United States Patent Application Publication US 2018/0305689 A1 - sequence listing, part 5

SEQ ID NO: 2877 - DNA, 4001 bp, Homo sapiens
ctgctggttccagttgatgtaatatgcaaatttgagaacttctgtctacattacttcaagggtgaatcaagcatcacaaatctgtccccaaaaatattaatctaagaaagaaaagcaggcagttaaaatacattttgaactaaacaataatagcacaatttatttatcacagaacatggtcagcaatacaatctccattaaatggcaaatcagtgtgaatgccccaggttctatttttcactctttctacatccatgtagctagatttgtgaaatcactgaagatagcagaaaaaaggtcatgagtggtagtaagtagcttgcacacacaccctcagcaatttatacactgagaaaagacctctgacgagcatcagaacacaaaggtggcaatgagctacaggtgcttcctctttctacccagttatagcgttgcctgtaatacctcttccttttagctacttctttacctcctaaagctgtctaattttcattttcagcagaattcacttgtaggaaatgtccttgggagggactagaaggaaacatagggttttttacttctcatataaccctaccagaaatgacagtgaaatatattgttataatagacaatctacacagcagtcgatcttcttcccggagtttcctcagaaggtgcttatactgaatttaagtagaggccattttttaaaaatagtagaaaaacaattgtaagttaccagtgtaattttattgcaaagttcatgtttggtgtaagtagaaacaaaacacaaaaagagaagggaatcggttatttagacatactctctgcagggcaaaaacaatcattacttcatcatatcacatttcaaccactatattttagttccaaagagatcgtaatgctttgaaaaatctaacgctcctcgcacctcatttctgtttttcatttaatcctaaatgtatatttaaaaatttttctctttacctgtgaatggtcttcagctcatttctaatacttccttttcattccacaaaaatatacctttgaaaaatataatgatgtagagattaacaagtatccaaacaagaaaacaaccatcagaaaaagagagggcatagtctcaatcaacactttgggataagatgtttctcgcccaggggttgttctcagcgtgggtgtggccgaactgcccgtggcccgagctaccgggcaggtggaagcgccaggtaaatgcaaggcgcaagctttcgcattgccatcactgcagagtgggagaggggagaggggtaaagatgaagacacgggggaacagggctgttaagtgttgctggtgtctgaagtctcaggtcggacttagggagaaagtgtaagtaactgagagggaatcgctgggcagaggaagggtggtgtgaataacagggaggaggaaggtggggagcgagaacacaatatccaggtcttaagagcgcacaggaagggaggttcaggcgctcagccattccgcccctccctgaccggagggcccaggccaccaccggctccagcaaagccctagccccgggcccatgcccaccttgccatcgcggggtcgcttcctgtagctactcccccatcctcaaaccctggcggcggaccccgcctggccgagcccaagcaccgcgtgcaggagagaagcacacgcactctccgacggcccagccgcggcgcacgggattggtgaggtgcagccacaccggcgactaccagcgcgcggccggtaccggtaggttcctcacgcgccggtctccacggcgagccggggcggggcctggcgcggagcattgtgggaaaggcgtggaggacgctgcctggggagacccgctgcgggcccagcgggcgctgcggcggtggggtggagagggcggtgtaggtttaggttgacgtggcggtgtgcgcgggatccggctccggctccggctccaacccggagctgagggaactgccctggccaagcagcccgcgccccctcaccaatgcggccggcgcctgccgcgggcggggagggtggatggcgaagcccgcctcttcctgcttccgttgccagggtgacggggaaacccagagggtgggttttggggttgagttccctgagagtcttttaaagggaagacggagctttggaggatttgtctgggtgatgggtgggtgagaccgaaaggcgaaatttggcggagaaaggagaagttgcctgaagcgacactgattgcagtatcaggctagcggactgaagaggcagtaggaaacttgaaggaaattaaaacatttacaattttgtgtaagcgtgtgtatcaacaagcatttgagacttctacaatattttctggattctgagtcatacaagctagaaactggggagttatcgttgttctctcttaccttgatctcctactgctatggtacaggaactgcattttgtcccacagcaatataacaattgaagtggttatatttactacattttctatatttaaaagagaaaaccgagcctagaggatacctgcttataacatcaaccctaacatgaaataagttgtgattggtaacagtttcggggagtaaatcaagtgtcagcttctaaaaacttggaaaactacacaggatctatggctaagctaatacttggtaggaaagaagaggaagtagaatgaacaaaggcaaacattagaagcagcctgatgtaatagtagttaatatgtctcaggaactggtctaagcacacatgtagtaactcatttagtcctccaaataatcttacaagatagtggctcctatatctatttcccatttgaggaaactgaggcaaatatttgagagctaggattcacatctaagcaacctggcttcagagactatgatgttaagcattatgacacagtgtgtaaccattttgttacacactgtaacaaaatcttaaagtaaattgaaaaacaaacagaaaactggaagatgaagcagggaccagatcacagacaggtttttataccaagatgaagacatagatttctatctcttaggtgatgaggaagcttttaaaaaagagactgagattgtattttagatcatcctggcagctattggagagaggatgcaaagcatacaaaactggagaaagaacaggagaatgttagacaaatagggtaaatgctttaagaggtggtgggccgggtgtggtggctcacgcttgtaatcgcagaactttgaggggctgaggcgggtggatcacttgaggtcaagaggtcgagaccagcctggccaacgtggtgaaatcccatctctactaaaaatacaaaaataagccgggcatggtggcacacccctataatcccagctactcgggagtcaagagaatcgcttgaacccgggagacagaggttgcagtgagccaagatcacaccactgcacaccagcctgggtacagagcaagactctgtcttgggggaaaaaaaaaagtaagagatggtgattggttggatatgggagataaaggaaagatttaagtttaacttctgacttcttatggctgaatactacccactgaatgaagatctgtttagggaaaagataaagggttctgacttggacatatctagttcaaggttcctagatcatatcttagtgaatataccctgcataaaactcatgggtaatgtctagattggagaaaaaataggagaaaaatcatcagatcacccaaagaaagtgtgcagaataagtaaagttgtggaccaaggattaaaaccttggggaattctaacatcaagaatgaaagcacacacggaaaaagaatctaagcttcatgaaggtggatttttgttcattttatttactgttatggctccagctgttcttactatatggtaggtactacataaatattttttgaatgaataaacattaatttgagaaataggctgaagaagaagaacccatacaggatgtaaaaaagagatgatcagagatgggcaaaaggaactaaa

SEQ ID NO: 2878 - DNA, 4001 bp, Homo sapiens
agtttaaacctaggaactttatttttgttgtaactgtaaattaaaattgtttttcaattacacattccaactgaatataatttggacacaataaagttattaatttgtgggtaataattttgctttattgaatttttataatgtttctaatagtttttcagttatttctctttgggtttccaggtaaacaatcgtattattagcaaataatgttaattttaccttctcttttctaatatttttatattctcttactcttgtctaattgcactggctaataaaactagaaaaatgttaagtagatgtggtgacactgggcattctgagctgcttctaatgttgtatcattaggcacagtaaaattacttttttttttttttttttttttgagacggcgtctcactctgccgcccaggctggagtgcaatggcgtgatctcggctcactgcagcctctgcctccccggcttaagcgattctcccgcctcggcctcccaagtagctgggattaaaggcgtgcaccaccatgcctggctaattttgcatttttagtagagacaggatttcactatgctggtcttgaactcctgacctcaagtgatccgcccgcctcgtcctcccaaagtgctgatgtattacaggcctgagctagcgtgcccagtccctagaaaaaaaaaaacacctcgtacacagctgacgttcaaaaaaatgttgactttcagtgaatactatgctagcacatacacacaaaagtagtacgggatcatgctacacagaaataaaaaacactaagtaaacatttactgagcatctcctgggtgccaggcactggactaggcactgccttaacagctctttcggagttgattttgaacgcatacaacgacggaaagagcaccgcagtgggaatgtgaagacttaggttctaatctttcctcggtcactgatttgatgaccttgggaagttcttaaccaacagattccacttgcccaaaaggaaagaatttgagtgaagaggaggccgtcttggaattcataagggaaaaggcctcaggttacctctggccttccctccccacgtactaaaggagagtttatagctgatgaaccacagatggggcagagagaagggcggtggaactaacagatatggggacaccaccaaaaataaaacacaacgcaaaacaaaacagcgcggaccccggccatcccttgcacctcccctgtgaaacacgtcaacgtcagttacgctctctcgtgacgggaatgcagaatctgggctgccgggcaccatttcgcgaaccccaaattctcacacgcaccccataacgttccgccggctcccaggcccggctgggggaactaaactttcatcctccatctcccggtcccggacggccccctagaacgcgggcaaggtatctaggccgacggcccctcatggggacccaggccttcttactcttttgggggtacattcaaggcttagaggccaccccagacaccatctccggaagagtgacgtcggaggacgagggggcaacggaaaggtcaaaaaggtcggggagtttcgttcgcggagccgcacccctcggctgagacccgggcctgctcgggggcggagaggaggccgggccccaggctgttgagtggccgcccttccagccaatggacacgtcgccccgccacgctggggcccgcccctcccggctcgctgtactcactttccccacttcggcgttgcccatggagatgactttgatgcggagagacctgccgggctccttccgcttcggcatgttggcctccatggccctggctctctcggggccacccgcctcggtctcttcttgtgcaccgctggcccgtccctcaggcctcctcgtccaatggcggagccgctgctctcgtcaccgcctcgcctccgctgctcgccatccccgccgctgcctggcagcaggcgcgggcggttgggagcgtggggagccgggggagggagacgggagtctcgcgatgctagcgcggggctgctgacgtcatctgcaggccctggagacgcgactgcagttaccgagtttctaaggcctcgtcccctgacgggaaggcggcgttggggggcggctgggtttacccttcgaggtgagcgcgtccttgttttcagggacgcccggacgggaggcgtttgttgctttcgcagccgagtggtggaaatgtattggctcttcagggcgggtctggtagtgtctcgtccgtttgggagtgtttttttttttttctggattctttttcggttccatgggccgggctgctgctcctcttccccctccaatattttgttccccttgctcgagatccccgagaggcagaccccaaagccaggaaagtggggaggtcggaaccctggttctggaagagggccttgggcaaggcgtgaagcgattctgaatctggttcctattgttttttattttaaatggagttgtctatttggagtcaaggcaagagtgtttagtcttggccctcctattacagatctctgatggatttgttgactcctctgtgggagaaaggcttggtctactgcaggtgttaacgctaagccaggctggagctgtggacgtcagtttcctcagctccccgctgttcgcttcgaacgtgacctcgacgtctgctctccccttccctttagctgacaatgtgacagtgcttgaataaaagtcagtctgacaggaacggtaattttttttcagtgaatatcttcagttacagaagataaatagaacttgacaatgattatttatagtgccctgaaaaaaaatggctgccaatttccctgtatattacaaagacaaaagtagcattgcttcttttctcacctaactttaaacatcttaagggaagtgcattacaggaaggcaatgagcaaaggctcaacatttcacagtaaagtcagattttccacattttaattttaaaatgtgttttttaaacattaagttttttttaagacaagtttattctggattgttttgataatcaaataatataacttaattcactgaagcttctaaaattatttacaaatatgaaatataagtcctggttagaatttggatagttttaaagcttaaaagaatccacatgctaacttctcagtatgatttaataaatcaaattactaaacatgtaatttcttcgacagttcacctttggccctgtaatagggtaactggtattgtggaagaataattataaaatgtcaaatcttcagctgttatgattgattaagtatggtgctgttgagactaagcagtaaaacatgccacagatttaaattgattactatttttttcatattgatggggttttttttgtttttgtttttgtttttgagacagagtttccctcttgttgcccaggctagagtgcagtggcacaatctctgctcactgcaacccctgtgtcccgggttcaagcaattcacctgcctcagccacccgagtagctgggattacaggcacccaccggtatacgcagataatttttgtatttttagtagagacggggtttcaccatattggccaggctggtctcgaactcctgacctcaggtgaccctcctgcctttgcctcccaaagtgttgggattacaggcatgagccacagcgtccggcccatattgatgcttttgacactttattgtatatagctacattttctactgtgtgtattaaattagtttggaatcgaaagagcaagaaagttgttttttttcccccactctttgaatataaaaaaataaaaatcagcacgagttagctgctttttccatagtatggacctgggaggtatagtgtgagcatggattctggagccagcccgatacacttaatcttggcatatgttgtaggcatgaggtggtgataaggattgtaggagataatgcacaggaagtacgtagtagtctcccagcaaacagcagccacatgctctcatttgctca

SEQ ID NO: 2879 - DNA, 4001 bp, Homo sapiens
gcatagtggcaggcacctgtaatcccagctactcgggaggctgaggcaggagaatcacttcaacccggaaggtggaggttgcagtgagccgagactgcaccactgcactacagcttgggcaacagagcgagactgtctcaaaacaaacaaacaaacaaacaaacaaacaaacgggtcgtaggccaggcacagtggttcacacctgtaatcccagcactttgggaggccgaggcaggtagatcacctgaggtcaggagtttgagaccagcctggccaacatggcgaaaccctgtctctactaaaaatacaaaaattagccaggcgtggtggtgcacgcctgtagtcccagcttctcaggaggctgaggtgagagaattgcttgaacctgggaggcagaggttgcagtaagccaagatcgtgccactgcactctcaatagtctctgtctctgctctgtgacaggacgagacttcctctcaaaaaaaaaaaaaaaaaaaaagagtcagatagcaaaagagatacagaaagaaaaaggtttaagggggaaattccaaggatcaataaagggctgaggtctgaacctgtaggattttttgaagtcttcaggtgaggcgcccttcttaagatccagcactgcatagaggctcatctcacttttggacagccggtgtgctgcttccttcacagtagacatgatctgagccagaggagaagcagcatctgtgagaacttctacaagtaagggtaccgagaagtgcacttccagtgacaggaaactcactaccttcagggattaggcaggtaaacgatgacagaaggacaaggataagataagagtgagtgggatttgtggctagcaggagaattcaggtgatcagaaagattccaattttaaggaggaaacatcttctcctcacatttcccagcatcctccagctacacagacctctagatatcccacatcctagaggtgttgtaagcagggagaggtctaagccaggaaaagagcctgattttgtctagagctcctattacctggagtaaacacctctgggtctgtccaagctcactgctgggtttgaaagaccagggcggccccagcctgaacggacaggatcaggaatcagacagctccacaacttcttcttcttttttttttttttgacggagttttttgctcttgttgcccaggctgaagtgtaatggcgcgatctcggctcactgcaacctccacctcctgggtgcaagcgattttcctgcctcagcctcccgagtagctgagattacaggtgcacgccaccacgcccggctaattttctgtgtttttagtagagacagagtttcaccatgttggtcaggctgttcttgaactcctgacctcaggtgatccacccacctcggcctcccaaagtcctgagattacaggcgtgagccattgagcctcgccgatccacagctattaagagagaaacacttcagaccaaaccgtgtgaggcctaacagaagtcaagtgtcctagagcctggcgggggcgggggcgggggcgggggcgggggtggggagtgcttgcagctaggcctggacttgcttcttccctccagtctcctgctctcaaaccaccccacttctgtccctcagaggtgggacagtggggagaggaggaagaggactcagaggctggagaaggaagagaaaaggcgttgctgtgggaaagacctggcaaggaaaaggcagcggaaccccagagagcagggtagacgcctgcggcccaggagaaccgagcaaggcaaggagctcaaagggagagctctgagtgtgcagggcacctctggccctgtgccgactcctcacctgggtctggccctttacctgggagtcgttctcttaagccaggtgggtgcccttcatccttttgggtgtgaaacttcacaccggccgggtccagcagttgactgcgcttgtgcgcagcgtcgacgctgagggtctgggcaggtcgttttttggcgcccccggaagcactgggtggggaggccacattggccctgggacttatttcgcgcgcagggaagcgagagcggagggcttagcaggcctgcggcccaaggcagcgtaggagcgttgctgccaggccttggggcagggattcccaccgagcccctcttccccagcaggagggcaccacccatcttgatggcccaactcactccaggaaacacaatgggtttgctgaccgtggcggatgagaggtatggctgctgcatgcccttcttaagaggtgtgttaccttcccagttgtcttcaggacttagggctctccgcttggtccctccttctcttccacccggaaacacctccacaacctggaagacccaactcatatgcccctgttcctgacactccatcattcactctcccagttgttcccacttcgtctgtcaaagcatttctcctagtatatcgtaatgatgagtttgcacgtctcattaaaatgatgtattgagccttttccaaaagtcactaccgtgcttcaaaaacgtcacttaaatatgatgccatcatgagcatgtcccataatgtaacccaacttggctgtttcagttgtttctatttgataatataataaccttataaggaaaattcaacagaaatccttgaacaaatgtctaattttttttcctaaggatacattcttagaagtggaattattgggtcgaaatgattttttttttcttttttcttttcttttttttttacgctcttgatctctattgctaactttcttctggaaaggtagcagaaggaggatttgtatccccacctgctggcatgggagcatgcctctacctggcttcccttcctgtgagtttctacaggaggtagtgtttgcatcacttataatttactactttgtagtgctggttttctttgcaagagcactcaatggctcctgtaacatgtagtagaaaaagctttgttacttggaaaatgcttatctgttaacctttttgtagcttttatcactctcttccttttattacagttatttgtgcacattttcctcaccttgtaggttttttttgtttgttttgttgtgttttgaggtggagtctcactctgtcacacaggctggagtgcagtggcacaatgtctgctcactggaacctctgccttccgggttcaagtgattctcctgcttcagccttccaagtagctgggattacaggtgcctgccaccacgcctggctaattttttttgtatttttagtagagacggggtttcaccatgttggccaggctggtttcgaactcctgacctcagtgatctacccgcctcagcctccaaaagtgctgggattacaggcgtgagccattgcgccagcccccttgaaggcgtgagccattgtgccagcctccttgaagccattgcgccaacccccattgcgccagctccttcgaaggtcactcaccaaaaaagaagctgaagctgataatgttttttggtggtttgtctcatgccaaatttctttaacccccaagctttcatgactcatgggaggacagaactagcagaacaaaccagctcatttcttccccagcactgggtagagagagcagaaggcattagaggtgcacttgtaaatcagtattccacctcaagaaccatctaagcaaacgaactaaggagtccatctgtagcagacgtgatgactgctgaattaatgaatttatttctgtaggcctgtggtcagtgcagggagaggggatgaagacctttgcattacccacctggtccatagtctctgggtcagatgagtttagaggtcactcacttaaaaagaagctgaagctgataatttttttatggtggtttgtctcatgccagatttctttaacccccaagctttcatgactatcatgggaggacagaactagcagaacaaaccagctcatttcttccccagcactgggtagagagagcagaaggcattagaggttcactta

SEQ ID NO: 2880 - DNA, 4001 bp, Homo sapiens
gacaattcatttcttcaggaaaagtcatataaatcatcaatccacagggaaaattagcgtgagtgcattccttggtttttgatttgcagttattttgacttttgcaaaagcaagattttgttctaatggttagaatggctccaacaggcatttcccccaagaagctatcatgtcccaaatctactcctgaggctcacatcacacaaattcttcctcctcctcatcacctcccttcaagtaactaaagcttattgtaaccagtaaacaaagaggaagagcacagtgttgaaaagatagattcagtttgctaatttgctattaaatgaaataaaaagattctagataaatgcaaaaaaatctggctgtcaaggtcaagtttctcaatcccatttacctctaaaaaatgtaaaacctgtcataatgaaagggcagcctttttccccattgaaagaacctatttgagcattctcaaagtaactctccaatcattgttatcaaatttatatgaaacaaactcctccaccctaaatgtaaggaagatagtatctgatcccaaatatcgtccatattcatgtggtttaatgtaatcatttcagataacttcattatttgccctaccctgcaatacaggtttggggattttctacccgtacacacagtcctaccaaattgcctactggaaatgttgatgttaataggtttcacagagctttaacggacttgtaaaagccccagatattattttctgccaaattctcctgaaaaccccaaattcacgggcggctgctggctacatcccatcgtcccatccctcgcaccgcccccacgctttctggcggcttcccggtgccctgctcacgccccggctgccagccccaagcgtgcgccccgtggagcgtccggcaggaagggcggccctgccagcgccacgtacaatgccccctcgaatgcctccgactgttccaacactgctcctaagcttagagagggctggtcgcaggccgaggggaggcagctgccctcctcgtcctctggctgctttgtcacagccctcaagggcgtaggaagagaaggagaaagtgccccaccacctggcacggggcccaccatcacctgcctcccacaccgcacaccctttacacacacagggtccagccggacgtggagcgtggaccacctggacattgaacacctcgccggggacgctcggagccggctcctccgcgctgccaaggcgggcaccgctcaagtggttcttggctcggcccggcctggaggggcgcgccactcagtggccaaccggagcgtctagagccccgcgcgagaagtgccgagccccggagcggcacaccccgagagcccggctggccccgcccgggaaccagggcgggtaagggaatcagggtcggcccgggggtccgcgtccacgcgggccaagagactggatccatcttcttcccaaagtgggaaagcctgtgtcaggcgtgcccattgtcgggcagcagcagcagggccggcgggaagaggctgctggtcccggaccagcgccccgcaccgcgcccgccgcttccactcacctggcagttggcgccggagatcccggcggggcaggtgcagctgtagccaggctcgccggcgggggccgggtgctgcgggtccggctcagggcgcgaggtgcacacacccccattccggcagggctgcgcggcgcacggcccgggcgcagacaggggcgcggcgggcaccgggttggccagggagctgcctcggggccccgctccgagcagcagcagcagcagggccagcgcgggcagcagctgcgcaccgggcgcctgggcgcggcggggctgcatggccggccgggagggcgcgggagccggagccaggacgcagtgacggcggcggcggtggcagtggcgacgagagctgcgagagcgacggtggcggctagggctgctccgccgggccgggcgcctcctgcagctgcgggatccgcggttccccgggcaacggcgggcggggcctgcggggcggggcggggcggggcgagcggggggcggggcgcctggcggccccggctctggagcatcggggagtggggcctctttccccgcagggagttgggatgggggttgcaggaagacgatgcgggaccccatcccccaggagtgggtcgaagtcacgggtgtgtccagaagcagccctggtacagggagccaggcgacgctggggcaggaaaggggctggagaggtccacgagtgagggaagcggggctttgaggggcttccagagccgggagcaccgagtgcgccccaaggcccgggcagggcagggcgcgggaggcggcagggcgcctcaagggaggggcggcgcgctcgcagcagccacctttggcctcttggcgcagaatctgcgagaccgccgcggggcccggccttgcctcatcccccgggactgctccccttcccacagcgcttctcccggcaccccaagccctcccgcccggccacggaaccctgcgcccgacgcttgctcagcagccgggttcgcctggaagtgacctcgcctccgccaggcggacccggggcccttgtccttggtgctgacccagctgtctcattctcgccggccctttccagagcgcggggccttgccgcaccactaaggaacgtctggccgcgccgtgtgaggccgggaagaggccttggtgtaaggctgtccacccctgtcgttgaacctagggggaaactgaggcccagaaagtctggattcgaatccagtgggtcaattgactcccagcccagaacgcccgaaagaacagttcaaaagcccaggttggcagaggcgctgctagcggcaggaatcgcaacaggggactctgcataaaaggagcattcgctgtgacctacttcggaggggatggggggggcgggctcttctacacgtcctggctgggctggctggtgctgcgaccgccaaggaggctgcactccgctgaataaagcgcatccagccttgtctcctccacctgacctttcacaatctctattacctgtgggttcccaggtacctgttaccttctttttaaggtggccaaatgaaaaaagaaaatgtgattcccctggattgacagtctgggccaattttttttttagtaaacacaaaaatagcttgttttgttttttaaaaaaattaaagtaaggactccatgtgaacttctgctgtaggtgtcacagacgccagggattgctaaaagtcctccagtggaaacagaaggcaaactgcacggcttctccctgtcctgttcaaacgcagaagcaaatgtcacacttttctgcttcaggagatacctaaaattcatgtggccattgcaggaaatcactgaaccccagacagatctgcaagcggagaattcagacctccaagtggatagagttattacatttttcctcacacctgctgtctttcaatctaagacctcttcctcttgaaaattcttaattttgtgccacgccagcaccctctgctggtactagtgtcgtcattcaggtggtttctgtgcccctggagttgcgttctttcctgaaactaacttctcttaccttaaatcctggactagtggatagtgctcttcattgccttccatcaagacacacacacaaatgaagcaagatgaagtgtaaaaaggttgtgagttaattaaaatcacatttcagtttattgtacttttgcctgagcaacccctttgtttgtgtatttcatattattttgaaatataggataattaaaagtggttttattttctggatgctggttactgcatgtttcagataattttccttgctaaaagtattctcttagtctttaatctttaaaatgcatattatggcagagacaatacaagatcctttcattttttccaggctaaaaaggaaaactataatcttccagcaccttagcttataggcagagcaacatgattaatgctggggaaaaagca

SEQ ID NO: 2881 - DNA, 4001 bp, Homo sapiens
ggatcccttcgtagccgcccgcccaggaggcgggttcagccgctggcagcctagggtgaaacatgaagactgagcaggccctcagggatgctgatggcagtctctgggcacggcagtgaggggcaagttgggtcacagggcggacagcgcttctccccaaggcttctgtccccgctggtttggagggggggtagctgcgcggccctggggctcggccctgcccaccctcccgcctgccgcaggccagagctgccctgctgggtgccagacgccatgttgggtcaaggtgcagccgcagggggctcccctcaggagccgggggaggcagcccctgggaaccagagggcactgctccccgcccagggcgccaacacctcctcaactggccgtgcagcggagagagggtgccaggacggaggggatgaggagagggggagaaatggcagaggggcgctggggtgggagagggtgcccccaagaagggaggcttcaggaaagcgaaaagcagtttggcagccccagggccgcgggccccagcgatgaggggctgggggaggccaggggcgggccctggacccgcgccagcccggtccgcgccgaaggggagggaaggcagggcggcctgggggaggggaactggggtgagggcgggacacggacagccgccgcctgcggctccgaagctcgaggtctcccggggtgcggggacgtggggccgaagaccccgctccgcagccgcggcgaggcctcgtccttcactgtgcagatgcgaagctttcaaggacacgtctgcaccggcccggcggggtgcgtgtgcgtgagtgtgtccgcgtgcgtgggagtgtgcgcgggggtgctggaggggcgaccccgggcgtaccccccctgcgccgctcccggtcccggccccgctacttccacccccgcgttttccggcccccgcggcccgggcccgggcccgggatcctcgcccgcccccgccccgcccccacattgcggcgccgccaccgcggccgcccgggcacccacggcccgcggtggggacagggaggagccgggcacgaccacccctctccgtgccgccggcactccgggggaaggtgtgcccccaaggcgggcgctctccccggccccgccgcccctcccggccccgccggcgccccgcacccccagccacaggtggccggaggaggatcgcggcgcggcgctccccggcccggccccgccatcacccctcggcccgcccccgggggcctcccgggtcccccgccccgcggggccgaggagggccgggcgccggggggaggggcggggggccgggtcgtgccaggctgccattttctgccgccgccgcggagcctgcgcggggcccggcccccgccccctcccccgctcccccgggccgccgcgggggccgatccttctgggtcggggtccgcgccctccggcgccctggccgcgggctccaggcggggccgcggggctggggcagagcccggaaggcgggggcggcccggccggggcccctgcggcagcggcgagccgggcaccgcggcgcaggccggcggtggaggggccccccgcggcattgtatagacttgaacttgagcccggagccgggcgggggcggggaggggggtccgcgccgggagcgggcgggacgggagggggcgcctgccgagcccgcggggacataaacaaaccctcaaatcccccgcgccgccccggccagcccggcccgccgtccccgcctgcagtcccggccccacgggcgcccggcgccgagttgcaggggtccgggagcgtgccccgagccgggcactgccagccgcggcgccccccgcccggctccccggctccccgccgcctccgggccggccttccgggccgccagcagcggcgctcattaccgtatggccggtggggtcgggccggcccggctgcgcgccctggtgccgcggcgccgcgtcccggctcgtcctctgctctcgccgccgccgccgcccgcgcgccctccctccctcccggcccgcctgcctgcctcgctcgctcgctccctccctccgctcgctgtcgcgctccctctctccgcctcctccgccgggtccccccctcccaccccttctctccgccttcctccttccctccctccggccgcccgcgggcccaggcctccgcccgccgctcgccccccgcggccgcgctggccccggccccggcgctgcggagccggcccgggaggcagcgccgactggggggccccggggcgccgcggcgggagcggcctgggcgcgcggccggtcctagcgccctcggcgcgacttcccggcctctgcggccccgccggggtccccgcacgccgcttggcggaggtctggaccccgcaccgcccagaccgggggccgggccccgggcgccccgcctcggccgcgctcccggccactcagagcccctcgagtcgtagccgagctccgggcctcgccgcagccctccccacgctgggcgccccgctacctggcgctgcttctgcgctgggtccccgcatccagcactggccgcagggacagcggcccctcctctccccgggccggtgtcaagtgcctccccccgcagcccgcggagcccccggcggccttcgccctgcagttctcccgacctccgccagagcccactgcgctctgcctgcctcagcactggggctggggacagcagcgctggcccaaccgcgccgcaacccccagccaggtgccgccgcggagtagaggccactctgctctacagggccaaggtcggagcgccaggctcctcctggccgtcccgcaggctccaaagcctctctgagatgagctgccttgaagggagtgagttccccgtaccttgaggtgtccaagtagagttgggtgtcctcagttgggcactggaagactgaaagatttcatgaggtgggaggttgaatgaaatgacattgaaggtctcttccagctggaagattctgtgtgtgcctacacaccgccctcaccccttcaccgtgggggctgttctccttccccatggagcgctcagggctctaggttcctgacttggggcacctctgtctaattccaccagcacagccactcactatgtgctcatctcactcctccagcagccgctgtaggacttggggctgggcacccccccacccccgcctccagcctccttgcgcgccccagcaccccaccagccacccgcagctctgcaccccgaattctactcagcacttcagctatatcacagtgccctgagctccctgactggcacaggacatggcgtgctcccttcccagggacccgccatcctacttgtgggcagggattgctggagttggtggtgggactcacttcacagtgaagcggatcctacttttcccttctccccatgcagcccagcacccgcccccccaacgccacccttttagcgtcacagaaccgagttgccaagttctctgggaccgggagctgacctttcatacagacgggaaggttttccttcgggaggttctccaatgcttccaggtccctccgtctccccaacccccaccctgagcctcgatatctgagaccagcttctaggccatagttctggccgttttcagtgtcaccctcactcaagtggccaccccgccctactgatgataggccctgctgtccatggtccccaccggcccagagactcccagtgctctgtgaggacaggggccgcgtctgtcatccctgtagcccagcacttggtgctaggagattctcagtaaaccttggtggaattaacatgtgaccctcctgggctgttcgctttctacatcaggaggggcatccgtgaacactctaaatggcgcacccagcttggcaaaggagaagaccgtttatagaaggatgactgagatacctctgccttcatcaagggcttacatataacacggccccaaacagcagcgactgtttactgagtgtctactatgtgcc

SEQ ID NO: 2882 - DNA, 4001 bp, Homo sapiens
cgattccgaaaaacactgaagatgttaagtcctagttcttcctctgactcaacaaattctaaaacaggataatgcatcctttgcccccaacccccaaacagctgggaaaatgagctcatggatggcggaatgagctcacggatcggactgcgggggtggaagaatgtggagtaattgctcatcgctccctagccccactctcacctggccagaactctgccctccccttcctactatcaattagccatcgcctcctcccctacgagaaggtgcactgaagtgtggaccccgctatgggggagggtgcctcccttgctgggatcctcagctgcgtcagctaccctcgcagaggagcccacaccacgccgctgctcctcgcccaccacgccttctcaagcttcaggcatgggtggctgacctagggtgatgcctcggatgatccaaagaccccgtttccaggcgtggcgaggcccctgagccagtacgaggtgtgcaggtagcagtgggcgggaaggggaaaggacccgctatcagttcctggcagcggcagcagcaggtgggctgggctcctcctctggctccccaggtctaggagtcgtgcctgacaccaccctcagcactcccccacggcccctttgtctctcagccccttcacagcgagttcctgaacattcttcttcccccacaacttcccccagcttgtcagatgccgcgctgcgagctgttcagcatccccagcccacttggtgcagaacacgcacccggcccggtaagggctggcggaggaggaaggggcctccatcaggactggggcagtggggtgggggaaggaagaagcgggggggggggtgggtgagcagcagggggcctgacgaaaggggaaggggcagccggagctgggtgggggaggggcctcactagactaggcctgtctggggcgtagggaaagcacccctttccctctgcactcctgccttcctccccaggcaaacaataagagaaacaggggtgaactcgaggctctcgcatttgggctgcgggctgctcacccccaggggggcggagaaaccaggcggcattcaagagacaccacactattccccactccctgctggctcacggaagcccctgggcctggagtccgtccagactgggaaagccaccgggaactccggtgactactgcctccggtccagtcccatctcctcaggcagttgtcccgcctccacctccccctgcgactgcagcgcttcccattccaaaggtcagaggtctgagcgccaccgcccccaagcccatgcggccttgggctaccctggtgtcacaggccggccccctgtcagggtcgcaccgtgctctcccgccccccaccacttctttctggcggcctgcctggaggcttccaggaactcgcaggagaggaagctgtccctcttaagaggccgcaagctggcagggccctgaggaccgcgtggtcccccagccagaaacgcaggtcaccagggaagtgccaggcacccatctgccagctcagctgaagctgcctccaacccaactcctgggccaccagctccgcgtgccccagcctgcagttaccactgcccgggctcccggccggctgctcttcctgtcccccgagggcgccaggtgccactggagccctcgaggagtggggccttggggctcgtgggcaggaaggcggcgggccagcactaagtcagcatctccagaactcgggccaggccgggacgccgcggctgctgcgggccggggaggcatacttcactcttttcaaacccggagggctgcggagatcctcccaccggccctgccgcctccccgcccccggtctccccggggctccgtccaggaacctacccataaggccaggtgcagcccctctgcagtcgcgctcaggtgtgagccgcggccctgaagctctggaagtagctgcccgtcttgggggaggggaagggggcgatggggctgggggcggagggggccactgggaggggaggggggcggcgggggggagggagggaacattttctttgtctaggactccaggtcacgtgggccccgctggagggcctggttggctgcgagcggcccggggagggggccggcgctccgacgctggcgctgggccagcccctcttctccggtccgaggggcgcggggccggggggcgaggccgttccccgcccgttcccagggcccgcccaggccgggctgcagggagcgccccgccttcgggaagaccgcctggcccctcccccagctctggaagagattagcgcggggccggggggccgggaggggagggaaggggctgctcccgagccgcctgcccggagggagccgggggtccgggcgaaagcaagccggagctttcggacggcctgggagagccgggagaaagttgtgaaaagtgagtttctctgaagcacaaccaaaaaaaaaaaaagaaaaagcttacagataggaggcccaggaagctgtaggaaaactcagcacacagacggagagtgacagcaggcgcgcgcaggcattgggagcgctccagatcggggattgtttggggggtctcccgcctccacactacaggtgaatagagaagcgggggggcctcaaaaagcgcggcgtgaggaggtcaggcttcgagtcccagggcccctgcgtcactctgggccttccctggatttctcattttcctgtttgcaaggttggtcgcggcgagggcgctccttcagaaagttcagcaattccttcattcccaggctcaaacatctgcagatcgagaagacctgactcctctcctggggcctccaggtgcggcctccaggtgcagcctccgccatttcaagcttcctcctcctgaacaaaggcacctacccccaaggcagacgcagtccccacccacagccctccattacgttggctgtaggatcagataaagaaatagaccctgttggctctgccctcgaggggttgaagattccactagacttggagaaatatgaaaggatcactgtaaaacaaacatatgtaaaggtaactatgccacaaataccaagtagaaaaaaatgggcggcatggatgacaaaagaggtcagaggtcagttccaggtgagccgactgggcctggaggctggatcggacttggaatgaggtgagatgggtaggatgagcaagagctgccgggctggggagggaggagaccctcgcccacctccaccctcccagtacacgacagggcaaggtaatggcaagccttcaggtgcgtccttgggtatattctgtagcagggaagaataaccgcaggttttctgacaagatgaatgagtattttggaaaaatcagcctagttgccgttggcaagatgaattagaaggaagaactgaggaaatggaggaaaatgcaccccacagcagagggctatttgggcagcggcacttgttagaagatctggacttggccgagcgcggtggctcacgcctataatcccagcactttggaaggctgaggcaggcggatcatgaggtcaggagtttgagaccggcctgactaacatggtgaaaccttgtctctactaaaaatacaaaaattagccaggcgtggtggcgtgcgccagtaatcccagctacttgggaggctgaggcaagagaatcgcttcaacttaggaggcggatgttgcagtgagccgagatcatgccactgcactccagcctgggcaacagagcgagactccgtctcaaaaaaaaaaaaaaaaaagatctggacttcagttctgtttccaccaccatgaccttaaacaagtcacttaacccccaagaaatctgttgtctcatctgcaaaacgagtgatgacatcagccctctttggccatggaacgccaccatctcctaatgacaatgagacaattctctaggtgcctggctcccagccacagtcacctgggacatacaggtgctggtataatgaagtcacgagatgtgcag

SEQ ID NO: 2883 - DNA, 4001 bp, Homo sapiens
ctccgaagctcgaggtctcccggggtgcggggacgtggggccgaagaccccgctccgcagccgcggcgaggcctcgtccttcactgtgcagatgcgaagctttcaaggacacgtctgcaccggcccggcggggtgcgtgtgcgtgagtgtgtccgcgtgcgtgggagtgtgcgcgggggtgctggaggggcgaccccgggcgtaccccccctgcgccgctcccggtcccggccccgctacttccacccccgcgttttccggcccccgcggcccgggcccgggcccgggatcctcgcccgcccccgccccgcccccacattgcggcgccgccaccgcggccgcccgggcacccacggcccgcggtggggacagggaggagccgggcacgaccacccctctccgtgccgccggcactccgggggaaggtgtgcccccaaggcgggcgctctccccggccccgccgcccctcccggccccgccggcgccccgcacccccagccacaggtggccggaggaggatcgcggcgcggcgctccccggcccggccccgccatcacccctcggcccgcccccgggggcctcccgggtcccccgccccgcggggccgaggagggccgggcgccggggggaggggcggggggccgggtcgtgccaggctgccattttctgccgccgccgcggagcctgcgcggggcccggcccccgccccctcccccgctcccccgggccgccgcgggggccgatccttctgggtcggggtccgcgccctccggcgccctggccgcgggctccaggcggggccgcggggctggggcagagcccggaaggcgggggcggcccggccggggcccctgcggcagcggcgagccgggcaccgcggcgcaggccggcggtggaggggccccccgcggcattgtatagacttgaacttgagcccggagccgggcgggggcggggaggggggtccgcgccgggagcgggcgggacgggagggggcgcctgccgagcccgcggggacataaacaaaccctcaaatcccccgcgccgccccggccagcccggcccgccgtccccgcctgcagtcccggccccacgggcgcccggcgccgagttgcaggggtccgggagcgtgccccgagccgggcactgccagccgcggcgccccccgcccggctccccggctccccgccgcctccgggccggccttccgggccgccagcagcggcgctcattaccgtatggccggtggggtcgggccggcccggctgcgcgccctggtgccgcggcgccgcgtcccggctcgtcctctgctctcgccgccgccgccgcccgcgcgccctccctccctcccggcccgcctgcctgcctcgctcgctcgctccctccctccgctcgctgtcgcgctccctctctccgcctcctccgccgggtccccccctcccaccccttctctccgccttcctccttccctccctccggccgcccgcgggcccaggcctccgcccgccgctcgccccccgcggccgcgctggccccggccccggcgctgcggagccggcccgggaggcagcgccgactggggggccccggggcgccgcggcgggagcggcctgggcgcgcggccggtcctagcgccctcggcgcgacttcccggcctctgcggccccgccggggtccccgcacgccgcttggcggaggtctggaccccgcaccgcccagaccgggggccgggccccgggcgccccgcctcggccgcgctcccggccactcagagcccctcgagtcgtagccgagctccgggcctcgccgcagccctccccacgctgggcgccccgctacctggcgctgcttctgcgctgggtccccgcatccagcactggccgcagggacagcggcccctcctctccccgggccggtgtcaagtgcctccccccgcagcccgcggagcccccggcggccttcgccctgcagttctcccgacctccgccagagcccactgcgctctgcctgcctcagcactggggctggggacagcagcgctggcccaaccgcgccgcaacccccagccaggtgccgccgcggagtagaggccactctgctctacagggccaaggtcggagcgccaggctcctcctggccgtcccgcaggctccaaagcctctctgagatgagctgccttgaagggagtgagttccccgtaccttgaggtgtccaagtagagttgggtgtcctcagttgggcactggaagactgaaagatttcatgaggtgggaggttgaatgaaatgacattgaaggtctcttccagctggaagattctgtgtgtgcctacacaccgccctcaccccttcaccgtgggggctgttctccttccccatggagcgctcagggctctaggttcctgacttggggcacctctgtctaattccaccagcacagccactcactatgtgctcatctcactcctccagcagccgctgtaggacttggggctgggcacccccccacccccgcctccagcctccttgcgcgccccagcaccccaccagccacccgcagctctgcaccccgaattctactcagcacttcagctatatcacagtgccctgagctccctgactggcacaggacatggcgtgctcccttcccagggacccgccatcctacttgtgggcagggattgctggagttggtggtgggactcacttcacagtgaagcggatcctacttttcccttctccccatgcagcccagcacccgcccccccaacgccacccttttagcgtcacagaaccgagttgccaagttctctgggaccgggagctgacctttcatacagacgggaaggttttccttcgggaggttctccaatgcttccaggtccctccgtctccccaacccccaccctgagcctcgatatctgagaccagcttctaggccatagttctggccgttttcagtgtcaccctcactcaagtggccaccccgccctactgatgataggccctgctgtccatggtccccaccggcccagagactcccagtgctctgtgaggacaggggccgcgtctgtcatccctgtagcccagcacttggtgctaggagattctcagtaaaccttggtggaattaacatgtgaccctcctgggctgttcgctttctacatcaggaggggcatccgtgaacactctaaatggcgcacccagcttggcaaaggagaagaccgtttatagaaggatgactgagatacctctgccttcatcaagggcttacatataacacggccccaaacagcagcgactgtttactgagtgtctactatgtgccaggcaccagacatggtattttctctagtcttcactagccctgtgatatggcttgtactctcctcacgctacagatgaagaaactgaggctcagtcttagtcaaagccatacagttgggaagtggcagagtcaggattcaaagccaggttcatccggctctgaaatcaccccacatcacatcttttttttttttcttttattgagacacagtctcgctctgttgcccagactggagtgcagtggagtgatcatggctcactgtagcctcgacattctgggctcaaccaatcctcctgcctcagccttctgagtatctgggactatagatgcacaccaccatgcctggctaatttattattattatttgtagagataggggcctctctatgttgatcaggctggtcttgaactcctgggctcaggtgatgctcctatctcaggctcccaaggtgttgggatgacaggcatgagccatcgtgcccagcccacaccacacttttgaaacatagttgctcttaagaagctgaaattcagtgggtgcagtggctcacgcctgtaaccccagcactttgggaggccgaggcgggaggatcacttgaggtcaggagttcaagaccagcctggctaacatggtgaaaccccgtctctacttaaaatacaaaattagctgggtgt

SEQ ID NO: 2884 - DNA, 4001 bp, Homo sapiens
gccaccgcagccctgccccagtctcacagatgcatctctgtgttgggcccaaagttctcgttgatatttcgctgcagatggatggccaggtgtgggatgcgaagaatgggccgctccacgtgcaccagctgctgctccagccgacctgaggtagggcactgcagccagccaggccaggtcagcccagggtgcctcctaccccagtggtcagtctttacttcactcagactaagcagggtggtcctctgaccagactgcccccacccctcttccccacgggtaccctgaggagtgtggcagtcagtcttctgaggaggctccgccatccccaacctcggttcccaccttgacaatgacgcgtccagccagagtcaggtcacggtcaaaccaggtgctccagatcccaccaccataggtctccacaccgacttgctggaagcccacctggctgcggcgagaccgacgtttcacctgagtgtaaagatggagaagtcagagaaggcttcatgacgatatgtggagatgagactttggctactcataagtaacagacagcgaatattagtgtcacatgaaaggctcaaggtgtgaaggaaggggccaacaagtttaccttctcccttactccaggggatagaggccccagtttgtacctcctagttctcttttgccctgtactccctctgacatctcctcccaccccaacaccgtccgagttccttacccggaggcaggggctgtccgtgtgggccccgatgaggctgaagccattgccaggaacgtactggccccctacagcaaaagctatgatggtggaggagttcctggtcatgaagtactgaggagaaggggaggaaagacaggggtgtgagttgcattactcagctggcacacagggcttggagaccagcctagggacctgcctttccacccccaccccacccccagtaccttgctctcgggcttaatattccatttctcagtctccttgagttcactgaagccagcctggagaaggcggttgcggcattcagccacagctgtgggaaaagcaccctctcacagcgatggaagctggtgaagggcgcatcagcctccaccctcctcccttgccctggccaccgcttaccatggaaaggagagggactccggttcacgaacttgaggagttccttagccgcagtctgcaccgcctctttgcgggccttaccgttcatggccacctaggggagggggatgctcagacttttacaaggtctgggacccctgacctttcacccaggttccgaggattctcccatccccacccccagaagtgaccactctaaggcacagacctctgcttccgcccgtccccaccgagagacccaaacccagggctgaaactccgttgaaagcttcagcccgccggcccaggatcatgagccaggcccgccccttaatccgaactttagcccgactccctaagtcccgcccccatgtccctgcccagctaggaaatcctgttctgctcccaaactccgggatcccaagcgggccccatactctgaggcggcctgcatcacgtgcgcgtacccagcccggagccaaagccctgtaccccaaggagcaccctgactcctctctcgcacccacctagtctctcgcaggactcccccttccagtcccgggaaagtcgtcaggtcaccctccgcggggctttcggtttcgctttgggtcaggcggccccactgcagcaccgcgctaagcttgggccccggagggcgccggacccggtctgggatcgaaattcaagtggggccgtcgggagccacttacctgcatggccccgcgcgtggggctgtgtccgctcatctggcctccgggctcggcccgcccccaccgcgccgcctgccccgcccctcactagctttgcaggtcccccgcgtgccccttcaggccgcgccgcactcgtaggccttcatcacgcttccccggccgcgccgccccgccccatgtttggcctccccgcccacctctccccgcccctcggcatccgccccgcccacctcggtcagccccgcccctcggcgggcttaccctgtccgctccgcccctcgctgggcaccaccacccgccttgccccgcccttgccccgcccctagcttggccgcaccgcccgccccgccccgcccctcgccaggaagcaccgcccgccctgcccctcgcagggctgcaccgcccgccccgcccctcgtcaagcttcctcgtccgccccgcctctcgccaggctgcaccgccctccccgctttgtcccgcccctcaccaggtttcccccatccgctccggccctcgctgtaccccactactcgccctgcccccgcccttgctccgccccgcccttcgtcaggcctccttgcgctccccgccccttgtcaggccgtgccgcccaccccgccccgctcctcgccaggctgctccacccgccccgccgctcgtcacgcttcctcgtccgccccgcccctcgctaggctgcaccgcccgccccgcttccgccccatccctctccaggccgcgcctccgcctccggcccgccctcgtctccgcccctgcgggggctgctcgttaggccccgccctgcacccccgtcacccacgccgcgcgacccgcagccgccgccagggccctctgctgccgcggaggtgctaggacagccgcggacggcccgcctccccgtgccccgggcctcgaggccaataaaaagctcgcccctccagctcaccgggtccgacgggtacggtacaaagtgctgtctctcgccacagccacctttgtgacaataaaagcaataaggctaatgtccatggggcgctcacggtgagctttagctttatgataaagattggcctgttacctcgtttaatcttcacaactgccccatcaactatgtactcttactgtccccagtttatgcatgaacagagaaagctgagatacggagactagtgatccgtcgaggtaataaacggcacaggtggggtttgaactccatcagtttgattgcagaggcctggaacaaccctacagccttctctcagatcttttctggacctttttctatgcgctttggtaagtgttatgttacacgggaggtccacaagggacacagaagttgacttgcccaagatcacatagctgtttgggtggatctgggatttgactctgatatctgtgccctttccatttgttaaaaacaacagaaaaacaaattccacattattggcagttccagtattcccatgtcaggagtagtgagtagcacgtttaaaccccatgcaccttcctagctgcaggaactgatcaggactcttggtggcctctagatccaaaacagggcccagctaccaggggttcaaacaaaattccagagatcacaggtttatggagcaacctgccgtttatatacctggggtggggagtgacagggtgggatggggagaggctggaaaggtcctgcagccctcacttcaaactagtagatatggcaggggagttttcaagaattcacccactaggtgctggcttaaattcatggcattccctaaccgtttgttgaaataccattatgggcctggcgcagtggctcacgcctgtaatcccagcactttgggaggccgaggcgggtagatcacttgaggtcaggagttcgtgaccagtctgaccaacatggtgaaaccccgtctctacaaaaaatacaaaaattagccgggtgtagtggcacgtgcctgtaatcccagcagctacttgggaggctgaggcaagagaatcgcttgaacccgggaggtggaggttgcagtgagctgagatcgtgccactgcactccagcctgggcgacagagtgagattctgtctcaataaataaataaataaaattatgtataaagctcaatgctgagcaggacatggagagagcattcttgtcctctacctcctggggaggggacacattcaaggaggacagt

SEQ ID NO: 2885 - DNA, 4001 bp, Homo sapiens
atgagtggtctcggtaagatagacacgttcttctgtgcattttctcttttagtggacacaagaaataactctcagggtgacataatccatgctacttctaaattccattgagataaatacagcagggaaattatgttttggggacaagactcaagttaaaaataatctcaaaccaggcaatattttgaaacagttattctccttaacaggctgacaaggctcttttggagtcagtagggaagatatatctgaccagtggggaggaagtggttaggtccaggctcttatttctgaccaatggggagaaagaggtcaggtccaggactctgcatattccagttatgaaatacccagtggaaagattagagctacatttaatgtgaacaagggtaggggctcaactgcatgtattcaccaatggcagacacacactcctgagatagaaactgaacaaacaacaacacagtaccaaccctctgagcagacctctaataaactctattcatatcaagttaccgtcaactaattgttagtataaagagggcctctattcattgagaggcaacgtacttattcatatttataaagagcctatatatatgcatgtgtgtgcatatatatatatataatatttttgaaaagccatctctgtttctatattaaagatgtttctatgaacaaaaagatctttcacccctagaactgtggttttcatatgggtgatcagtgatcaccctcccggagacgtttagcaatgtttggagatgttcttggtcatcacaactggggagggattgccactggcattaaatggatagaagccaggaatttgctaaccatcctacacggtacaggatagccccccacagaaaagaattctcagaccccaaatgacaatagcgctgaggttgagaaaccctgctccgaaaaaggcaagcaaagccagatccaccatgtgaaatgaacattcttctaaaataagctacccaggaatattgccgcaaccatttaacatacaaagtgggcccttcactttacatgaaagtcactgaagtgctctaacaatcagctctgatattcaactgtcagtagtttatagaactgtaaagttctatacattctacagtttatagatctgtaaagttctgtaataagtacaggttttcaagctctcattttgtttgcaaacaataaggcagaaatatttttaacagcaaaacaaaaccaaatctttttaacctttaaaacctttaaaagtatcactttttaaagtcctccttggctctattaatcaaatgcttatttactttttctttcatattttggattgctctttctaagaattttaaaataaataattagtggcatatgataaaatagagcaatgacaattttttaaaaatacaaccatatacatgtcatcaactgagtccttaggcaattagaggcttttctttaataaagagaataacttcttcagaaattttaatttgtaccataatactaagatcaccttaaattccaaatattatagtaatgttttaatgattaaattctctattaatatattttacaagagttacatgcggtttgagaacagcgtgacttcaaaaataatgatggaagtaaaagagaatatttaggacccaaatggaatcttctgttccatataagacttcacccagcagcctctgctagaataccactgtagagctaatcatttttgaaagaaaggattgaaggaaagatggaaagcaaaacattgacatttggatacctacagaactaaatctgtggatttcttcttggtttactctcctcacagttcgtctcttcttccaaaattcactgggctcccgtttaaaaaccttccctcgaaaactcatcgtattgctataatttgagtcacaaaatatttcaaaatatcaatgtcgttaaactcttctcttctgaagcgtcaccaggctgaacaaatctttcttcttggtaaaaagggaaatgctcatgctacatgaatgtaactcaacagaaaggaaaggaaagctgtcaagttaccacttcctgtgagtaactaactaccagctgttcagatactgcttttgtgcatatatcctccctcttcacctgcaataaagcaacacaaaatgactttggacgtttaagagaattgttcacagctaaataaaccatatgatgtaaaaccacccgtgcaaccaaatcaagattgaattgaacagttaattgacaacagggctccacggctgtcaaaacagccacccaaactttataattctggttagactccaaaagtcaactgtaataatatggctgaggtctgagaattgtgtttaaagcaattgctcttgttaagtgtagactaaataagtgatcttccgaggggagttcccaaagtgattgtttagagaacaagaagaagatattagaattttttgtatattggctatctaaataaagaaattatgcttgactattatttaatagaatgcacacagacatggactccttgaatctgtatgtcaaatagttacaaagagctacagagttagttccctcatctttagatcttcaagccctttctctggggctatttaatttaaaagtgcagttctcccctcaaacccacccagatgctctttcctgttttgattttctccatcacagtcactgacacgtaacacaactgtacggtttatttatttgttttactcagggtctcttcctctaccaggctgtatgttccatgagcatgcaatttcatttcattcactgggtcctcagtgattagaacacgcggcactcaaaaggctttcagtatatattagttaaatatatgtttaataaagaataaattagggatttacatttattatgcttaacaatgaaccttgtctcatatatatattgtgctttgaaatattagctattgataaaagccatataattgataaacagatatacaatataggagtatgttcagtttttttctactaggtgaagcagaaatatttggaggccacaggactaggctgttctcttttccccagtaataattagatttagttgataggcacacatgtaccccaggcctgagccattcacctgtctctactttgtcatgcagtgatttgtgccagacagggaaaaagggattctgattattcctgtcttagcatgcagactgagaagaccttcttttgaaaccaatcagaaaaatagcatgatgctataaaatgacagctggggagataaattatatcattactttgtaattggcttagttaggcaaactaaggattccactgagcagaagtccattgatccctggtcatttgatatttagaaattccaccatatgtctttagtgctaaacagatttcaccctcaaagtaacgctttgacatctgacagatgaacaggtatgttatagtacatgcagaatcttcagatttattattttttccttatatggtgtgatgagagtctgactctggatcacctgatttcctggggttagattatgtgtatatgttgatggctaaaaatagtattttataatcctttttagatcatgagctcattttaaaatctgataaaagctatgaacccactcatcagaaaaatataagcactcagaaaatgtgcatgcatggtcaagagtcacaaacttctgaaaaccatctgtggatccatccaacaatggtgccttaaatttctgaatcacagttttagaagatcagcatactgtcttataacaaagcattgaataatcttgagaaactgttaagcgactttctgtctgtctaatatttgcatctattttgtcctctattcctctttaggcaccacagttctttatcctagagttcctcccacttttcaacttctgcaatatgagaatgactcatttctccatttcctcagctgctaatcatagcttcctgaaatattggcaaaaagaggcatcacccggcagcatatgg

SEQ ID NO: 2886 - DNA, 4001 bp, Homo sapiens
tctacatttaaaaaaacacacaacagtttaagctgtttattccaattgaacgctgtgtgtttccatcagatcctcagtgagattcagtccaatgagtcaattgcaaaataaagtttttgtcaagggaatggcagaaaatgacaaaaccacaattctgaatgatcattcaaaagtaaaaagtactttctactactgtgtggagattttcttatctctacttttactcgaattgaatcttttcttctaatgttcttttgaacagtttgtctttggtgtcctgaaaatgtgcacgctgatagcagtaccacatgctgtccctggcacagagtgagctaacagttgaaccacctctgggtaactgcggactgcagctagtgtaagtgcaagagaaggcaccctggccaccaattcgtttcacactccaatcacccccgcccgctctacaccccctgggcacccgatgcctcttccctctgccaggcaatttgcttccgttctgttcaactttccgacctctggctttagagaatagtcctggctgtgggaactggctctgggaagcttttggcgccctcctcattggtgactggcaagagtaacactttcacactcttaaaaagagccgtttagttcctaatgatattttctggcaaaaaagaaaatgaaacacacaacccggattccggtccaccaaacgcaggccaagagcgcggctgctgagccccggtcttgctgtgaggctgttgttcccactcgcttcccgtttccactagagttgatttgtctcttgccacctctccccggcagtgtggacctactgcaacgcaggaacatctgggttggtatggataggatcctagcatcagatgctggctgctgccccagggacttcccgcggaaatcacccagcacttagaagccgtttcaataaggaagtaaccagtaaagcattgctggtgggagaaccccgcgaaacatcttagaaaaatatcagaaaccgctggagacctaatgacccacgtctcctccagcctgtgttcctcagccctttctggaggagtattaagtggtttgtgggtttttaccctgcggtgggagggctgttccaagtacatctatttctgcgatagttaacgtcggggggccccagctctaaccagggcgaggaccacggactgcatccctctctctcagcgcactggtctgtttactggagggtgagagggacgcgcagacctccggactcaggggttctgttctgtagatccccccaccccacccggggtctctggcactcgtatcacttagcaccagtgtgactggcggtgcattccggccccctcgcgccccattaaagcccctgcacatcctctcccacgctgcgcttctgctacccacgcagctgctcctctgagcgtcccgcgtgcacaaacgcgcccccggtccttacgcgtcggtggcgctgcctcgctgaggtggcgccgggggagcccgcagaggcggcgggggagggagtgcggaggagaggacccgtgagctgcggggacctgggcccgccgagcttttggggaagctgggctccgttccccccgggcgcctggggcgcgcgggaaggcgcggaggacgcgccgcactcacccgctgctgctgccggctgctgactgccaccgcggcggcggacgcggcgctgtgccggagctcggccgcctgcccaggtctcaacaggctccgggtgaacctgcgggtccgctcaccggccatcgccggtcacgccaatcgcgccgcgggcccggggcgcgcctcccgccggtcttccccgcgccaaccttctctatccacccgccgttcaggaagcggaactcggagccttcccccccctcttcctcgctcaactcgcaagaggcgggtttttctctcttgcacccccactcttcccacccccttccctcctctgaagcttctcgaagactttccaaactctgcgctcccccgggcgcgcgcggccaactcggctggcggccgggccctgcagcggcgcatctggagcgggcgtcgcgggacgcgtgtggggcggctcctgcccgcgccgcccacacgggctcagctggccggccggggctgtccacgccgcccgggggaactgcaggctgcgggggagggcggggggcggccgccgaggggctccgggcggggcctgtccaaggccgtcgcctgtccaaggccgtcagcctcatttggaggttgctgggagagttggagccctggatgcatttgccgtttagacttctattttctgggtccggctagtgggtgggggccaagctcggttcgcccttccaccctcgggaaggggtcagaggcttattaaagatctggtggctgggatcccagcagcatcgcccaagccagcgtttggaaggctcccttgccagaagtccatgttcagggccttggaataagcttccccattcattcactccttcaatgagtatttattaagcgcctactatatgccagctcacactgttctggaaactgaggatacggagaggaacttagcaactacactttaaggctgtgtagagctgataggttttttcggggtaggggtgggagacagcaagtaaccaagcgaacaaataaacaaatacagagaaatcaaggagacagtttaagctactaacacgaactcaaaaccaataaatcagcgttctgggggtaagagactttgggtggcattaggatgagtaggcaagaaccaactggcagggttactatgtagggtggtcaggtcgggggtggatttcacagttatgctgtctctgctcttctcttgcccatacccatctagcctgcactttgcctctagataggtatctgatgaaagccttctaagaagtctcttcctgggtcatacccagggtggttctgcaattcagtgttggactggatggggggcagagaagttctggcccctggatactggtctggagagatctgggacagcctttccaagtggtctggttttttcttaacagctttttatggatccatgaccctgccactttctaaagccaatgatagatagttataacacaaggtcacatttgggtataaagaattcttaagcaattgataaatgcactttagtcagctctttgttagccaggattcaattagccagagatgctgtttggggatcatttcagcacattctagaaatcataacaggcgtaagagggtaagaggctctggcagatttgggaagtgccatttgaaacatcatctagttccaagacagcctgcataacaaataactgtacctgtattgtatgctttcatattggtactcagtgtgggagcaacaccacctttcagggtaagcaaagtaggtggttgcctctgtgttggtacatgaagatctctgtaggaacagctccctccaaccgtaccctttcccaggtgtacccagacttgatgtctctgaatgcatattcccctgagagaaccgattaagcacatttgaattaacttgagcttcccaagaagaggtacctaatctttgtctctggtttcaaaacactgcctggcacacgtaggcactcaataaatatcagcttatggatgactttacaaagggctcagatgggctagtgcagtcagagagctgggtgtgcctgacacagagaaagtcagagaggagaagagaaaggtgtgctgaaagggaaggctatagtaatcgataatacatcagaatgtgccctgcacaaggcaactcgctgatccaaaacactgagtagcacacacaacccaatctccaacaatatcgagtaacagaaagtcacttacaatttgttaatcgtacaattaatacacctaattgtactttttccagcttcaggaggtcacccagagcactggtgtgagagggtttaacgaacaaatgcctgtttgcccaatccataccctgtatgatgttaattccgtgggtcacaccgagt

SEQ ID NO: 2887 - DNA, 4001 bp, Homo sapiens
acagaggttgcagtgagctgagatcatgccactgcatttcagcctaggcaacagggcaagacttcgtttcaaaaaaaaaaaaaaaacaggtttcagacagagagaagaacaaggggctatatggcagcacagacagggcgggcacaagagagaatgcaaggatgtgaagaaaggatcttagacatccaagcctcacagatagatcaaactcctaagcccccacgtattggctttatggtcttaagcaagttgctcagcttctctaaaccccagtttctttatataaaacagtgttctggcagctctgttctaagaatgatcacatatgtgcacaccatggcagagcacctggcacacagtaggtacctgattaattgtagctatcaatgaatgggtagagactgatcagaacttcagggttgattcttggttttttattcaccgtatcaggttcttgagtatccccagatcacaccaattttccctcaatcttatgcccccttcctattccctgccagggtcccctgtcccgtctccaccccttatcataccagaaagatgggatcatcatggccaagtgggaggcctcagcactcactcttccctacatccccattactcccccatcctccctccccaagcttctctgtcccttcatctccccttccacaggccgcatctggctggacaacttgagctgcagtgggaccgagcagagtgtgactgaatgtgcctcccggggctgggggaacagtgactgtacgcacgatgaggatgctggggtcatctgcaaagaccagcgcctccctggcttctcggactccaatgtcattgaggtctgcatttcctagacatacacacacacactacccaggatagccgagagtactgtggggtggttagcggagacattagaaggtagttacccctgggggatcatttggattggtgggagacttggaaaagcaaatgatagagctcccagatgctgtaaaatccaacaggtttttagcattcacattcaaggggctaaacctggcatgagcctctccagcttcatccctagtcacccctggggcacctggtgctctccttctcctcaaatgttcctgctttcctgagacatcttccttctgactttctcctccttcaaagccatttcctttttgaagtgctccctcctgctccaggcacagggagggcctccttcctagtgccctgaatcctctctgggagcacagcacatcccacgcgctgctggctgcaagagagtccacaccgcggactgcggccatcgtggccgctctctcagcgccgcctcgggcccatcccgccactgggtttacagcaggcacaccaagcagggttccttaagggcggcgggacacatgaaaggtgccactgggattctttccctgcttgtggccccgcccccaggtagagcatcacctgcaagtggaggaggtgcgaattcgacccgccgttgggtggggcagacgacccctgcccgtgacggaggggctggtggaagtcaggcttcctgacggctggtcgcaagtgtgcgacaaaggctggagcgcccacaacagccacgtggtctgcgggatgctgggcttccccagcgaaaagagggtcaacgcggccttctacaggtgaggggccgcgggcgccgggcggagcaggccgggattggggtgctccctgatgaatagccttgggagacatctgagcaggtccggggcacgggaggacccgggggtcgggacgcgcgggaaaatatggaggccgttgcaaagctggagagttgggaaatcttgtgggaccacgaaaggtgccccaagggagtacctgaaatggggaccagcgaggctcccgctctctcgtggccgacgcctgggcgggcaggcggattcctcggccccggggcgcgcgccggcctcgcgaggccactcccaggcgcgggggcgattccagcgctggcgctgccggccagcgatttccgagttcagtaaggacgcggccgcccctgggaggcggcgcctgggtgtgtcccgcgcaggctgggcgcccagggtccgggggcccggggacggcggcgcgcgatggccgaagggcgccaggagagaccgcgccagtctctctgcccgggccgccccggggcggggcgcgtatgtgaacgctcgagccctcggggctcctggaagtcctggaagtttcccaggatctcttttggcgaggcccaacctctccacctgcgctggagccctggggtccagtccggcttccagggaaacgcatcaccctggaaactgcctgtgcttaacgtctcccttccctggaacatctactttgatctttttgagaaactgccattgacagccaggcatttatttggaaatctttacaccctctcactgtaatctattttgcgagccaaaaatcctccctttcttcagtggttccctagatcagtattgctgaaaggcctcttgatgtccggataggtttccgcgggcacactacttcagatggggtctgatgccgccagctactgtagaaatcctcaaccccgactgaagcgtgctcggattacactgtcttcctactgcggcagcttcccactgcttatactgaacttgtcatcacttaaaaccagttcaggtcttccctatgcttcctactgatagagcagccttttccaacccaggtataggtgacgtttacctattacatttgttttgatacataatttagaagccataaaaaagccatgatgatcccatgagattatcttgagtcctgatgtgactttccatctgtcatttcccctcagcctcctctgctgaacagacatggcagctttgccttctggcttcatccaaatggctaaaagttgttgtggaaatgtttaaaaccaaagtctaactcttcttgcaaaatgttcctgtagattttcatcaagcttctaatcatcagctgtaaaatatgttccttccaccaactgggaagaaacagaacacttcaatgatgtaaccaacatttcaccttatctatctatatatttcttatctgtaatgaaatcatgggagattctgttagtttttgataaaatccagatatgctatgttcacagccattctccagccttccaatttagtaatcctgtcaaaaaagaaaatcatagtagtttgagtctatttttactgaaatccttttaggtctctaagaatcaccttattttttcctaaatgcttacaaacttctatttaataatttattctagaatattacttatgtgtagattgaggaattgaggaatcctttttctccttttttttttttcttttgaaagtcaggatattatccagtctccagtcttttctatacctgctcacactttctttgccttggctctgaggctcatctgaaatgtctttcagtactgaggactttcggtactttatctggcctggacactcaaaccactttaaaacaaacgtgctgtgcctctttactttcatccatcttggggctgcatttccttctctgtgctgcttaccttccctaatttaaaccccatgttctgaaagatgcgtagaatttagacatttccagtgaagaagatagcgtgaacaaaggtgtagagatccactcacccaatatttatttactgagatcttactatgtgccaggtactgttgtagacactacccgtggctcatgcctataatcccaggactttgggaggccacggtggaagcattatttgagcccaagaattcgagaccagcctgggcaacataatgagaccctgtctctacagataattttttaaaaataaaattagctgaacatggtggtgcgtgcctgtagtcccagctacttgggaggctgaggtgggaagattgcttgagcccaggaagtcaaggctgcagtgagctgtgatcatgccactacactgcctgggtggcagagcaagaccctgtctcaaaaaataaatt

SEQ ID NO: 2888 - DNA, 4001 bp, Homo sapiens
atttccctgtgccgtctggaaggtgaaggttccagggcctgaggggcagcggcggccggcctcgaaagagaacatgacctaaggagggtagagggggaaacacattaccaggagccatcagaggaagtgagtcacacgcctgcactagttagggtatctacaaagaagagaccacctgcgaacagacgcggggtcaccgggtaggcaagaaagggggatccaaaggtcagagcttcccactttctgtcctgccccacccctcccacagctgcccaacccaggaagccctcccggacagcccctgcaccttgtcccggccatagcgacgcaacagagtgtagggccaggacaggagtggctccagtatctgactctgggcccccacggtcaggagagtcagcctttcagcctccaccctcagcacgtaggagccatgcaggccacagcgctcggcggcctcagtcctctgcaccgttacccagaattgggatcctggaaggcatacacgattagacagctgcgggggagggacgggggcagcagtggggacccagaggactcatgagcatagtgtccaagcactcactcggaagccagatctcagggccttcctacttcttacttccccatgggcccctgggtatccacccacttcccaaaggccctcggccctcctcctcttcactccatccctgcccgggcttctgaggcgtctaccttcccaggtagggctgtacaaggagttctccagcatctccagggcagaaagcttaggtgggttatcggtaggcgccagagtccagctgcctttctgtagtagagagcatcgagaaacccgtaatttcctcagcggggagcgggggtcggtctgaggcagccccatttctctgcctctgtaactgcccccaccccgcatcgccgcagctcctcaccggaaaggcgtttcggcacagcgtctgcacccaggctgcactggacggcgcgtcggccgccagcaggtgcgagcgctgagcagtgtccaggcggaaggcagtggcgccgggctcagggggggtctccacggtgacgggggccacactcacacactcagccagacggatcactttgcagtccaggcggcgcgagctccctcggccacccccagagctcgaccccttatggtcaaagaactcgagccgcgctacgccgtggggactggccgggtagagcacggcccaggtcttcctccacctctagggagagagagagagtgctcgagagggagtggcgtgcgcaggcggcccgggtcccgacggggaaggaggttgcggcgcaagtcgatttgggatctggggcttccaaacggggttgggggcgaagtttcccaaggacgatgccactccgtctccccaggaccagaacccctagactacagacgcttcccgggagtgtgcaaagcaacttcacgggaaagtcacaggctctccaactcccggcgccgctctccagcccgctgcccacctctccctgtttctgggctctctcacccactactagcccggataaggttcggcatccatgcgccagactaccttggtcccaaagcgctgactctgcaaaaaaagcggcccttccatcactgctccgtccatggcccccggcggttccttccgcgcttcctggccctgcggcgggaggcggggcgggaggcggggccgggttccctggaggagtttccgcccctccccggcccccgccggcagccgctgggggggtcgcggtggggtgagggagaggagcgagaaggaatggtggagacccccggattagccgggagctgcagcaccccaggcccctacccgccgtcgtgggggcgcgccagtggctccaccgaaagtcctcggttttggcgcgagggccctggcctctgggcgtggtggctgcgcgtgacgtcatatgcccaaggtgacgtcagagtgaaagccatgacatcaccccgaaagcgccccgggcaccggagagacccacacgggcctccggggctttatttaccctggccgggcccgcccccagccccgcccgagccgggctgtttagactccgctggcccgggactcggagggagggctggggttgaaccgcttcccgccaccaccggggccgccccgccgcccggccgccgcttgcatgtcagctccctgaccgcagaggcctggcctccatgccgcgggaagagaaagcttcattgaacgagccgggagggccagggagggggagggggcgcggcagtggccagctccacggggagggaggacccagaggaggagaggagggaactggccgggaggaatggaaggagaaggcggaatgtgggagggctcagggggatgtgggagggacgaacggagaagggggagagaggggggtccagtctcccctggccgagcatttttttttttttttggaagtcctaggactgatctccaggaccagcactcttctcccagcccttagggtcctgctcggccaaggtagggggagtcacgctaaccgcagagggaatgagtaggggatggagaggatgtggagggaccagggaaaacgggtggtgtgggatggagtcgaggggaagccacccaactgagagtttgattcttgtcaaagggcaagtgagacagagtacacggaggaggcacataccggaggcgggggctacgggtgttcgaacagggccgccaggagcgccctaagggagggggctcctccgggaggcgctgcccctgggtccccaacccagaacaaagctgccttgttggattgattgtttgggttgggggaagcatgttgacgggggcttgctgtagaggggctgttctcagccctaggcagagaaggccttggctgaggagccatagcgcctggcctcccgttgcccggtgacagggatggtggtgttggcaggaggctgggacaaccctaccccatcccccgcccagccttgaggcctggccctcctgggcctcttgaccctgcagggcatctgagagcctgcgtgttggggagggcgtgcagcaggttctccaggcgagctttggtgccagccttccctgcctgggaatctgctgggttaggactctgggctcccattcaggggatctgtgatcccagggccgcctagggccccttacgtgcctctctgcacaatcagtacagctgtctgtcctccctctgagtaaatggggtcatctggatccctcccacgtccgccccttggctcttgtcaatccctctccttctcacccgcggtgtgcttggttcccctatactgagtgcttagttctttgcctatcactttctatccgttgtctctctcctctgtgtctttctggttttctctctctcattcccacagtctcccttcctctcacatcctgtctgtctgggtcttcctctctctctacgtgtctcttgctcagtctctatctctttttattgacccttctctgactctcgatctctcatagttgtctcttatctctgggtctctcaggctgtgcctctatgacctgtgcctcagcccttatttaatgtgtttctctccctgtctcttggtccctggggctctttctctcctgttgtctctcgctgtctctgtcttactcagtgtctgtttttctttcgtgacttctccctctctttctgactctgggccccactcaatctgtttctctcacgcacactttgtctctggggcacccaggccttccctgccatgcgacctgtcagtgtctggcagtggagcccctgggggctgctgctgtgcctgctgtgcagttcgtgcttggggtctccgtccccttccacgggccctgagaagaaggccgggagccaggggcttcggttccggctggctggcttccccaggaagccctacgagggccgcgtggagatacagcgagctggtgaatggggcaccatctgcgatgatgacttcacgctgcaggctgcccacatcctctgcc

SEQ ID NO: 2889 - DNA, 4001 bp, Homo sapiens
actgacattttcaaatcatgtcaatactcagaaaggcacttaaaatactctattaaaacaagagttctgcaaagtagccactccctgaatatttgaagtggctattaaaaaatgcacactaacaagaaaaatggattcgagcttgcacctatctcttcatatgaattttaagtaccagattaatcctgacaaggggatttgttgtgtatagacagcgtgtccactatctacacatacattttcagctcctgtgtgctctgctctgctctgcttctgcatcccacttccaccatcactgaactgtttgcagcgcctcaagtaaccagctggtgtcacaggttagtgagcaaagatttcatgtggggactctcacctggctaatctttcttactggtagcatcattcccagagcagtagagaggctcggcggcttgttaatgaaatttaagggctgtcagcctgaaagaggatgttcaatccatgttcccgttctgaaattatttttctatatctgctaaccaatgtttacattctgatgtgtgctggggattaggaggaaggggtataaaaggaaggaacgtatgatgttttaatattttcatacttatctcagagtatggatcaaacaggatcgtttaagaaaacaaatgctttgtaagaactgccaacattcaaccccctcccactaataaacgagaagggagctgtaagtcattgagtaatccccaccacctgtgtgaaacacatgtgagagaaaagagaaggggagggaagaggagaaaagaaaccgcaagccaggagagatgaccaagtctgcaatattaataacagcatcgctggcatggcctcctgtgtctcgccaccactcctgggcgatttggacagctccccttaagaggctcttcagtgcttagaatacgcgaaaagccgagtcgctgctggagcctagccgcgtgcgctccctctatcccacgctagcaataagctgggagggtgtccgcctccagcagccttcgcagcgcactccgaacaaagatccccagtcctcctaccccagcgcttgggtcccgcgggtccacagttaatccctgacctaagtgcagctctctctgcccggagttcctaattgatgcaaacgtgagcgcacctgcacccggctcagcgcagcctccctcctcctcctcctcctcctcgccagggtgtctcggcgctcccgaccctccaactttggaaaaagagcgacaccgaagtcccaaatcaccccagatcagggacagagacgagatggggatccacgacggtacggttatgctacagatttctaaagaccaaaacaaaaaggggttggcgggtgtagacggacgggaaagagacaggaataaccctcagcccacgcagggcacctcatctgtgcagacgcgacacatccaaacccaacacatcaccaaagccagcgccttcccggctccacttaatcgttaatgcctcgccgctccccaagctccgttccgctcagcagactacggatgtctgggacactcttcccccatccccacctcacaaacacacacccgtctcctcaaaagaaacaagaaagcagagggaaaaccccgtccgcctaaaggtcattcgcctgctcgggtcgctttggccagcgagcgccccggctataggaggacggggctcgaacccggtgagcggccgtcaggagcgcagcagatttcttcagcgtgcgttaatggggaaccaagaggccccattccttggtcccggccgcctctccctccctcggtgggccgcccgccggggttccccggggcaccttcagcctttacctctctgcccccttccccgcggctctccaccttgcgcatcctctcgccgggccccggagcgcacgcagaggctctaacttcccgcagagtccgtggagaagcaggagagcctggaactggggcggggcgggggagggtgagaagagggaggcgcgggagcccagcctgggaagcgggaggcgggcggagcgcgcactggagccacccctcccgggagggcctggccgcggctgccgactctcacctggtccgccggctgcgcctggctcgccctggcccccggggtgggctgcggctcctgcttcgcggccgtcatcgccggcggcccgcgctggcgctcgcttcctcgcgggcgcttcagactcggggaccgtcacttggcagcgttcgcaggtcacgggcgcccgtcgctcccggaatcggcggaagggacggggtggggggagcggaggggcggggaggggaagaagagcggcaccgggcgggctccccgtcgtagggtccctccctcggccaccgcagaccctctgactccccgctctccccgccccccgccacccaaagcgcagcgagccgcggcggcgaggcgagaccaagcggcaagttagtgcagcggcgagcggcggggccccggcccctgaccgagctgcggcgacgcctcgtgccttcttcccgcagtccgcgccccccaccgcccgcccccgggggctccccgcgcggtgctcagcgcgccaggtggagcagccgggcgccgcgctccggcctctcttcggcaaccgcagccggggggggggagagcccggagcggcgcgagagcccccaacccgcgcgcccacggccgccggcttccgcggttaccccgccccccgcaggcttccgctaaaacccggagaagcggagcgcgcccgtgcgaagcactgggtggctccagctccgccactgcgcgcgctccagcgccccagaaggcagggggcagcccggggaccggggtcccggagccccgtgggaggcgggcaacacctgtcgggacccgagggcgtgtctgagattgtggcctgaggtgctgcgccttccgatccggggcagcgggcgtcctgtagctgcgccttccgaatccagcccagattctcctaccagctgcttgggtcacgtcggtggaactcctaaaggtcggttaaaaaccataagaactgtaatgatgataagactctgatactcatttcttttttctttttctttcttcctggacacgtgtaggaaaaccttcaaatcttaagtcctcccagcctttcctttcttcaacacaaccctctcccattcaaagtaggtttaccgagcacctaccacgtgccaaacacactgtgaggctcagagagagggtcgcaggggagagaaactaaacaacacggcaaacctaccaaatcccctggctgcagggagcttacgttgtgtgggaattgggagcccggagcctggatacaaatcaatgagtcaatgtagctcttaggaagttgaattaccgcggatagacaaagtccacagttcatccagatgcactagtgcacgtggctttccctagggcgcctaaagcctgtggaccacaaacagcctccaagtctcaggcacaggttgtggaagattgcttaccggagaaatggcaggagtgagttgaatatttaggtgttcatgtattcagcacaagacagttccagcagagaggacagagaatatggggcagtggggtggcagtgagttgggctttattggctaaggactggctccctgctctgagccactcagtccattaattagtcacttcttaactgaaagacttttgtagaatggtaggagctgtcctcttgccttagtagtttctaaaacacgaattataatgttgtcctaaatattaattgtaacgatacttcctataaagtatgtattttaaaataaatatatcagtaatcaccagcagaaagatagaattagaggtgagtggagatcttgtttttcaaaaatatgtattccagtgcatattgtgaaagacctatttattctgtttcaggagaaataactttttgctaggaataactttgcaagttgcaaaagcataaagcaaatatatatttttaatgaaacattagtgtaatagctattgggcagcttatc

SEQ ID NO: 2890 - DNA, 4001 bp, Homo sapiens
gtaccagattaatcctgacaaggggatttgttgtgtatagacagcgtgtccactatctacacatacattttcagctcctgtgtgctctgctctgctctgcttctgcatcccacttccaccatcactgaactgtttgcagcgcctcaagtaaccagctggtgtcacaggttagtgagcaaagatttcatgtggggactctcacctggctaatctttcttactggtagcatcattcccagagcagtagagaggctcggcggcttgttaatgaaatttaagggctgtcagcctgaaagaggatgttcaatccatgttcccgttctgaaattatttttctatatctgctaaccaatgtttacattctgatgtgtgctggggattaggaggaaggggtataaaaggaaggaacgtatgatgttttaatattttcatacttatctcagagtatggatcaaacaggatcgtttaagaaaacaaatgctttgtaagaactgccaacattcaaccccctcccactaataaacgagaagggagctgtaagtcattgagtaatccccaccacctgtgtgaaacacatgtgagagaaaagagaaggggagggaagaggagaaaagaaaccgcaagccaggagagatgaccaagtctgcaatattaataacagcatcgctggcatggcctcctgtgtctcgccaccactcctgggcgatttggacagctccccttaagaggctcttcagtgcttagaatacgcgaaaagccgagtcgctgctggagcctagccgcgtgcgctccctctatcccacgctagcaataagctgggagggtgtccgcctccagcagccttcgcagcgcactccgaacaaagatccccagtcctcctaccccagcgcttgggtcccgcgggtccacagttaatccctgacctaagtgcagctctctctgcccggagttcctaattgatgcaaacgtgagcgcacctgcacccggctcagcgcagcctccctcctcctcctcctcctcctcgccagggtgtctcggcgctcccgaccctccaactttggaaaaagagcgacaccgaagtcccaaatcaccccagatcagggacagagacgagatggggatccacgacggtacggttatgctacagatttctaaagaccaaaacaaaaaggggttggcgggtgtagacggacgggaaagagacaggaataaccctcagcccacgcagggcacctcatctgtgcagacgcgacacatccaaacccaacacatcaccaaagccagcgccttcccggctccacttaatcgttaatgcctcgccgctccccaagctccgttccgctcagcagactacggatgtctgggacactcttcccccatccccacctcacaaacacacacccgtctcctcaaaagaaacaagaaagcagagggaaaaccccgtccgcctaaaggtcattcgcctgctcgggtcgctttggccagcgagcgccccggctataggaggacggggctcgaacccggtgagcggccgtcaggagcgcagcagatttcttcagcgtgcgttaatggggaaccaagaggccccattccttggtcccggccgcctctccctccctcggtgggccgcccgccggggttccccggggcaccttcagcctttacctctctgcccccttccccgcggctctccaccttgcgcatcctctcgccgggccccggagcgcacgcagaggctctaacttcccgcagagtccgtggagaagcaggagagcctggaactggggcggggcgggggagggtgagaagagggaggcgcgggagcccagcctgggaagcgggaggcgggcggagcgcgcactggagccacccctcccgggagggcctggccgcggctgccgactctcacctggtccgccggctgcgcctggctcgccctggcccccggggtgggctgcggctcctgcttcgcggccgtcatcgccggcggcccgcgctggcgctcgcttcctcgcgggcgcttcagactcggggaccgtcacttggcagcgttcgcaggtcacgggcgcccgtcgctcccggaatcggcggaagggacggggtggggggagcggaggggcggggaggggaagaagagcggcaccgggcgggctccccgtcgtagggtccctccctcggccaccgcagaccctctgactccccgctctccccgccccccgccacccaaagcgcagcgagccgcggcggcgaggcgagaccaagcggcaagttagtgcagcggcgagcggcggggccccggcccctgaccgagctgcggcgacgcctcgtgccttcttcccgcagtccgcgccccccaccgcccgcccccgggggctccccgcgcggtgctcagcgcgccaggtggagcagccgggcgccgcgctccggcctctcttcggcaaccgcagccggggggggggagagcccggagcggcgcgagagcccccaacccgcgcgcccacggccgccggcttccgcggttaccccgccccccgcaggcttccgctaaaacccggagaagcggagcgcgcccgtgcgaagcactgggtggctccagctccgccactgcgcgcgctccagcgccccagaaggcagggggcagcccggggaccggggtcccggagccccgtgggaggcgggcaacacctgtcgggacccgagggcgtgtctgagattgtggcctgaggtgctgcgccttccgatccggggcagcgggcgtcctgtagctgcgccttccgaatccagcccagattctcctaccagctgcttgggtcacgtcggtggaactcctaaaggtcggttaaaaaccataagaactgtaatgatgataagactctgatactcatttcttttttctttttctttcttcctggacacgtgtaggaaaaccttcaaatcttaagtcctcccagcctttcctttcttcaacacaaccctctcccattcaaagtaggtttaccgagcacctaccacgtgccaaacacactgtgaggctcagagagagggtcgcaggggagagaaactaaacaacacggcaaacctaccaaatcccctggctgcagggagcttacgttgtgtgggaattgggagcccggagcctggatacaaatcaatgagtcaatgtagctcttaggaagttgaattaccgcggatagacaaagtccacagttcatccagatgcactagtgcacgtggctttccctagggcgcctaaagcctgtggaccacaaacagcctccaagtctcaggcacaggttgtggaagattgcttaccggagaaatggcaggagtgagttgaatatttaggtgttcatgtattcagcacaagacagttccagcagagaggacagagaatatggggcagtggggtggcagtgagttgggctttattggctaaggactggctccctgctctgagccactcagtccattaattagtcacttcttaactgaaagacttttgtagaatggtaggagctgtcctcttgccttagtagtttctaaaacacgaattataatgttgtcctaaatattaattgtaacgatacttcctataaagtatgtattttaaaataaatatatcagtaatcaccagcagaaagatagaattagaggtgagtggagatcttgtttttcaaaaatatgtattccagtgcatattgtgaaagacctatttattctgtttcaggagaaataactttttgctaggaataactttgcaagttgcaaaagcataaagcaaatatatatttttaatgaaacattagtgtaatagctattgggcagcttatccagtaattatgacaatatagatattccctcacatgtaattcttttggagggagggcatctgcattattcagaaaatgttcgcatttttatattttgctcttctgttgattatttgagtatattcatcctttcattgtgtttccatttcggacaatctgcttgagttgaagg

SEQ ID NO: 2891 - DNA, 4001 bp, Homo sapiens
aagatgtaactgtatgctaagtatataacataacttcactgaagagggtgggttaaagactgttgacctaagtaactttggaaattattggaaagtagaagataaaagggcaaaggaactgcacatgagcactgtcctctagttggtaaagctatttttcaaaggaacataacttaccagtcctgaagccactcttcatgtatgtatacctggatggaaaaagtaagtaaatgaaccaataagagttagatccaattttctcagttttcaaatgggaggttacagacaagcaaaggaggaagactagaatgatccatgtggtacagtactagagtaggaaacatcattgtgaactcatgcttaaatatttaatatggacacagatggatggctattgaaataattatagatatgtatacatacatgggttagtatgcacatatagatttcctagctctgtccactgagagggcctagaagcgatgaatcccctgtagtgaccagcacacccagcaccaagatcttggtttcaaaaaccattctccaatgaaagaaaccagagtcctcggggaaattgctgattctagggccaaggcagggaatatacaagatcatcctggagcttatgatggtatcagaaagtaaggaaatgcttacaaaacaaaaatgataggtgtaggctaaaagtatgcaggagctaagtgattgaataaatatgtgattgaataaagtcaacagggggtgggagaagaggaagagacagatatccgaatagaagaattttaaataatttatgttgatacttgccctgtctcaaggagatagagaataattccccaccacgtaagggtaggcggtgccaactattgctgccagagagtatggtgtgcgaagcagggggaagagcgttttatagtggagacacctgaaacactgtcttagccaagtgagctaggttaacagcatcagtgataagtcacgttgatagcatagacccttgttaggatatgaattgaatagtatatcccttctgaagttttcctccccaaagcccataaccccagtctaattatgagaaaaacatcagacaaaatcgacttgagtcacatcctacaaaatcagggaccagtacttctcaaaactgccaaggttgtcgaaaagaaagtctgaaaaattgtcacagttcagagaaggctaaggagaaataatgactaaatgtcatgtgttagaggggatcctggaacaggaggttaggggaaaagtaataaagttaaataaagtatggagtttagttaatagtaatgtgccacaacgtttattcctcattgtgacaaatgtactatagtagtgtaaaatattagcaatagggtggtatatacggctctgtaaaatcttcgcaacttgtcggtaaatatcaaactattctaagactttaatgtgtattttttaataaagaaaattacctggtgttacgggataatgtttcattccaagaaagctccatatccatttgcattgatcatcctggtgaagccctttcttgatatcacactctgctccagttttctctcaactgcgatgaatttgaaagaatattgtagcacttcctttcgattcagcagggagacttctgtatcttagatggtcgaggcctcattatttcctacctcctaaccagcataccagctccacgcagctctcatctccctccctctctccacctgtctctttttcattttccattcttcttatagctaaaggttgaagatatcttctatcatatttggtatgtaccaggtacttgtgtatattatttctctaatcctccaatttacggatggcagcactgagccccagactgtttaattaacatgtccctggctaggaggcttttaagtgcagacggctgatcaaaatgaaaagcaagtatttgtctccgaagagcaggccctctacaccagcaaaatattaccctgtctttcttaaagccttctaggtcttctttcatcaagtgtttaatgcaatatgataaagaggaggctggtcttagaaaaggaggttgatcattattggaggcaagagagtgtgtgggagaggctaattggttgagggagacaggtaatcaaatcctaagtaaaggcaaccttgaaagaccgcaaccatggaaaacaaaattgttctctcctggtgaaccaatgggatcaggaaagaatttgcaggcttggcgcctctctttatttccccctgcaacaaagatggctcaaaaggaacattgttaagagtgttttgctcactcagcaatgaggcaagctcattaagaaactgggggctgtgccaatgggggctcgcaggggtagccaattcctaacttcacaagatctcacctgctgaaaatcatatggaactcaaatgctaactcattcagatgaagcttcaaattgatgactttaaagagattgaataaactctttatgttacaatctggcatgtgcttttaatattaactactacatattttatagactgtatttgttgccaagcactaaaacaaacattaagctggttttgccttaactggtactatgaatgcttccaaaacagtgggtataaaaagccgcataaaacacatcatagtcatgaaaatcatctgcattaaactcacatttgccatgaatgtggcagttatttttcatctacaaacaattatatcacaattacttactctctgttaggaaacatttcatcaaaaactctcatttaattgacataaaaatgcattttgttcagagaaaaacataatctctaatttgtcctaatgaaagaaataggcattctgaattagtgaaaggctcatgtctattgaaaaatatgcctctttattagtttatatacagaaagtaacgcaaactaagctacaaagcttacagtaggtaaagaaggacccaaaagaaaatagtcctataatgaataaataaaagtaacacacagtattctatattttccataaaatggaggcttgaaaaaatttgtgtcataaataagttaaatgtacaccttgtgtcatcctgtttaaattgtgaatttactcagtagtttttttcaatcacccagttataataggcacatctaaatcatatactcagaattatcaccgttcagacaaaggagctttttctctaggaagtaattgtaattaaaccctagctatatcagctaatctgaaattatatgcaaaatgtctatagattataaaaagtcagtactataccaaaacacaagaaaggattgagcattactagtactgatcattttatatgtcagtttccaaaaatacttttttagaaaagcagacatttgaacacaaacatatgctcttagaatagatagatagatagatagatagatagatagatagatagatagatagatagatatcatcccaaatgcattcggttgctatggaatgattttcagaaagtaaagtactctatttattttcatatccagccccattatcatctcagcgtattgctggttataatctgtagaagaaaatagaagacatttttcttggtctaacataccttggtagatggtttgtaagaagatttcaggtaatgaaaaggtctttaatgtcactgtaccctctgcacttcatgtctaccaaggaataacctgtcaccacacggaccatagcagccaagcaagttccccaggaatggatggcaggggtaagtcaccatgataacaggacataaccctctttactactactcaagaaatattaaaaacatagctacattaaaataacagagtaagttcttgtagtaagtcacatataaaataaaaaacaactattgaaacaaagattccatagtaaaactgtagtattcaagtggcaataccttacaataaactagatgattatccattgttatttaatttaaattgctttcatcctttttgaacaaagcatagctcaccatgaggcctcttgtaat

SEQ ID NO: 2892 - DNA, 4001 bp, Homo sapiens
ccagtaattatctgtggaggaaatcatagatattagggacaggtggccatttagaatcaatttggttagtgccatatgttattctaacagtttgttgttaccattgctttacattgaaggcaaattttaattttaaaaatttgagagatattataattttaaaccaattgtgccatctaatggacccttaagactcccattagatcctggaggcatgctctaattttatatttaggttgcacaaataactgaattaagcattttcatatttttattttttctcatttttttgcataatcttgatgtataaataagaaatataaatgtgttcatatgcataaagtgcctacacatgcaggcatgtgtgtgacaaaaaattacaactgttatttaatcctaaagcatataattacaatataattggcaaagaataatatacgtatctataacgtgaaaaacatacatatatataaaatgaataagttaatgaatccttatttgtaatgtcttttctagataagactaagataaacagcttctgccttatgaagtttatatatttaatgtttatcttaggcaataacgtggatcttgtcaagtcacacaatttagaataatggtagatgcaaatagtttgctgttgattaatgtcccattttaattaaggattgctctgatttagaaactgggttcactacaggatagcaggcaatagctctgcaaatgctgagattaacacaatttaagatttaaaggattatctaccaaactcagatacaccaattcaattattcttgggtggattttttttcttttggcatgcgtgtttcaataaaaactaacaatgataaaaatgtaaaattaattagtgcactggagattgtatcaaagggtgtagattgactatacaattttactcttctactttccaaaatcccttgaaatgaaaaaaatcaaaagaacaaagtaggatagaggagagaattggggggggaggtgtgcactactggtaagaatgactacatacacactacacacacatacacacgcacacataccacttctaaatgaacatcagaaagatgaagagtgccatcaaccaattgcaaattttgaggaatccctgaaacataaagagaagattaaaagaattataaagaaaaaaaagaacataagaaactggtgccctaaacttttgtatcctcagatcttctgctaaggttggttgtagcagtcctccaggttcacagttaatgattgtaagcaaggcagaggccacctggttgtccatctggatgattactggaacagatgggccatgactcccttatctcttcccagtttatgttaagcagtggtcattttaaaagagttagatttaaacattcaatttttagttgaaaaaagtaattaaaaaactctatgagtgggttgaattgagaaatggatagacttataaaggaaactagtgagctcaaaaatagatttctccagaatttaaaaaataaatatgttacagagttatgtgtaatgatccaggaatatttcaaatatattttcaatatgaaacccagagcatataaagggtgactagttgaggtgaagaaggtagagcacaagaaatgtgaaagtatgttatggtcattttctaaatggataataattcaaattatccttcaaaaattataatataaacatacacattaaatatatgtgggcaactattaggcctatgatgaataatgcttaaaacaaaaaagaaaaataggaaaagacaattcagtacaagagaataaaataaatgaaacccaatcagaaaccctgctagaaagaagactaaacaaacctaggtagcatccacttaccttttcagaaccatctactggtccctcagccacctctgtgatgaccattgctaagtggactataaccactttctacaaatgcaacctcaccctcacagaatcttacttcaatgtcagttccttgcatgtcactcactcatgcttccagttctcaacactttgctattcacatataagtacaggaagcaaagaatctacgtcagtgcccacctatgtccaaccgaaatatgtgtgtgtaggggtgggtggtggggcagaattaaccccctatcagccagacttttgagtgatgggcaacagatgtgtgtagataaattatcctctctgtctcctttgggcacacggttctgagccacagtcatatagcttctgggggaagagatcctgaaggtcaaacatctgctttaccttgtaatgctcagccccatggcacattttctattggctctcccttcttccctgctttgctgtacttgatctcactacttctccctgggatcacactctaatggagcagaagcacaccagcctttgccacaggctccacttgctgggaatctcaacctaagaaatactaagtatgtttgtaggcataataaacatgagttatatttccttataaatcagaggctttaacattagggagagaaaagaagaaaaaaaaagaaagaagagaaaacaaatgaacaacaatcccatatctagctatatgttgtgtgaaagtgagaaagttaaaaattcgacaatataaagtataataataaaatgatggtaaaagtaaattgggcaaattttaacaaaaggcaggcattgaaccaacactgtgaaacccattgtaataccagaaaaaaaagatgaatgagacaagctaatcatattttacaatggtaaaagtaaaatcataaaaccttatatacataaaaaaacacagcatcaacatgaaatttttgcccttgtctatgtcctgaatggtattgcctaggttttcctctaggtttttatagtttgggattttacattaagtctttaatccatcttgagttaatttttgtataaggtgtaaggaagaggtccagattcaattttctgcatatggctagccagttctcccagcaccatttattaaacagggaatcctttccccattgcttgtttttgtcagatttgtggaagatcagatggttatagacatgcaatcttatttctgagtcctctattctgtttcattggtctgtgtgtctgtttttgtaccagtactaagctgttttggttactgtagccttgtagtatagtttgaagtcaggtagcatgatgcccccagctttgttctttttgcttagggttatgttggctatatgggctcttttttggtaacaattgaaacaaaagcaaaaaattgacaaaagggatctaattaaactaaagagcttctgcacagcaaaagaaactatcatcagtctgaacagacaacctacagaatgggagaaaatttttgcaatctctccatctgacaaaggcctaatatccagaatctatgagaaacttaaacaaatttacgaggaaaaaacaaccccattaaaaagtggacgaaggacatgaacagacacttctcaaaagaagacatttacacagccaacaaacatatgaagaaaagctcaacatcattgatcattagagaaatgcaaataaaaaccacagtgagataccatctcacaacagtcaaaatagtgattattaaaaagtcaagaaacaacagatgctggggaggttgtggaccaataggaacgcttttacagtgttggtgggaatgtaaattagtttaaccattgtggaagacagtgtggtgtttcctcaaagacctagaaccagaaataccatttgacccagcaatcccattactgggtatatacccaatgaaatataaattgttctattataaagatacatgcatgcatatattcattgcagcactattcacagtagcaaagacatggagtcaacccaaatgcccatcaataatagactggataaagaaaatgtggtacatatacaccatggaatactatgcagccataaaaaggaatgagatcatgtcctttgcagggacatggatggagctggaagccattatcctca

SEQ ID NO: 2893 - DNA, 4001 bp, Homo sapiens
tatatatcccaatgtagagtgtcatgtatttactattttggctttgttcagtgatatgcttagataattgatgtatgtgggaaactgatacacagaggaaaactataccaaaagctcaacattttttatttctaaacttagatacagcacagaaaatctaatgctgaaaaagattctcatatctgttattagaggtggtgtaaattatctgaatatgagttctgcatgatttcagttaactccctatgtttatgtatgatgggaatctaattatgcatcatttaatataccctggaaaccccattgcttttaaaagtcactgctaataaatagaggaacatgtttagtttatggtttatctatcactgaaacactctggcaaacggtaggtaaattcatgaagaagagacattgttgaaaattatattccttttgtaattacagtctatgcaatattattaaaggcctgagacataaaccaaaacataatataaatcataaaaagtcaggcttatcaggaatagtagcaaaaggtatgcacttgtatgttaatgagagattgcagtaactaaagatgccctgtcaggatatcacgttttttgttttagtttttttttttttttcataaaagagtttcagacgaatccatcactttccctcaagatgcaaaatatccacatagataataatacaattcaagtaaatggcaaaatatagtaaactttgattggaagtctggtcgtttataagccttcttggaaataagagcatcccgaataaaaacaaagagaatggtataagcatgacttgaaactaaaacagaagagtgaaattgtgagtttgttctttacctttaaccatgtgctgtcagaaaagcctcaaattttaaacaacacctgcattgaagagtgtctccaatcatctcactggttttgagttacatggtgatataaataaagacatgtgattttatactctctctctagtctttcatcctctctcactataatcactttagtataaccaccagttcaatgctcacaatgaaggatgagctttttttaaaaaaggataagagatccaaaattcatatgacaatgaaatcctgttatcagatttgtagtcaatttgatgctatttatttctagcagtttgcaaattcttccccagttctatcaagaaaattggcatggactggaaactcttctagacactcacaaaactttcttctggaaatatacctctgatagattctcagtaaaaaaaaaaaaagtcatgaagatgaaagaagtgttcagtggaaactattctttccagtctacacacacatgcagagccaaatgctttattgtgactcaaccttcaattcaaactcaaatcaagtaggtatgtccactgtcagtaccccgatatatcaatgcccatgtgttaggtagatgaatgaagacacatgtgcagaagcagagggaaaaaccagatcctaccttgattgtttttgagggttgacacttgatgtgatgggacacgctggcagtttggttcatgtttcaggaccctggacagtgcacaatcccaggcggagttccagaatgaactagagatcaagtctcctctattggacttcagtaggggctgctgctgttgctgctgccgctgctactgctgttgcttctgctgcttctgtttctgctgcttcctcactccggaggctgaaacgctatcagattggaggaatctgtatctcacttagccctaaatagagcatttacttggttcatcagtctcaaagctcttggcaatatgcaatagaaagccaaaaacggtttaaattcacttgcagtgtaccttttcagtatggagatgtgacagctccacagtacagccaatgatcctggctctcattcccctttcaaagggacgaaaaccagaaaacatacagagatcaattgcagtcctgcagtttaaaggggcactctcaactcctctgtctctccagattatagtttttccagtgcaaaatatttctctctctctctctccctctccccacccctaacccagtttaaaaaaaaatcataacatcctcattctgttactaaattttattccttcctgggtacttcttgcaatcaaaacacaagtaaatgctgtggaaaaaaaaaaaaaaagactgttggcagtttcagaatttgggggttttatatctataggttgaaggactgatattccctatggatatttttaaaatttagccataacagccagccaagagactgtcctttctgtaaggtggcagaaagcttaaggtatatttaaaaagttttcaaatacaatagttattgtagtttttggatatcgcaccaaagctagacaatgtttttattttcaacctttatttttgaccattgctttccttgaagccgtattttttgaatgcctgggacaaactggtagttagctcatgccagtctaactccccaaatggtcacctctctgtccctaatgtcattttaggcaaaataaattataaatatttgtaaattaagttttccgagtcaccagtccccattgtcacatcaacactaactagaataaatatatcctggttggaaataagatccagtagtcttgagtaaatgcaggacactcttttccaacttttgttgcaaagtgtttgatgttgaaaaccaacagtatttattcatcagaaatgtatcctactaatgaaatgctaggtttataagattgaactaacgaactacattcaggaggcttttatgaacagcctaaaatattacagataaactttaatgtgaaatgaaataaattaatgtttggtgaaattaatttatacataattataaacacatattttctcttgtaaaacagaaaagggatctaaacattctgacaaagtagtctgcacatgtttgaggatggctaagtttcagaaggttatagttctgagtagcaaagtggaggtaaggatgtgacagaagtaagatcagactgtttgcagccacaaaagttaatggcaagagtattggagaaatcaggagaatcatgggaaaagagatggagccaataagaaccaggcaaaaggctgtgtgcaagaatctggtgtagcaatatccaggcatcatattgagcacaaccagaggcagccatagggccaacaaatctcatgatttgaagtttacaattctaaatcacaaatgtgactggaatttgtggcttatcttgtattttgcttgaatagcattgctttgaataattcataaatcacaaaaagagtatattaaaaatgtttaaacattttgtattcaacaataatgaaaacaacacagaaaatttgcagtatgcagctaaatcaatatttaaaggaaaatgtatataattaagtacctataccagaaatgcagaaaagcataaaattaataattaataagctaattattcatatcaaagagttggaaaaagaatggcaaaataaactcaaataaattataggggggaaacaataaagagaagagaagaaagtaatgaagtaaaaaacatacaaaatactcaatgaaaaaacctatgaacatttcatcaggtggtttacagtttgataatctctgaataaatgaatgttctataccagtagaattggcttaattcctttcttagatagcactttgtactaggtatctaagaaacttccaaactaaattatctggggagcccagggagggagagcagtccaagagttcagagtatcccatccccatcaaagaactgtacaggatggaaggagccactagtacttcaaggaaccctctccaggcacattgatagagacagcatttatatgcctaccacaaagagggtatgagttgctggatttctacaactataatcacatgagacttcaccccttttctacaatttttcaaaaaggttctacccccacctggatggcagcaggatccaagaaagatattgacactaccatttat

SEQ ID NO: 2894 - DNA, 4001 bp, Homo sapiens
cctcagttgactaaatcttccagagagaatgctttaactggctgactaatttatagtgtgtaatgctgaaatgaaagcaagtgtttaaaaggaaagtaaggccaggggagactgaaactagtagttctcacttgcttgcatcctacagtgagtattccattatgtgagtgttttatacatttaggcaagctaaaaagacatgaaagtccttaaataaaagaatccaccaaaacatcactgattccagacccttcttaaatattatcgtgtataccagctttattatttagctctgcaatactgctaaattggtcaattacttccctgcctccccaccctccaactgaattctcaccacccttgagggaaaacagtctgggttccctgtggaacatcatttctcaaaactgtattttggggcttgctttctcatttttcctttccatttcagatatccttactgctgtctttgggctctttaaacactgccttttttcctttttcgatcacacccaaaaacttttctcaaaaattacatgtaaatttaaaaatttacaaattaaatttaaaattgaaattttaaaaatcccgactctccctaatttcaggaagcatgcatttattatacataacaagacgtgaaagccgcaagagtttcagcctaaacactgaagaccccgcgaagtgaatccagctgctgctctacaagcagcaacaacaactgggaagccttctcagctacacttcggggcactggtccaaccccacgcaaaatccctcgtttcccttagcgtggtaagacggagcctgacctgagctccaactgtcctatctttttcaaatgtttcaaacttactgcctttgttcagcagaaccacgggcacggtgatgatggtgacaagcgcagcagcacccagcagtcccagaagaaccttccacggtgtctgcaagccgagcagatcaagtccaattagagggaagcgtgtggccccagtttccgtaggagggtcggggctgctccagaggcagcaggatttgcaggtgggagtgcgttagaagagggagaccgcgggctgggggtgggggtggcgtctggagtgcgccagttggagttctctaaggcgggtgcccttgaacttgtgccttcagagcacattagcgttggtttctctacccctgcccgggttcgggcgtgcgttctgtgagtggctctccgggacattcaaagctcgacgccagggtcctagcagaagccagggtccgaaagctaagcgagagctctgggacgtcccttcacctgtcagagggtggccttggggcttccgcctaaggggagtccctggtccggtttcgccagcttttgggccatttggggagtttggcgaagaggtccccacagctcgccccggggacgtacgtggcgcggcactcaccttcatcgtcggcgtctcctcggaagtgagcgttcagagaaggagcgcaggcagaagtcaccgcgggcggcggagacgcgcgtcctgcaccgctgctccgggcggtggagtcactcgccgctggcaagtttcggccccgagttaaacattagtgagcgccgagcccgctgggtataaaggcgccgcgggcaggctgcagggcaggcggcgcgggagcaggcgcgcgtggcgcggggcactggcatcccggccggggggagcccgcgagggccccctgagggcggtgtagggcgctgggcggcagccggggcgcagagtgcggggcccggaggagccgtgggggaggggaaagggcgcgcggcctcggatgcgcagaccctgggccggcgactcggggaccctgctccctcttagctaaaaatgacgtcggcgttcagctcctccaacctcacgtggacaggcgagggaaccgagacccagagagggcaggggactttggcaaactcacacagcccaccgcaggcaactggaactgaaacccaggactccgtctcttgccagtgaaagttatgttaggaagcagtgaggggtctaaagcagtatgaaaggcaaagagaaaaggtgattgttccctcttgaatggcccttggaagctgagtatctggattcaccctccctagggaatttcccgattgtcttgcaggcttacacactcatcaagatgacaaaaataatgacagtaacacttatgtggaacttgactttttcccaggtgctgctctaagcatttactgtgtttgttttacaggaaggaagactgtacacagagaataaataacttggccaagccattcagctaggaagttgtagatcctaaattaagagttcaaggtcttaatggctactctatgcggcctctcatagtcttttcaagggttttggagaagaataaaagatcaggtatggcttctccctcccccagctctctattgttccctaaaggattattcattcgttcattcattcctacatcctcccatttattccagtcatccacagatgtttgagtggttacaatgtgccagcctcccttctaggtactggagataaagtgggacaagagaggtgaggtctggacccttggcactttcacgataaaatacacaggtaaacatttgcctttagggccccctgtgattacttccactcttgcagataagaggataaggcctcttcagcttgttcacagcagctgaaaagcaaagcctctctgtcagtagaggtaaaagattaagaatgcagagtccgatggggcattaccacatgattatgaattaatgcaattttccatcttttatttccaatccaggcattgcttttgaactcagtcatcttttcccccttgcccactagttgcttgtgatacatcagtatcctcactcacccccaactccagaggctgaaactaactctcctcctccctcttccaactgctgaggaagatgagtcaatggtgttactggaccctgtgaactgatgctgtgaagagaggccatttaacacggactacggggaatggtgccacagggggctcagtgctgcccttcactctcagcattttgctcactcagcattggtaagccacatcagcctcggtgaaggaagtctggagagttaagcctgtgcttcatctccatgccagcaccatggcactcattgtacattcagcaagccccaaggaagctggcaggaggctggctgacatctacgggacaggtcaatttgttctctggagggcactccatgagacgcaaatatcttcacaccctgtgcccatttcaagagactctctcacatgcctcccccaccttgacctctgtgtcaccagtctttcaatcttgttttttccaaatccttaaggtagcagctggccaacacattagccaccactgatgagtcagtgtagatcttacattgggccatctcttttttcttgcaaaatagaaaagcagatgttctgctcaaagttctgtttgtcagtaagatttccctttctgctgtgtttcaggacatccctgggagggactctgatgcagcagccatctacttattgctagtgccagcttactttgcataacattgactcctttccctcatctgttgcctagttgtaggaaactccttgtgaagctataggtgtgcactgagggagagacattgagtcaatgggagcaggcatcatagagtctaagttttctgctagtctgagtttcttgtgccttgtggacctggtgggcttatctcctttatcatatagatacaattttcgcttaataatagcatgctcctgcaaatgcccaattttatcatgtggtagattaggcaacactcagtttattagggtagctaggttgtgcagttacttgatgttatggattgaattgtgtccctccaaaagatatattagaatcccaacctttaggacttcagagtgtgacattatttgaatatagggtctttacagagttaatcaatttttttgaatcttatatagcttttatttcagtg

SEQ ID NO: 2895 - DNA, 4001 bp, Homo sapiens
ttcctcacctcaagtgatctgcccacctcggcctcccaaagtgctgggattacaagcatgagccaccacgcccagcctgtatgctttattaaaaaaaacaagacatgtgtgattcagtttggataaatgagagtaacagcatttctaagcacagtaataatagtaatagctgttaatattaatattaatattagccacacacactcttaagtaatttgcttctatcttcagccccataaggcccagagaagttcagtaacttgttcaagatcaccagaaagtatgttgggagctgtattttcaacctaggcaggttggcatttttgcagtagaattaacttgtattgctcattttctttctttttttttttttttttttggacaaagtctcgctttatcacccaggatggagtgcagtggcatgatctcggctcactgcaacctccacctctcgggttcaagcgattcgcgattctcctgcctcagcctcccgagtagctgggattagtagagaggaggtttcaccatgttggccaggctggtctggaactcctgacctcaggtgatcagctagccttggccctcaaagtgctgggattacaagggtgagccaccgcgtccggccttattttgaggggggggggggcggggggagggaaatagggacagggtcacatgctgacacccaggctggagcgcagtggtgcgatcatagctcactgcagcctcaacctccccagctccagcaatactctcactccagcccaggagttactgaactctaaaaagaaataaatatttattaaatgttgactccaccagctcactattctgctacaaagaccaacaggtttcctaattttattttttacttttttttttttttttttttgagacggagtctcactctgccgcccaggctgtagtgcagtggcgcgatctcagctcactgcaacctgtcttccagattcaagagattctctggcctcagccacccgaacagataggattacagtcatccaccatcatgcccggctaatttttgtatttttagtagagacggggtttcaccatgttggtcaggctggtctggaactcctgacctcaggtggtccgccagccttggcctcccaaagtgctgggatgataggcgtgggccatcgcgcccggcgaagggtttcttaattttaatatgcggtttttacgtagcaacatcccaaaagatcgattaaaagccaccaagaaaaatgattcagacagtatccctcaagaatatgtgtttcgcaataaaagttcaatcctttgactcaaacgtaatttgtacgtctgtacaccaagaagcattagtactgctaataaaacaagctacccataacttgatactattcagttcacgataacaaagttttcccttgtgcatagccacctagtaaaagcagatcccaagttttctccagcttgcaagagacaacacagatgaggcataggaacttggcgagttacctcaacgttgtctgtgagaccgtactcagagtgaggattttctgcaacctagaaaacaaaacaccggtcacagagatataagtcccccctttctcgctgcctccctgcacaccgccaccctgaatccacggcctcctgatacctgcgtttgtccctccagcatctgctctggctccatggcggaccctgcaagtcacagtccccggataccagtcttggaaaacaagaagagccgcgagttacctgggagatttcaacacgaagactccaggatggagtgcagcccagcccccgaccccgcccctcacccccacctgggcgcgggagcaccacgagcagtagagcagcagagtgggacagtccacgactgggcgcctacatggggtctggaaactctacgacagtcccaagtacctagaataagtgagaaagtgggggaaagggagctgattacccgcgcccaagccgttcgttcttaagagccctgcaccgcgccaccagctcccagcacaaacagctccggccgtaagtgacggctgtcgcacgactgccgcgcctgcgcagaacctcccggcggacaagaagctgggaggcgcgcagaaccatcgtcagtccccgaggctctctgcagtccgcgtgagtcctggccaaggtctggcctcggaagctacgagctacaatcttccttcatcctacccacccacgaagagcgccaccccagctgcagaccaagtgaccagcccagttagaaggggctcggccggatcaaacctcggtgctgcctcaaagcatctgctgaagctcttcctcgaccaactgaacttcctcactgagtggttcttactagaaaattataagcccagtctgacagtctctgaaagaatgtcagtgttttactgtaaagccaaagatgggggaagaagcagttttgggggtttcctgatcagcttttattcaagcccttaaatctgtgaatatgcgatgttaatgccaccttacatttgtattagattagcagtatgcaactggctttccaaaccgtggtcctactgatagtaatgtagttgtaaaacgtacataggataatttgcctcctacacagtgtgtaaatagcaaacaacatctctttacttggattttttaaaattccaataaattcaatttattttaatgtaaacaaaagtgataacacgcaaacttcctgcctttgacacaattctatttgtaattgcactttgtaatatgaaaacttgaaaacatttggagtaaatgatggcataacaatatggtggaatataagcgattaaaattaaaaattgtgactacatatacagaaatatggtgtaccattgagttttacttccagctggcgttagactacaacttaatattgctactctaaaaaatcgtggatacagatctaaagtaaataaaatttggttaagagctagacatataagtaagtttttaaagtttcgcagtgtatacttaaatagtattgtgattggtgacagctgtcatgtggaactttgaagatttttcatgtaatgctgattcaaacgtgtatgcctatgtgcaggatgtataaattgcctagtagatatattaaattaagattaaatgcttttcaagagtgtgaaataaaaagggcatacatacaagtagagaatgattgggacttttttttttttttttttgagacagagtctcgctctgtggccaggctggagtgcagaggcatgatctcggctcactacaacctccgattccctggttcaagcgattctcctgcttcagcctgctcctgagtagctgggattacaggcacgcaccaccacgcctagctattttgtgtgtgtgggcgtgttttgttttgtttttgtttttgttttgagatggagtctcactctgtcgccaggctagagtgcagtgaccctctttttttttttttttttggctcactgcaacttccgcctcccaggttcaagcgattctcctgcctcagcctcccgagtagctgggactatagacgcgcgctaccacacccagctaatttttgtatttttagtagagacagggtttcaccatgttggccaggatggtctcgatctcttgacctcgtgatccgcctgccccggccttccaaagtgctaggattacaggcgtgagccaccgctcccagcatatttttgtgtttttaatagagacagggtttcaccatgttggtcaggctggtctcaaactcctgacctcgtgatccgcccacctcagcctcccaaagtgctgagataacaggcatgagccactgcgcccagcccttaatttacattttctaagtactgacagttttggtaaagtagtaaactagaagagctccttcagggcaggggaccatgtcttagatatctttatacttcacaacatgctaaatacattgtaggtgcagaatacatattaagttgggctggttcatagtcaaaatttgatattaatatatg

SEQ ID NO: 2896 - DNA, 4001 bp, Homo sapiens
tcacagagctaccccagtcttaggtcagcagacaatatgggcgaagtctgcaagagacgcactggcttgggtgtggtcactggcaaagaaaagcactggacccctagcagcggctcccaaacctagagcctcacccttgcgggatcatttccacccgcttctccgcaatttgaccacaatccgcaccagcccttacggctccccctgagaaagcacagctgcagcccctagactacggccgcctcggcagacaaagccgctgctcgggggaacccgcgctgcaccgaggcgacctccagtctttggcacctgcgtcgccgcccggcagctccgcgccgctaaccacgccgcgtctcggcagcgggtggacagcgcggggcgggcggcggcgctgcaccagaaggcacccgagccggagtgggggggtggctgtctgcaggcccccaggccgggggagcgcctcccacacgggattcccggcgtggccaggcccccataaaaccccaaagccagcacgtgcccggaggttccgcagggagtattcccagcaccagaaaactgcaccctcgcgtcctgggtggccctggtttgtcgtcggatggacaccagggtcggctattgttctccgggtctccccgaagggagatccgcctccctggcagcacctgctgctgggcaaagcctttcagctcctcgagaaaagggcgtgccgtgggcgccgcggaagatcacaaaaccctaagcgagtcgctaccggctggtttcaagcctggagacaaagctcctcaccaagccagcccagcccggtcccggatctgccatcctgggtccctaaccccggtccgagggccacgcccagccggccacctgggccgcggggccccgcgcctggagctgaggatcctcgggcccgagaccgcctctcagctgcttgcccctccctcctcgggaggctccccttcccaggaggcccccctcccccgcacagcgcgggtcttctcctcgctcccgtcctccctcctcaaacccaggcggcctccacccgcctgcatccctcctcccctccccattcttcagcagaaccagcctcgccgggcgccacctgcaccgagctccttccctcgttcttcggacccgcccccgccccttctctttcctcctcaaaccctagttcccactccctgctccccgagacccactacctgtcctaacccagctccccagccttccccatccccatcttttctcaaccgaggcctcccctcgccctctcccggcttctctccagctcagactacagccccgtccccaggcccggggcgtcgacgtcggtgcccgctgagatcgatgctgcaaggcgggctcccgcgctgggctccagccgagggacccggctcggcgcccgctccgggctgggcagccgcaggaggcctttgtggctcaggcgggaggctcggaggcggcgggcgagtcctctgcaggcgtccgctccgttagccgggcggtggaacagaccgccgggtcgggtccaggctgggcagatcccagctcggaggcgagaaggacggagggtgtgtatctgggtggtgtgtgggaccggggacagcgcagatcctgggaccggcaggactggcccccggccagaggcgcccccgcccagccctccagcggtccactgcaccgcgcccggctaggaaagcggcccactgcgtgctaggcgcgaaacccctcggccgagccgcctcctcaccccagggctttgcaaccccgcgagcacgcattaaacgcttactatgagcaaggcccggcacggcgcttcgcgggcgtacaaagaggaccccaagagcgccccggcttagccccgatggccacctcccaaccccaaaccacacctcccgccgcgtcccctgcggccgggccccaggctcacccggctccccgcccttttgtgcgcctcacgcagaaacagaagggggagaggaggatgtcctagcccgggaggggtaagcccaccgacccccctgccatcacccactcctccgagatgctgcggccgcgggggcccgtggctcggtccgtctccgtctcgccgcggcgccggagctgcgggtgctcggggcggcggcggctgcacgcgcgctcgctcgggggccgcctcagcgcgcccagcgcgggagtccagagtggggagcgggggaggggcgcgtgtcgggggctgggagcggcctccgccaatcaccgcgcggccggctcctcccgccgctccccacctcagctagcaggttaaggggaggcggggacaggcggcgtcccgcatccttggcgccgcgcgccgccgccgcctggggactacaactcccggcaggccctgctgcagggccggggtccgagagcggacggagggcgcggccggagaactcaccgacccccctagcacccggctccgcgttccctcgggtttccatggcgactcaggacaccacaaagcctggacgcgctgaggcacgggtccccagggagggccgggggcggttccggaggacaccccgcctcccctcccccagctggatcccaccccaggggctgaaacaatgccgcggccgcctctcccgggctgcggccgcgctgccctccgccgcaggaccccgccgaggccgcctggttcgcgccaagacccgctccgacgcccgcgggattgcgggatgcaaagggccgggtgggcgttataggaaaactgttctcatgaacaaagtggacggccacttggggccaccgcagttcgcatctgcacccggggaggtctcgaacccggagtgcgttctctccactgagaagattttgcccagcgccacgcgggtgcttccctgtccagagcgctcaggcccagtgcctgtcttatttctggcttctgtcaagggacagcgaagcctttggaaattatttataacccaatttacattcgcttcacctgtttcttcatgtttaaatacatacataatttaccaaaataaacaaatctaaaaaaggagaggaaggatcatccccggtttgtcccacctccctagctaatcccggttcaagcctttgccattgatctgtgttattttctgcagttgtaataatagtttggattagtcatttgcctctttgcacttaatgtcactccaaaggcgttgcgatgcgcgttaaaatgcagcatcaaggacctccaagctgcagctgcagaatccctccctccccgggctccccggcgatccggtggggagaggagtcccctggcagccatggcctcgtgaggtggttctctttgcaggatactttcaaacaaaatggtgttcactactccgggggcgtggagggggtcccctctccccatctcagcaaaatctacccgggcgcaggacccgcagagcccgccaaggcggggttccctgccgtccttccccagagagcttagggcctggaccaggccaggctggcctttgagggatgcatttctggattaccccacccctgagtctgcactccttctccccttcccaactcccgcctgcttggtaagcagagagcagggagcccccagaggaacctcaaagcatccctaacccagtgcagcccgggatgtggctgtgaaaactgctccagcttggggcactgccctatggattctccagggcttgcccggacagggatgtaggcaaaatggactgggcttcagggaggtggcgtggagctgccagcggcctcccggcggcggggttccgagactaccgcgcgcgggcggtgctgcgctttttgcttaagggagagagagccctctagtgactgtaaatgttttctgcagcgtctcgtagaccttaaatttggattctagcatcttagctttcttgggctaccttccctagtcagcgaaacggctgcctctacgtcatctgtcagtttaggatattgataaaggttgcacccaaaccgggggttgcatatgtcctcagtcctcgact

SEQ ID NO: 2897 - DNA, 4001 bp, Homo sapiens
gtcaaggcgctgcagcggtgacttgcaaggtgtttagacggcgggcgagaggctgagtgcgtggaaagccctgctgaaagcctgttttaagcttccattcggttcatctgctttcccacgggcaagcagcgcctatcacagagctaccccagtcttaggtcagcagacaatatgggcgaagtctgcaagagacgcactggcttgggtgtggtcactggcaaagaaaagcactggacccctagcagcggctcccaaacctagagcctcacccttgcgggatcatttccacccgcttctccgcaatttgaccacaatccgcaccagcccttacggctccccctgagaaagcacagctgcagcccctagactacggccgcctcggcagacaaagccgctgctcgggggaacccgcgctgcaccgaggcgacctccagtctttggcacctgcgtcgccgcccggcagctccgcgccgctaaccacgccgcgtctcggcagcgggtggacagcgcggggcgggcggcggcgctgcaccagaaggcacccgagccggagtgggggggtggctgtctgcaggcccccaggccgggggagcgcctcccacacgggattcccggcgtggccaggcccccataaaaccccaaagccagcacgtgcccggaggttccgcagggagtattcccagcaccagaaaactgcaccctcgcgtcctgggtggccctggtttgtcgtcggatggacaccagggtcggctattgttctccgggtctccccgaagggagatccgcctccctggcagcacctgctgctgggcaaagcctttcagctcctcgagaaaagggcgtgccgtgggcgccgcggaagatcacaaaaccctaagcgagtcgctaccggctggtttcaagcctggagacaaagctcctcaccaagccagcccagcccggtcccggatctgccatcctgggtccctaaccccggtccgagggccacgcccagccggccacctgggccgcggggccccgcgcctggagctgaggatcctcgggcccgagaccgcctctcagctgcttgcccctccctcctcgggaggctccccttcccaggaggcccccctcccccgcacagcgcgggtcttctcctcgctcccgtcctccctcctcaaacccaggcggcctccacccgcctgcatccctcctcccctccccattcttcagcagaaccagcctcgccgggcgccacctgcaccgagctccttccctcgttcttcggacccgcccccgccccttctctttcctcctcaaaccctagttcccactccctgctccccgagacccactacctgtcctaacccagctccccagccttccccatccccatcttttctcaaccgaggcctcccctcgccctctcccggcttctctccagctcagactacagccccgtccccaggcccggggcgtcgacgtcggtgcccgctgagatcgatgctgcaaggcgggctcccgcgctgggctccagccgagggacccggctcggcgcccgctccgggctgggcagccgcaggaggcctttgtggctcaggcgggaggctcggaggcggcgggcgagtcctctgcaggcgtccgctccgttagccgggcggtggaacagaccgccgggtcgggtccaggctgggcagatcccagctcggaggcgagaaggacggagggtgtgtatctgggtggtgtgtgggaccggggacagcgcagatcctgggaccggcaggactggcccccggccagaggcgcccccgcccagccctccagcggtccactgcaccgcgcccggctaggaaagcggcccactgcgtgctaggcgcgaaacccctcggccgagccgcctcctcaccccagggctttgcaaccccgcgagcacgcattaaacgcttactatgagcaaggcccggcacggcgcttcgcgggcgtacaaagaggaccccaagagcgccccggcttagccccgatggccacctcccaaccccaaaccacacctcccgccgcgtcccctgcggccgggccccaggctcacccggctccccgcccttttgtgcgcctcacgcagaaacagaagggggagaggaggatgtcctagcccgggaggggtaagcccaccgacccccctgccatcacccactcctccgagatgctgcggccgcgggggcccgtggctcggtccgtctccgtctcgccgcggcgccggagctgcgggtgctcggggcggcggcggctgcacgcgcgctcgctcgggggccgcctcagcgcgcccagcgcgggagtccagagtggggagcgggggaggggcgcgtgtcgggggctgggagcggcctccgccaatcaccgcgcggccggctcctcccgccgctccccacctcagctagcaggttaaggggaggcggggacaggcggcgtcccgcatccttggcgccgcgcgccgccgccgcctggggactacaactcccggcaggccctgctgcagggccggggtccgagagcggacggagggcgcggccggagaactcaccgacccccctagcacccggctccgcgttccctcgggtttccatggcgactcaggacaccacaaagcctggacgcgctgaggcacgggtccccagggagggccgggggcggttccggaggacaccccgcctcccctcccccagctggatcccaccccaggggctgaaacaatgccgcggccgcctctcccgggctgcggccgcgctgccctccgccgcaggaccccgccgaggccgcctggttcgcgccaagacccgctccgacgcccgcgggattgcgggatgcaaagggccgggtgggcgttataggaaaactgttctcatgaacaaagtggacggccacttggggccaccgcagttcgcatctgcacccggggaggtctcgaacccggagtgcgttctctccactgagaagattttgcccagcgccacgcgggtgcttccctgtccagagcgctcaggcccagtgcctgtcttatttctggcttctgtcaagggacagcgaagcctttggaaattatttataacccaatttacattcgcttcacctgtttcttcatgtttaaatacatacataatttaccaaaataaacaaatctaaaaaaggagaggaaggatcatccccggtttgtcccacctccctagctaatcccggttcaagcctttgccattgatctgtgttattttctgcagttgtaataatagtttggattagtcatttgcctctttgcacttaatgtcactccaaaggcgttgcgatgcgcgttaaaatgcagcatcaaggacctccaagctgcagctgcagaatccctccctccccgggctccccggcgatccggtggggagaggagtcccctggcagccatggcctcgtgaggtggttctctttgcaggatactttcaaacaaaatggtgttcactactccgggggcgtggagggggtcccctctccccatctcagcaaaatctacccgggcgcaggacccgcagagcccgccaaggcggggttccctgccgtccttccccagagagcttagggcctggaccaggccaggctggcctttgagggatgcatttctggattaccccacccctgagtctgcactccttctccccttcccaactcccgcctgcttggtaagcagagagcagggagcccccagaggaacctcaaagcatccctaacccagtgcagcccgggatgtggctgtgaaaactgctccagcttggggcactgccctatggattctccagggcttgcccggacagggatgtaggcaaaatggactgggcttcagggaggtggcgtggagctgccagcggcctcccggcggcggggttccgagactaccgcgcgcgggcggtgctgcgctttttgcttaagggagagagagccctctagtgactgtaaatgttttctgcagcgtctcgtagaccttaaatttg

SEQ ID NO: 2898 - DNA, 4001 bp, Homo sapiens
gcccttacggctccccctgagaaagcacagctgcagcccctagactacggccgcctcggcagacaaagccgctgctcgggggaacccgcgctgcaccgaggcgacctccagtctttggcacctgcgtcgccgcccggcagctccgcgccgctaaccacgccgcgtctcggcagcgggtggacagcgcggggcgggcggcggcgctgcaccagaaggcacccgagccggagtgggggggtggctgtctgcaggcccccaggccgggggagcgcctcccacacgggattcccggcgtggccaggcccccataaaaccccaaagccagcacgtgcccggaggttccgcagggagtattcccagcaccagaaaactgcaccctcgcgtcctgggtggccctggtttgtcgtcggatggacaccagggtcggctattgttctccgggtctccccgaagggagatccgcctccctggcagcacctgctgctgggcaaagcctttcagctcctcgagaaaagggcgtgccgtgggcgccgcggaagatcacaaaaccctaagcgagtcgctaccggctggtttcaagcctggagacaaagctcctcaccaagccagcccagcccggtcccggatctgccatcctgggtccctaaccccggtccgagggccacgcccagccggccacctgggccgcggggccccgcgcctggagctgaggatcctcgggcccgagaccgcctctcagctgcttgcccctccctcctcgggaggctccccttcccaggaggcccccctcccccgcacagcgcgggtcttctcctcgctcccgtcctccctcctcaaacccaggcggcctccacccgcctgcatccctcctcccctccccattcttcagcagaaccagcctcgccgggcgccacctgcaccgagctccttccctcgttcttcggacccgcccccgccccttctctttcctcctcaaaccctagttcccactccctgctccccgagacccactacctgtcctaacccagctccccagccttccccatccccatcttttctcaaccgaggcctcccctcgccctctcccggcttctctccagctcagactacagccccgtccccaggcccggggcgtcgacgtcggtgcccgctgagatcgatgctgcaaggcgggctcccgcgctgggctccagccgagggacccggctcggcgcccgctccgggctgggcagccgcaggaggcctttgtggctcaggcgggaggctcggaggcggcgggcgagtcctctgcaggcgtccgctccgttagccgggcggtggaacagaccgccgggtcgggtccaggctgggcagatcccagctcggaggcgagaaggacggagggtgtgtatctgggtggtgtgtgggaccggggacagcgcagatcctgggaccggcaggactggcccccggccagaggcgcccccgcccagccctccagcggtccactgcaccgcgcccggctaggaaagcggcccactgcgtgctaggcgcgaaacccctcggccgagccgcctcctcaccccagggctttgcaaccccgcgagcacgcattaaacgcttactatgagcaaggcccggcacggcgcttcgcgggcgtacaaagaggaccccaagagcgccccggcttagccccgatggccacctcccaaccccaaaccacacctcccgccgcgtcccctgcggccgggccccaggctcacccggctccccgcccttttgtgcgcctcacgcagaaacagaagggggagaggaggatgtcctagcccgggaggggtaagcccaccgacccccctgccatcacccactcctccgagatgctgcggccgcgggggcccgtggctcggtccgtctccgtctcgccgcggcgccggagctgcgggtgctcggggcggcggcggctgcacgcgcgctcgctcgggggccgcctcagcgcgcccagcgcgggagtccagagtggggagcgggggaggggcgcgtgtcgggggctgggagcggcctccgccaatcaccgcgcggccggctcctcccgccgctccccacctcagctagcaggttaaggggaggcggggacaggcggcgtcccgcatccttggcgccgcgcgccgccgccgcctggggactacaactcccggcaggccctgctgcagggccggggtccgagagcggacggagggcgcggccggagaactcaccgacccccctagcacccggctccgcgttccctcgggtttccatggcgactcaggacaccacaaagcctggacgcgctgaggcacgggtccccagggagggccgggggcggttccggaggacaccccgcctcccctcccccagctggatcccaccccaggggctgaaacaatgccgcggccgcctctcccgggctgcggccgcgctgccctccgccgcaggaccccgccgaggccgcctggttcgcgccaagacccgctccgacgcccgcgggattgcgggatgcaaagggccgggtgggcgttataggaaaactgttctcatgaacaaagtggacggccacttggggccaccgcagttcgcatctgcacccggggaggtctcgaacccggagtgcgttctctccactgagaagattttgcccagcgccacgcgggtgcttccctgtccagagcgctcaggcccagtgcctgtcttatttctggcttctgtcaagggacagcgaagcctttggaaattatttataacccaatttacattcgcttcacctgtttcttcatgtttaaatacatacataatttaccaaaataaacaaatctaaaaaaggagaggaaggatcatccccggtttgtcccacctccctagctaatcccggttcaagcctttgccattgatctgtgttattttctgcagttgtaataatagtttggattagtcatttgcctctttgcacttaatgtcactccaaaggcgttgcgatgcgcgttaaaatgcagcatcaaggacctccaagctgcagctgcagaatccctccctccccgggctccccggcgatccggtggggagaggagtcccctggcagccatggcctcgtgaggtggttctctttgcaggatactttcaaacaaaatggtgttcactactccgggggcgtggagggggtcccctctccccatctcagcaaaatctacccgggcgcaggacccgcagagcccgccaaggcggggttccctgccgtccttccccagagagcttagggcctggaccaggccaggctggcctttgagggatgcatttctggattaccccacccctgagtctgcactccttctccccttcccaactcccgcctgcttggtaagcagagagcagggagcccccagaggaacctcaaagcatccctaacccagtgcagcccgggatgtggctgtgaaaactgctccagcttggggcactgccctatggattctccagggcttgcccggacagggatgtaggcaaaatggactgggcttcagggaggtggcgtggagctgccagcggcctcccggcggcggggttccgagactaccgcgcgcgggcggtgctgcgctttttgcttaagggagagagagccctctagtgactgtaaatgttttctgcagcgtctcgtagaccttaaatttggattctagcatcttagctttcttgggctaccttccctagtcagcgaaacggctgcctctacgtcatctgtcagtttaggatattgataaaggttgcacccaaaccgggggttgcatatgtcctcagtcctcgacttcggtttgttgttgctaacttaggctccgtttcctgggaagtagaaagagcacagagctgggagtcccgcattgctgggttggaatccttgctccttcagtttctgccgacttgaccttgagaaagtgacttactccatctgacccttagctccacccagaatactggggtcatatacattcttttaa

SEQ ID NO: 2899 - DNA, 4001 bp, Homo sapiens
gcagaagcagcctgtcccagcagaacctgttgacattggtagtgggcagaggaatcagtgtggacactgaccagccccacaagctcagggaatcttctccccaagggacgtatattttgatattgaaggtcagaaaaatatgctgtgacttcctgagcctatggacccataactgtcaccccacaaccccgctgagaacactttgttcacaaggtatacgccagctgggaagtgaaatttttctgatgagggtgaggctgaatgtctgaggcccctggctgggattcaagggcttattttagccattgcaccacacacaatttagagtgagttggggccaggcacggtggctcatgcctgtagtccttacactttgggagaccgaggtgggtggatcacttgagcccaggagtttgagaccagcctgggcaacatggcaaaaaatataaaaattagccaggcgtggaggtgcgcgcctgtattcccagttacttgggaggctgaggtgggaggatcacttgagcccgggaggttgaggctgcagtgagttgtgattgcaccactgcactccagcctgggtgacagagtgagaccctttctccaaaataaataaaataaaaaagagtgagttgggctaagggagggtatggtgagatgccagaggaatgggtttgtttctactgaataaggggaattatattcgggtaaggcctgcagaggcccccacctgagcagggtgttgggccccgtgcagtcctcctgggggatgctgtatccaacctcatgacccagggtcaggtccatctcatcagcaacccgcagagccaggctccgggctgcaagagggtagggctgagtaacagtaacctgtcctttctggaaccctctggccagcgcaaactctgcacaccactgagggatctgggatagaagtagggaaggagagccagtgaggaagatgtaggacttcagtcagaagtgctcagggaactatggccactttaatctttccttatttggggagtcccctggtctttcaccagcctccagggccaacctaacccatcccatctctcttcgttcaccttcctcatgaccccacgcagcccagtccccccttgcccagggaaaggccactttccctttgtcctccctttgtcctccctttgtccactcccagaatctgcctgcccccacaacccccaccacacctgggtgctcttgccagaaccaggctccccagacaccagcaccactccagtggggttactctccaactgctccaagaaggtaaagcgagcagcccagatgggcaaggcttggcgctgcttcagcagctcatagtagcgggaagagaagggaagcccatcaaaggggttcacagccagttcagactccccaggacttgggccatactcttctgctagcctgagaggctgagaggtcatggtggctctctggcaggacctgcagaaggcagagcagccagtaaggtcatatttggtgaccgacaccatcttcccacctcagccctgatccttaacctctaccttcagttgatcatgctctggggcccacccttcccagcatttcctgccaggaaacagtgctaggtattttgataaagggctactgagagttagtcgacagtccctatagtcaggtagtagaaatctacctgagactattaccccgttggcaggtagtagaaatcttacttaggcaggggtcctcaagggcagtagaaattatgtgagacctagtaacctgtgggaaagtcctgaagggaaaaggataaagaatatagggggtggggagaggaacagcagagtcacagggatcctggattcaaacctgcttgcagctctaggacgtgtcaggacggcagtcagctccagacccacgtagtcaccaccaaccctgaccgtgtgaagtacaaaggtaaattccggctctacctcagggatgggctcaaacttcaaatcctgaagcctgcttttggggtggggctatttgctccaccttatttaacctagtcaggaacctatggaaaacaggctccagctaccacactgagcatgtgtgaactctatagatgatgtgtagtgtgcttgtgaaaggcatgctgggacttgtagttttgcagcagcttcctccaaaacctgggctgatcacccaagctgggtcttcagttcagttacacttccttaatttatcactcatcacttggcatgaggaggtgattttagacagttgcagtctgactacccccttcaaatgtacgagaagactctcacccccatcccccgcagccaaggaataaggaacccactcacagggcttttgagaccgagagagacaacagatgccttgaatgaaaaccatgaatttaatgtgacattgggggagcctcatccttccctttttaccacccacccatccagcctgttgtgagttgggtgagggctgcccccagtctccgtcctgcggctctgggtgccatcctgttcctttgagctcagtcagcctcctgggctcgtctctctgtgaatctcctgtgggacatagggagagatattattcaggctttgccgtagtagctccataattccattctccaatttgccacatcctattaattgtcctctaaccccctcaccttcttgcgtattcatatagtgcttgcttgcgctcctgcaggctctcctgccgggcccaggaagacttggcaaatgttagggctgttggctgaggggtcaccgggccagagctgggaaactgaggtgatcacaatgtcagagggcttgcggagtcatcatcattaaacacgcatcgaatgcctactttgcaagagaggcactatgctagggtctcaggatcaaaaaagaaaggtcagggataagggagtacatagcctgcccccaactcaccccaacacttggatctgaccatttcctgggtctcaccttggaggcagaggctgtgggtagggactgagttcccttggtgatgtcttcaggcatgaaagctacggccccctcaagcagattagtgatagtcaagtctacacagccagtcttggctggggagaaaagagaagggagtccactccctacttactttcttccttcacaacccacttttcctccctgtgcccatctcccagtgtggggccaccctttcccatacccaggtctctctggatgacacccaatggcacatggggcaaaacttccttgactctctgagccagagttgccagttgcacatcaggagaaggaccaggggagggagggaaagaagactgggctgtggaaaaaggaaaaaaagaaaaaagaaattctggtaagtagagaactagaaggagaggctaactagcacagaaataggggaggaatcacagtaggccgaaaaaaaaaaaccccaaaagctgtaatgtatagagaccacatacctgactgggggcgcaatctggggtgtctttgtcgcttcatgtgctctgctttgtcagctggagtgagccgtgtccctgtctggcccaattccttggccaccagctagggagaattggaagactggaagtgtcaagatctcaagctttcctccctctcctcctaagcagggaccccgcctccaccctgtctgtgcacccgaccacctgttgtacacggagtgcaaactcctcattcgcttcccctagttggcgatgaacaggacgaagccacctgcaaagaaacaatccagggctatgttgtgggcacccagggtagaggctgtcaccattccccactttggtacctctttgcatggtgggtgggaaaatagtaaatactgtaaatactttgtgttgcctctgtggtagaaccttgatataaagatctacaaatggacagggcagaggccactaattccttgaccttgaggtgagcctctccccagcgaccaaaatgtgaggacagttaataccttacttgatacaccgtgaaagggacgaaaagtga

SEQ ID NO: 2900 - DNA, 4001 bp, Homo sapiens
tgtcggtcaggctggtctcaaactcctgacctcgtgatcccgcccgcctcagcctcccaaagttttgggattacaggcatgagccactgcgcccggcccaattttttttttttttttttttgagatggagttttgtgcttgtcacccaggctggagtgcagtggcgctatctcagctcactgcaacctctgcctcccaggttcgagcaattctcctgcctcagcctcccaagtagctgagattacaggtgcctgccaccacacctggctaatttttgtatttttagtacagacagggtttcgccatgttggccaggctggtcttgaactcctgacctcaggtgatcctcctgccttggcctcccaaagtgctgggattacaggcatgagctacgattttttacaattttaaatggtttttacaattttaaatgatttttacaattctaaatggttaataaataaatggttaaaaaaagactaggatgaataagcagagcacaggggatttttagggcagtaaaaatatttggtataatactatactggtgggctcgtgtcaccataaatttatccaaacccataggatgtacaacaccaaaaagaaaccctaaggtaaacaatggagttcaagtgataacgatgcgccaaggttcatatattgttacaaatgtgccctccagtgcaggatgttgacagtagctgtgcatgtgtgggggcagggagtatatgcgaatgctatactttttgatcagttttgctgtggtcctaaaaactgctctaaaaaataaagtttattattattttttatcaaaagaaggctattttgtgatacatgaacagtatatgaaattcaaatttcagtgtccataaataaagctttattggaacacagtcatgcccatttgtttatgtcttgcctgtggctgcttttgcaatacaatggcaattgagcagctaggaaagaggccatatgatccgaaaagcctaaaatatttactatttggccctttactgaaagggtttgccggcccctgcattccactgatggccccgcagcaatcagccagggtgagcgagtgatggaaacacactgcagggcttggtaagacatgtgtgctccagacggtgggcaatcaaccctatgaaggcccagggactgccatgtcattcaagtttgtaggggtccagtggtcagtgggatgctgggatagcctatcaagtaaaaaacaaatctactgcattttgcatcctctacagagaaggaaactcaatgcctcttaggccactttgggtcctagagacaatacatcccgcacttaggaatattattcaggctgacacaaaaagctgccagctttgagtggtgcctggaacaagaaaggacccaggccacagtgtaagcagccaggctacttgggccacatgatccagcagaccctgtggtttggaggtgtccgtagtggaaaagatgccatgtgcagaccacagtcgaacgccaccacgcccgattaattgtttgatgttttatagagatggggtctctctatgctgcccaggttgaccatctccaactcctgggctccagtgatcggcccgcctcggcctccctaagtgctgggatgacaggcgcgcgccacggcaccggcccagcgttttactttcccatactctgcctgaaccttcccgaagaaatgtttctatttcatcaggaaaccagcccttctccggctcctgcggcgcggatcccgccccgcccgcccccgcgctcaccgcctccgggcttctaagcgcgcagcgatgcggaggcgccgggcctggatgcgctcctgagagttgtcggagtggaccgagggcgcgagaatctgggtggacaagtgctcgtccacgttcgggtccagggcctctagggaccccggcggattcatggcaggagtccctggtccctaggcggctccctccgcaccacctccagacctcaggctggttgctaggaacaaaccgttgccagggagagcggtcaccggagccacagcccgagtggttgcgcgcgcagctccctgggcccagcctgccgccagccgccgttccggccgagcatcccagcctcgggctgacgcctctcccgcccgtgggatgtcaggtctgttgtcaggcccacgaaggcccggtcgtgttagcggagctgtggagtctcaccaggagactagaggactaaagaactggaccaagttgtggttcatcacttgctgaccctgatgattaattcatcttccattcattcatcaaatattcctccaactcatattcaccaaataaaattgagcgcctactcgatgccaagcgctgtgcttggatacaggataccaacctgcaatcaaatacttatgaaagaggaaaagtggaatagaggaaaacagtccgtgggaggggggagggataaaagttagaaatgcggaagcactattaaattctcaactgtccccagaaaggcgctatcttctgggcgtctcattgtcaacaaaaatagtgttctcattgagaattaaaacctggcgcgctggctcatgcctcagcctcccaacactttgggaggccgaggtggacagatcacttgaggtcaggagtttgagaccagcctggtgaacatgatgaaaccccgtctctactaaaaatacaaaaattagctgggtatggtggtgggcacccataatcccagctactcgggaagctgaggcaggagaatcgcttgaatctgggaggtggatgttgcagtgagccgagatcgagccactgcactccatcctgagcaatagagcaagactctgtctcaaaaaaacccaaccaaccaaccaaacaaaaactggataccatttaacagggttctgtcccattagcccgtggggaattaagggcactggatgagcagtgagaaagggtgagtactagtcctagccctgccctgccaccttgggcaagtcacaacttcttgaggagcattttctcagctgttaaatgatgcaacccacagacaactgtgcggccaagacgacccgtcctttgtgagtaagaactgcccagaggcaaatggagtgggtttttaaaatcagttcttccacgtttgcaagcagtagagaggtttaggaatgccaaaaccatccaacagctatagagtctaacagcagctgcctggatccttgtctcacacctgcctaggtggtggtggtaggagcgggggtacttgcttctaggcttcagggccttctgccagatctctgtctcctttggttgaaacctaaagtattaaactctcctaggagccatgatacagctctgaccaaaaactcgtccaggtcctggttcatgtttccactatccgtaaggacagaaacaagcatgtgtgcatgcgcatgtctatgcctgggagtgggataccatgagaaagtcagggggaatcagctgttgcacaagaggtaagtgagagcaaaggtaccatacaaacccatgaagagtgaccagtgagatacttggccctgcactgttctgataccacttccaacatctttttatataagaaatctgactccattttttgctgctgacatttggctgctggcagcttttacgcagcactccctctttcttctccacatctgggcaagctgttaaaaaaagcctaggtgctctttttggtgctggcagatttcatctgcgtgcacaggataccctcctcccagcctcaccccttaaccacaataaaagccccaagcttgtctcctttcctggctctctctagccattttctgaccagctgggaggccctctttgctcccacaggcagcctcaattatgtaataaacctttttcactggtgtgggaaacactttcactcaccgctggaaagggacctcctaggaggacagtttgccaaaatctattaactgtttaaattggcatactagggtaaagggtggaatagggagagatttgttaaaggataca

SEQ ID NO: 2901 - DNA, 4001 bp, Homo sapiens
ggtagaaatttgtctctcgggcatagtggacatccaaaaactctgccagcactaccttgactgcacaacccctttcaaaggcaattccacttatgcatgataaaaatccttagagaactcataaaaggtcaagttttaatttggcagacaaagtaacccaacaggcactgcaacccaggttactgaaacagcagcctggagctccagagttcagagattcaaccaaggcagagcacaggtagaattccagcccttacagaaaagcagaggcaccaacagcctcgcactacaggtctaagacccaagaaccaggaccaaaatgaaaaagtgttctctagacaacactaccctcttccttctcaagtaatagaaaaagccaatgggagaaggaacaaaatgggatgatctcaagcaacaggccaaggagcaagctcttgaaggccaacatgaaagacacatgggaaagtggtagcatggccacagaaaccaagacctcgccgccttagccattgctttaacgtgcccagacctcagaaccggggttgcctcgcatagcaaaaaaaaaaaaaaaaaaaaaaaaaaaaaaagaggcagagagagagaacttgtggaacaggagaaatccagcaaccttccctaacactagagtgactgacactgctccatggcaaatgtggccaaaccttgcttgtccattcattcatgcaatagacacttatggctcaaccgctgtgagccaggcaacattctgaagatttagcagtcaatagtcatggagcttatttctagatgggaaggaaggaaacttcctttctttccaaacgtcttttttccccatctaagagccccctttaaatgttacccgtaggagccttcaaaactctcccaaatttctcccataggcttcttttgacctttctgctttatccccaaaaccacgcaatttatggctccaatttcccaatactgggaaaagacaaaagagaccgaaagtaaatagggcatgcgacataaaattcgacgctcctttgtatttcatgtgcatatcttcacagccacactgtcagcacctcaataacatgacggtgttccatactatttcgtggccccagtgctgactacgggtctctacctacggtagctggaaggtcttcctaatcccaaggcctggcacaggaatttaagggcaagtattcgtcaccggcatcctcgtctcgggacacttctttcctgtccagggtgacctcctggacaggttcgctattaggcgcctcgggaaacagtgatttggggtgatctgaaataaatacccttccctctgccagggcctgcccgcctcacctgccctctgccaggacctgcctcactcgccccttcagcacctaacgcagagccgcctccaggcgagccgggctcgggcagcatcagcccggcgccgggcccccgctcgcgcccgtgccccggcgcgttccggaccccgatacccctcccggcccgggatccgccgcatcccctctgcctgtccctccggggctagccgcgccgtcccacctcgcagccgcgcgcggtgcagcggccccggctccccgcgccctccccgactcctgcagcgccgcacccgcaggctcccgggtccccagtcccggcgcagcgcgagctgccgtcccgcacctcgcgggcgcgaggctccagcccagctcgtctccccacagccccggcggcggccgcagacccccaccttgctcacttccccgccggagcaggggtcgtcgggaaggtctcctgcggcctcactcctccgcacgctccggcccagccccctcggctgaggcagcggcagcgcctactcaggccccggagccacccccgcggcgaacgttcgcagcgcccggctcgcgccgcttctccgcccggcacgcgcagcgcccgcccccggcgcgagggcgcgagggcggagggcggagggcggatgggcgggcgcgcgcccagcgcgagcgcgcggccgggggcgtggcttccgcgcgcggggagggggcgggagcggccgagcaacccccctccaccccgcccccgcggccgcgccccgcccaccggtcgccggcgggttccgggcaggcgggaagctggctccatccaggcttctcccgctcgctggcgtcgggccgggtgtctttccatccgcaggtatccgtcggcggggtgcccggcccgacgtgactacccgacaaagaatgcaaagagccaccccgtgaatcattctccgcgcctgggtcacaagcctgtgcccgagtgacccccgtgaactccgcaagctagcccagccgcggcgtgcgccccgcgctgcaccaggtgcctgtgggcgcacgatcacggtcacggcgcctgggctcgaggcgccccaaacttagcggggaaaacagccatgtacacaaccaagtccgatgacccgtgcagagccaagccacggtgcgatgctggcacagaagctagagacgacttctgcttggacgccgcagagggctagaggcggcatttatggtcaacctcgaaggaagaaaaagaagtcctaggaggaaaaagggaggacattagggctgggaaaacagtttgggcaaaggagccggggcagccaggtttaccatctcagcaccagcttttttgtgttttactgttatccatcttttatagaattctttccaaactgtgaaatacaggagatggtgccaaattagaatatagcaaggactttttgaatggttcaaatggtcattctcaacgttacttaagactcaaaacagcaacgtcctttgggggctattggtcaatgatgaaggctgtaagctccagagctaagcgaccccaggcctgcatgctgggagtatggttttcactgctttttggcaccttacggtaaggcagatcgtgccacctcctgctgctgcctgcctgcctgcctgcctgcctttagaacaccctcttcctcctcctctcctctttttatttttaaactcctatggtgaaggaaatgctgataaccaactttgttaaatgggaacaaataggttcctcaaaagatgagcattttctggcctgccgcggaggctcacgcctgtaatcccagcactttgggaggctgaggcagacggatcacttgaggtcaggggttcgagaccagcctggccaacatggcgaaactctgtctctactaaaaatacaaaaattagccgggcgtggtggtgtacgccgtaatcccagctacttgggaggctgaggcaggagaatcgcctgaacctaggaggcagaggttgcagtgagtcgagatcgcaccactgtactccaagtctgggcaagagagtgagactccgtctcaaaataaataaataaagatggacattttaccttttaccttacatatatgaagtgtgtgaatattttcatgcttgaggagacttatctcttgtaggcacggtcttggctatgttttgtacatattaagatactcagaatacaggtaagagacctctagcttctttatttgccctttttgagcaccccctatgtggaaggcattgagaggggtaaaacattgattctgttctttggagaaaagatgtgtaaataatataaaataaatgtgtaaatatcgcttgatatgttcggtttattgattgaaaccaaggtaatttcaatatgtggactagacaatcctaaaccataagggaattaaatacttcaaggacactgtattggcatctctccatctctgttctctatttcttcacctcccacatcctcagaaaacttttcaaacacctttcaatcattctccccctctcactccaaaattaccaacttctctttacttgtctctttccttcatcatctattcatgtttaagcttttcctgtcctcaagaaaaaggaagaaaccctttcgctgtccctctagattctgcttcagttactagtccctctctgagttttccttcataaatatcttga

SEQ ID NO: 2902 - DNA, 4001 bp, Homo sapiens
agaagtagcacagatttaggccaggcacagtggctcaggcctgtaatcccagcattttgggaggccaagacaggcggatcacttgaggtcaggagtttgagaccagcccggccaacatggtgaaaccccatctctactaaaaatacaaaaattagccaggcgcggtggcaggcacctgtaatcccagctactcacgaggctgaagcatgagaatcacttgaacccaggaggtggaggttgcagtcagccgagatggcgccactgcactcccgcctgggcggctgagtgagactccctctcaaaaaaaaaaaaaataataataataagtagcacagatttaaatagttcaatctggtagctgatcatagacagcagatttgagagggtcaagactggaagaagggatcaggaaattattgctttggttcagaaaagtaccagtgattaaaaaaaattagtaataaacacaaccatccatattaagtatgtactacttacttcatacttaagtatgtgagtgccaggcactgtgccaagtgctttattcacattatctcatttaatcttcacaacaattctatgaagtcaatgccattcctgctttatggatgaggaaacagaggcccagagagattaagttaacttgcctaaggttattcagtcaggaagtgaggcagccaagatccaaactaagcagtctaactgcaaagctggactcaaagctgctgtggcgtgacgaacagattcaaactcatgtacatagtaaaactcagatgccttctgatttctttggaggtagaaggtgaggtggagggaagtgactccaaggtgtctggcttggattactagccattagaagctccgaactacaaaagtccttaatgatcacccagttggactgcctatccaatgccaaaatttcttctttatcacccctaacaaatagttatccagcctatgactgacaggacaacacatggctgagctgagtcaaactctgcttaccattaccaagaccctaaaggtgtcaaatatgtcgagagttgggtcttctgagacttttacccactgattttcatattgcgatatgcagaattctagaattctgcaaggacctcagaggctatcccaggctggctcccctctcctgcttcaaccaagcactaccaatcttatcatactcttatgttaagggtccttgtaagatttcactgggggaaaaaaagagtacagtacttttgaaaggtttcctaatctctggtccagaccaattacccgtatttcatgacaaaggaatttgaggtccagcaaatgcaaccttgagttggtcaaggtcacatggtcatggtcacatagacaagtagtcacagagcaaaacaatcctgcaaggattgggaaccacccaacttctctcagccatcttcttctctctgtttgaactgtatacaacaatgtaaattttaacagaatatttaaagttaaaaatatatcaaaatacacattcactctttttagttttccaacagctctaggtgttgccctaacactgagtcctctctgtctcagaactgtcatctagtggaaggtaatttatataatgtattaatcattagtcaccacctgcaaagttcatggtaacaatggagttacagcaagagatctaaattgactggcatggtacaaaatcacagacattctaggtaacatttctgcctatttatttatggccttgtctaagaaagcaagtcaattctattcaaatatatgctttggcttggggtccttcaactccatgattctttaactcccattcttccctctgcaaagcttataacataaaagttgtaactgattaaagctatgacttgatctaaaaaaaaaaaaaaaaccacacaaacattcccgcacatatgaacaaggactcaagactcacgcatttctatgaacagctgcctcttctctgccatggtcttccgcttgttcccactttcctcaatcatcctagagacaaagaaagatacaataaaccactgtataattcgacaattcaatcaagtgctaatcattctattgtgaagagggaccggaaaccaagttgcaaatgcacattttaagacagtatcagtaaaaataaactggaagcctgattcagaaaaagataaactgccatccttttatttgatagcttctaaaatattagtaaatcaatacttgtatgagctcatacacttgcttactgtgctaaaaatatggggctgacttacttctaactttgattattttctctgcagagtcctggattagttgaggtaacttcccatatctctactgttttatatggataaacatgttactaaatataatttagaaaataaatgtaatgaaaggctgtaataaaggacataagaacagttagcttatacataaaatatacatgaatattcaatttcatattaaagaaatcaggtattaatccctgatacggtttggctgtgtccccatccaattctcaacttgaattgtatctcccagaatgtccatgtgttgtgggagagaggtaattgaatcatgggggccggtctttcccgtgctattctcgtgacagttaataagtctcgtgaaatctgatgggtttatcaggggtttccgcttttgctttttctacattttctcttgctgctgccatgtaaaaagtgcctttcacctcccaccatgattctgaggcctcttcagccatgtggcactgtaagtccaattaaacgttttttttttaaaaaaaaaaaaaagaaagaaggaaaagaaaactgttcagagcttgctttctttctttctttctttctttctttctttctttcttttttttttttttttttgacagtctcactctgtagtccaggctggagtgcagtggtgcgatctcagcttgctgcaacctccgactcccgggttcaagcaattcttgtgcctcagcctcctgagtagctgggattacaggcacgcaccaccacgcctggctaatttttgtatttttagtagagatggggtttcaccatgttagccaggctggtctcgaactcccagtctcaagtgatctgcctgcctcagcctcccaaagtgctgagattacaggcatgagccaccacgctcagccctgttcagagctttcttccagactcagtgacctgggactggagtgtgggaagagggaagatgccgttcgttcacctgctgtcttagaccttcccaatgtgccttttactcccgctcttgataactgccttctgtatctttccttcactttcttctactacagatcatttttctccttttttcccctcatccttccacatgtatcatcctccagcttaatcaccaaaaccctacccggtagatataatgcccattttacaaatgaggaaacaaaagttcaaaaaagacaaattacttaatcaaggctacagggactgataagcagcagggccaagagattccaaagctcgtgttctttccaccacactgtactccttccactttaaagcaatataactccctgctcacaaaacaaacttctgaattactctaggtgagctctgtcataacacaaccacctttagagattggcctggttctcaaccagggacaattttgcccccatgggacatttagcaatatctacagtcagttttggttgtcacaactgggagggtgctactggcatctagtaaacagaggtcagggacactgctaaacattctacaatgcacaggagagtattcacaataaagaatcatccagtccaaaacagccatagtgctgaggctgagaaaccctgagacagaccacgtaacgaaattttaaaaacggtaaacattcgaaaacagccagtattaaatttagccacttgttcaatatgatattcaacagcaaaacagttgacatcctgaattctaacaatagttttctttaactagccttgaaactcatcttgtcactcaatttct

SEQ ID NO: 2903 - DNA, 4001 bp, Homo sapiens
acccatttatttctatgtaatatattccattcttcttttaataaatatttatcgaggcaccatcatgataaacagatgtgatacttattctcataatgcttagagtctacaagataaaatattaagcaaagaaagaataagctaatttcatcgctgtgttcataacagaaaatgtaaaaactactgtctaaaaacataaaggcttaaggatattatataaagtcataatagtaaaggtaacacaaggttgaaaaatacaaactatgtaacaaacctgcacatgtaccccctgaatctaaaagttacaattatttttttaaaaagagctccaaaaggaaatattctgaaaactaaggttaaaaaaaaactatttaaattattaaattattatgactgcttttatgctacaatggcagagttgagtagtgtgacaaagacctcatcatacagcctgcaaatcctaaaatatttactttctggctctttaagaaaaagatggctggccccagcactatattaacagagtaaagaggaaagacattcatctcaagggaagcagaaaacatctgataaaattcaatattcagttatgacttaagaaaataatgataatgattcctggcaaattaggacatatcagttctttcacctttatctggttaacctgtaccaatcatcactcttaacagtgaaatattagaaatatagaaagaatagaaatattagaaatattcccatgaaaatcaaaaacaagacgctatccttcctacctttttttttttttttttttttttttttttgagacggagtctcgctctgtcgcccaggctggagtgcagtggcgcgatcttggctcactgcaagctccgcctcccaggttcacgccattctcctgcctcagcctcccaagtagctgggactacaggtgcctgccagcacgcccagctaatttttttgtatttttagtagagacggggtttcaccatgttagccaggatggtctcaatctcctgatctcacgacccgcctgccttggcctccgaaagtgctggcattataggcgtgagccaccacacctggccatccttcctacttttcaatataacctctgcggccctaaccagtacactaggtcaagaaaaaggtataaggattacaattacaaaaggaagagtcaaaattgtctttctttaaaaatggtatagttactggccaggcacggtagttcatacctgtaatcccagcgttttgggaggtagaggtgggaggatcacttgagcccaggagttcgagaccagccagcctgggcaccatagtgtgaacccatcactacgaaaaacaagaaaattagccaggcctgctggcacacgcctgtagtcccagatactcagaaggctgaggcgggaggatcaattgagccctggaggttgagtctgcagtgagccgtgatcataccactgcactccagcctgagtgacagagcaagacacagtctcaaagaaaaagaaaaaaattgtatagttacctacctaagtaggaatctataaccattaagactaataagagttgagaaagagtactggattcaaaactgacatactaaaatcaacatactaaatgatacaactgaataatggctggaaaaaggtgattctggcatccatagaaagtagttatgctggagtttctggttgacgttgctggaaatgagggggtggggcttccagcagcagacactatagtcacccatgcaattcttcctgtgaagaaatataggagactcaagaagtcatacttaccaaacgtctcccagactgactgttatccttaagtcagaggatgataattcatatgaggtttctgtgtaagagtagtaacattcacaaagaagtaaacccagttcttggcaggactacttcagatctctaccccatcaacgcctgcatgcgtattacttaaggcaccccagcctcttcttagtatcaggaattactgtgtttgtgtatttggtttcctattttgtctgcttccctttactaacatggaagtttcatgaagtgaagtcagggactgtgttttgttctcctctgtagccctagcacccagaatagtgcctggagcatagcagatcctcaataaatgcactaaaagttgaaaggaaaagatgacccctatgctgagttttgaagggtaggcagaagcagtatgacgggtggtggaggcaacagtattgtgcaaaggcggaaaggcatgaaaccacatgatctgcaggaaagccaattcagtattgctgggaagtaacacgcaaggcatgtgatggaaaaattgggaactagtgggcagagcaaaaaaggggccagaagggccttgtttggcattcttaggagtggggtctttcccattaaagtgatgagaagcaagtaaaggaatgtaagcaaagaagtagcacagatttaggccaggcacagtggctcaggcctgtaatcccagcattttgggaggccaagacaggcggatcacttgaggtcaggagtttgagaccagcccggccaacatggtgaaaccccatctctactaaaaatacaaaaattagccaggcgcggtggcaggcacctgtaatcccagctactcacgaggctgaagcatgagaatcacttgaacccaggaggtggaggttgcagtcagccgagatggcgccactgcactcccgcctgggcggctgagtgagactccctctcaaaaaaaaaaaaaataataataataagtagcacagatttaaatagttcaatctggtagctgatcatagacagcagatttgagagggtcaagactggaagaagggatcaggaaattattgctttggttcagaaaagtaccagtgattaaaaaaaattagtaataaacacaaccatccatattaagtatgtactacttacttcatacttaagtatgtgagtgccaggcactgtgccaagtgctttattcacattatctcatttaatcttcacaacaattctatgaagtcaatgccattcctgctttatggatgaggaaacagaggcccagagagattaagttaacttgcctaaggttattcagtcaggaagtgaggcagccaagatccaaactaagcagtctaactgcaaagctggactcaaagctgctgtggcgtgacgaacagattcaaactcatgtacatagtaaaactcagatgccttctgatttctttggaggtagaaggtgaggtggagggaagtgactccaaggtgtctggcttggattactagccattagaagctccgaactacaaaagtccttaatgatcacccagttggactgcctatccaatgccaaaatttcttctttatcacccctaacaaatagttatccagcctatgactgacaggacaacacatggctgagctgagtcaaactctgcttaccattaccaagaccctaaaggtgtcaaatatgtcgagagttgggtcttctgagacttttacccactgattttcatattgcgatatgcagaattctagaattctgcaaggacctcagaggctatcccaggctggctcccctctcctgcttcaaccaagcactaccaatcttatcatactcttatgttaagggtccttgtaagatttcactgggggaaaaaaagagtacagtacttttgaaaggtttcctaatctctggtccagaccaattacccgtatttcatgacaaaggaatttgaggtccagcaaatgcaaccttgagttggtcaaggtcacatggtcatggtcacatagacaagtagtcacagagcaaaacaatcctgcaaggattgggaaccacccaacttctctcagccatcttcttctctctgtttgaactgtatacaacaatgtaaattttaacagaatatttaaagttaaaaatatatcaaaatacacattcactctttttagttttccaacagctctaggtgttgccctaacactgagtcctctctgtct

SEQ ID NO: 2904 - DNA, 4001 bp, Homo sapiens
tctatgaggccaggggtttgagaccagcctgggcgtgatatggtgagaccttgactctacattaaaaaaaaaaaaaaaaattagccgggcttggtagcatgcccctatggccctaagctactcaggatgctgaggtgggaggactgcttgagcctaggaagttgaggctgcagtgagccatgatcgggtgccactgcactccagcctgggccacagagcaataccttgtcttaaaaataaaaaaaaaagggccaggtacggtggctcacacctgcgtaatcccagaactttgggaggccgaggcgagtggatcacaaggtcaagagagaccatcctggccaacatggtgaaaccctgtctctactaaaaatacaaaaattaaatttaaaaataaagtaaattaaaattgcaaaaattagctgagcatgctggggcgcgcctgtagtcccagctactcgggaggctgacgcaggagaatcgcttgaacctgggaggcggaggttgcagtgagccgagatcacacctctgcctggcgacagagcggaactccgtctaaaaaaacccgaaaaactgaagtctattagttatggggtgtggggagcaggaggacgaaacagcattcattagcgccctttgggaactagggcgcttcaccacctctgcccacaggactgctaaacagaagaacatcaggcccagcactactgtcactgtcattcagaatcgagtgctgcgttcactgaatctcaggaggaaggaaagtggcaagggcagagggagcagtgtgcaatggtttttacacttgttcccagcgatttgcagaaaaaagcaggtgcaccgagtgatcctccacgtcacttttcttttgcaagtaggaactcagaagtttgccgatttcagttgatctttctagaaaaaaagagaaacacacaaaatgcaagtgagatcaggctttccctctatattacaatatagtttggactgaatttctcccggactcaagtctcacgttgaattttactttactaaatctctagacaggcttggatcttctgcggaagccaaaggaatttctctgagcaataacagcaatctgcaaacaagctgggatgaaaaatgctttaggaaaaaagaactcgggtagaaagtagagacttcaaagaaagcatttataaaatttgtggactgggtggccaaagattaaggtcaatgcttcacttgaaaacttttaaatatatgctataaaacccctgaaagcgcgaacagccatcaaacaaaacacaacaccagaaaaacccacaaaaacgagacatggattacaaaagagctggaggagacttttgggggagacaccacggtttcgcgcgggtttacacgtcagtcatcaccataccccgcacttaaagacacgcagcgtggaccgggcgcggtggcgcgcgcctatgttcccggctacccgggaggctgaggcgggaggatcgcttgagcccgggaggtccaggctgccgtgggccgagatggcgccactgcactccagcctgggcgacacagggaaagcccgtctttcaaaataaaaaccgcacagttcacagcacgccagccgcagacaacgaagcggagcaaagagcccctgggaaggcagaggcaccgaaggccgcggcgcaccccccgccgcgcgcacccacccgggaaccggagcagttcggcgcggtggcccgcggcgcacagcgcttccaccagcttgcggctctgcgtgctcttcccggcgcggtccacgccctccagcactatgagagccccgcgccgggccgccatgactgtccaccgcccgccgctggcgtctccacgcagccttccggagctcccattggccggcgtcaacagcgcgcgccgtgattagctagtatttcccggcctcggccaaattcgaagggattggccggggccggggcgaggacgacgcgcggtgggaccgacacccgcgcctgcgccctgggccgcgccgccactggagccgtgtcctgggcttccggggcggaaactggggccccgtgtcccgtgcgggcctccgtcctcgggcgagcagggcccttcgctccgggaggggaggtgacgcggcgcgggctggacggccggagacgcggggtcagggcgcggacgaggggagcgcagggtcggaggggctcccggacgctgcccgcccagcgtcggctctcgttggcccctggctgcgcgcagcgggcccgactctcagggccctgcggtgcccgctgccagcgtgagggctccggtcacgcggcgcgcgagacgaacgagcgagatgcttcccgaagcgcggggcccagtgcaggggctcagccggggctcctcccaaagctcacctggagcccagcacgactgcgttctggaaacgctgtgtttgacagcaggggcaggatggggggctgtgtagacgctggccacgtggcaattgtaggagaaccatgggatcgataaatgttcactgttgtccctgaagcgcaaaactgcagggctctggaaagtccgtgtgtgtgtttttgttgtttttgtttgtttgagacagagtctcgctctgtcacccaggctggagtgcggtggcgcgatctctgctcactgcaacctccgcctcccgggttcaagcgattctcctgcctcagcctcccgagtagctgggactgcaggcggccgccacgacgcccggctaattttttgtatttttagtagagacggggtttcaccgtgttagccaggatggtcttgatctgacctcgtgatctgcccgcctcggcctcccagagtgctgggattacaggcgtgagccaccgcgcctggccgaaaagtccgttttaaaagatgatgtatacaaattatagcacggagagggaacgggcaagttgtttcctctttccatgcctccaactcctctgaaatgtgggtcatgatgataataggaaaaactgtctctgccatagagaggtggaaaaagtcccgcgaagtgtccccggtatctagaaagcgctcagtagtgtttgctgttatcttagggatatcaggctgcctggacatttctcaggtgagactttttgttattttagatatctaaaatactactatctatatgtgccatattgtcagttgtcagctagacatcactttctctgcttagcagaagaaatggtaggaactgcatttcccagaatcatctgtgtagccctggattacagtctaccagacgaggcactcttacctttcgaggcgattattcttgggaggcaccctcagccagaaatatagatgaaattcaaagctgttctgttttcagaaccacctgcctctgatgtagaccaagaaattgctggtagctttctaagtgttgagtttgcattggttttttccccatgagctcttgagaccaccacccacttcagtgctttgggctgaggtcattggcaacaatttcccggactttactcccagcatttgtgtaagctcgcgattatattatcattgcatacctagagtagctttatgttttccagactgaagcctccccaattcagtttggggttctggaaggatatgggttatattgttattaccagttatgccctttcttcctttttaatttacttttattgcttttattttatttgagacggagtcctgctctgtcccccaggctggagtgcagtggcgcgatctcagctcactgcaccctccacctcccgggttcaagctattctcctgcctcagcctcctgagtagctgggattacaggcgcccaccaccacgcccggctaatttttgtatttttattttatttttttgagatggagtcttgctctgttgcccaggctggagtgcagtggcgcaatcttggctcactgcaagctccacctcccgagttcatcccattctcctgcctcagcctccccactagctgggactacaggtgcccaccatcatgcccggctaatttt

SEQ ID NO: 2905 - DNA, 4001 bp, Homo sapiens
atgaacttcatttcaggatagtaaaggggtcattacaaagtatttgctataaaaagagaaaatggaatgtgatagagtggagagcagtgttctgcatggtgaactcagatgcctgaaagaatactgaattaacttttgcttaccttttgcaaaggaactttgaaagcaatgaaacgagtcccaggcatccgctgtccaactgggagatagtctttccacctattagatatattttttgttagccaaattgtatgttagccttgtttccttgcacaaaataagactttttgaaaatgggaatcatagcccgcacaacatgtcctctctcctctctgctttgcatttcgccactccacttattaaaccccaccaagtaacgacctataccgtccttctctcctgtttccccatcataaaaacgaacacaagccaacacaacagtacaactcaaataaggcctatataaaaccggagatacccagaacttctgtatccctgttaaacttggcccagtaccagatactaaagtgccattaatacaaacatattcactgaaataatttaaattcaattatttcacttcacgcttttagttttcatacgactgatgccataaagttcaattagtaggaaacttcaagttcatattttaagagaaaacctgctagaagagggactgtgaacttcacttaataatgctaggaactggccgggcgcggtggctcacgtctgttaatcccggcaatttgggaggctgaggcaggtggatcacctgaggtcaggagttcgagaccagcctgacccacatggtgaaaccccatctctactaaaaatacaaaaaaaattagccgggtgtggtggcgggcgcctgtaatcccagcaacttgggcggctgagggaggagaatcgcttgaatccgggaggcggaggttgcagtgagccgagattggaccattgcactccagcctggcggagaagagcaaaaatccatcccaaaaacaaaaacaaaaaaacggattggaagaaaacaaacaggagattcactaattagaaccccactgcaataagtcaggcaagacctgtattagggtactgacagaaagtgacagtcaaaagatagtagataaaatgaagaggatttattgaggtatgagatggtggaggatggtctcaaggagtaaaaacagttcaatgcacctacgtgcaaagtctcaaaattaatcatttgtacgtataaaggagttatctttcaaatgaggcctgttaggaagtaacaaagtatgctctttgtgatttctggaaacaatacaaaccaactttccatgtgagatctcagggcgctactactgctgggttcctaactcaaaccattacactttccgtgccaacgtaacaaggaattgaggaggttccattttgggaattaaggagtgtccccaacagtaacagtcccaccttaaagcaatccttccgtattttacctaagagcaatggccagaacctcccttttacaagaatatggagaaatcacaggacatcacagacatcgcccctttcagctacagcgggtggcgcagagggtcaaagcctcaaagcaagcggcggacaagtcaagcttgcgatggcaacggcgagaggcagagaccacaaacgatgaagcccagacccagaagccacgagctggaaaggccacgccaagggaccaagacatactacctttcggggatgtggtttccgcccttcttcttggctgaggagcgtcctgaaaagtcgcgtctccggccccagccactgcggggatgatgccactggctcatgtgggtcccaagaagccgcccacccaatgccaagtcggccaaaagcgccagtccggcgccctcaatgccaggataagaccctaaacaggaaaagactcggcagccacctacgccgcgctccagcgtctcgctattgcgcatgtgccaccgccggtcgtgatggcgtagccacgctggcttactgagactcctgatctgtaaacaggactttggtggctacagcgccctctttagccagaggccagtagcacaggtcaataagggcgtgtatgcacccttcagaattcaaacagtgaggcacagggaagtccctctgcccgatccgccccacgccccggttccttgtgtgttcttctagatatttaccagcgcttacattcacattttgcatattttgtatacatatttactttcacatatatgtatatcctctatttttatacaaaaggagtaactgtacatattctacagtataccttaaacactgattatcccagtcaatttatgcatacatagattctatttttaatggctataggcaatttacttgcttatgagtaacataattaaaagtaccataacgtatttagccagttcaatattaatggacctttagttgttttcaggttcttttcaaatcttgttacagacaatgctgcaatgtgaacatccttatacatatatacaactatatctaaattcctagaagtagaatgtctggaatgaaacacatacaaacttaaaatttggaaagatactacctaattaccctccaaaaataatgtagaaacatacactcccatcaaagccaaacttttattgggttcctatcacataccaggtatcatgctagaggtggacagaatgtatttaagttttagcaaatacaaaaaataactgagagtggagctcaagtccaaggtttccacacagtctcaagcataaagatctgtacccgttagaaaaacgttcaattctgctaaaagtggaactacaaaggacagcataccctatagcagctttgaaaatagaatagagtactaaattccagattaaactgtaagtaattatgattgcagactttttttttttttttttgagacccagtctcactctgccaccaggctggagtgcagtggtgccatctcagctcactgcaacctccgcctcccgggttcaagcaattctccctgcctcaacctcctgagtagctgggactacaggtgcatgccacgactcccagccaattttttgtattttagtagagacagggtttctccatgttggccaggatggtctcgatgtcttgacctcatgatcagcactcctcgacctccgaaagtgctgggattacaggcttgagccaccgcacctggccaatggcagatttttgaaagtaatttttacttcttagtttctaatttatgaaagtaacttacatatatttttagtaatctttgcaaccatttcagagctgggtaaaccaaggataagaaaggtcagagctattgaataaatgaatattaataaagctagactgctagctttattaacatttttgagacagtacttttccaaccagttttaaatacataaacatttacaattctgaaaatttccacatcattaaaaatgtgtcaatattcataaattgttcattggaaaaagaaaaagacaggatagcagaacataacaaacctacaattaggaacatttaattatttgttgttgttgttgttgagatggagtctctctctgtcacccaggctagagtgcagtggcgcgatctcagctcactgcaacctctgcctcctgggttcaagcaattctcctgcctcagcctcttgagtagctgcgactacaggcgtgtgccaccatgcccggctaatttttgtatttttagtaaagacaaggtttcaccaagttggccaggctggtcttgaactcctgacctcaagtcatctgctctcttcggcctcccaaagtgctgggatgacaggcgtgagcccctgcgcccagcccacattcaaatttgacattaaattgtaaaatattgtggccgggcatggtggctcatgcctgtaattccagcactttgggaggccgaggcgggcaggtcacttgaggtcaggagttagagatcaacctggccaacatggtaaaatcctatctctactaaaaata

SEQ ID NO: 2906 - DNA, 4001 bp, Homo sapiens
tgaaaaatgtgccaggacgtattttctttcctagatatggtgagcagggcctaggtgaacttttcagattacctaaataactcactttttcactgtaaatgtgacaagaatatggtacagtttttcacgggactgtagaaactagttagagacatttatttggtgaatttaaagacagcctatgtaacaattcatataatatttaataacttatatgtacactgcaattgatttgcatcaaaaaccttttacaacaacctcaggaggatcctatgacataagcagatactgttacttcatctttacaaatggctttttggaggaccagaaaggataaatggcttgcaccagctaatctagtaaattagaggcggagcaggattgaaaacttggtctatgtgaggcagcctagtataacaatggacagcaggagtccatcagacttgggcttgatgcatacgtctgttatttaccaggtgtgttaccttgtgtaaattacttcaccaattttaaatcctggtttctatttgtaaaacaaagctgataatccctacttcacaggattcctcaaaggagtaagacactaggtgaacagcacctgggctatttctcagtcttctctctattcaagaatgccttagctgcatagtgataagtcatttagtctttccaagtcttaatttctctattcataaatagaaataattcagacgtacttgaaaacattcttgactatttttttaagaacaccataccatattcttgccaaattaacaagtttgcacttttataaccttgcttcatttgctatttgtgaactatgcttgtataggggctcagtatttccataatacgaaataaatcataagatcttaagatctccttctcttaaacactccaaaaacagacaccatgaacagacgtggccacaggaggcatgtattccgcacggtctgtaagagctgcgcaggccagcaagcacaggactatttcgagtattaacttttctataactttaaccattgtcacttgtagttctgcctgatacaaacattcttttttcattccttttttttcaagctgtattttttataagccaagaaaacacaacatcaatgtgttattctccagagaagttagagaaacgggaagaaagcttttctaaaattcaaatatgcagtgccaagtgctacgagaatagcatctatgcttcttatgggtacactgtgaggcagaaacggctctagctggctaatggaagttccatatccaaaaaaggaaacagttcagcttttcggcaggatagctgataatacagactattacgcataaagggggaaaatgagaacgtaatctggctaaaaggactcaatgatctagtggcaagtcgatatactcacctaggagcaaccatggcttaataacgccaacttgcaggtccgagctaaggtcctgcacataaccacaaccacccccactgctcggctctacttcttccacaacatgaattctggcatctttccatgtttctataattttctttccagttagcgttgtcaccctggtgcattgcttcctgagattattccgggagaatgctttaatttcctggttaagggagtacattacatgagcagtggctgggaacaaatacaaacaaatccagcaggcatagaaaacggctgaactgctagtcccttattgcccaggtaacaaagccagcctcagaggtgctcgcccatccaggtaaccgcagcagccacagaccaagagactgagtcgtccagctccgtttatcccagcgatgcaatgtaaggcgaaatttgattggtcattgagacacaagtgccgattggatgctgtttcttcttcctgtcagccagaaacctgcattttcccgaaaggctcgagggatccactggggaagatttcttattgttgctgtttaaatttagctttctaatacacgcagaatggtaaaatataagacttcgttggagagaggaatgatatgtcctggttctttaaaggcagtgattttctgatatattctgttagtgtcacttacggcagtgaccatggacgatccgggctgacctgtgtatcgctcccgcttgaaagagaccggcggagtcaccttgcaaatcaccctatgtcccaaagcctttcctgcctgtctgcttttaggctagtccaggagggctagagcagacgttaaaagttatttctcgcttcctgtatccttcacaccttctgcttttgctgttaatgcaagaggaacgtttactagataaagttgttgtgcgtatttgtgaggcaacaatttaaataaactgggaaaaaagatatattttttaaaatttatgctcatatatgtagattgacaagagcttaaaatttatttattttctgactttcagcctacattttcatttcatacagtaaatatacatcctaaataagaattgcagcaagtccatccatacgaagaattaagaaaatcaattgtgtaagcatccaaatttgtaaaacagataaataaattatagaacgatgattctgattaccaaaaaaaagttttgcaaaagaaatcacaagattcctttaaagagaaatttttcaaacccctattaaagtaaatgtaattttaaatgaatttcaacacaatgtataaacacatatataaaatgaagaagttgcacttatgaaaacttttcttccaataccacatattaaaatttgtgttgttgttgaaactttctgacataaaaaaattcaactgttatggattgactatttctgtcccttcaaaatgcatatgttaaagctttaaacctcaaggtgatggtatttaaatgggacttttgggatgtaatttaggattagactaagaccctagggtagggtcctcatgatgggtttagtggcttcaggagaactgaaagaaatctgcctgctcccctatatggaccaaggaaagacagtatgaggacataaggagaagctggctgtctgcaagccaggaagagagctttcagcaggaactgaataggccagcaccttgatcttggacttctcagcctccagaactgtaagaaaatatatttcggttgtttaagcaacaaagtttatggcattttgttagagcagcctgagcaaactgagatataaaccaaacttctccctcttgaaaaaggaataggcccagtacagtggcgcatgcctgtaattccagcactttgggaggccaaaatgggtggattgcttgagcccaggagttcgagaccagcctgggcaacatgatgaaaccccaactccactaaaaaatacaaaaaattagccaggtttggtggcacgtgcctgtagtctcagctacctgggaggctgaggtgggaggatcacctgagctaaggaggttgaggctgcagtgagccatgatcatgccactgtactccagcctgggcaacagagtaagaccttgtctcaaaaaaaaaaaaaaaaaaaaaaaagaaaagaaaagaaaaagaaagagagagaaaaatatatatatatataagctcaggctatctacaggatgtcctaaaatgaaaaactgaagagattatttgcatcatttaaacaacaatcacaggctcatcaaaaaacaactctaaccataaatcaatccatatatttatcataataatgatcaaaaaaataagtactattaagcattcactgcatgctaggcactgcgcttataaacaattttagattcttagtattatcccttagctgcttaacaatgctttacacacattatcatatttgacctcacccctatttgtgattagaatcacaaataaaacctatgtttgtttcagtccagtgccttatcttttatttactgtagaatacggccctgcttccaaaataattacagttaacgaatatttactgagcatcagctatgtgcctggcactgttatagtcattggaaatacagcagtgaataaaaacaa

SEQ ID NO: 2907 - DNA, 4001 bp, Homo sapiens
cacagacagggctcctggttgtcacagcttgttccttggagctctcaggctgccaagggcttcaacatggtggtggaccagggagagtccacggtatagcgtctagctgatttctgccagaggatggggagggaaagagcagacacacccttggttcccgaccccgaatgagggccagcctcagtcccccagcagaagagcaccaggtcggaaagaccagcatgccggcattcctagagcccccatgtgggggcttctgaaactctgaggaggtagcagccctgccagaggtgaggggactgtgctggcccagaggggagcccaccagtccacagtcagctcctgccagcacagtggggcaggcaggcagaggggcaccacctcagtgacacagcacctgggtctcaaactgcagcagctgccccatgaaactgaagttgggggagatgaccccccggcgctgcttaacgaagtcaaaggcctcgtccagccgcacacggcgactctgcatgaggtatgccagacagatggtggcagagcgcgagatacccgcctggcagtgcaccagcacccggcctccgctgttcttcacccagtctgcaagggagatgggggagtggtgtcagacggaatgtgcacagcccaggagacaggtgcccccagtcctctcctctggagcccctcgggatttctgggcagaggtgcccccttaccaatgaagcctatggcctcctggaaccaggcactgatctccaccatctggttgtcctccacagggatactcttgtagcggaaaaggccctcaaagtggttggggcagctggcggacacgttgaggacggctgtgatgccacaggcctgcagcccctgcaggtctgacgagtgactgcagctgcccaggaacaggtagggcaagatctccacagggccaccctggagggaacagaggggcggtgaggcctttccagcccagccccggagagctggagcagcagcgggtggagaccccatgggctggccgagacaagaggactcctcagccagtcctcctgacctgagacaggtctcaggaatgtgcggaggacacaccgggacatacatttcccttcatgctcccaacatacacatgcaaacatacacagacccatacaggcacgcgcgagcagccatgccccaccccctcccccaacacacacacgtataaaagtgtgtgtatatgggcaaactgctcgcatccccaaatggcaggctctttccctagaggcgcccagtccgcggcggggagagagggaggttcgggggaggggggtcaatactcacctggtcgtagacaggagccctggagtcggagcggctggttttgtcccctgttggcggcagcgcaggggcgggggcctcagagcacagatcgggacagcagccctggaagccgtcgaagcctcctgcaaggaggggaagagcacgatcagcagggaaagccgggctggagtcgggtggggcgggccaagggcggccggcttgctcacctcgcaggaagtacacggcagtgggccccgcgcgggtctcgtgcagcagcgcggccagcagcacatgagccgggctgtcgggccggagctccgccaccgaggcactgccctcgtccagcaccacggcccgcgccagctccccgcggaccaggcgcgtccgcagcgcgcggtcgggcagcaggcaggcgagaacggcggcaggagggccgcgcgcgcggcgccgcagcagcgcgttccaaggcactggccgcgcggcgcgcacgtggcgccggcagaaggccaggaaggggcggcagtccagcagcagcgtgcgttccgcctcccgcggatcccgcagcagcgtgcccagcgccgcgcactccagctcgcgcgccgcctccagccccatggccaccggtgcctcttcctcttcctttcggtctttcccgcgtcccgggctctcgtggcggtggcgctgcccgagcggtcgactccgggcgccctccgcggcggcccgggttaagtacccgtgggccggcctccggggcaccatacaagggcagagcaggaaggcgctggcgcccgcgcccgcccccgcccctcacgtggggcgcagtctgggctgacctggagacttcggggcgggggggaggttgagggggaaggcagggcgcggggaccaacacaccgggaggaggcggggaccagcgactaagggaagggaaggtgttacccggagtcggagggactagcacccctccgtttttgcgcccaccctttgacctgtcccaagccactcagtcctggggaacccagcttctcagatgcaggtccccctttagggccaacgatgacccttggagtaccccaccccctaaccccacgcttcctctgccttttccctttccctcccagaattttcctcttagaaatttgtcaccacaaacattgacaaatgcctgctgccacgggtgatttctacactggatgatggggggggtccctgctgagatgtcctatttctcatctatttggagaccttgagccagagggactttctctctcctccccctccccaccccccattgcctggataagaccagtactcagggtcttgcagtaggttggtggccaagctaggccagaacacagtccccggggcccaggcccctgggcttgggccgaagggaaatgagggggggtcccagggcctttcatggggaaagcaggggtctgtgactggtttccagttatgtgtagggcaaagcttcttcctcctgggtgcagggaaagcccccaggccccagagagaagtacttccccctgccacaagcccgccctggagggaagtccgctgacgctcccggccctccccaggcctgcggggatttcaagaccttggcaaggggaagagggagaagcagaacagaactggcctcccccatcctaggcctccctgtccagccccgccgggcagcaaagtccagggctagcactgcacccggaggactgggggcctgggtatcccctccattccgccctcccccagccctgctgccggatgtggtgaggcccaggtgtgcgtggggtgtctgagccacaagaattgttggcagtgaactcccaaactcaagcagagaagttgaggtgggtggagacagcgtcactgcgctggagctgccctcgccctgcccccagctgcgtgggatttcagaacccaccctccaagcccccagtctcctgaggccctcctccgtgccctctgaaagacccttccggctcccccacagacccctgtgtccagaccgtcttgaagagtgacagctgggacctgtggagagcccgcagcccttctggacttgtctgccctgagttcctcacagcagtgtgctgtatgcctggttgtgtgcagggcagcatcgtacctgtgcagttccactatgtgtgagaaggagctggagcttgtgtgtgctggggtcagagccgatgcagaggagaaaagccccaaggactccaaaggtccctggggccacgtcaccctctcagtgtctccatctgtaaggggagcacatcatggtgcagcggctcttccacactggctccaacgctctaaggctactccactgtctgggcaacttggctgaggccccgctgtccctggcaggccagtctggaggctgaggcagcaaagcccacaacagagccagggagtctgggccacagatcccaaaggctgatatgagcccttatctttggcatcggcctccaaatgacttaatgcttattccaggggcaaattacagagcgtgcagaaggacaatcaggtccagtcttgctgctgggccaggagccaaagccttccagctctgtgggaggaccccagccaggtgggatccctgattcaggagtgaattcagctcagccgtgtaaggggctccagacccaactcccatgctgggctgggcctcttcccctccttctggagaatctggtata

SEQ ID NO: 2908 - DNA, 4001 bp, Homo sapiens
tgtccgaactcctatgggacagctccagctgtattgcagaggggctgatgaagagaataattccccaatcacccaagttgcccttcaacaatgtcttcatcaacagctttcttgatctaaatgtcccacgtgggtatgcattttctcaaacagaagcatccgtggtcacgcaggaagaactagtccgttcttatgacactactaaaaataaacacaagaagagttgcttttcctgatttcacctatgactcagattctgattactgtagtctgtactcatgtccttccctgagactggtagaatgcgccggcacccccaaacactcaagattctggagtgtaaataatggaggatccctatttgctttttcttaatttgtcttcgatgttttaccaaatgtatttctttttgtgtctgtaagataatttgtgcatcacctcagccggaaatataaaattaaaagcactatgtttcacacacacacacacaaaggaaaactcgatatgacagtgaggaagaagggtaaagaccagccttctgtatcagtgcagggacatccttcctccaggcagcaggccttcaagcttcaagcctcagggcccaaccctaaggctgggggctctccctgcaggcaggactgggcctggagggcctcctcatacttctggagctgagaccagaagcccgggttcggttctgctaccgggcgagcgctcttcaccatctgcaaacaagaagtgtactgaataaccccaagtcgcgctaatggccagcaggggccaaggcgggcccagctgtaagagtgggccccgcccaacccggaagtgcctctctgcttccctaagcccgccctcacgagagagacccgcccctcccggaagtgcctgtcccaatcccgaagccggccccgcccggaaaactcgtccccggaagacacgcccctctcgaaacaccgcccccctaaaggcccgcccacctggaaggccttcgccaggctgaggccgcggtgccgcatgaggtacgcggtgcagacggcggccgagcggctgcggccgttcttgcagtagactaggcaggcgccgccggcgcgcaccgcggcctccatggcggcgcacgtgggctccaggtgcgccagcaggtcctcagccgggtcgtcgaacacgggcacgcgcagctctgccacgccgggcgcgcgcgggccgggctgctggcgggagacgttgacgcacagcgtgactcccgcgcgcgccagctgctcctccgcgcccgcggctcgcgcgctcccgaggaagagtgagggcgcgacgcgcaccaacggtggaggtacgggcgaggcggccccgcggcgcccagcttctgccggtcccatggcgcccgccgaagagtctgcttttgggccctgaggatctattttgggggctcaggcgcccgcccaggagtctatttgtgggagccgggcgggccgccgggcgcccccgggtcctagaggcctccgaggtggaccaggctggggcttgggtcccccgcgggcgctgggccgggacagggggcttgggtctcgttggggccggggcatggcgggaggtttgggcctcaccagggcgccggggccttggaccgctctgcgtcccatgttctctgtccccgggcgccgtcctccccgcccccgcggcctgtggcactgggcttgcgtctgtggctcttgggcgcagcgccctgcccgctctactgcggcgtctggcgcggaggcgtggcttggccgggcccgcccacttcgcgtccgcgtcgttcggctagggccccgtggctacccggtgcacgtggacggcgggctgcgtggttcccgtgtcttcaccctttccctagtgactgcgttgtcggctttacgtttattcctttttgtggcccgctttgtaattggtgcatttttttctatgtattataacacatggctcataaaataaaactaatttctattttcatcacttcttcatagaccacactattccttttgctgtttctaagtaatttattggggtcagcattgtaactttaaaaaatttaatatcacttaatgtccatgaaattgccatttaagactccttcaatttttctgacatctggtaattttcaggcaatggatacactgaaaagcaactgtctcaacagccctacagacatttagcaattgaagtttcagttgcatacagtctctctctgggttatcgtcattgctttgtccatcagccttctagcattggtaactgtcagatctttattgcagcctggggttcactcttgagctaaagactcaaatatgtctgcagccaggtcttccctggttgcagctccagacatcacctccgtggaggtcttatcagcatctgtttcccacttcctccaccctaaggaaggactccaactttcctaggatggaggagtggaattccctttttttccctggcgttcatgggagccattgattaggttgggacactgtctccctccgctttctaggagttggctctgtctctggccaaaagtgaaggccacactcccgtgactgctctgggaatgagcttggtgtctaataacccatgaaggagagagcactttggaaggctcctctgttctctcatggccataaggggaagccagccttgggtgaaagcagaggagatgggagagccaaggtccttgatgccactgttgggccactgaaatgaatcaaacaaaacctgaagtccctcctcctcctggactgtttcatgaatcatcatcaccctttacggttggaggatggttgaggtgggttttctgctccaaagcctgctacttgaaccatcatgctcccactccattgaggtaatggattgggaaccaattcatcctaagtgtctctgcatctcattgccacacttagtctgggccagcctctgtctcctggacttggtgctagtcccccacagtgtaaccagaatgtgcttgctaagaacagagggtttctacatgttggttctgactccttagcaagttgtaattcacaactaatgtgggttgtgaaatcaattctgtgggtcatgatcagcattttagtttttagagaaataatagactacatgaaaatattagagtgcatgcatgtagtatgccgaacttttaatgaaacatttttctgagtggtttgtactgggtcgtggtgtaaaatgagattttagagagaagtgaactcaacagacaggcactggcgtgtggaggcagagcccctagaaccccagaatcctggcccagccttagtccttagtccccggaaagctagccagtggggagggccagggcatcagctcttcacaccccctgccctgttctcagaggcagtctgggttgagaaaacgcaagccctgcacctccaagagcctctcccctctttgcaggaaggcccagctgtttcccaccatggtgcctctgtacatcccagtccagttcctgaaatgcgctctgtagcctggagagctcctgcgcatcctgtgaagccccatcaagaatccgctctcctgcagtccttccccgaggccctcggagggtccaagacagccaatccctcttctctgcggtgactcttgcggcctccctcatctcgttccctccgcaggcctcgagttacccttgcgccttccacatttactgaatgaacaaaggccggggctggaatcaggcagggcttgagcaagtcgtggctccacgtgctaggtgatcagggcaagttaattaacacttgggcctcagtttcctcaggtgtcccacggcgctccctgtgcccccatcacgggagtgttgggggaatttagcgctttctctcccaggggtactcggcccaggggctgaccgggtaagcgggaggctggcaccgaggcccgcggggtgtcggccccaagcccctgaagtcacagagggcgggcacgcccggaggcggggccgggtgcgtcctggcggggggatt

SEQ ID NO: 2909 - DNA, 4001 bp, Homo sapiens
tgtataaacaaatatatataataaatattacctagagctgagcatagtagctagcccatagtaagcactttaatgttcgcatacacaaactgaacacaatgtctcaaagtttttgatgacaatatattaggtacccaagataaaggtcaaaactggctcttaaaacagaggacatggtttggcatttagaagctcttaagctatatgacacagatcaaaactattaccaattctattgcattcatagaaacttgataaaaaacaataggtcaaactgaactttcctgtaagttctaaaagtgctgtagtaatactaaagcaaaacgcaggagttaccatcattagctatcaaatcatatgactgtatttctccacaataacaccttacgtatacctctgatggcacttttagtacaattatttgtggacatacctgaaatgttccctattagattgtaatgtacttgaaatcagggactgttttttagttatttttgttgccttcacaacatccagcagaatgaccttaacattacaattgacactggctaatgaataatggatacggtagacacaattacaatctgagcttcaaaaaccaattgcataaacactacttcagcttgagttttaggaagaaataatgaattaggattttttttttttaagtagcctagcagctgagcataaggcaggagccaggaactccttaccttctccacatgattgacttattgcctaatgatcaatctctttcaatgtctctgtacaagtgaagtattaaatgctttagatcaagaaaactaggagaataacctctggaaaactgtatttccagaggttaggggaaatctcttaaaaagcacaattgttaaatctgaacaaaggtaagtcagtcaagaggagaaattcacctactaagaagtggataaaggaaatttcagctactaaactccattaagactggcaagcgaattgataattttcaagcatacgaaaaggatgaaaagttgacatagcagacctgaaatatatacacaatatcttccaagatttgtttgaacaaactaaaagcaagagaccgtgtttcttattccactctttctacacctctaaacagctccatacaaacggctggtgaagagaacttccatacgtaactgtatgctacgctaggcacattatattttgttcaacgtcaactgtaaaacagatataccaacactaattgatattaaaataagcgcatttttaaagcccaacaacaaagtcttgaccagctgaactacagctgaccaatcctctcatcctcacagaagccagagccttcctccatgaccgacatgttcacgttcttaaaactcaagagaagagagtctctagagttttgtgctagaacctccgtgttcgggggctttccatcacacataaggtgaggggagacactatcaaggcaagtagagatggccttaatttgtaaaatggggcaaggcgaaaacgaatcactttctcccctggggtcacggccaagagggcgcggtccacggcagggcgtccggaagaagccagtgggcgccggacaagcctcaaggctccccaggccgcctctggagggtcgagaagggaaaggagtggactcctctcgccgggccgcaatgagtcaccgcacccaggtctccccgcctttcctccccaaagctgggccgggcggggatgtcagcaggaactgccaagccgcccttcgagttgcgacgtggaacacaggcagggaggccttgagggaagaacagtcaacccacctgtcaggtgactggatggggaagagtcctcccgcctgcaacttcccggtaacgtccctcgcctaagcccccaacaccaactgtagccaccaccagctccgcggctttccaaagcacacaaagagggatgggcggcggctgctacggcgagagcttagggacaaatagcctcaccagaacgaggtcgctcccagaaataaaaggtggggccctgctgcgaggaattgtagcccctccgtgacttacctgtcgtaaagcagaagccggtagataaaacaaagaacccagtcaacccaggggccttaagtatttccgctttgccaaaaactggaaaactacgcctaatattctcaggccaggaatccaacttccgccctcgccttacaaactgacacgatcgagaagaactacaaaccccggcaacaaggaaaacctgcgtgcgacgagcagtgcgttctgggaattgtggtcgctgggcgtcgcaaggtgtgctgggacatgtagtgtgtcccctcctttagatttcccactccaaggccttcttccgtcgagaagcttctgtataaagtattctcgtctgttgatccgtgcccacagtgtagtatgtgttatagtgtaagatctttgacccaatattggcggaattttaaggtctattttccagtggtgaacctgtgaatcacgctgctgcacatttggtgaagacgtgaagtagactgtttaggatgtaaaacattatatatatatatgtacatacatatgtaagttttagggaaagaatgtcttatataggcttcatgtggcatcttaggcaaaatctaaataaaaatatgtcaactgacatagcaaataattctttagtattttgttgcagtgtggtagcattttggttttctctcaaacaattttaggaaataaagcattttgtattattggactctcaaaccaagctagaatgttttccacagttagatttttaacatacaaagaaaacaaaagttactggaacatgaatttacctgcaatgtatacattgacacacctttttaaagtttaaataatttaaagcattatttggcaggagttaaagctaacaccaaggtaatatcttttctatgttctagaaaactgattgttctagaagttctagatattgcccaagtctagaatgaacctttatgattcaaattccaagtccttgggcttgtggtctttttcttatctttctctgccttatctgtggtcttttgtgtagaaaaaaatattctaaaaataaatttgagaaagaaaatccttggctttccacagcttttcccaataacctaacattcaaagagctttatagctatgttatttttttacttctttcctaatagttttcatgtattaatttgaaaaaaaattattattgattgcctaccatgtgccagcaatggtgatgggtgttgtggtaacagctaaaatggaccaggcgcagtggctcacacctgtaatcccagcactttgggaggccgaggcaggcagatcacctgagctcaggacttagagaccagcctgggcaacatggtgaaaccccgtctctacaaaaaatagaaaaattagcagggtgtgtggcatgcgcctgtagtcctagctagtcacgaggctgaggcaggaggatggcttgcgcccaggaggcggaggttatagtgagctgagattacacaattgcattccagcctgggagacagagcaagaccctgcctcaaaaaaaaaaaaaagaaaaagaaacaaaaaaaacaaaaaacataaaaatgcacaaaaatgcacatccttcttctcaagggagaaaggacactcgctcaactaagaatggatggttcctgactgatggtttaacttatgatttttttctcattacaatgggcttattagagtaaaatgcattttcaacatatatttttgacttaaaatgggtttatcaggacataactcaaggagcatctgtataatgatggaattatataaggaagtcatagaaacacctggaaaaacttttcaggaaacttttggaaggaggtgattctagagctaagtctttgattctcaaaggttgagtagaagaagttagccaagcagagaagatgcagaaaggtgccttgggaagagaaaagaatatggacaaaggacagaggtgtgagagcatagaatgctggtgaattt

SEQ ID NO: 2910 - DNA, 4001 bp, Homo sapiens
aataggtcaaactgaactttcctgtaagttctaaaagtgctgtagtaatactaaagcaaaacgcaggagttaccatcattagctatcaaatcatatgactgtatttctccacaataacaccttacgtatacctctgatggcacttttagtacaattatttgtggacatacctgaaatgttccctattagattgtaatgtacttgaaatcagggactgttttttagttatttttgttgccttcacaacatccagcagaatgaccttaacattacaattgacactggctaatgaataatggatacggtagacacaattacaatctgagcttcaaaaaccaattgcataaacactacttcagcttgagttttaggaagaaataatgaattaggattttttttttttaagtagcctagcagctgagcataaggcaggagccaggaactccttaccttctccacatgattgacttattgcctaatgatcaatctctttcaatgtctctgtacaagtgaagtattaaatgctttagatcaagaaaactaggagaataacctctggaaaactgtatttccagaggttaggggaaatctcttaaaaagcacaattgttaaatctgaacaaaggtaagtcagtcaagaggagaaattcacctactaagaagtggataaaggaaatttcagctactaaactccattaagactggcaagcgaattgataattttcaagcatacgaaaaggatgaaaagttgacatagcagacctgaaatatatacacaatatcttccaagatttgtttgaacaaactaaaagcaagagaccgtgtttcttattccactctttctacacctctaaacagctccatacaaacggctggtgaagagaacttccatacgtaactgtatgctacgctaggcacattatattttgttcaacgtcaactgtaaaacagatataccaacactaattgatattaaaataagcgcatttttaaagcccaacaacaaagtcttgaccagctgaactacagctgaccaatcctctcatcctcacagaagccagagccttcctccatgaccgacatgttcacgttcttaaaactcaagagaagagagtctctagagttttgtgctagaacctccgtgttcgggggctttccatcacacataaggtgaggggagacactatcaaggcaagtagagatggccttaatttgtaaaatggggcaaggcgaaaacgaatcactttctcccctggggtcacggccaagagggcgcggtccacggcagggcgtccggaagaagccagtgggcgccggacaagcctcaaggctccccaggccgcctctggagggtcgagaagggaaaggagtggactcctctcgccgggccgcaatgagtcaccgcacccaggtctccccgcctttcctccccaaagctgggccgggcggggatgtcagcaggaactgccaagccgcccttcgagttgcgacgtggaacacaggcagggaggccttgagggaagaacagtcaacccacctgtcaggtgactggatggggaagagtcctcccgcctgcaacttcccggtaacgtccctcgcctaagcccccaacaccaactgtagccaccaccagctccgcggctttccaaagcacacaaagagggatgggcggcggctgctacggcgagagcttagggacaaatagcctcaccagaacgaggtcgctcccagaaataaaaggtggggccctgctgcgaggaattgtagcccctccgtgacttacctgtcgtaaagcagaagccggtagataaaacaaagaacccagtcaacccaggggccttaagtatttccgctttgccaaaaactggaaaactacgcctaatattctcaggccaggaatccaacttccgccctcgccttacaaactgacacgatcgagaagaactacaaaccccggcaacaaggaaaacctgcgtgcgacgagcagtgcgttctgggaattgtggtcgctgggcgtcgcaaggtgtgctgggacatgtagtgtgtcccctcctttagatttcccactccaaggccttcttccgtcgagaagcttctgtataaagtattctcgtctgttgatccgtgcccacagtgtagtatgtgttatagtgtaagatctttgacccaatattggcggaattttaaggtctattttccagtggtgaacctgtgaatcacgctgctgcacatttggtgaagacgtgaagtagactgtttaggatgtaaaacattatatatatatatgtacatacatatgtaagttttagggaaagaatgtcttatataggcttcatgtggcatcttaggcaaaatctaaataaaaatatgtcaactgacatagcaaataattctttagtattttgttgcagtgtggtagcattttggttttctctcaaacaattttaggaaataaagcattttgtattattggactctcaaaccaagctagaatgttttccacagttagatttttaacatacaaagaaaacaaaagttactggaacatgaatttacctgcaatgtatacattgacacacctttttaaagtttaaataatttaaagcattatttggcaggagttaaagctaacaccaaggtaatatcttttctatgttctagaaaactgattgttctagaagttctagatattgcccaagtctagaatgaacctttatgattcaaattccaagtccttgggcttgtggtctttttcttatctttctctgccttatctgtggtcttttgtgtagaaaaaaatattctaaaaataaatttgagaaagaaaatccttggctttccacagcttttcccaataacctaacattcaaagagctttatagctatgttatttttttacttctttcctaatagttttcatgtattaatttgaaaaaaaattattattgattgcctaccatgtgccagcaatggtgatgggtgttgtggtaacagctaaaatggaccaggcgcagtggctcacacctgtaatcccagcactttgggaggccgaggcaggcagatcacctgagctcaggacttagagaccagcctgggcaacatggtgaaaccccgtctctacaaaaaatagaaaaattagcagggtgtgtggcatgcgcctgtagtcctagctagtcacgaggctgaggcaggaggatggcttgcgcccaggaggcggaggttatagtgagctgagattacacaattgcattccagcctgggagacagagcaagaccctgcctcaaaaaaaaaaaaaagaaaaagaaacaaaaaaaacaaaaaacataaaaatgcacaaaaatgcacatccttcttctcaagggagaaaggacactcgctcaactaagaatggatggttcctgactgatggtttaacttatgatttttttctcattacaatgggcttattagagtaaaatgcattttcaacatatatttttgacttaaaatgggtttatcaggacataactcaaggagcatctgtataatgatggaattatataaggaagtcatagaaacacctggaaaaacttttcaggaaacttttggaaggaggtgattctagagctaagtctttgattctcaaaggttgagtagaagaagttagccaagcagagaagatgcagaaaggtgccttgggaagagaaaagaatatggacaaaggacagaggtgtgagagcatagaatgctggtgaatttggaaataattcacaatggccgtaggctaagacaggaactggggaatgaagccataagcaggggcaaagtcgcacatcccagtttagatttagtcctacagatgatgtgaatccactggtagattttaagagggtgcaaggtatgagaaggtttgcattttagatgactggcctttcaaagtagtccggagaaagactaatgtgctggttattttctttgccccccagattcatttcctgcccttctttgctaagctctatgcc

SEQ ID NO: 2911 - DNA, 4001 bp, Homo sapiens
agaagaaaagaaaacaaacaaaaaaaattggctgaggctgggagtggtggttcacacctgtaatcccagcactttaggaggccaaggtgggtggatcacttgaggtcaggagttcaagaccagcctggccaacatggtaaaaccccatctctactaaaaaaaaaaaaaaaaaaaaaaaaaaaaaattggccaggtgtggtggcgggtgtctgtaactccagctactcaggaggctgaggcatgagaatcacctgaactcaggaggtggatgttgtattgagccaagatcgtgccactgcactccagcctgggcaacagagcgagactctgtctaaaaaaaaaaaaaagaaaataaaaaaagaaaaagaaaagaaattagctgggtgtggtgacatgcactcgtggtcccagctactagggaggctgaggcaggaggattgcctgagccctggaggtcgaggctgcagtaagcatgttgacatcactgcactccagcctgggtgacacagcaagaccttgtctccccccgccaaaaaaaaaccataaagaaagaaagaaaaaaaaaccctaaaaccacaaacattttgaaaacaatcctttcattgatttctttacacagatatataactttacacgataaaatcatatatatattaattaaagcctaagtgaaaatggaatattaaactaaaaactaaccatgggcaagacctgataggtcctagcctgattctgctacttcctatgtatgtgaacttgggaaaactacctaacctctttaaatccttcattcctttattaattaaacaaatatttattgagcacctaatatatgcaatcctctgtgctattccccaggctcaattgtttctctatctctaaaaagccaataaaaaagagtatcagctttataggattgtcataattgttaaaatatatatgtagtttagggcatggcctatacaattacaaaaattattgagggcttgtaattatactattcaagaaccaggaataagaaaaagggtcaaaacaggagtccttaaatgtttgcactaaaattcatgcatttatttcacaggtgagccttcagaactcagtttcgggctgtttgctcttcatttacacaacattctttcaaaatatgaggatctgctttccaaatacctagcagagaggaaagacggaggtgctgcagtcagccacgacacctgcggaaatcgggaagtataaccatagctttataactaaccaattatcccttgatggaaagctgacaattctccacactatcccaaggagagaaaaagatttatcctgctctgtgatgcactccctgacccctctccccgacgtgcttaagcataaattgttgagaaaaggtttaggaatatcttgtgaacaggtaattaaaatgaatatcatagaattgaacagctagaatatagtttacaaaccctctcccgtttccccccttaaaagtgatgttatactttccacagtgccttccaagtttcccctcgcttattactgcgaacccccgcaccaggaggggaggcccctggggagaggaggctttgtggtctagctcatcgccgaatgtcctgctccggaagtagtctctggcctgcaagaaacttttattcaatcattgaatgggtggagttgctgatctttccaaatctctcacttttctacctagggaactttcttttctttcctgtttgcggcagaatctttatgctcaaggctgattcctaggtccccgaccctgcatatcctggtggcaagtagccacccccacaatcttccaacagctggtcccgcctgggcttcctctctccaggaatactctcagtagcctttcccacgcaagccgggttcagggaatacctgggcatcgtcgacggcctggctgccgcaaacgtcacaggctcggagtagtgaccagcctagaatcaggcggcgagctccgcaaggagtctgggagtgaggccttctgggttgccatgggagcgacgtcgcggccgcggttgcgtggggagacgggcatcatgggaaatgtagttttcaggagtccttttacatctcattctcggcctcaagccttaggattgcttttagatcccaagttagtaactccttgttacctcctagaacgagatgataaggggttacaaacctgggatctaaaagcaattttcttttattttaaaatttttttactgggtgtcaactatatgccaagggtctctgctctctctctctctcatctttcacttttttcttcccaatcgccatgatttaggaatagagggtgtaacaatctcttgagctgttttctgctaatttactagaagcaaggaatattcggactttaaaatttaaaataaggcacgtaattttaatattttccaactttctagatgtttagttgtttcaagttttattcaatagcacattgtgtatttattaataaattaatgaagcaagtgcatctcctacatacttcatttactttgtgaatgtagattattttcttttggaactttgtggtctctttatagatctgcaggagtgtccaaataaataacgagcattgaaataaataacaatcattgaatatgcaaggccctatgctacacagaataaggaataaagagatgagtaagaaaagatcgctgcccttaagaaagacacacactcagctaattataagcacctaaggaagtgagtgatctaaactattgtatagaggtacaaaaattgcatgagggcaagtgaccaattatgcctgaaggagatggtgaaaccatggcactgatagtatttggtctgtattgaatgctgagtagactcaggctttctagcctaagatgccctgaatatttgaaggagataccctccctccagtcctctactattcggcttgatttctatggtgcgatgttcaagtacatgggctttggcgtgagatggacctaggttcaagttctgacttggccacgctggctaagttgtcacattgccacatcgggtaaatcactgaatttctgatcctgtaaagcgggaaagattgtgaatcttaaatgagataaatgtaggtaaaacataacttacgtgggtgtctgacacattataactgcttaatgcttgttattattgtgtgataagctgctggtcagcaacttcgaacaaagaaacacaaggaacacattcctggaaacaaggctgatggttgataaaagggtgtttatttcaaataaagtcattgggaacaaaatcctcccaacacctaggtatattttggagacgtaaagaacactaagctgcacataggaagggaattaatgggagtagagctcaccgaagaaaggatgatttttcaaaggaggcttatacatctgtcattgaatcaacagctatagcctggtgctaagccagactttaagctcacaaactgatatgggacagattgtaatgaattgtaatgatttgggttctagaacttcagaatacttttgcatgctagttaggaaggcctgttgatattgatagcaataacgacagctaacatttttgccaagtgcttgctatgtactgggcacaatactcagtacgagtacttcaaaagtacacttgtttgaataacggggagaggtgtttgaaggagggagcttggtaaccaggaaagtgaaggtgatccggctgggccctgatcagcagcattgattcagggttgattcagttgatctgactgagcaggtgagttcccctttcttccctcattcctcttgaggccttcatacttgggcaaagaaagtgactttcctgggtagatgaagattgttcttaaggtaagaatggaaggagaaggagacaattttatgctgctttctggatggaatgagcaacagtgcagaagggtaaaggcgtgtgcaggatgtatttgggaaactgaatagtttgggttgcgatcatataaagtgcctggtggagct

SEQ ID NO: 2912 - DNA, 4001 bp, Homo sapiens
tggagaaggtggcattgccctgggctttgaaatacaaatagacttgaaacggttggagatgttacattctattgtatggtatttctgttttccgaggagatcatcagtgcaaataaatagtaaggcattacaaagaaggaatacagagatctggggggagatagcagctgcacgtgttcggggtacttgggcgagggcaatagtaaagaggggcctcaagggatttggtcatcttcccgactcaagggcaatacccactccaagcgctggtagctccctgccatgaccactgacctgaacacatttaacttccctgggtttcaatttccttatttgcagaatggagacattggtagccaccacaggactgttacaggacaagggaaagagctgtgagcagacccaaacgagtgttagagcatccagagccctatgctaatgtgtgccctgcccagtgtccttagggaatttcttttccagccaatggtgacaccgcaatttctgcatagcaaagccttaggcagcatcaggtggacactggagaaggaaagactttgtcttgaagttgctcttgcatagtgaactcccaggcatgtcaccaatcaatgaaaatagtgaaattttcttaaacgtttcaaatcacatctttcaaaagaggaatacatataacttgtcccacagcaaagaataaaagctacacataaatctccctttgccaaatcatgtctttcatctatcattatcttgggggtgcttggagatatgattcagatcatgggtcagactgaaaagagttcccttggtgcctgcactgaaggaggcttatgaaaacaccagctactcttccttcttcatttgactatcttttctgatacgtagatttttattattattattatcgattccacaaagctacagggtatggctcctggctaagtggaaaccctctttcctctcctgatttatctttctctgcagaactggggtcctgactcacagctattgttccttctcttaattttgacagatccttcctcttccctttcccctcctgagacacccgctccagtgggaatctgccttggaggggttgggggagggggttcaggacgcctggtgagaagaggagtgtgtgtgtgatttctctgctgccccacacagaaatacctgtatgtattctaagcactacatgtagggacttagcttcttgaatttagagaaaatatccttgacattcctcaaaactccttgtgtcaaggccatttccatcctattctgttccttttcctactgattaagacggggcagattcaatacagccaatgttggataaagatgggtgaatgaatgaatgaatgaatgaaaaaagacacaactttcaaagcacatcatctacacgccccgtttttcagaggccctgattcctctctaccttctgcacccatcttccaacttacccttatccccactacccagtaaaagctcggactttatttcctctgggtgtcagtcttagaaaagtgataaccgctgacctacggcactttcgcttttccaatttttcaaagccctgtggcatttattgtgctctgcttattcctcatcgcccccctgcagaagtcggggctgggatttccgtccctgctgacaaagggagaaactgtggcctggactagggttagctccggagcaggggcttcagacccgccagtgagcgccgagagtcgggtagcacccgagcatgggcgcggcagccacggggctctcacctcggaaagtcaggcttgcgacagggtcgctgcgccggtccttcttcgcactggggaggttgctggccctcaccagcaggcagcacagcatggctgggcagccccggcggcacacaggcgcgcagtcagggcgggagcgggagcaccgggcccgagcacccacccagcaagcgcccggctcccaggcagccgcgccaagagagctgtcgccttcgctgctcctccgcggagaagtgaccaatgcctgggagaggctgcagggaggacaccggacacccgctgggcggaccctccccctccggcccctacccagatccgccctgcccgcggcgggcggggagggacaggggtcagacgggcgcctgtgggggtgctggtccctagctccgcgggtcccagctcccggccaggaacgaggcgccgctgacgcgggcgcgcagctcggcctccgagagcgcacaaggcgccgtggggcctgctccgcgggggcctccggtgaccaaggctccacaccagccagggatcccgggcccggtgcgcaccggtgccgacttggcagccgccctgtgcgctcgacgaaagggtgagaaggaggcaggagtgcaggcggaaggagtgggcaatcagcggcggggacgagagtgtgtcttcggggaaaccaagtctgagtgagcgctgaagggggagtgtgcggagcgtgccgtgcaccccgagccccccgcctcattgcctctcgcctctctccacctgccccatgatctgcgccagggagccggtcctctcccgtccgcaggctgtctaggtggccgttctggtttgctgggacccccgggtcgggagagactccgaggttcgagtccccaccaaccctcctcggagccttctccgcagcggtgtcgagtcactcatctctggaggcagagatctgtattcaaatcatactgcgttccctggagaactagggtccagctgcggcccattctgtcccctgcaagtcccccatccccaacaatctctacactccctagtctccacagtggaaagctgttcaaggtgtaagccatgaacggtgacagtcgtttcgcttattatgtctggttcctttccagcgtatgaacttcttgacacaggggccctggcttcgcacttctatcccccagcactccagcacctagcccctgtcagggcactgtccgtcttcccaccgcccaagtcctcactaaccaacctgctcactcagcctaaacgcactgctgcgcaaaatctcaactccctttcccctctcttattttgagggatacagcattctcacagggctaagccataaccctggcgaatccaactccgcctcctccacacctgcccccaaccagtgctgtgttggagagtaacacagccggcctgagtggtgccttttgtagtcatgacccttaactcaagcgagccctcactgctgggggcaatcatactatatgtcttgtctccctgtctcccggatgcccctaggacaccccatcgcccaacctcactctcagtttgcttcctctttacggagcagagaacttcttcaggtccccagtctccttctaacgcccgccctcggcatctgtgcccaaatcctgtgagttctctcctgttcctacaaatgaatcacccgtactccccactggtaacaactggacacttgggcatagaccccatcccctctcgcccattcagtggtgagcctgcagtgattctctcactctcttgccttaccaagttcccctgtttaccggatcatcccatcggcacacaagcatgatgttattgctctcaagaaagcacaccgttgaccccacatccccttcagctactggtcatttctcccttttcacaacaatgccctttgaaggagctctccatactttctgtctccaatctccctcctccattctctcttgaacccacccagtgacaccttcaaccccaccaggtcaccaaaactgcaaatccccctcccactctccttcaaaatatgtccaaaatcccaccatatctcaccatctccattgtaactgcccccagtggaagcctgtcatcccttgcctgagtcatttaatcgactccatggactcccaatgcgtctcctgctctgcccttgtccccatggtctatcctcaattcaattctcatgacctggttctactcaaagtcttccgttggctcccatctcactcagtgcaaaactca

SEQ ID NO: 2913 - DNA, 4001 bp, Homo sapiens
gagttgtgcaccaggagcccagagccctcagccaggctgctgaacagggccactgacctggcctgcccagagctgaggatgcggagaggaagcatgaaagactcccatgtcctccctgctggaaacacctggataaagctcatttccggaggccacgtgggaaactgattgagagcagatcaaagcagcacgttaggaaaaaaagcacagctggagtgccacagccacccccttggtccccactcttggtgtacactgctttccaggcctcaggaccattcagcaactcctcctcaagctctgctctggtccaacaaatccagaagccctgaatctcatacccaagagaaggtactcatgacatgatcccttgctcatgctgagctggacacaggcctgtgctttcggagcttttattccttggaacatcacaggtgtcccacacgctccagggtgtgcatgtgcctgggatcatatgtgcagatggtgtctgtgaacaggtgtatccaggagcttgtgaaactgtgctgaatggccagaaaccaactaatgctatgatttctggaagtctgggatgtagttagaagtcagatctctggggagaaggggagtggcaggtagtggaggctgagaggaaaacccacaggctgggtgggaggttcacactctttccccctagttcttctcccccagtatggttccaagcccaaagacccagctgtgtagatcctagctctggcttggtcctgaagggttcctggagagcagccagggcccagccctcagctcctggaggaaaagtcaagtcataactctatgaaggccctcctataggaggtcccaatctgataagggagtggcttccctgctcaaggaggcctcactctgatgatagaaagcagatacgacccccgctccctccacccactggtccgttgggggcaggggttgggggcagagaaagtctgtaaaggttggtgctgtgacagctgtgcccagctgctaaatttcccccatcctgtgcgcaaagcaagggtagggtgccttcgcctccagtggctgccagcctgccaggccagcctctgagagagagcaaagggccaggaaagcagccaggcgcagatcggggcgggaagagagctgggttataaataggcctgggaccagaccttcaggggagaaggaggagagccctgcagtacagcgcttcgccgccggcaacgcagaaagacctcttttcagagatcccgaaaaggtgagaggagagatgctggtcccaccttcctggcctacctcagtaccaacctgggctgaagcttccaggagaagcgccattcagacacctctctccttccagcctcagtttccctctgagtcgccctctgcagacctgtgtcgttgcaacactcaacgtcagtctggcggggccagaaagtctcctgtctctcagctctaggtgctctccagggttgagagccgcggcgtcccctcctctaccccaccccgaccccgggcgagggtggtcggcccctcctacctgcaaacaccgcggagcagtaggcatcgctgatgtcggtgtcgggtgtgtggacgttctcggcatagaggatgaagaccctcagcatgcttggcgcgtgtagggccccgtgcgcccagggcgcaaagagggctcggaaaggtcgggagggccgaggcgccgcttgtgggtcccctcgctggagagggctggctgggcgaggccggctcgaatctctggctcctggcttagagcagttgctcttaaaggggaacgggccacccccggctgctccagtgggctaggctgggtccccgccccggctgcgctcaccccgcttgtcagccggcgttccgagaacaggggcttctgctcatcttccacccccgccgcccttcccgagctccgtcgagctgtaatctaatgctccggctgcggagtctcccaatgacacggcattttgcacctggctgggcggcggccgcgatggccgggggctggactagggctccgggcgcccggcgtagcccagatctcgctcttggacaggagaaaggctcggctcctcccctgagcttctaccccctggctgagtgctgcgccaaatcggttgcctccttccgcctcggggattggagcagtctctccagaactcaacccgaccgcccggggtaggacgggggatcctggggaggcctctttccctaagagaagcctggagttgagaatttcattgacaagcaaggcagctgccttaaaaactttgccccctttttctggctttaaaagcaacacatgccattttaaaacaaaaagcataaagaaagaaatctctggttctgaaaaaatagtatattaacatttgggtatttggcagcccaggctttctcctctgaatgtatacacacatgtaaattgcagtatttattatatatctgagtgtagaatgcagtctgtgtcccacgttttcatgtaacatcttacatcattaaacaattattcataaacactattttcaatagctatataattgtctgtcatatgaatgtactagattcacaaactttctcttgtttcacatttaggctctccccagattctactataatagtgagaaagggagtttctttttaataaaaaagatataaactcatcttagccctccccctccccccacccagttcttcagattagattgtaaggtcacaggatatgacttttttttaggttctagtacctattgctaaactgccttcctgcagatagatccacactcccggcagcctgttgactcaccctctaaagagggccagttggatgggtgtgcagctgtcagcaaaactcccacagcagcccctgggggcagtagacacacccagggcaggatgggctggccgctgacaggtggctgatttttttccccatagggagatactagaagagagcaacactccccaaaaaaaggtctgtaatttcaagattagggtagcaaacatttcctgtggtcacttagggtccttctgtagtggtctatgccttcttttctttgcctttagcacaacgtatggtggggggtggggagaggaagaggaagaggaaggggggagctgaaatgcaatcattcatttaatgggagtgtgtcaagtcctaaaataagtcaggcactgtcctgggtggggacacagtggtgggcacaagtgacacagtctgtgttatgggctgaattaggtcctctcgaaatttctatgtgaaaggcaacttccagtaccttggaatgtgattctacttagagatagcacctttaaagaggtgaacaagttaaagtgaggtcattagggtcatccaatctgaccagtgcccttataaaaagaggaaatttagatacagacaaaccagggatgcatgcacgcagagaaaaggccatgtgaagggcacagggaaaaggcggccatctgcaagccaagaagagaggcctcagaagaaaccaagcctgctgactacaccttgatcttggacttccagcctccagaagtgtgagaaataaatttttgttatttaagccccccagtctgcagtattttgctatgacagccctagcaaacaagtagagtccctaacctcaaagagcttccacttcagtgagggaaactgacacttatggaataatcacgtcagtcacataccattacaaatatgtaagtgccataaaagacagaaaatgtgggagtgtgagaacagagagcagggagtcctcatcgcgtgcccaggacagtaagagctatttgagatgagatctgaaggtcagctaggagttcactgggcaggactgaggtgggggcaaggaagagagtattccagagagaaagaaggaagcgctctgtcaaggccatgggaggagaggagtgtagattaaggggttgtggaatggggcaggcaggctggagggcaccatgcagggcctgggggaagctgcctgaggcctgct

SEQ ID NO: 2914 - DNA, 4001 bp, Homo sapiens
atcatggattaaagacatctacctcaggtgaagtggactgtgcctaaacattgtcgcccaaacaagagaggttgtttaaaaaccgtctacatgttttcctttctttttcaagaggtacaaacatatatataactacaatttgctctaaatcttttgttattcatcatttccttaggctttaaaaatgcttagttttcagataagatgccaatgttagagaatgggagatgtcagaaactcctctgtcctatgtttggagaaaaaaaaaattgagagtaggcataatagggtggaaataatttacaatagtgtaatgcccaacatttctttcctctggaaattggccaatgtttgtgccctggttcctctcagatgcaccaagcagatacacagaatcagcagacaaggggctctgcaagttcccagatgctgctcttggtagaggagcgactctgtagctgctctaccatctggccatcactctcctgtcaagttatgctttacagcgtcatctgatgaagttaggcagcataacacggcaagctgtgatacagtgcaacatggaaaatgaatgaggagcccaggtgagccaacaccagacccacttcctcaaggctaacttttacattttttttctgccgatgcaaacacacacacacacacacacacacacacacacacaaaacaaactcaagaaaggaagaaactaccaaatgtatcacgcccaaagctatgaacaaagcagttttagatgcttaaagaaatagtaacacaagctacatgtgttcttcttcatggaagcaaaatgattgggaaatatcttttgaccaggattcttgtttttgctcagctacatcagtatatttattttccacagatactaaggtggatataatacaattctttcaaatgtccatcatctagttcaatgatccaaaatagatgctgtaggccagtggtcctcacagtgtggtcccaagccagcagcatcatgtcacctgggaacctgttagaaatgtacattcctggactcttcccagacccacggaatcacaaactttgcagcatattaacaaacctttcaggtgattctgatgcatgctaattttgagacacactgccttagaaaattgagaaagaagaaaattgagagttgaatggattacctactgctttgtgtaaagcgtattaatatgagagcccaaatttggaaaacccaaaggtattgtaatcatttataatgttgttttagataaacaactagggatcatacagaatttcatataaaacaagtaagataacaatgtagattttggttaggggagtaaggctccaaacagatctagcaatagaaatcccacagatcagttctgggcctaacttggcattcagcgatgttagaagaaaggggaactagtttctccatatccacttataaaattttcatatagtgacaactgtgagacctttctcccaacttgaactacacagtactgtgaacttacctatgacattaaaatatatacgataatttcattttaatagtaaactatgaatatacataaaactaaggtaatagtttctgtgtatttgaatagcaattcaaatgtaattatgttgacatcaagtcttttgttagattatttttggtgctttcgagacaatagaccagatactcttcagtacatggtggatttctgtttagaagagagagaaagccactttaatcaaataacagtttctttttcagccagaaatttgccaaatgtttactcttcttcaaatcagaggtctgaaaatataacatctgtgcctaatttttctgtttacaaactatgctcagaaacttgacaataatactcaccttgtttatctggatccatttcacaaatttcctggaatgacagatggcaagtgggtccctgtaactagaaatgaaccagtattttaagcagaaggttttgcagcagaggaatgaggacaggggaacaaaaaggcaactaaacaaatcattttacctgtggaaagtgactgcaaggtgttcaaggtgactgaaatatcttgggaggaagaaaacagggagaaacatagaagcagaggctcctgatactgaccacgcttctcagaaaactgagaacagctcctgaaactaataccatgatgacttagaggctttgaggcattgtaattttaagagtggactgtattcttactttaagatgatatcaatttacttgaactttaagaacaaaatttgaaactctcaatacttaaatttctaataatactatgctaaatcattctacatattaaatttctaacaaaagctatcaacttgtcatatatatgcatatatacatacatgtatgtatatgtatacataggattctgttaataattaatttttaaaagagtagtcaattagctacctttgttaattgtttcatgttgcaactattgttcaaacaacacacacacaagaggtttgtggaaaatgtatattctgaaaaaaaataggcaaggatttcaaaatttttttgtaccaaaataaactcacactagattgttgaagcatgtctgaacaggatttagtttgaagcattaagaaggataagatatcagtctgaaaatagctcttgagagcaacatgaattctgctaaaatggaagcaagaacaaacgtcaaatttatggtaaaacttgggtggtaaaatagtaaaatcattgatgctttacaaaaagtttatggggacaatgccccaaataaatcaatagtttacaccatggaatactatgcagccatataaaggaacaagatcatatcctttgcagggacatgggtggagctggaagccattatcctcagcatactaatacaggaacagaaaaccaaagactgcatgttttcacttataagtgggagctgaacaatgagaacacatggatgcagggaggggaactacacacactggggcctgttggaggtgcaggaagaggaagagcatcagaataaatagctaatgcatgtagggcttaatacccaggtgatgggctgataggtgcagcaaaccaccatggcacatgtttacctgtgtaacaaacctgcacgtcctacgcatgtatcccagtacttaaaataaaattaaattttaaaaaaagaaaggaaaaaagaaatcagtagttcacagagagataactcattttgagaagggatgagaggatgtgaaagatgaaacccacagcagtggaccatccacatcagtttgcaagaaaaaaatgaagttttttctttaaagaaatgtgaatgctgtaatttaagaggacaattaacagaagaaacaatagccaactccatagatagctcaactgattgagcttacacaattctaactgaaaaattgaagttgcgctagctttctaccagaagggtgccaaaaccattgcacgtagatcagctgcagacaagagcagggtcaatggaaattttaaacatgtgggaccaagattctgaagcctttctttgcagaattgtaacaagagatgaaacatgactttgccagtataatcctgaagacaaagtacaatcaaagcaacggctaccaagagatggaagtggtccagtcaaagcaaaagcagacctatcaagagaaaaggttctggcaacagtttttaggatgttccaggtattttgcttgttgacgggccaaaagaacaataatatctgcttatcatgagagcattttgagaaagttagccaaagcattagcagaaaaacacccaggacagcatcaccagcgagtcctccatgacactgcttctgctcattcttctcatcacataaggacaattttgcaagtgatttgaagagaaatcattaggtatccactttacaattctgatttggctccttctcttttctttttgtttcctaatcttaaaaaatcttcaaagggcacctagttttcttcagttaataatgtcaaaaggactgcactgacatgg

SEQ ID NO: 2915 - DNA, 4001 bp, Homo sapiens
tccccagcagtgggttggctggtaataagaggccatcaagtggaaacagtgagtgtaaataaccttttcaagaagtttagctgtgaaagcactttgggaggctgaggcgggtggatcacgaggtcaggagattgagaccatcctggcttacacggtgaaaccccatctctactaaaaatacaaaaaaaaattagccgtgcgtggtggcgggtgcctgtagtcccagctactcaggaggctgaggcaggaaaatggcgtgaactcgggaggcggagcttgcagtgaaccgagatcaggccactgcactccagcctgggtgacagagcaagacttcgtcaccaaaaaaaaaaaaaaaaaaaaaaagtttagctgtgaagaggaagagagacagtagatgggaggggatatggaatcaagggagagatcttttaagatggggatggatttagaatgcggttttagtagtcaagaatttatcatctggagttagacatttggagcttcaacccaagtttctacacttattatccagccacaggcaagccggcgttacatgcatctccaagtctgttttggcaaccgtgaaacaagaataataatcttttagtattataaaacactgctgtgagaaatgagaaattaaatgaggcaataatcacaaactatttggtaggggaaccaggcataatgacttgggaaaatgtttaattactactagttatagaaagaaagcagcagagaaattgaaaatacggggagaggtcgggctcggtggatcacctgaggtcgtcaggagttcgagaccagcctggccaacacggcgaaatcccgtctctactaaaaatacaaaattagctgggtgtggtggcgcatgcctgtgatcccagctacatgggaggctgaagcaggagaatctcttgaacctgggaggtgggggttgcagtgagctgagattgcgccattgcactccagcctggggaacaaaagtaaaactcaatctcaaaaaaaaaaaaaaaaaagaaaaaaaagaaagaaaagaaaaagaaaatgcatttgttgagggccctgataaccgcggggaatacagcatctggtcctgaacaagagaagaaatcagcctttgcaggaaagggagccaaatttcctaaccattttctctgtcaaacaggtggggagataatttgatgaatgggagctgtggcgtgggaaatataaagcgtggacaaggttttaaacggctgcagtagagcagaaggatgggagaggaggcagaaaaacaaatgataggttgcagagatacagctagagtccatagaaggagataaacatggactctctaatgcaaagttgagcaattttctccaacagtgctctgaagttccgatgtaaaagcctagaagactgataccacgtctgtgagcagatgctgaaagcagaaggcgggagagcgcagttcgcagcacgtgatgggcagcgcctggcccagggggagcagacgacccagacgacggccagcggggttggcggcggcgcggggaggagggggccggatttgggagaccaccgcccgtccccgtcccgtcccggagcttaccagcaggccctccacgttgatggggtctcggcaccgacggcgaaccgtctcctccgtcgggtccaggaggagactgggtaacttcctcgccggccgctgctgactcatgctgcccggccgggcgtcctgctcccctcgcaccccacgagctctcccgccctctcgcgctcagctcgagcaccgccccccacgcgccgatttccaagggcccagcacctaaggggtccgcggcttcctccgaggcgccgcccggctaggccgtcccgcccgccagtaaacgcggcacggcctcacgtgcccgggagctcccgacgcagacggaaaaagaggagggagacccgcggatctcaagtcgcccggcccgccatcttcccgcatgcgcagtacaccgcccccctctgcgcatgcccgccgctgccggagcgctcccacgcaccgatcctctcccggcggctgccgcccgggaaacccggaccgcggaatccacggagaggctggcaaaggaaaaggaagaggtggagccgaattccagaggaagggaacaggggtgagagaaaagaggcaaccgggaaaacccagcggtcgcctggaattctcgacggtgataactgaaagttctgaggtgataactgaaagttctgagccgcagagatgttcatttattccttttttttattttaattttttttttggtcgcccaggctggagtgcagtggcgtggtcagggctcactgcagccttgaattcccgggctcaagcgatcctccacctcagcctcccaagtagctgggactacatgcgcgcgccactgtgcctggctaatttttaattttaattttagtagagacagggtctcagtatattgccccggctggtcctgaactctggggctcaagccgtcctcccaccttggcctctcaagtgctgggattataggcgtgagctaccacacccagccttcatttattcgtgagctctgttagcgcatcttacaggcaggtcagtgttgatgcttagtaaatgtgagcaaccacaccattgtggaatcgttttacctctgcctgcccgcctgcctgcctgcctgccttccttccttccttccttccttccttccttcctccttcctgtttgacgaatgagttatcgttgacctatagtgtcagatattggggtgggcacaggcgatacttattcgtttgaatatgccacgggttcaacctccaatttcagtggggacagataagtaaacagagcatgttaatttagctggagccagaaggtgtgttttcaagtcctggctgcctctacgtataaactagaagaccttattaagccagttacttaatctgtctgtgcctcagtttccttatttggaaaatgcaaataatgacaatacttacctgataaggttgttgtgaggattaaatggattaatggatacaggttgctgtgattagaacagaggccagcacatgtttgaaataaaaaggcaacacaccgtggtatgtacagagttggagggaaacaactggttagactgggggtttctacacagcctgaggtgggcgaggtgaggcagggaaaaatccccgaagaagctggttccccactagactgtgaggtcagaggccttctctaatctttttttttttttttctgtcacccaggctggagggcagtgtcacggtcataattcactgtagcgtcaaactcctggcctcaagtgatctcccagctaagactcccaagtagctgagagtacaggtgcatgccaccatgcctggctaatttttttttatgttttattttattttattttttgaactccttaccttaagcaatcctcctgcctcagcctcccaaggtgctggagttataggcgtgagacacccatgcctggcttctaatctttgtatctctatcatctagcaaagtgtctggcaaataaaacatgctctattaatgtttgctaaataaacgatgagaaaaaaagagaacgtagcggaggtctcgagaagactgcatattgttgcagaatggagaatttcccagagccgttagaaatggccatttgaaggcatttattcagcatctgctatgtgtttggcattccacatgcatttgcttatgtaaatctcatatcaaaactgaaagataggtatttttctgcccaatttgcagatcagcaaaattaagatcagcaggattacaaaaatttactcaaggtcctagtaggcagtggtagaggcaggctttgactccacaactgattaattaatttggcattcagatctttaggaagattcttcaaggacgactagattctctacaaccagagttggggttgggcaagtaaaggtggggtgtggatcaggacggagtagcaagtggtccaggctaaagaaag

SEQ ID NO: 2916 - DNA, 4001 bp, Homo sapiens
gcactcacgcggatgacgtagcgcgaggagttcctgtcgtccaggctgaccgtgagcgagaagagcgcggcggcgctgtacacgccctgcgccttgtacagcagccggttgaggtcccatcgcgccgcgacccccggacgctcctccgcgccgcccaggtcccagcccccgcagtcctcgatgacctctagcatgggtcgcgggcccagtcgctcgatctcgcgcatgtcgaggcacgagcggaagaaggcgcgcaccttgcgctgggccgcgccgccaggcccacccccgggccgcgccagcaggcgccgtaggcgctcctcgttttgctcgccgatggccgcgatggtgccataggtgagcttgtcgtcggggatggcgtggcgccgcagccaaccgccgcaggcgaacgagtagaagtcctggcatgggtcgatgctggcgtccaggttggcggccaggaagcgagcggcgcgcgcgaaggccttgcgctcagggcagccctcgggacaggcgccgccgccggccgcgaccgggcccaggtacttgagggccagcatagccgccagaatggcgcagaggccggcggcgaacaccagccccgacagcaggcacacctcgcgccggttccagcgcggcagcccggaccgggccccggtggcgctgcgcgcagcgcccaacgggaagcccgggggcagggaggccccgcgcgcgccccccgcgccgcagcggctcacgtacttgacctcttggaactcatcgtagtgcgccgtcagcgaatacgggggctccatggcgccgaggccgccgcggtgcagacctgggccacctgggctacgggatgcgcgtggccgccggcctcctcgtgggcctccgcatggccctggggccgcagctgcgggaagggcggaagcaggctcaggaggcgccgcagccggatggggctcagggtcaccgcgaggagggacacaggcctgggtgcagaggccccagccgcgggcctcattcactgcggaaaccagggactatgagggttcggcggggccaccacccccgggtgcacagtggagtcttcccccctgtcccctccctgcacacacttgagggccgcagggttgggagggctcttattggaagcaagaggcgccaggcaaggggcctggcacgtagtgggccttcattgaaaggtcgtccctcttccccttcgcctttctcttccacgacctgccccagccaaggccgggtggagtgggggaagaagcggaggctggagtgaggaggtgcggtcaggggcgcgtctatgcgacactttcagctctccgcgctggacccagacagacgctccgcaaagcggccaaagaaccaaactttgtcctcgcggaagtccgcgggatcgaccacgccaaccccgctccctggctccttctgctcggtggcccgacggcccactcgccccttccctaggggcgcgcgccaacgccccagggtggcggacacacaacccacccactggacggccctgatggagaacccgagacgggttccctccccccactcccaccatctctgtccccgccccgagccactcctggcttcaacaggttctccccagaacccaaacttgggcgaagtttcacccccggcggggagcgagctggctggcgacccccgagccccggcgccgtgcggcgcagtccgcggagcccgagagccgagcccgggagccgcagccgcagccgcagccggagccgcagccgagaggacgcagacaaagccgggaggctccgcgcagtggcggcggcggcgacggaagtggccgcggtggtggcctcagcggcagggactcgggcgccacttacccggcaggtgcgcgcccgagccggcggtgaccgagcgggtcgggcccgagcgggggcctgagccgcagcgcagccgagcgggcgtccggtgtctcccagcgcccgccgcctcctctgccgccgcgccgagcccgccgcgccgcccgcctgccggcccgagggagggggcgcgccggcggctccaccctcctccgcccgccccgcgcgcccctccttcctcctgcatctctcgggccacctggcagtggggcggcagcgcggacgtgggtcggcggccgcggagacaggctcccgggggtcgtgcgcgggctgcggtcggggactccgggtccagccgcgttccgagacgagtgagggcagcgagtactcccgtgaagggtcccctccgatccagtgtccccactcccagccgcccaccagccggctggaaaggggctggagctggagatgaggagccgaggactcctccgaagggctgggggcggtgtcagtagtgcctgtgtctgccggcacagtccctggcgcagagcgcaccttcactaaccggcttttttgtcctccttggaacccctgccctggatgggctctccactagggcttctggttggcctcgctcccttcacctagcccctggtgaagggagctcagcggggactcctgcaagaagagggcttgccgcccccttccccatcctccccagccttgggtggccctggcaccacggctcagggagtccctggcccaggtaggaagaaaaggccaagagaagaatgagcgaagtctccctgctggagccagggaaggctggagcctgccccctctggccagcagccctaggcctcagacaggccctgagcctcaagaccctggtatgtggactgatgggagggcaggctgggtgcagggactctgaatttactcaccgcctgccttcttccaggtaaactggctttttaaatgtggggcctccccactgcctggaggcaaagccctcttctacctgcctgcctgccttggccagacagcctggccctaatgggacacagagaacttggggctccttggaagactgatactgtttctggagtctctgctttctctgccctaccctgcctctggtgtctctagcaggagaccccacaaagcaccagccctcccaggtctgccggctccagcccgtaggattggcttaaacaatgtgtgagagccatggagcaccatctaataaaaatcacaacaaggtagggactctgataacctacccatcatcctgttctcctcctcagggtctgtgcatctgcccagctcctgagccctggccctgagtgccggcctctgcccctgtcttgcctctccctgcctcttcatctctccatctctaagcccccactccggataccctgcctccatctctggccaccccagggttgtcctctgccccatgcatccttcttgggtcctattaattctaaagaggaaaaatggaattacttataatgtggcgattccatgaaggggggaggggagggcagggaggtggcaaagtggctctttgtgcttttaatctgcatttttccctcaatgttcccgtctccaggaggataattttccagccttttcaggccctgattggtatcatttctccagcaaggacagcttttattttccccgaaatgaatgccatgaaatttccaagaaatgtaaaaatggatattgtctcagagagcctcttccgacagaaaggcacagaggcaaacacgcttccctagggactcttctgctccagtcccgggggtggggtggggggcagcccccaggccctcagtctctcctccctccttttgccctccctcatcccttcctcctccctcccgggtcagctctgggaccccccttccagccaccctctcccagactcagctgctattggtctgctcatgggcctcccgactccctgccgggcgacctgcctggctccacctcaccttttcttttcacatcgcatcccccagccccgggctgagagcagcaaccagggcctacaggagttgacttggaattgggccctctgacccctcagtcctggccaccccacacagactgccaataaagagaagtcagaggcccacctccttgactctc

SEQ ID NO: 2917 - DNA, 4001 bp, Homo sapiens
ccaggtctgtctgcactccggagcaatgttgggctgccgcccaatggcaggcactgggctaggcaagagggtaccatgatgcctgagaaacaaagatgagcccctgacatgtctgtgcttcacaaatgtgtatgcccaacaaaatgaaagtccagctcacaaaagcaagaaaccaggtagtggccagggagtgaaaatcaagcatttcagggaaagtgtatttactttttcctcccaaagactggtccttccaagattatcctccaactgtgctgtcacaaattaatcctcccacagcacagcctggcccacttagggatggggaggggtacagtggagacccccggccaatcgccaccaggatcgccaaactttcccagccgtgaagggtacacgtggactgtcatcggaacgaacgcttatttccaagccttgaccagagtcactctctttttggtggcctctgtcaaaatgtatctttaaaggttttaagtggctatgacttacaaatctcagagtattaagccaggcaagaaacattctctattttagatgcctggatcccttttttccttcagtctattatggctcttcacttctttgttacactttcactcttgcttagaaagtgtctcaaaaatgccacttgagagccacagagcagtggcctggggactggggaagaggacggtggtgctcctgtctctccgtacgtctcctcacatgcgtgtacccctggctgtgtgggattgcccactgaccggcatctgccctgcttgttgattttaactgtccctcttgttgctgacccagcacaacatgggcagggaaacccagtgggaacctcgcctgctgacctccctgcccagccacccgcttctccctgagctgacatctcaaagcttggctgctgcaggaggctgggaatcagagccgactgaatcagagccgactcctgtctaggagcccaacccaccccacggtctgtcagagtgttgagaggaacctcttggctggaaatgaaaacctcaatcatcacaaataggtacccactcccctccttctctccctctccccgctcccccgccaccaacacagaggccaggatatggggggtctcagacacgactggaaaccccacttggaaggtctcttaggtcacagcgggtacgcagagttggaggcaggtacagagcccagctagagtccctgccgcgcctgccttccccagtgagccgggcacaggggcaaacctgagaaacatacttttcacgctccctggaggaacccgttgcttcagtagcccaaatcttaaagcctgtgaagcacacacagaatttgtctccctaaccaaatgtgcaaccaacagcaaaacagggtttctgatgtttttctaaaacaaaggaacaatctcaggtcttagaactggtagcgcagacatactgcaatcggtaaagcttgttcaaacgcaacccaaaaatgacatgcatttcaaaaatgcacccagcctctctcccagcccatgacacctccgtctcggccacagctgaagagtttagaaaaccagaggaaaggaccagggcttacctggcttctgttggaggtcagcttcagtcccagcagaagatgggtctatgaagaaagtcaggtaccatccagttctgggtgacaggcttcacaggtggccaccgtggcagccctctcagaagcaggtactctatgtccttaggggccagcagggctgcctgggacctggcacacctctctgacactagccccgcttcctttccgtttaaagggcttcccgggaactcttccttgaccgctccctgccctgtctgcaagtttggaaactcagtccttgccgaggggctttccctcattgcaaactcacctgcaccatctagaggtctctcccagcactggagaggctggagcgggcacgttcagccctgctgccataggtccctggcacacctggctctccggccgtctgccccttaagagatctgttggaatgcgtaaaaatcatggatttttttttttgcaggggtgggggccttgcttctatcagagcctttaggcgtgggagtgctaaaaagctaaactagcattaaaatatcattaatcaaagcttgttcgtagaaggaccccccactgagatggctacaggcatgggtgccactgcacggattcagcttccaacatgtctgttcacattctcacccatcccccgcacatccctcagggtttgagccaccaggactgctcttcctttcctctctctggacacctcacaccaccagtgtatacccatgtaacttcagataaccatacacaccccccgtataactaggtaattaggaagccatttgaaacatcaacattttgaaaggacatacctttcagtattgggcaattatttctcaaaaagtaaatgattgggggggggaaaacagccttaaaataatgtcattctcttgtcattttctccctcattcacacctacacagataaatacaggaacagagcagctcctccaggctagatttctgtgttctccttttccatcttgtcccctctgccttggaaacctacaaggtaactcacacatgagaaagtaagagcttaagaaagaaacagtctgggctccgtggctcacacctgtaaccccagcactttggaggctgaggcgggcagatcacttgaggtcaggagtttgggatcagcctggccaacatggtgaaactccgtccctactaaaaatacaaaaattaggccgggcgcggtggctcacgcctgtaatcccagcactttgggaggccgaggcgggtggatcatgaggtcaggagatcgagaccatcctggctaacaaggtgaaaccccgtctctactaaaaatacaaaaaattagccgggcgtggtggcgggcgcctgtagtcccagctactcgggaggctgaggcaggagaatggcgtgaacccgggaagcggagcttgcagtgagccgagattgcgccactgcagtccgcagtccggcctgggtgacagagcgagactccgtctcaaaaaaaaaaaaaaaaaaaaatatacaaaaattagccggtggtggcatgtgtggaggctaaagcaggagaattgttcgaacccaggagatggaagttgcagtgagccgagattgtgccactgcactccagcctgggcaacagagcgagaatctgtctcaaaacagaaaagaaaagaaaagaaaaaagcagacagaaatgtatggggctggggcaaggacctagactgtaaaggactaattctgcctccacagagattaagctgaaccagagttacttagctgacttgatccttgtggatgattaatctagataatataagctcccaaacaagaattttaacttgaattttcaggtttggttgtctaccctgctcatgccgagttcagactgagggtctgtgataaattaaagtcactgaaattattaaattaggaacctgggaaaatgaatgggaggtattctgggctaatctgttctactccatataatttttactttctggtgtgctcacagtgtgtttgaggtttgggattattttaggtgtaactaaaacattttttctattggaaattaagtggtgatttaaaatttaccaaaaggaatgatactgatatttcccaaagagagagaaaaaagacacaagaaaaaattaaaatggcacaaaatatggatgctgtaatagaagccaagggagttttttcctctctttgaaaaaaatccaaacatcatggcattaagcaaggttatggatggttatacttgaagtctgcctagtcatcatatccaaatgaaaatgagtatataattaattcagttgattaagagaaagaatgaaatgagaaatcattgcttatcttcatcatgtaaagctccagagctttgaagatatgtgattttctgttttatacatttcctaagagactgaggcagaaata

SEQ ID NO: 2918 - DNA, 4001 bp, Homo sapiens
tggccaggctggtcttcaactcctgacctcgtgatccacccgcctcagcctcccaacatgctgggattacaggcatgagccactgcgcctggccgatatgttctttatagaagacgccatacctcctcatcatcagatccaaagaggtcaatgtcatcatcatctttactatctgtagctccacttcctgtagtgtcttccacatcggcaggaccatatttgcccaaagctttcttcactcctggcaggcttgaaaaacatttaaattcaaccactattgagctagtataacatccttttccagaaaatacaaaataacttgttttaatcactacttatcactagatcccttttgcaatcataatttaccctttcacatgcgcccaggtaaacactgtcatatgttcaactcctcacccgacaagcattagtaccatgtgagacattattttcaatactcactatgatttactctttcagtatgaacatttctgtttgagatttcattaagtatgctcagttccattcttagtgaactggagtccacttccccaaacttccacccttgttggcagtttcagaagaatggccaaggactgaatgaatgagccaccctctcaccccagaggtgggccccccaggtcaaggtcgaggcacattggcagggcagtgtggggaaaagttgaattgctgctgtccatgttctacctgttctgtgaaaaaatggagggcttcagtctcttggccttctaaggttacagaaaaatttagcttacaatatcccaacaaaactaaagtagcctgggtccagttttgtcatgtgaacatcctgataaacttcgagagcagtcttattcttcagctctatacaaagatgattttacctggccttttccttttcgtaagacttgatgtgattataccaacgtagggcatgacacaagtcggcaggcggtgggctggacacggcttcaaatactgccacatctgcttgtgatggcacatacctgccaaggacacagaaacattcacacacacctttgaaaaacaaacgccagcgaataaataataaataccgtatgcatcacattaattagtgggcactaaccccagcagggttgctttaatgcttttcttttcttattagctccttcaaatcaaaccatatgtttgggtcaccgcgctatcctgagaaatgtctgccactaagtagacctcaaatactgcaatgtctggcgttgctctatctacagcttaacatgtattaactgggcagcgatgcggaaacacctggctgaattaagtgtaaataaagcacattttaacctttccttgctcgtgaaccgctccccggaggccgggctcgccccacacgagggccttgggagacggcaacggggcgctttcccctccctctcgaaagggccccgggcccggcctccctccctcccgcggcagccgacacgctgcgccacgtggccccggccccgggcggagaaacctccccgccaccccgactcagcccgtccgctcacccctcgatgtagctcttgtccgccaggtaatcgttgagcacctggaggccggcagggcttttcaggtctccgaaacccatggtgtcggctgtatccgagagctggggagcagcagaaagagagcgcgcaaattgtgggcgccccacgctgaagagaggaaaaaggacccgaagagaccggaaaattccttatatagagacggaggcgtttccctccaccgcgccggaccgaaggttaaaggtcaaagtacttttgcattcccacttctccacgtacgaattgggggccctgaattaaatggcccacaaattgtccatggacctttcgttgcgtttggaagtaaattaataaaataggcatgtcttaagttcgtacctccacggctcccgaagatgacgggaaccagccctagaagcgccggagatgaccgaagacgcccggcctcgaggctggggccacttccggcggaactgcgggtccaagttgtccttcccgcctccgggctgggccgacctcagctccgccctctggtcggctgacggaaattgccgacaaacttgtcgaatgcaaggattctagtccctccgggctttccgttctccaggcccggctgacagagttagccgaggccgccatattgaataagcgacccggcctcctagggggtcgtcgtggtccagacagtttagcagaacagcctccgcggctccggggagaaggtgaggtcttgtatggatgggaagggtgaggtgcgtcggccagaggcttatttattgacgggactgtttcctttggcccacgcgacgtagtcttctgttgtccttgactgggcgccgcctcccgccccgccgcctcggaagcccctgagagccggcagatggggggcttttagccacggtctctggtctgatgaagcagaaaagaagatgaggatcagggggtcctcgggaacgctgtcacgaatgtaggcttgcaggtgaccttccctctgcagggaaaattcaggacatttccctctcagaggaggaggccgttttattccccgggagaggaccagtgtccgatgacttaggccttaagactaagcctttccccccagatttttacacgcctgatacagtgcatgattgtttggtcgctgttgtgttagcaatggctcacgcttctgtttgttgtccttgtttgtttggtccattgaccacgttggacagcatttttttattcctttaactaacgggaaattgagaaaaacgacttttgaaaagttagcccaggattgcattgcaaataacaaaacgttgtttacaggttattgggatccagtgcttgaactgtaaggtcttggatcagacacaactctgttcacacacgaattgacggtatagaagtgtaacgttaactgtttttgatgaataaacaagttatttttgttttgcggaatattcttgttttcaccgacttaaggctgccagagcacctgcactttttaaatccgggaaagtggtctctacaaattaacgaccagaaattagagattcagttcacttaaccgttattgaacatttactacgagccagaaatgagtccgtaaagaagaataaaatggatgatatgctgggggaatcgtaaatgttagatagcctggtcaatgaaactgagaaaaggcttttaagccaagatttgaaggataaggaggggccagggaagagcatttcagtctgaggtcacagccggtggcaagaggggagaggctgtgtgggaatagtgtggaagcttggtgacctgttaagctattgaaggccggaggcggtggctcactcctgtaatcccaccactttgggaggccgaggcgggcggatcacgaggccaggagatcgagaccatcctggctaacacggtgaaaccctgtctctactaaaaatacaaaaaattagctgggcgtggtggcgggcgcctgtagtccagctacttgggaggctgaggcaggaggctggcgtgaacccgggtggcggggcttgcagtgagccgagatcgctccgctgcactccagcctgggcgacagagcgagactctgtctcaaaaaaaaaaaaaaaaaagctattgaaatactccaggcaaggagtgatggtggattgggatagggtggtaccttggaaggcaagaagtaaatggatggatccatgttggagaacgtggaatagcatagtccctatatggaaaagtatccagtctagtttaagaaatgattagtcattaacattttccatccaaagagataattatttctattgctacttggcatatcaatgttcaaagcacatatcgaagtgttgcaaatctgtatttcttatgttgggctatgctttgttgctggatgtcaacagtctagttctagttgatttcctatccaaagtgagtactatttttatattgcattggagataaaaaagtattaaagttttaaaa

SEQ ID NO: 2919 - DNA, 4001 bp, Homo sapiens
tgagcccaatgaacttttgaaaggatcaagggggcaatttacaacgaatcttagatatgaagcatgaatgaagtgttgtttaatttatcaccctcagcagagtatagcccaaatacactggcaggggtgtgtaaagtctttttttgtcacagaatcccgctgaaccgtacttatttcaaattccatcaccccttaccgtgtacgtgatggtttcttcggtgtcctgtgacttgaccagcgccagagtcagcatagttaggaaaagggctttcaacattgtgaatctcaaagaaaatacaggacaaactaatgtttagtatctgctgcggggaaagtaacaaaactttagcagtgagcacaagcgaggaaaggagggtgggagaggctgaggctccaccatactcaacttccaatctgctttctcatctcccctccccctcctgaaccttctcggtagccaacgaacgaggcagcaaagacgtaaaaactgctgtagaattgcatttcacgttactccatcctgctacgctgtttacatacaaaagacattcagcgtgcattttatactgcacctacaaagcaggctgcagaaagagggggtcgaaaggaaaaaacagtaatccatttcaaaggggacggtgcatttcctgccccccagtcccacaccccgggggatggaggtggggctgcaaaactctgttctctagaacgttaaggctttcccagtatactcaccttgagctagcagagttccttgcacagcacagcaaaaatacctgtgagccaatatgaattgccttggcctcaagctttttattttttaaacaaaataacaaaacaaaactcggagagcaatcttccagttctagtagaatactagaccttctcacatgtctcagagcttctcacatcccccagcacaaactctcaaagtggcatttccacgcctttctctgcgcacagctttgtttaaaagtcccaggttgtgtggaggggcagcccaaagcgactgattctcttttgtcttatcagtctgggtccccgacacgctaccttcggtttcaggctgcctaggaccggaaccagggatcgcaccgcagcccaaggtaccagtttcgggcgggcggcctggcccggcagggagatgaggtcccctttcttaacagcaagctaacgcggcggtcccctggagctgctcagcgtcccagcttctaaccagctcctatggaatccaggtgcggcttaaatctcgcacactggtcccctaaactttcaaaaccacgtttatgggcaaagccctgccggctggttgtcggcgcgcacacacatgcccatcccaacagatgtcacccgagtactcgcacttgctgacagatcgcattccgaggctgcacacctccacctccctctctgcccgagacaccctgcacagtccagggcagttctcgggtactcaacacccctcagctcaccccacctcactctcccgcgcgcggcccagtgagtactgggctcgctcggggcgaccccccgttgggggctcctacctgtgcggccgcgctgcgctccgggcccgggcagcgaggggagtgcgcaggggagggcagccccgtgggtctgatctggcgaagtccggcagcggccgcggcggcaggaggaggaggagaaagggagggaaagggggagggcgaaggggggcggaggagagagctgagggaggcgcgagcgctgagcccagcgttgcgagcccggcggtagagcgcgcagcgcagcgaggtccgcgccccctgctccaggggccctctttgccgcccccgcttgccctcccttgccagctcctcgtttcccagactcgcggggaccccacgccagagaggacacgttgacatgtgatgtcctggatgcgcttcagccttggggatgctcccactctctagtgcgttttcttcttctctgaggaggggaacacagcatctccctcagagaccagagggttctagaaactgctgttactttttttcccaataagtgaatgctaggagagtaaattaacccccattcatagaactgtttcctttaccttttctttcggatttttttttttttttgaggaggtgtctgcttccacaaatggagaaaaatgagaattcatccattcaacaaatatttgccacctactgtgtgcttagtgttgggaataggccaaatagaacttgcactaacaaaattgtgaggtggggtttgttttatggtctctcaaacctccctttatgataacaagtgttggcaagaatggagaaaagggaatgcttgtatgctgttggtggaatgtaaattagtacaaacatgatggaaaattgtatggaggtttctcaaaaaactgaaagtagaattatcatatgatccagcaatctcatttctgggtatttactgggaagatttgaaatcagtgtgttgaagagacgtctgtactttcatgtttattgcagcactattcacaattgccaagatatggaatcaacctaagtgtccatcaagggataaatggataaagaaaatgtggcatatatgtgtgtgtgtatacaaatataatatatattatatatataaacacatatatatataaaatatgtacacacatatattttagatatatatgcgtttttaaggctaaatagtattccattgtgtgtgtgtgtgtgcgcgcgtgcatgtgtatatgagcccattcttctgaaaagtatctttcaagccaggcaaaaatggcagttcacttgaataatttgtatggtaaatagagaagacttacagtttgttttagatatttactcctagacatttaatgttagtgtactatcaagtaagcctagactgagtttagcttcaccacttggctatgtagccctaagcaagttagacactctctttgatcttcagttctaccattaatagaaggaagatgatgccacttaccttacacattgctgcaaggatcaaaggagatcgtgtctccacagcgggatactcaaaaatagttattatcttgtcctttaaccatgaattattaggcatacaaaatttaaaagagaatagtattccattttatgtgtctgtgtgtatgtgtggaatactatttagccttaaaaaagaaattctgtcatttgtgacaccatggatggaagtggaaaacattatgcacagtgaaataagccaaatgtagaaacacaaataccacatgttctcaagtatctgaaagtaacttaaaacaattgaactcatagaagcagagagtagaatggtggttaccagaggctagggttgcagggaatggagagataacagtcaaagagtgtaagcctcaattagataggatgaataagggttgggtgcagtggctcatgcctgtaatcccagcactttgggcagccaaggtgggcagatcacctgaggtcaggagttcaagaccagcctggccaacatggagaaaccccatctctactaaaaatacaaaaattagacacgtgcctgtaatcccagctactcgggaggctgaggcaggatgatcgcttgaaccccggaaggcagaggttgcagtgagctgagatcatccctctgagtgacagagtgagactccatctaaaaaaaaaagagaggaaaagtttgatttttttaaagttcaattgcacggtgtcgtgaataaagctgataattgagtactgtatatttcattatcactaagagagtaaatttcaaatgttctcatcacaaaaaatgtcaaatatttgaggtgatggatatattaattagcttggtttaattattacacattgtattaaaaaatcataacaccttgtaccctattaatatatacaactataatttgtcaatatataataaaaagtctccctttttatgggtttcttttttcatctatagcttctcttttcttcacttattgacttagtgaaatctccaatactgctcattcaaagttgggcatt

SEQ ID NO: 2920 - DNA, 4001 bp, Homo sapiens
atggatttggtatgggagtcctagaaccagtgcctcctcagatactgaggactgtagttccatattatcttgttagtggttaccttcaattcattttatttgacttttaattaattaattaaaaaaaatagagacagggtcttgctgtgttgcccaggctggtctagaactcctggactcaagctgtcctcccgacttggcctctcaaagtgctgggatcataggcgtgagccaccacgcctggccctaaccttaaattaaaaaaaaaaaaaattttagcctgtattttctttcctttttttttgagatagggtcttgctctgttgcccaggctggagtgcagtggcccaatcacagctcactgcagccttgatgctgggcttaagctattctctcacctcagtctcctgattagttgggactataagcgcatggcactacacccagctaatttttttttttttttgagacattctcgctctgttacccagggtggagtacagtggtgcgatctcggctaagtgcagcctccgcctcccaggttcaagtgattctcctgcctcagcctcccgagtatctggggtaacagttgcctgctaccacgccaggctttttttttttttttaatttttaggagagacggggcttcaccatgttggccaggctggtcttgaactcctgacctcaggtgatccccacccgcctcggccccccaaagtgctgagattacaggcctgagccaccgcgcccagcccgaccggctaatttttaaatcttttgtacagataggatctcactatgttgcccaggctggtgtcaaaatcctgggctcaagtgatccgactgccctggcttcccaaagtgctggaattacaggcatgagccatttagaaataaaatgggccagacgtggtggcctggacctgtagtcccagcacttcgggaggctgaggtgggagaatcgctttagcccgggaggtggacgttgtagtgagccgtgatcgcgccactgcagcctgggcgacagagccagaccgtctcaaaagaaaaaacataataagaaaaaaaaaaagttatgatgtgtctccagattggggtgtgccactgaggcccattccgtgcaccccaactttatttttttttaatttttattttattttatttttttgagacggagtctcgctctgtcgcccaggctggagtgcagtggcgcaatctcagctcactgcaagttccgcctcccgggttcacggcattctcctacctcagcctccccagtagctgggaccacaggcgcccgccaccacgcccggctaatttttttttttttttttttttagtagagacggggtttcaccatccacaggatggtctcgatctcctgaccttgtgatccgcccgcctcagcctcccaaagtgctgggattacaggctgagccaccgcgcccggtcgcaccccaactttaaagatgagggtcggtgcaggtgaggaacctgctcagggtcccccagccccagcgccgggtctacccacgactgggagcggaggatggcggtgagtaaaaaaagaaaccttcctcattcactgacattccaggggaggacgatggggacttcagcacaccctgggattgctgcaggctggggtgtctctcaagagtttcgagtttagattctctgggagaccagccggcgcggagaaggcttaaaagcccagccgatcgcagaccgtgcgcggggcagggaagcgagggccgggagtgccctccggtggcgaaagccaggaattaccgcgcacctattctggaccagagtaaaaatcgcctggaaaacgtcgaaaatcgtagactctcaagggtgaaaggggatttaaagagcacttactgcaactctcccatcgtatgtctggggactgtcagcgttacagatcttggccttcacagggacagtacggagaaaggcaagcagccgccaaggccggggtatccgcctgcacttagcggggctctcggaagccggcctggggatgagccaggcgtcctcgggcctggtgctggcgcctggcgcgccctctgctggataccgccgccttgtcagtgactcgaaatttgctcagaaccgattttttttttttttttttttgatatggagtctcgctctgtcggccaggctggagtgcagtggcgcaatctcggttcactgcaacctacgcctcccgggttcaagcgattatcctgcctcagcctccagagtaactgggattacaggcgcgcatcaccacacccagctcatttttgtatttttagcagaaatggggtttcaccatgttggccaagctagtctcgaattcctgacctcaagtgatcctcccaccttggcctcctaaagtgttgggattacaggcgtgagccaccgcacccggccccgaaccgaatatcatacccacagcattattcattcagcaatgtttttctggtactgaggagccacgtccttacggcgagaggaagctggggggccacagagcaaactgtctgatcacttggtttctaatccttccctccctccctcccgccctccctctctctctctctcttttttttttttttagacagagtctcgctctgttgcccaggctggagtgccgtagcgcaatcttggctcactgcaacctccgcctcctggattcaagcaattctcctgcctcagcctcctgagtagctgggattacagacccatgccaccacgcccggctaatttttgtatttttagtagagacggggtttcaccatgttggtcaggttggtctcaaactcctgacctcgtgatccacccgcctcggcctcccaaagtgctgggattactggcgtgagccaccacacccggcctctttttttttttttgacggagtctccctctgtcgcccaggctagagtgcagtggcatgatctcggctcagttgcaacctctgcctcccaggttcaagagattctcctgcctcagcttcccgagtagctgggattacaggtgcgtgctgccacgcctggctaatttttttgtatttttagcagagacagggtttcaccatataggtcaggctggtctcgcactcctgacctcaggtgatccacccacctcagcctcccaaaatgctgggattacagatgtgagccactgcacgcggcctggcccctaattctttaacatcccactaagacagggggctctggcatagcatctgggtgtctgactccatcacctctggggaagaaagcaaaggtggtgagaagacgctggaaccggccagccctggaggcggggtcggctggggcacctccttcctggcctctgcgcctactagacgcctaggctggtaaggtgcttccttatctgtaaaatgggaccacaatgatctggctatcagggctgggaaggcttgaatgagcttatgtactcggaagagcctgctgggcctgaaggggaagggcactgtgggaagcgtggtgtcagtgccaggacttagggagaaaaagaggcctcaggctcctggccccaggcatgtgtgtttccccatcttgctgagctgtgggaagtgggaagctggaagagaagggaagaggatgagccgtgtttcagaccctgaatgttgaatgtggggtgacagtgaagtctcgtgtctactgggcaggtagggtagggagagagacaagagcctgggtaccacagaagacgaccacctgaggtcttgttggcatgagatggaggagcagagaggggaggatctgacccacggcccaggcaggagatcaggagacccaccctgaaatgagagtgagacgggtgttctccaggccacggacgatgcagaacccggcagggtgggctggaggctccaggagagagcggtggcaaaagagtggtgtctgctgccccagagcgttcatttcagaggctggagagggaagaaaatcaagaaggaaggaggtggccgcgagcagctg

SEQ ID NO: 2921 - DNA, 4001 bp, Homo sapiens
agatgccaccttgcttcgtctcccaagaccctctgagcatatggactctttttatcactcttaggtagtcaactacaagttgatctttccaaagattgttttataggaaaaacaaaagaagcctgagtggccacaagaaaacttgaagataaaggtccctccccaagatcccctgaatccagctggactgggaggaactggtggggtctgggagcagcccggccagggcagtcttcccatgaaaggcattaccccagagaaatcaaagggctccaacaaaccttgcctcacccattgcttttccattttcgccccagccgcattctttagcgcactgggccttcctgaactgcccaaactagacccagaaaacgccacagatcagtgcctggaagccagacaaagaaaccagggtgtcagggaggcagaggaggcggaggctcccaagtgccggctctgcaaacctccatgcaggggcagcggaggctcaggcgacgcagcgccagtcacagcgcctttaaatagaacctccacgcggagggcaaacacattccatgcgcttttaaaaacgcccaagcatgacctggccggcggcctcagctcccccaggcatttttccggtctcggctcaattctggaaatattaatagctcggttaagagcttaccgggtgcaaaatacttttcggccttaaaaggcagggactgttactgctcccactctccagatgaggaaactgagatccccggaggttccaggcgacgaggtggactagtgggtctctatcgcctgcctctggctcagtgtctccccaggtgagcggctccccgcgcactggggctcacagagcaggaccgcaacgagcccccgccggaccggtgccagcggccaagttcggttcccacaaccgccccccctccccgcgcccccaggaggctcccgggccgcgcctgctccaggaaagtcctgaatctcttacaacgactttaccaaactccccgttctcggcctccgctcattcatcagaccccgcgctgcagccaaggattaactttccccttttgttttaaaagataaaaggccaacaggggctaatttttcccttggggggatacagtgaaagctggcaggtgaggcgcggcgacggctccctttcctagaagttgctttcggagcaaatctccggactggcgggcggagggggcgggaccagtggtcggggttgggggacctggaactcgggcccggcagccgccgagaacttttgggctccgtcccggagagctcctgctcctggtgtcccccctcttcggccccgtcccccaccgcgccgagatagacccgagcacgcaagatctggctgcgttgggccaaatgctacctgcaccccgggacccctccccacacaaacagggcccgggacttcggaccagaaagccctcccgctccctccctggtcccgggggcgaagggcgcgcagcgggagctcacagtttgaacatgctctccaggtccttgatgaggcggcggctgaactccgggaactccgtgtaggggttgaagaccctgcagcgccggggccgcgcagcgccctcgttgatgtccagccgccggctcagctgggcgctcagctccgcgtcggcgctggccgtgggcgcacgggcgggaggctcgggctcgggcttgggctccggggctggggcgccgaggggagccagctgggggccactctcctcggcctcctcgcgccgcagccggcgctccagcttgcacgccagctcctcactggccatggcggcggatcgcaggacgcgggaacgcggggacgcgggacgggacgcagggagctggcgggcggcgcgctcctcgcaggctcgaggctctacaacactccgccgaggcggcggggacccggcggttgggagggtctgaggacggactggcgggcggggcggtcggggcggagctgcggctttaaggaggcgccagggctcagcgactgccagcctggtgggaggaggccgccggtgtctgggtgtctgcgcgtcccggagaccccgacctgcttcctctccccgcggctccgggcgggaggctgaccgtccccccgggaccaggcagggaccctcggatcaactccgaccttgctgcccctgtcagctccggggaaaaccgtagcgggaaaaagcgtctcgaccgttcagacggtgcctttcttgtcccccagaagtaacccgactggaagcgctcgcggcccgggacaggctgggtgggggaggcgagcgcccccgagcgacacccacgcgtcccccgcgtctgggagtggtgcccaccctccccggggtcagggagtgggaggcgcccgcccggagcgtggggcgggggagctgcttttcaaacactcattggaacgaaatgtttccaaaacatgctaaaaatactaaaaacaaataagcaaacaaaaaagagagagagcaaacgagcagaaaaaactcccgttttccctagaggcaggaaagcagcgtagcttcagggactcgggtttttttgcgtgaaacgcacaagaaaagagaagaaacctggcgcggagactcacatccgcaatcccaacacttaggtgttggtggcaggatcttttgagcccaggagttcgagaccagactgggcaacatagttagactgtctctacaaaaacttttaaaaaatcagccaggcatagtggcgctcgtctgtagtcccagctactcaggaggctgaagtaggaggatggcttgagcccgggaggtcgaggctgcaacgagccatggtcaggccactgcactccagcctgggcgacagagtgagaccctggctctaaaaataaacgaagaagaaggagggagagggggaggaaaaaagaaaggaaagaaggaaaagaagcttgaaaattaaatcagcatttttaacaagagggtaaaaacaaatacagtcgtcattctccccaaggaaggctgatgccgctgttacatcagccaggcgttgagaatcttgtaaacacgggtctgtccccacttgagaacgacgctgctctgacccaccatgggctgatgactggggcaggtcagtgaccccgctggactatggttgtctgagacccagggaccagcctttggcatgcgagtgcagggcatgcgggggacctgggttaaaatgttatttttaaaaagttataaaggaaaatacgttttttaaagaaaagtataaaaatctttaacattcctactgaacaacttgacttggtacagagaatacgggttttacatatacaatggcaaccctgcaaatagatcacggggcgctacacttcctgacctggtggtggtgactagaaggttggctttgttgtcacatctgttttgaccactttatgtgacacatttcagagaaataaggtcaaaaattttgtgtaattaaactttttttaattttatattttaaaaactttttttttttttgagatggagtttcattcttgtttcccaggctggagtgcaatggcatgatctcggctcactgcagtccctgcctcctgggttcaagtgattcccctgcctcagcctcctgagtagctgggattacaggcgcccaccactgcacctggctaattttttgtatttttagtagagacagggtttctccatgttggctaggctggttgtgaactcctagcctcagacgatcctcccacctcggcctcccgaagtgctgggattacaggcatgagccaccacacccagctggttttgtttttgtttttttttttttttaatgttcttattccatcgagctctcctcaagaaagaaaaagttcaaaattcttaatagtctccatcaacaagaaactctggggctgggcgcggtggctcacacctgtaatcccagcactttgggaggcagaggcagacgcatcacttgagcccaggagtttgagaccagcttgggcaacatggcaaaaccttgtg

SEQ ID NO: 2922 - DNA, 4001 bp, Homo sapiens
aatgaaaacctgagatgtgtctgaaaatagcacccagatgctttgattccccagttcacctttctgactatccagctcttccttgtcttgcttcatacaacagaggcagcctgggacccccaccttcagatatctcgggtaaacgaccaaattatcttggactaaatgcaatgaggcagcccagcagaacccagttcctaattctgacccattctgatgagcctgtcctaactccttccccactgcaggtgcccctgcagtcacatgcttttgtcaaatgatctgcagcttcaggctgctacctctgcagaaaagaagagggggaaaacagagagagtaaaaaaatacacacatactcctatatatatacatacatatcacaacctctggcttataaagcataaccgcctttttacctttccccagagtccccagtggtcagcagcacagcctctcaggccaacctccccctcctcccacttggtccaagagaaatggtacttgctgaggggacctgctgatgtctcaccctggatcagaaatgcaaacgtatttctgagcaactgggcagggaaggagaccgatgaaaaagttgagtcagtctctctctctctctcagtaggggggcccaccaattgctgagcctttccaccaggctctcagcttcctctgcctctaacaaactttgtgactcacagtctgttcgcggagcgaggcagctgagcagccgagcagcctcagtgatgggttaaattgggaacgcactcttctccaaacactgacccctcaagtgcagcctgagcccctaccttgcagtgggggtgggaggtgagcacagctccaattattttgctggcactagaagagctgccagagacctgggttttcatggacttatgtctaccgggatcacacacacacgcacagcccttggtgggctgcaggctcaggaatgcagtccattcctagactggtctaggtctccagtgctccattcatcagagctgcaatgtgggacccaacgcgctctctcttcttcacccacactgcctgcaaaaccagagggagtcctagcaaatgatcaagcagagccgtgcatcgtgagggtctggctaactgttgcacggcagttgaggggatggcggtggaggcggggagaggtcagggctgtgctgcaccctctcagcagcgtctcctcccttcatcactgcggagggaaaatctggaagttggtgaacctggatcccgcggggcggcaggggcaggcagaggccgagtccattcaggcgggcgagacgagactcggccactggctgctccccgggcctctgcgccgccggcgccgcctcccgccttctccgagccgcgcagacgaccggccgcgggcgtctccctcagccctggaccggcttcccacagaaaactcccaggcacaaaccgcttttgttaattccgcaaatgctgccacacgaccacctcctccagcactcccggtctgctcggctccgggagacccgctttcccctgagcctccgccccccgaaggaccaccgcccagcaccggcacgcgccgggcctggagaggaccccagggtccccggcccgaggcatctttgtcctcgcagcgcagacgcgcgcgcacagagcgaccgcaacagccccgccgggcaccaggtcagcggcctggccccgcgccagggccgtgcagggggacaatggtccgcgccggggaagtttgcggagtcgcccccgcgggcccgggcccgggcgcggagccctccttaccgtacatctcggcggggcgcgcgcctctcgagaggccggcgtcgctgcggcgttcccagccagccctcggcggcgcccgcctttcattcacagtcggggcggggactggcggcggccgacaggggcccgggcggggagggagcagacgcgggggccggccgcgggcaggacggagccgggcgccgccagcccattcagcgccgggctgcagcggccgcctccgctcgggttgctgggcactgctgcgcgcagggggcgggggctatgctaatactaatgctcctccctcccggctcggccaacccgaggcctctgcgagcccctcgccccgccccgcccctgcgccccgcccccgagaaacccacagccggagatgcgccttttccgaggctgtcgccctaagggccgcagcgtgcacctgcggagctacccaccccaactccctgctcctgtcggagcgctcggaagctctccctaacctggggtcctcgaggtcagccggggcgctgagagctgcaggtgcacccctcctccagttctgtccaggctgcgtgggctaagccggggggcgcaaggatgggaattggggaatgacttccaccctctcctggctaggtaccttagctgagcgccgttctctgatgaagccctccagccctcagctgcgccctaccagctactctctggctaggtgcccagccactctctggctaggtgcttgctaccaccaaacagcgtccttcccgggtcagggacgcaggaaacgcaccccactcccaacccccaagggctgcaggaagtccgcttgcttttcctctccctgatttatatgtgtaattcgcaagctttgccgccaggatcctctccagctgagccccagcgccgacttgaattccagctctgcacctgccgtgaccctatgaggaacaggcacagagaggcagcggctcatgcctacgcccacacctgaagatctctcctaagctagctcaggacttccctgggcttctcatccagccttctttacattgcacacgttcccgtcttttttttttttttttttttttttttttttttttttgacatggagtctcactctcgcccagggtggagtacagtggcactatctcggctccctgcaaactccgcctcctgggttcaagcgattcttccacctcagcctccagagtagctgggactacaggtgcgtgccaccacgcccggctaatttttgtattttttggtagagaagggatttcaccatgttggccaggctggtctggaactcctgacctcaagtgatccgcccgcctcggcctcccaaagtgctgagattacaggcctgagccacttctcctgcccctcctggcctttcaatatcgatttcttagtttctcttggcccatggttgagagttgtttgggttttcttttgtttttttctactggtagaaatattctactagtagaagttagagaggaaaggaacttaaagatacttaagaactgaacttcattttacttcatttaacgttgagaggttaatttatgttgttaggctgggctgtgtgtctgtaggccaatgatctactctctcaaccccagcttcctgcaggactgttgggaaactggaataaaatctacatgaaatgacacagtgggcactcatgtatattttttccttccttcatggctcaaggcaggaacagagccagagaaagaatccaggttgccagactcttgaaacagtgctcagtctgttgcactcaaaacttatgtttcctatttttctctggcctgggcctccacctcccgcccgcgccccactctcttgctgtttccaggttttcttcttcttccttgacctctttgactctcttagcagcatgccagccccaagggaaaccctgggatggttcctggaacacacatttagtctagacccccctaccccgggcacacactccctgcatctcacaaataacctctgtctctgttcttcagttccaggaccaggccaggtggctttaagattgactgagagtcagacttgaactggagcaggaaggagaatctcagctctagcttgatatgatcacccagagacactcccttcccacaattctgctcaacacaaaatatactcatgaaacattggtgtctacagtacagaaggaaatgcagtgtctgtcttcaaagaatgaaaggtctagcagg

SEQ ID NO: 2923 - DNA, 4001 bp, Homo sapiens
ccgtgtggatgcgcaggtggcgattgagctcgtcggagcgcgcaaagctccgcacacaactctccaccgggcaagcgaaggccttggcgtgcggccgcgggcagaagcagcgcgtgctgcatttgccgccgcggcgccccttgcgtcgcgccttggcctgggggaaaggggtgggcggcggcggcggcacgggtggtgcagccacgccactgcttccagggatgtccgccaccagaggtttagggaagtccgccgcggcggcgctgcgaaggcccagcggggaaagctgaggctgcgtactggccagaaactctccgccgtcgccgctactccctccctccccactaggaggggtcaggagcccagggaggccctcagccccctcccctaagtcacccggggccagcgggaaagcgtcataggccccgctgggatagagtctgttggctgggacggccggcagttccgcagggcagctgatggacagcaagtcctcaatcttggtccctattacgggaaaacgagcctccggggcggcctggtagtctccctgtgacccacagttccctggggcccccacagaaagcagctcccagggcgcgtagggacccttgaaggcagagacagcgtccagcgctggcgaggcgggaggcgcccggaggccgggcttgacgtcgggcggggagagctgaggctcatacaggcactgcgagggggcacccgcgcaaggcgaggcctcccagaacgcctctgggaaaggggcagcgcccagatccggggagtaaaggtccggcggacccggcagcaaggcatcggaccccgcaggaaaaggggcatccagcggggatctggacgctgctgcctctggaccggggaagggtgccaggcctaagatgcccgacatgaggttgaagagtgcctccgggtcgtgcgggtgttcgggcactgcctgaatgaagaagctaccgctgtagctgaggccgggagggggtgtgggcgcaggcccctccaggaagcaggagtcggctaagtccccacttgcgccgcagctgttcaaagcccagctcaagaagtcgcctgctgaggagggagcaggaatcagctctgggcacatcaaagggtgcacctgagtccacagcccctacctacaaaactcttggtgcccacggatatacacaaagtgccttttgcacattctgattcagcaggggcccgcatacgtcccaaggagcacatagaaacatgcacacgcaaaacacacgtgcacaggcaaaagggcgctccgataaccgcacaggttcctgcggaggcgctggcggcccagtgtgggtgggaatgggggtgcgcaccccaggactcctaagcttcccatcgcccctattctcatagctccaatgtcccagtccctcctggttctcaggtatggtgcgcccccgcgctgcgccgtcgtcgtctgagcacccctgctcgccctccttacctccagggtagccggtggccgcgggagcgtccctggcaggcagccggggcaattcagcgctgggttcggcgcaacagccttcagtggacttgacgaggagcgcgtcgggttcggaaaactcgctaaggtggagcatggcgcggcgccggctgtggggcgcccggggcctcgcccgctgggcttgggggcgcgcgggtggcggggaggctggcggtaggggttccccgcagcgcacagacctaggcgcccgggctcctggcttcgggcactcacctctgggaaaggagtcggggagccgcggcgccctcgctcgcccgcaccggcctcgggcggcggctcctcgcctctccaaagcgctgccgggctcccccagcccacagcccccccacttatatagctgcggcggcgctggctccgggcttccgactccccgggccactgccattttgggaggccccggccctgccgccgtgacgtaaatgcccaaacatggacacaggatgtgtgccggggactcccgaaaaggaaagctcgagctgtgacgttgttgttgtcgccgccgccgccaggctcgcgccgctgcgtgcgcgcgcgctccccaggcgtggagcgctggggccgcggatgcgccagtctggggcgctgcgcctcaccgggccgaccgtccggtagatgcgcttcccacctggaggcagaggccgaggggcagcaggggaggaccgtgttgggtttgaatctgccctctgccactaactagcttgacactcagtcccccttaacgtcagtttctcacctgtgcatttcctgtggagagaaactgagagcacataaatgtccaggcgcactcagtaaaccacagagattattgccattcatttcttttgctcacgcctgtgtgtttttccattttaagttttttttttttaaatttgtgctaggaaaaataatttaaattaaaaaggactgtaatacttgttaacagtaggaggaaagtcaactagcacaacagggtatattctaaattgaaaagtaaaagtccctcctctccacctaccttcattcctagctcctgaggtagccacatttaagtttcttgggtattctttcagaagaattttatgtatatccaaccatacacattgttctgcaatattattattattattattttttcacttgaaataacttagagattgtgccatgtcctgacataaagatcttgtcattctttttcaaggctgtatagtactccattgtaagggaggaccttgagttagtcgatttgtcccctatccatgagcatgtaggcagtttccaactttttacttataccaatgttgttggagtcaacatccttgactatataaatgtgaatgtgtctgtgagataaattccaacgagtgtaattgtgtgccaaagtatatgtaaaattttgatagacaactggcaaattgtcttccagaaaagtagggccaattcctgctcactcctccctcacccacagggtatgagatgcttctgcagaacattttttctgccttcatacaaatggctttcgctctaaggatgttgatcccagcaacacacagggaatccgtgggaaatatctccctggaatcagtacttgaaataattgggcttcttttgagaaaaaaaaaaaaaatcctagccttaaggaggctgtgaatcttggctgcagaagcatcagagccaactccagcaaagaagcttgcctactctcctagtctcatctctcttctgctgtggttttccctctgtctcattctctcattctttttaaaatgtttattttattttgtattatagctcacttaactcctttctggaaccaaattaaataaatacatgggggggaaggattaaataaatacatggaatagcatgttcttctttatgaagagcatcaattcctgagactctgtgtgctggagggtaaggtgggcaggtttagggctcctccttccttctctccttttttgaaatagaaacaaagccctttgggggtggtggactcagcatcatgggcagtatagctcccagcctctcttccacccctgtaccctctttttcaagagagagagagagagcccaagaatgcccaaaccccaccacattctcagtcctttcaccctatgtccattatccaaacatccattcagtttctcaatgttcattcattcagtattcatttcttaagtgcctattacaggccagaaggtagactttggttttatgtctgctgggaccctgagccccatctccagcactaggtgcccactcctcatcccacagtgaccttattaagtgttttcacagaatatgtcccttcacacaatcacctgcaaaacatatgctgacacacttgtatgcatcttctcctgaagtccacaaatcatataaaggttctcacagggtcatgcacttgcagtgtgtcttactaaatggctacacctatggttctgtgttagtagcacatatatgagcatgtaggaaatgcaga

SEQ ID NO: 2924 - DNA, 4001 bp, Homo sapiens
cactttaaaccccattaatatcaaactatactacttgaatttccagcacatcccatgctaggtaagcctcccatgtttctgcataggttgttgcttcagtctagaatgtcttttacgtcttctcccttggcttcctggacaacaactatgaatctttcaaaacccagctcagatcccaggaagccatcccaacaactcatcctctacccttaaagaattgtttttccctctgcgacctctgtacataataatggcatctattaggcactatgtccctgacactgttccaagcattttaaatgtattaactcatttaatcttcacaattaccctccccatgaagtggcaccattatgacctttatggatatggaaacttgaatcacggagaagttaaataacccgtcctcaaagatactcaactgtatcgagacagattaaaatccttatgtcatacatatttatattattgcatctctcacggtgaatttattcatgtgactctccttatactggactgcacactccttgaggacagggattatgttgtattctactctaaatccacagtacctggtataaagtaggtaatgagtgcatgcatttctcaaactgattttaaaataatattcctaataagttgaagagaaaagcattcagaaactagttccaaataaatattcaaatataagagttctagaataaagcaagctatttttttaatctaataaaatggatgttaaaaagaaaaattattacagacctgaattacagtccttctggacaaagaaatggacttattttgcaataagtccattactgcttaatcactgcagtaaatcaagacccaaacgaccatttgcttaaaattaacttttttctctcactaaataaaaaatttttgttgtttatcattcagggcaatggaaagaaagccctatatttactcttctcaagtggaaaaaagccaatcacagaccagcactactaattgcttccttaaatctggccaagaaatgtatcccattaggcaattaaaataaaatacagttgcctgagtaagcatttaacaaaagaatttctaaggttttgtggatggcattccattaatcaaataatgaaaaattctttatcctaagcaaggaaaaatgaaaaaacaaaaataaaatagattaccatcaccccacaagaatatagacttctatattaaaactctattaaatcatatgcctgttatattaaaatatacggattaatgctcacaatatttcagtagccattctttgtctccttaaaattacaaaaatcaaagttattttaacactaatgatgaataacctcaaaaccaaatctattgtatttagtgtgctctcacagttacagtcctctgagccatactgaagcgcagtaattaaaatccacagggatggtactagcagcaacagtgcacagcacagtacttgttagagttatctgcgccccacccagcttctacacactagtgcactatagaaaggtaaatatactatcagaagacccagagtttaggccacagtatgcttaggccacagcacagcaaaatctacctccaggtacatcttaccatttcttcgtacactcaaccatgagctcctggtaggaggccacaaactggaacttggatgcatgttttcccacacgctgcagtctcttccaaactgaagccatgatgatcagtcaagacactggagcagttctgggttagcaatacagcagctttaataatgcagagggtccaaagcaaaggaactttgcatgtatgtcttttaaaaactcaactacaactcgaaatgatgcttggggtccataagtcttctccctgtttcacagggtaaatcccatcttagatgaatggcccagtcaagaacactatgatatacgtgacaggatgagtgggaaggggttccctcatggagacatcaccatgccacctcaggggctatatgatgggtattctggagggctgaaaagcaaaacaaagacaaaaagagaaagaatatgaggagagaatcatgagaaatgactaaccacccatgttaaataacgctgcaaaagaccatcccagttctctgcatgtcttttaaacaatgaaacaaaacactgacctcaaaagccagtaacatcaaggatgcaagacaccaaggaagaaattacaattcacaccgaagacgtggagcgacacatcaggtagtcagcaccaacaacaatccagagagacggtaactcggggccctacctccccctgttagcatcactgaagggcgagcagagcgggaaagtctagggatgctgtttaatgtccaccgccagaaagagggagaagtggagtattttttaataaactttgtttttcagtcgataattaatagcctcaagtccgacaatatgtgcttggaacaaattagggagccaggaggaatgctatttttcagtcggagggaggaaatggatggggaacgaggagtggagggaaatctccaggcagagagagggcaatgtcccggctccaggccacttgggctccttcgctgccaaccggagggaaatggaaactcctgcctgggggtgaagcaatgaccagcggggcaagtggactgtgcagggtgcggtgcctccctcccccatcctcagggaaacagtccgccggagcccagtctcctcacgcacggagcccagacccctgccccccagcggagacaggcggtggctcgtccgcggtccctgtcacccaggcgataccagaagaccccagcccggaccccgagccccggccccgccgctcgtccactcccgccccctcctcacacctctaatcccgctgtcgggctgagtctggccccgttcccttctcatagccgctcctccgtcgccgccgcagcagcagccgccgccgccaccgagtcctccatccccgccggagccacatggaacagccaagccagccacggcgctcgcggtagccgggatctgcagcccctcaggcggacggcgcccctcacgcccaccccctccctgacagatcgccccgcgaccgtcccccaccctaccaagccctgccagagccaccgctcagcgcccagcaccccctcccccgcctttctcctccgccaccatcatcattacctcccccgccgcacctctcacactaaccctacccacggcagctcaacctccaccgccccgccgccattggccaggccccgcgcgtgccccgcccacctcggcggccgggtcttacagcggctggggcacctcattggtagaactgcctgcccatcacaggggctccgccttgcccttgctcgggaggtggtttttccccgaagccggaatgcgacgcacaggctaccttttttttaaaaaaaaaaagaaggaaccgactaaggacgatcccgcccgttcttctgattggcttggagagggaagcgataggcgggaggaatagggagtgtttatagtgaactgcaaggtgattgcagaaggtggctgtccgtcaaaggcgccgctggtgcggggctgggtttctggcccctaagggtgattgcagacctagagattggcttcgctgcagctgtgggcagtgcagctgcctgtgggtttctctcctgttctcatctccgccaggacctgggcgcgccctctcctccgccactggcaactagggtttttgcgcatagcctttatttcaccagttcctcctgggatcttacctgacaacctgaagtaatgaccctgtcaggcaccccccgacaccccggccgctccccgcccaacatagagtcaactggtcttcagtgggattgaatcagctgagctagacacaaaatgtgtacagtacaatttcttattgttcggagtcttcaacatttctttgaatcttggtttcctcttcgctgtcggactcttttgcccctagtgagaactgtagatggatttgggaacagctagcatataaaaagggtg

SEQ ID NO: 2925 - DNA, 4001 bp, Homo sapiens
gaggccaggaggtggaggctgcagtaaaccaagattgcaccacagcactcccgtcaggacccatctcaaaataataacaacaataataataaccagacaatttccttctgcatgaattcaaactcaaagactcccaggacaggaagatacctctccatgggttcttccttctatgtggcctttttttgcagcattgaaaatttttttcttgggagtatttcaagaaacagaagaaaggccttattttgtccctaggcttccttttttccccatgttctaactttgccaaaaatggaaacacactatttggctctcctcaaagtttcaagactatttcaatgccttttcattatcctttgcatattcagccattttctgtggttgggagcaggaggttgtcaccttcagtatattcacaaaaaagcagtactctaggactttctagagtacctcaagggccatgacttgcacatatagacactttaaagtcacttagtaaaatgcattctgtagaggcagatgaattacaaacaggttcctcttccctggcactagggttcatggtcagtgaaggacagctgggctttaacccttatctggagggacactttttcacagggcacagactaccctacaggctactctggagacatgctcacttttaatggctcctttctaagcatgcctgaggccacagttatctgaaaagagactgtgggcatcatttcttcagcaccagaaatctctccagtttctgcctcccagatttccttcaaatgttcactctcttctgttctctctagttctctccatcccactgaaatctcactgaaatgaactcaagttctccctctctgaccactaattctcaaacttttttgaccaaggttaacctaggtcagcagaaggctcttaagacttggctgggtatggtggctcacacctggcatcccagtgctttgggagaccgagacaggagaatcatttgaggccaggaatttaacatcagcctggaaaacatagcgagaccctgtctctaaaaataaaaattaaagaaaagctctaagactcatatactccagcccttcctgcttttttctcaaaaaattctctgataacaataaactgttgctgcacaaacacactttgtgaggattatgtgaatatctgctttagcaatattggtttagatgattcctatgtgcactacaatccacatttggtttaaagttttatcatagaaaacttataggtcataaattgtgtcaacttatacaggcatcactatcctactgtagggttaaccaaacaacccacttcaaacaacatagagggtgatgaaggtaaatgaaatgtaatttataattaaaaagcaggaatagaaaccaccaaaaagcacaaccaactcgatacagcactgatgctaatataaagcaaacttccccaaaattgaggatatttcaacaatctgctcatgcatgtttttagtgggagctcttcaaatattgccaagtattgcctagcagccaggtgaatgctcaggtaagcccccagtaaactctagttacgtgctaaatttttatttatgaatatgaaatactaccattaacaactcagcagttattaagtagcttttacacacacacacatacacacacatgaaaatctaggttatcaaggaccatttgctagtaagatccaaagaaaagacatatttggggatgcttctagaacattaggaggatgcttgtggcctaccagttcataccttgaaaatcactggttaggtggttggcttggctttttgattcggcttcttgagatgcacagtcaccttttctgattctcacattgctgctacaggggcatgctaaccttgtgtcctagcaagcaacccagttctgccatgacttggacctccaaatccccagtctctcgctggagtctctctttggggagggagagtcagatgttacccacaaactggggagcctcccagttaacaccctggagtatctgtgatgacataatgggaggccttcagtgatacatggtggagggaagtcagaagacctggtcacagaccacctctgccttgccacctgtttgacagcaggcaaatcacctcaattgtcagctcacatttatcctctgaaaaatgaaaatatagtcatgcactgatagcaacattttggtcagtcatggactgcataatacagtgatcccataagattataatactgtattttcactgtatctcttctatgtttagatacacaaatatttgccattgtattacatttgcctacagtattcagtatacaaacatgctgcataggtgtgtagccatggactataccacatagccaaggtgggtagtaggtttgtgtgagtaccctctatgatgtttataaaatgacaaatggcctaatgatgtatttctcaggacttatccacaatgataagcaaagcatgactataacaataccaacctcatagatttcttgtgaagatcaaatgagataatgtaagtgataaataaataaatccatttataaaagtattatgttattgtcgcagagaggaaatgttcacacaagcatcttgactgttctgtttacaaagtatgcctgaaattagggttgcaatcgtttataataatgacaaacaatccgaactgtcaaccatgaaggtcaaattcaaagaccgcacaggccctacaaactactgagaaagagttgagaattcctgattccgcaagtacatgtctcagtgatcctgaatccctttctttttttccttctcatggcttggagagcaggacttaattcagattaattccaaacattagaaatgaaggttggttttttcttttttcttttccttcatcccacttgagtttcagagctccaagaggacagtggctgaagaatgctaggaattcttccttccacccagtcaggaatgtgtcctgcctagggaacttagaaggaatgtgagggctgccagataagccccagcacttgaagcagtcagagcaggggactgtggacttagtactggaaagagccctcctctagaatcaggccctcctcaacacccccaagaggctgctcttaggctgagagtggaggccagagctggtgatgcaggaataacctctgcagccagtaagtgaagagacagctcagctggatgtttgaaacaaagaacggcagtgtttttagtctttggggaaagtacatggtcatggtacatggcagaggattttttttattgcagaggattttttagatcaacacatatatgggcttgaacatgggctctgccatctgccaattagctgcatgactagggttggatactctgtgctaataacagtacctacttcctatggttgtgggcaaattgaataaaataatgtacataaaatacttctcgcagtgcctctccataatgttgggctataaagcctacttttacatgactaacttttaaagagtcttgataccctgcatttattcaaagtgttatagtatacaatgtgttttcatatttgttacctttttttaattgcattaagcaatggtataaacttgaacactcttgggatggtttgtagatatgttactcttttggaacaaataattagatgtcagctttggcagttatcacagggcctcatcttagctcttacccacaccttgcccctgtcacggttttttcagggagctgccagtcacaggcaggctgcttttctcaagcacactggcattgaaccagtgtagccactctcacccagacaatagtgggagcttggaataagttgttcttagaggtcagagagaggctcaaagacttcaggggttctgtcaggtagggttgcccttaggcagcctctggaacagccagcctgcctatctgatcccctcaagcctgggtctcaaagtttcacatgcgttggagaagatctgccctgcaccatgcccctaacagggttt

SEQ ID NO: 2926 - DNA, 4001 bp, Homo sapiens
aattaaaataaaatacagttgcctgagtaagcatttaacaaaagaatttctaaggttttgtggatggcattccattaatcaaataatgaaaaattctttatcctaagcaaggaaaaatgaaaaaacaaaaataaaatagattaccatcaccccacaagaatatagacttctatattaaaactctattaaatcatatgcctgttatattaaaatatacggattaatgctcacaatatttcagtagccattctttgtctccttaaaattacaaaaatcaaagttattttaacactaatgatgaataacctcaaaaccaaatctattgtatttagtgtgctctcacagttacagtcctctgagccatactgaagcgcagtaattaaaatccacagggatggtactagcagcaacagtgcacagcacagtacttgttagagttatctgcgccccacccagcttctacacactagtgcactatagaaaggtaaatatactatcagaagacccagagtttaggccacagtatgcttaggccacagcacagcaaaatctacctccaggtacatcttaccatttcttcgtacactcaaccatgagctcctggtaggaggccacaaactggaacttggatgcatgttttcccacacgctgcagtctcttccaaactgaagccatgatgatcagtcaagacactggagcagttctgggttagcaatacagcagctttaataatgcagagggtccaaagcaaaggaactttgcatgtatgtcttttaaaaactcaactacaactcgaaatgatgcttggggtccataagtcttctccctgtttcacagggtaaatcccatcttagatgaatggcccagtcaagaacactatgatatacgtgacaggatgagtgggaaggggttccctcatggagacatcaccatgccacctcaggggctatatgatgggtattctggagggctgaaaagcaaaacaaagacaaaaagagaaagaatatgaggagagaatcatgagaaatgactaaccacccatgttaaataacgctgcaaaagaccatcccagttctctgcatgtcttttaaacaatgaaacaaaacactgacctcaaaagccagtaacatcaaggatgcaagacaccaaggaagaaattacaattcacaccgaagacgtggagcgacacatcaggtagtcagcaccaacaacaatccagagagacggtaactcggggccctacctccccctgttagcatcactgaagggcgagcagagcgggaaagtctagggatgctgtttaatgtccaccgccagaaagagggagaagtggagtattttttaataaactttgtttttcagtcgataattaatagcctcaagtccgacaatatgtgcttggaacaaattagggagccaggaggaatgctatttttcagtcggagggaggaaatggatggggaacgaggagtggagggaaatctccaggcagagagagggcaatgtcccggctccaggccacttgggctccttcgctgccaaccggagggaaatggaaactcctgcctgggggtgaagcaatgaccagcggggcaagtggactgtgcagggtgcggtgcctccctcccccatcctcagggaaacagtccgccggagcccagtctcctcacgcacggagcccagacccctgccccccagcggagacaggcggtggctcgtccgcggtccctgtcacccaggcgataccagaagaccccagcccggaccccgagccccggccccgccgctcgtccactcccgccccctcctcacacctctaatcccgctgtcgggctgagtctggccccgttcccttctcatagccgctcctccgtcgccgccgcagcagcagccgccgccgccaccgagtcctccatccccgccggagccacatggaacagccaagccagccacggcgctcgcggtagccgggatctgcagcccctcaggcggacggcgcccctcacgcccaccccctccctgacagatcgccccgcgaccgtcccccaccctaccaagccctgccagagccaccgctcagcgcccagcaccccctcccccgcctttctcctccgccaccatcatcattacctcccccgccgcacctctcacactaaccctacccacggcagctcaacctccaccgccccgccgccattggccaggccccgcgcgtgccccgcccacctcggcggccgggtcttacagcggctggggcacctcattggtagaactgcctgcccatcacaggggctccgccttgcccttgctcgggaggtggtttttccccgaagccggaatgcgacgcacaggctaccttttttttaaaaaaaaaaagaaggaaccgactaaggacgatcccgcccgttcttctgattggcttggagagggaagcgataggcgggaggaatagggagtgtttatagtgaactgcaaggtgattgcagaaggtggctgtccgtcaaaggcgccgctggtgcggggctgggtttctggcccctaagggtgattgcagacctagagattggcttcgctgcagctgtgggcagtgcagctgcctgtgggtttctctcctgttctcatctccgccaggacctgggcgcgccctctcctccgccactggcaactagggtttttgcgcatagcctttatttcaccagttcctcctgggatcttacctgacaacctgaagtaatgaccctgtcaggcaccccccgacaccccggccgctccccgcccaacatagagtcaactggtcttcagtgggattgaatcagctgagctagacacaaaatgtgtacagtacaatttcttattgttcggagtcttcaacatttctttgaatcttggtttcctcttcgctgtcggactcttttgcccctagtgagaactgtagatggatttgggaacagctagcatataaaaagggtggtcaaaggcaaaaaggaggaggcagagtgagggcagggacactcaatcttgttaaaagagccaagggcccttttgagaatatgaaagctacagatactttctcaagggggaaaaagtgttctgtctcaaaacacaaaaaattgttttcagttttaggtggttcacagacccctggtgtggagaaagaggacaaagaatgaaacttcaggggaatcctagcatctaaggaataaacagagtaaaatgggaaagagaccgagaaggaataatcagagaagtaggcgcatcagcaagctatgggcagacagtttggaaaaaaaagagaggcaagctaacataaaaagaaagcaagcgggatgggttctggaaacaaggatcattcaatcttacgaaggttggaaagcagggtgcatggacaaagtagcttgaaaggtgttagggtctagggaggattctttcagggacaggaagagagagcagtgatgggtgagaattgagtccatctgtagacattgggggccaagacaaagtggagagacatgttgaagaatcaagagagatggggagacagatataaggcttgaatccagtatctaattcaatttccactttcaataaagaaaatgatctaataatacaagagcacagtgtgcattttacagaaaacagcatagttatcgcttattttgctagtcaattctaaaatgttaagataatcgtaataatcatattgattcttattttctattaagagttctctgatgtccttcctgagtggtttacgaagtcactacaacctacagccattatgatctcatataataatatattctgcatctttagtaggctttaagtgtgtggagttttttaatggcttatttgtagaaatggtcataaattattttcatccaagttacccttcagaaacaatccacatgatgatcagaaggtttttgcaccctatttattactgttctctggaagttctcaaactttcttatgtggtcattctggtttcttttaacatgctt

SEQ ID NO: 2927 - DNA, 4001 bp, Homo sapiens
aagggtacccctgctttccaaaccctctgcaggagatgagcacacttgactttggggggccaccaaactccattctcaagctgtgggagcctgagtcttaagacagagggccacagcattctcaacaatttggaatggctataaaaggggccaagaaaatggctggccttgaagttgggaagattgaggactggagtgaagcctgttctctaaagataagaagggcctctggtggacttctctgaatgcagggtgaacaaattgacttcttgagcctccctccagcccaaggattctgtaattgaagggaatggatgactcattctcagagttacaggcgtttagccaagcatctcctcacatgcatctaggacttaacatcccaggtctgctgcccactctttagatggctctgcacaattcatttaacttctctgcgcctcggttatctcacctgcaaactcagcaactggatgagacaatgccaatatcccttccatctctaagcgtctttaatattattattaagccattaagatcaaataagagaaaggggaaaaaaaaagcattctgcttctggactcagcttctgttgagtctccaagatatatacacaggagctctgctttagagaaggaaatgataaaaggaggacaagtagcatccccaggccacctccgttcccaggcccgcacccatcagaactcagctgcaactgtgaggcccccatgtgagtgccaagccccttgaaaaacaagggaagaggttttgcccgtgaatgatgtgttgctaaaaagtgaagacgtaagacatccccaccaacataaggcgctccagagaccaggagctcttccattgtgcctcctgggcctcggtttcatcatccataagatggggagactgggaatggctttacacttgaatacttcaggttgaccaccacagccaagggccaagtagagtggacaggtattgggtaggatgggaagggggaccagcaaaaattgtggggtaagattttgacgcctgcacaaacacagatctcttcagagccctcaactgaaggcttcccattggtcccctgtctgggatggagcaccaggagtgaccggagggactaggcgctgggctccggggtgggctgccaggaccctgggccggctcacctgatgaaggtggtcttcccagtggagtactggcccaccagcagaaccatgggcttgttgtcgaagtcggcatcctccagggcgggcgagtggaactcgtggaagcggtaatgctcttccaagggcagcagcttgctcttgtagagtttcttgagcccctcactcaccgtctggaaaacctcggggtccttcctccggcggtcgtccgtacccagccagctgaacatcgcggccgccgctcgcccccggcacgcagccccaggggaagactcctcctcaggggaagatgtcccgtaggaccggtccgccgggctccgagccgcgccgccgcctcacccaagcgcggggctcagccgcaccatggcccgggcacgcggctaggagggccgggagcgcactctccctgctcctgggaccaagcccagccgctgctgcatccagcagcccaggccggagggaggataaataatctgggcttgaggaggaggggtgaaatcttggcaattaaagttgaacctgcaaggaaactgccagatgccggggtcccaagccggggtccccgatcggcccccagccctcgcctgctctgccctgcgtgcagcaagggatgcttcggctccgctcctgccggaccgaggcggctcaggggagacggcgacgctgcccagcccgcggacagctctgcatccgcagcagcatcctgcagccccaggcggtggtttaaatgccagctgggcaggaagccggcgcgcagaggaagtcccctagtactggcaaggcagggccggccccacggttgcggcgacgggaagccgcgcagggcgccgccatgtttgtgggcaggcgctcagctctagacctgcggccgcgcggggagagggatgctgacccagtccagtgggagagtgccggtgtctcagtctccgcctctggggcttcgatttgggaacagcgccctctcagggacggctgcgaggacagagttgacctattcatcacactccctgctttgaatcgcctctccttcagttgctgaggtcaattccctaggaaaacaggtactctagtattgggggattttttttttttttggcatagaaaggggatccactatcaggttacacaaaataaccaaaactgtcactacccaaacttttagctaggcttagggtgaagtcaaaatcgttcccatttacttattcattcattccagcaaaacaaaacaagccaagaagcaaaatccctgcaagtattgggaatttattatggggcagttacaattttggtgactgtggatacagagatgagtgctgaacagactctcccttccaggaactccagtgaaggcaggctttaaagaggaggcatgagcagagggtcatgggaatacagggaggagtcactccttttgtgtggctaatttgaggaaggcttcatggaaagcatgactgtaagctggatcctaaatgatgaattgacatccattgttctaggagcgtaaggagtatttgcaaaggcttgaggaacttggtgtgtccaaggcagagtaaacagtttggcatagctggagtgtagggtttaggaaggtgaaagagagtgagggaggccaagcatgaaaggctttgccagagatggggaaccaatagcaatgctattactaatcattgttacattaacaaaatgctcagcatgtgcaggggcctgggctaagttctcagtgaacattgctttatttaaccttcatggcagatcatattatctccagcatcatactaaggagagtgagtgggaacactgtccaggtgtaggcaaaagcagtgcatcgtgtgtagagaatttaaacccaataataaacttgctgaaagttgatgtgctttgtattggcaccattctaaacagtgtagtgataaaacactcctccctgcccaggctaatgactcccactaccctcccttccacagatgaagaaggagtaggctatggaccaggcaggaactggaatgccaagagcagtgttggaggggcaaaagaggttgggggttgatatggttttgctttgtgtccccgcataaatctcatctctaattgtaatccccataatccccatgcgtttagggagagagctggtgggaggagattggatcatagggacagtttcattcatgctgttctcatgatagtgagtgagttctcgtgagagctgatggttttataaggggctcttcccacttggttcctcatacttctctctcctgccgccttatgaaggacgtgtttgcttccctttatgccatgactgtaagtttcctgaggcctctctaggcatgcagaactgtgagttaattaaacctttttcctttataaattacccagtcttaggtatttcttcacagcagtgtgaaaacagacgaatacagaggccaagagaccatttaggaaactattccaaaacttaggagacagctgcaatgggattggagaagaggtcagactcaaaagatttttttcatggaatagaattgtcagatcttggtatgtgataaaaaaaagaggacataagggtgaggcacagtctaggatgattttgaattttctaccataggggataagatcattggagaagctcttccactaattaggggaggcagagagagagctgatttagcagacagagataatgtgttcaatctaaaacgtgttgcgtttgaagtgcctgcaggagcttcaagaggagtgtggtgaagctgcagggatttcaggggaggggggattatcagaggccagtgctgaatagaatctccttagttacatctcagatctcccgactccctcctt

SEQ ID NO: 2928 - DNA, 4001 bp, Homo sapiens
tggtgatcacctccaggtttgtggctttaaattccacggacacaatgatggttctcaaaagcacgcttccaccatggactctctcctgaactcccaactgcctctgtccaacctgctccctcctaaaatgcccttgactctattccttctgctgtcttggcctggtcaatttctacttcctacagatttcagctcaaaatcccagacactccttcacaggctcttccacagtgctcatcccctttattaaaattgcttatttaactattttccaaaatagagcatgaattactacaggtaagggaccaggctcaataatgaatgagtgagtaccaaaatatctccagataccccatccaggacttgtcacctgcttttctctacatttatagtgcaatatctgcattctctctgtacccaccaatatccactcatctatcaggatcaacacagccttctttgatgctggagggtcagctagtatgggcttgccactccaccttgcccaaccttcaacacagccctgactgctttttaaactaattagtgagctctttggggagcagattctacatcttattcactcatctggaagaaacctccatcataatcactaaaaaataatatttgtccatcttactaatgcccagaaattattttggctatgcctccacttcctttccagcagactacatacagcctggccaacacggtgaaaccctgtctctactaaaaataaaaaaattagttggctgtgctggcgggcacctgtagtcccagctacctgggaggctgaggaaggaaaatcgcttgaacctgagaggcagaggttgcagtgagcccagatcgtgccactgcattccagcctggcgacagagtgagaatctgtctcaaaaaaaaaaaaaaagaaaagaaaagaaagaaaatgtcaccaggtgataactactatgttgacaaccgaagtagtggaagggggaacagcaagggcagagcggggtttcttgtataggcaggttgtttgaggaaggctgctctgataagctggcatgggaagcagtgcaggataagggagggatttccccatgcagttatctggggaagaagctttccagaaagaagaaacaagcagtgcaaaggcctagaggctggaggatgcttggctgtgcaccaggaacagcaaggaagccagcgtggccggagtagggggtgcgaggggccttgcctgtgagccttaataaatgtttataggattctgatgagacaggaaagctacggggaaggtcggagcaggggagagtctggttcttacttaaaggaacattccagatgctgaggtgtggagaagaggtagggggtggaggttcaggggtgaggatacggagtgggaacaggaactgcggccaggcaattgggaaactactgcaactctccacggaagagatttttagccaaagattgttcagccagtctatgagtatttcaggcctccgtattttccatgtgtcaagccactaggcctattcgtcttccactagaccccgccccacaactgctgcctgggaaatatttgttacttgcactgataaaaattcttcacgggaaggaaatggctttcagtccccaccccgctccacgatcctttccctggatttggggagggccccacacccgggctgcggacctgggcctgctctcccagtgctgacccagccggggccaggggcttcggatcagcgtccgcgtcctgagctggggacgcaggattggcgagtcccgccccggctgggcctgcagcccctcgtacgtggccccccggcccccgctccccgcgctccctcggctgccccctgccctgctcacctgcgccgccgccgccgccgccgccgccgccggccggagacccgcggcttcgggagagctggttctcagtttcgttttccccttggactccgccttccctgcagccgcccggccccctctcgcacaagccctcgtctgctacgggattggggtaaattggcgctggatccagagtgcgcgcgagaggcactggcgggcgggcttggcaccggcgggcgggcttggcaccggcaggcgggcttggcacccacgtgctgcccctgcacggccaggaccctgcacccccatcccccgcccccggggctcctagggttctccgctggcctagtccgctggccgcactaggttctcgaatcaagggttccacttactctcaacacaaatatttggggtggggttgggaagatggatcttaccagctccattctacaatagaggaaactgagtaaatgaactcacccaggggtcctgccgctcgtaagtggcaaagccaggattcagttcaagtcggggcctgtaaacaccaaagcactctttccctcttgccacaccgcggccccctcacctttacaagcctggggatcagaggcctgggggcgtaatctccttcactccgctcccacccatccattcattcatgagcagacacttgccagccgctgtaaaagcacctgtgggccagtcctgctgctaaatagagacacctgcttcctacagtaccccagggagcttcctaccatagtccaacaccagtagtcctcgatttatagaaattctactcacctgatggactgcgacacactcccagagtcacacagagttccagagttcattggcacagtgactaatgagtattgaggcacagagaatttggattaacacaggtagtaagcagcggagttagaattataaccaggagtttgtactctcagtatcttagctgggataagagaggaaggtggtccaaagacagacctcaaatatacattaaatattatgcctaggccggcgcggtggctcatgcctgtaatcccagaaatttgggaggctgagacgggcggatcacctgaggtcaggagttcaggaccagcctggccaacatggcaaaaccccgtctctactaaaaaacacaaaaattagctgggcgtggtggcaggcacctgtaatcccagctactccagaggctgaggcagggagaattgcttgaacctgggaggcagagattgtagtgagctgagatcatgccactacactccagcctgggtgacagagtgggactccaattcaaaaaaaaaaaaaaaaaattacacctaggcaggcatcctctccagcctcccttctccatcccccaacaaccccacattgcagggtatcaacaactaaaatctacactttccttgtagctctggtcctgggcatagcttaagtcccctatatgtaaagcactggcgggaggtttagaaggtagacatgaggcagagccatctttttgtggcatttccaggtgacaagaaaactctgacagtgctgtgtgtccatttgtcagctttgtgggtgtgggatggctgtggcagcagcaatggcagtagcaaggacaagtttttctgactttttgagcccctgaactgcccaagagagcttaaagaatgaaaaatggcaagcttaagcatgatcagaggacacacgcttttatgactgtaccagaaaaccctcctatttcagggagcctcaggggtgatgtaaaaatctgccttctctgctggggaaagatttggaaggaatgatatcagagggttggtgatgaggtccaggggaatgatatgatatgggtgaacctcttggaatgggtaaagtgtgagcatattggactccctgaggagcccaattccctactgtctgggctctcagctgcaaagcttggtgctgcaggcaccagaattacaatataattgttttgagacagagtcttgctgtgttgccgaggctggagtgcagtggcacaatcttggctcactacaacctctggctcccgggctcaagcaatttccctgcctcagcctgccaagtaactgggattacaggcgtgtgccaccgcacctagctaatttttgtatttttagtagagaaggggtttcaccata

SEQ ID NO: 2929 - DNA, 4001 bp, Homo sapiens
gctcactgcaacctccttctcccgggttcaagcaattctcctacctcagcctcccaagtagctgggattacaggcgtccaccaccacgcccagctaattttttgtatttttagtagagacagggtttcaccatgttggccaggctggttttcaactcctgacctcaggtgatccacccgcctcagcttcccaaagtgctaggattacaggtgtgagccaccaagcccagccttttgtcttttatactgtatttttaccgtactttttctgtgtttagatatgtttagatacatgaatactaaacattgtgttacaattggctacagtattcagtacaataatatgctgtataggttcgtagtctaggagcaataagctatactacacagcctaggtgtgtactggttgtaccattcaggattgtgtaagtacctctatgatgtttgcccaatgaggaaattgcccaaaggtgcatttctcacaatgtattctccttgttaagcaatgcataactgtatatgggaagatgtaaataggttatatgtaaatactatgccattttatataaaggacttgagcatcagtgaattttggcatccacagggagtcctggtaccaattccccacagagagtgagtgaccactgtacattattctccctacaatcactttcatctctttttccttttttactgtacttcctcatttaggtggaggggactcctcccagaacctgtcagctcatttcccactgaacacttctcacctttccatatttgttcaactttagagtatttaactgctgctgacactctaaataactattatccagctttgcccatggtgtcctaggtgtggctctcactcagggtttcatagaaatgaagatagggtgaatgacttaaccaaactcttgaatgtaagggaacgtgtgaatggctttactctgtatgaaagtattttctcacagagagaaacagaaaatgtatttgcaagttcccatttattaggaaaaaaggcaatcactcaccttcttttccttattaagtatctcaacagctaatttggctgcggcattttttgcttccttctttgatctaccttcaccttctggaaattctcttccatctattataacttgaaatgtaaacctgattacaaagagaatattcataaaatattatacaactcatgcactatctaaaaacaagtactctagtcatcactacctcctatgactacctttgagggtttgaacctacattcaatatagcatttaagcagtcacctcaaacagtaaagcagcatgtcttgttgaagcatggaaaggtttctaccctcttttctctctggagtcaactgtggctccaccatggttcccactttatgccaagagcactctcacaaaactaaagtgttgacctcaaagttgtgccagagttgccattcccccagcttacatttataaggtcatatcttttttcttttttttttaattttattattattatactttaagttttagggtacatgtgcacaacgtgcaggttacatatgtatacatgtgccatgttggtgtgctgcacccattaactcgtcatttagcattaggtatatctcctaatgctatccctcccccctccccccaccccacaacagtccctggtgtgtgatgttccccttcctgtgtccatgtgttctcattgctcagttctcacctatgagtgagaacatgcggtgtttggtttttttgtccttgcgatagtttgctgagaataatggtttccagcttcatccatgtccctacaaaggacatgaactcatcattttttatggctgccatatcattttttatagcaacctacctcctatcatgtggaggtcctgaattaggcagttcttgatatttaagtactactccctgcttctgacggtatgtattaagttcctccatgaagaaacctgctgaaagatcaccagccatttcttcttcccgtatcctacaatggaagagacatttgaatgagtgatgctcacagaacatatttaatctgagtttcccaatgcagtttaggagacagaggggttggggagactcccctttataggactcatctcagtctcacataaatgcagagactttctttcaaaaccgttctttctttctcattcactgcacaataaagttaatttctccaaaattttctactttaaaaactcaacttggccaggtgtggtggctcacgcctataatcccagccaaggtgggcggatcacctgagctcaggagttcgagaccagcctgggcaacatggcgaaaccccatctcaattttgaaattgttttaaaaaataaaggaaagaaaaaaaactcaactggtcagtgaaagggggtccttctctttaactctgctctgtgcttccactgagtatcaactacatgtttgcctacctgcttaaaaaagtaaaaaggctgcaggattgtagaatgttttatgttgagaagaaaaagatttagagtatatataataagtgaagtggagtggtagcatggggacaggctgggaaatgaacgggcaggcaagtgtgcctgtgtggacgtggatcctgccggaagccaggcggaggagagctcaagctaagggtgatcagcccgtgacctagatctctagacaaaataaaacaaggaaaatatgctagaatcaacaatgatggatcgatagttgcagtccagcttcgtactacaaatgagtgccataaaacctactatacttgtcacacaggttttaagatgttgcaagaattgtcatcaaatgacatgcttttacttcaacttagaactggaaggacactttctaggaacaatacaatttgctttcatcacataaaaatttatattgacagatttgaggatttacagaagtcgtgttgtgacccatttaacatacacaaaaaactagccccccagaatttgcatgtaattgacttagatgatgccacttttctgagtgcaaaattcggaagaccgcttgtacctggttggaagctttgtccaaaatgcacgcagataatcacggaagtgtggatgttgattctgaagaccgccagagaagcaaacctgagtcagatggaagaactgctaaagttttgaggtcattacaatttacaaatccaggaaggcaaactgaatttgctccagaaactggtaaaagagaaaaaagaaggcttaaaaaaatgcaaccgctggttcagacagacgagtgataccagcgaagactaaggtctatgatagccagggtctcctgatttttattgggatggacctcgatgcctcgatgaagattgtttaggatgtttctatgcttgtcgtgcctgtggttctaccaagtgtggagctgaatgccactgtgaccgcaagtcacaaagtatgagcaaactgaaattgaaggaggagaaataattcattataaacatgctggataatctgtggtatcaaactatggggcctttaaaggtctttatttctaaaattcggttactctaagatacattttaagcttgattgtcaaatgacaaagattttaaaagcacctcaatgtgcacgaatttttcatcttgggtgctttaagattcactatttgatataaattcagatagcctatttctcagtagtcagcattaagcctgcctggaccaatataaacatgtagggtgtaggcaggtcctcaatgtgcacggttcccatggcacaaatttcagtgacctagatttagtttaaataccagtttccttaccaggaaggaaaggaaactggtaaggaaactggtgttgtttaaacctaggttaaaattttaggtagcacagtataactctgagtaattacaggaagtacaaacttctctgctagttcttcagtctacaaatcacgatgtaaataacagatatgcttcatgatcagtgaccagtcgtgttacttgtttcaaattcttccagtggttggtc

SEQ ID NO: 2930 - DNA, 4001 bp, Homo sapiens
tctcgtttcatccgtactgttagactgcacactctcctggaaggcaggaactacctgcctaacctctgccacccagggcatccttgggctcttgttaaccagtaagtacctgttgaagtggatttgaattctaagaaaaagaaaacgtctcaactctacttcatgtaattcattttgagcaggagcttcagaaatttatgataaacaaaaacactcttccaggaaaactgactcattagcaaacctaagaaaactttgttttatatatatatatttacaaatgtttatatattcaaatggtgcctagagaattttagtacttatcctatttatagtagtctccagatatatagatcaaagttctaatattaatttaaaattaaatctaacttgttacgatctagtaatgactataagtctaaaatatgttccaatccagagcccagccttccctagtttaatttacttaatgctccctttagcactccatttataaaatgggacatcactttctccacgggtgtgataagattggctgtcccccaaatttactgttaacatgccttacattgtgtctagactttgaaaagtgctttaaaacaatcaccttgaagtaacattttttgaatgctgagaaactcaaagaaaaccctatattaaatgtttatacagtaaaccccttattcaagaacctaaccatggctcttaggttcaagaaccaatattcaagaatctgactatagctcttaaactttagcgtgcaagaattatccggcgtgcttgttaaacacgcagatgccaggctcttacccagggaatgtctcattcagtaaaactggggtagggcctagaaaactgtagatttcaccagcaaccccaggtgattcggatgcaggtgttccgcagatctcaattagacactgatctcaatccttgtccgggggcactacagagttgtgtttgaaagaaaatgcagacgtcttttgctaaagtcctttctcaaaacagctgtcacgccagcacagacaggaggtgatgtgcgtaaggaaaaagagggaaaggttccttggaagagaatcaatgcccgaaaacaatgaaagaggggaagtggcgtttctttgcaaccctggaattccattctcccgcacctgcgaggatgctgctctgacccgtcggccagcaccaggccctcgggagccgagcccaggcaggtcgctggccgggggatgggagggcgtcgtggccccgcgctcgtccccaggtcgccagctgccctccgcagccgagggaagacgcccgcccgggtcccggatctccgcccccctacaccgcatcctccgcggctcgcgcgcgtaaacaagttgcctcccccgggtcggcagcccctcacctgccgcgcggtcgcaactctgtctcatcgtctggttccggaccccgaggctcctgctctcccgcggctgccggcagcgcctcagcgtcctccacagtcacctcggccgcagccacggcgcccgccgccggtactcgcgtcgctgaggtgggagcagcggccgccccgaggccgaacgccgcctccgccgtcggcgctgggaggccacgggcgcgccccgcggccaccgtccttgccgcgagccccagcagcagcagcagcagcagcagcgcccgtaccagcagccccgggctgatggcgcgctccatcagcgtcccgccccgcgcgcaggcatggaggcgcagccactgacgcctgcctctcccgccgcttggagctcccaagaaggcaaggacgtgctagggaccctactgccgccccgacggcctggacagccagccgtgttcccctggccacgtctcagcccggcctctgccgctgccacctgagtgacagcctatctcggacatcgcccattgagcaaactttccgcgcgtttgctctctcattggctgcggccgctgccactccatgttcccaggctggccttgttggggaaggtggactttccctggtggtcaacatcgcacctaccaatcaaatcgtaatttcgtcgttcgaggcccgtccctcttccggacgcaattaccaatgagaaatgcccttccccgacgtctttttacctgattggtgcgctcatcagttcccggaatacctttcctacaacagattggccatcgcggtggttggcctcgccccacaaagcgaggcgctggagaagacttgaagatcattggtggaagtggatgtccctcaaaggtctgcgctaactgcctcttgattggttggaagcggcacttactacgtggcggattctgactgtgaagaggactgtcccaagtgaagagtgggaggcaagtgccttgtgaccgggaggaggtcgaccttaaaggagctggtattgtagctcttctaaagcctagtctacttaggaaggcaaaagcgaagcagcaagaagtggccacagaagccgtgtggtccctagaagtagaagggtaaggaggatgcaggagatggtcctacttgtggccgcaacggggctcagaagtccgcttgttagagatggcagtgacctgtgacaatccagtctgcccgacacgcctcccgcctccttaggaacgggaaggagccccggcccagtgcactgacgtagttagcctaagatcacgtagctggttggtcacagaatcatgactttaattcatgtcttctgactctgacctggcacgctttgtacctcaccaaagacagtgatgaaattgcaaaagggcagagtggagaagactggaatgttcagccaaggcatttgaacttttaatgctgcaagtcaagacttcctgaagatttttgagcagatgagtgaagtgataagaaaatgcatcttcagcagtgacagcatcaacgaggaggagactggccgggaggctattacccgcatcaaaaccagtgaacattaaaaaaaattttttttttagagagagggtcttgctcttttgcccaggctggagtgcagtggcttgaccatagttctctataaccttgaattcctgcgttcaagcgatcttccttcctcagcttccggagtagctgggactacagatgcgtgccaccatgccaggccaatttttaattttgttttgtaaagatggggtttctgtgttgcccaggttggtctcaaattcctggcctcaagccatcctcccgcctcagcctcccaaagtgctgcaatttacgggcattagccaccgcacctggtccaaaaccggtgaagatttgttaaggtgttggcaatatgggtatacctagattatccttcatctgctaaaaacatgctctaatctctccccagcccaaaacaaacaagaaacctctcttccccttccagctcctaccacgtgtctttgctcctctgtatggcaaaactcaagtgttcaaaattccttatcttcaattcctcttctcccattcccaagtacactacagtcaggcattcacaccaccaaaactgctctcgctgaggccaccagtgctgtattcaaaggataatctttgttttatcagctgtatttgatccagcaactcaagtttttcctgtctagaacacctttcaccggtcttcttgcttctccatagtgctggtcgtaaccctcaaaaggtcccccagttcactcaggataaaagtcaagtccttaaaatagactacagggtgctacagcatctggttcctatggcttttctgatctcatttcatactgtctttgctcactccactgggccaatcaagacccacctggggggttttcctttgttgttttgcctgcctaggaaacttcccaggtatatgagtttgctagagttgccctaacaaataccacagaccaggtggcctgaacaaaactagtttattttctcgaagttctggaggctagaagtccaagatcaaggtgggattctgaggcctctctccttggcttgccgatgacagccctcttacttcctcttccctctgatg

SEQ ID NO: 2931 - DNA, 4001 bp, Homo sapiens
aggaaccttgacaaaacaagggaacaggaccaatggcccagagtttaaaaaggatgggataaagctggaaaggaagtgaacagtaagactactctgacccaagcacctatccttctcactttgcacccagcacctttcctccctccagtccatttccctaggctctttctagccaggcaccaaacccacttcctacctgttgacgctctggttttttaacaagccttctcagaagtaggtcatcaacctgagggtactcagggagacgcttcactcctgaaagataatcatcatgttttcaggacactgtaggtcttgaaatgtgtaatttgctcttagggtataaggggcatcaagaaaaacaggatgaggtggagaaaacgggagaatagggtagaaaaggaaatagggataggataatggggttgcaggaacaattcagaactctgggtcccaagaatgagaggggagagctgttttactattgggcagcctgagctggcgttataattaggagtaagggaggtcttaaaatgaagggaagatacctgagggggtttctccagctgtgctggggctggccttaggaggtggtcctccttgttccccttttcttgcctgtttcagggcccgctcggcctcctgcttggctcgacgctcagcccgaagttcggccttactccgaccagctggaactttctcccgaggagtgcccaactgaatgcccgattctggcagttctctggttgggcctactaaaagcattaaaaaaaaaaatgcccaagctgcaggcaggtgatatccgtgccccagctaaaactagcttctctccttgtaaacctctttgctttacacacttgctcaaatcaactttgtcctgtctctcccttatctctcccaccacatccctctaccagctccacaccccagccctttaaaagagacccctcactcaccttgacattgggctgcagatacagcagagccagtctctggttctgcccccttttcttccttccgtttcttcttctgctgtttcttttccttccgaagctgcagcttttcttctttggtcatttccctccccactgcctgagacacagacataggatactgctcttccccaacaattccaaaggggaacaaatactattggatgcttacaagatttccacatggttaaatccctagttcttcctaacttccacaagctacctgttgcaagcttacatccacagaggctgacgtttctcctccagggacagaatcatatatccctagggttgcaagacctctgtaaaatctcctggctttactgagaaataaaccgacacgggatgggagctggggcggaataaagctggcacagcctcctgcgtagcgcttggcaggcggcttgggagggaagcctcacttaccccaggcccagggggaagctccgccttcatcccggatcccgagtctgcatcagaaaacagggcacaaagtgagccagagagactccgggagggtttgggggcacgagtactcggcgcagccggctgctgggttggcatgaccacggatccgccggcaggcgcgaggcgagccagggatccgcgtggggacgcactgcgcggcggatcaaaggaatggaggggtcaccgaccctcctcacagcaaccagccggtgcgcggcgcgggactgcgctcgagactgtgtagaccggagcccagcgtggcgctggaacggagcggcggggcccaaaggcgctcaaggcccggcactagctgtccggagctcgtcggctccgcgtaccagtaggcaggcccggctcttcactcaccctcgcgaacagccacggccacagcagccatcgccctcagtcctaggctccgcccgccgtggtcacggagccgccccgctgcctcgctccgcggctgcagggtccacagcgccacctgggctggaggctgagccgcagaagcgaagcgcgcagccccaatcggactacaatttccgacgggccccgaggccccgccccgcactacgggttgcaatgagggccaactccactttgggctccctatccggacaggtggctcttgccctttagactacagttcccagcatgcccaggcgattgcgtcccagaaccgacgtcccaccgccttcccacatcggatcgcagggctcccaaaatggcgagtgaggctgcggggactcgctgagcagcggagggggagcgtgcagagccgctgcggccctcacagtccggagcccggccgtgccgtgccgtagggaacatgcacttttccattcccgaaaccgagtcccgcagcggggacagcggcggctccgcctacgtggtgaggagcggccggagccgagccgggccgggcaggggcggggataacgggcccgagccatctcggagcggcctctgaggcctgaccgccacccttcgggcctggtcctgggccgccgactcccgacggcctctctgggagcttatctcatgtgtgtgattcgtgcagtggtcgcccgagctcctgtaggcccttaggccgggtcgcttccccgagctaggccgcagctgccctggtgggcgtcactggcctcttgggcagtgagactgcaacacaagcgtccgaatttcccccggactggctcttcagctttgggacttggccctggcgaaaacaagcgaactatccctcgggagattagcgcgttactccggcgagttgccaggcaacttccggccagggttctcaggggggttgcgcagaccgcaaccctaaaatgcttgactacttttgtgtcctcaggcctataacattcacgtgaatggagtcctgcactgtcgggtgcgctacagccagctcctggggctgcacgagcaggtgggactagcacccctgccttgagacagcttcaagcccttccctacacgtggacatcagtgtctccctttacccgctcttcttgttcccgtaggctgtagttcccctttaatcactgccacagggtagggccctggtttatcttgtctgacatttccgggaactccctaagaagcttaatgtccgcgcaacaactgctccttcctgttcttatattctggttttctgtccagtcttactgctctagtagcctttacccctgcatggacaaaccaacccctccccccactacctccacccaggctgtcaaagcacattccttctgtcatctgagcggcaacttgaaattcttttccctgcttatacaaacgattcaccgatttccttttgtgttcttcggctcatttcagtgtgtttagctgtgccaattatcgttatgtatctgtgatgcaatgtttctcctccttccttaccagatcttaaactctatttaactcagtagagctccactgataattagttgtgcaaccctgaacaagttacctgatatctttttttgggacggagtttctctcttgttgcccaggctggagtgcagtggcacgatctcggctcactgcaacctctgcctcctgggttcaagcgattctccttcctcagcctcctgagtagctgggattacaggcggctgcctccacacccagctaatttttgtatttttagtagagaggggtttcactatgttggccaggctggtctcaaactcctgacctcaggtgatccacccaccttgcctcccaaaatgctgagattacaggcatgaggcctgtagaaactgatttctttgggcctcagtttctacaactgaaagatggattctttgatctgcaaagtccctttaagtcctaagatattttgtgaacagacttagctattaactgtgcactttataaagccctttccttcctttaagggttcagtgaacagtcttgctaggtggtcaaggggctccctataggtcctggcccagtacaaatcctccccgtactgtggaggggctgacttgtacacagtaaaatagagcacaacttatatctaggacagctcccttgagg

SEQ ID NO: 2932 - DNA, 4001 bp, Homo sapiens
caccgggcattggagccactgaccaggccctgggagtactgcaggccgagtcgcaccatggctgggtggatcacagaggatgggatgctgatgggatggcggtgtcacatactttgaaagggagcttgagcatctactgcccacctgcccctgatgaaaaggaactcccttcactagcagatttccccactcctctacagttctgccttgggttcatactttttcctacagagtccatctcagattactagaaactttcaatactgacttactaaaactcctcagactcaaaagttatgacaatttcataggatcctacctcataaactgggtcagagagttttgtctgctgtactggggtaggtgagagaagagactgactttggatccataatcctttcgtgtaggaaccttgacaaaacaagggaacaggaccaatggcccagagtttaaaaaggatgggataaagctggaaaggaagtgaacagtaagactactctgacccaagcacctatccttctcactttgcacccagcacctttcctccctccagtccatttccctaggctctttctagccaggcaccaaacccacttcctacctgttgacgctctggttttttaacaagccttctcagaagtaggtcatcaacctgagggtactcagggagacgcttcactcctgaaagataatcatcatgttttcaggacactgtaggtcttgaaatgtgtaatttgctcttagggtataaggggcatcaagaaaaacaggatgaggtggagaaaacgggagaatagggtagaaaaggaaatagggataggataatggggttgcaggaacaattcagaactctgggtcccaagaatgagaggggagagctgttttactattgggcagcctgagctggcgttataattaggagtaagggaggtcttaaaatgaagggaagatacctgagggggtttctccagctgtgctggggctggccttaggaggtggtcctccttgttccccttttcttgcctgtttcagggcccgctcggcctcctgcttggctcgacgctcagcccgaagttcggccttactccgaccagctggaactttctcccgaggagtgcccaactgaatgcccgattctggcagttctctggttgggcctactaaaagcattaaaaaaaaaaatgcccaagctgcaggcaggtgatatccgtgccccagctaaaactagcttctctccttgtaaacctctttgctttacacacttgctcaaatcaactttgtcctgtctctcccttatctctcccaccacatccctctaccagctccacaccccagccctttaaaagagacccctcactcaccttgacattgggctgcagatacagcagagccagtctctggttctgcccccttttcttccttccgtttcttcttctgctgtttcttttccttccgaagctgcagcttttcttctttggtcatttccctccccactgcctgagacacagacataggatactgctcttccccaacaattccaaaggggaacaaatactattggatgcttacaagatttccacatggttaaatccctagttcttcctaacttccacaagctacctgttgcaagcttacatccacagaggctgacgtttctcctccagggacagaatcatatatccctagggttgcaagacctctgtaaaatctcctggctttactgagaaataaaccgacacgggatgggagctggggcggaataaagctggcacagcctcctgcgtagcgcttggcaggcggcttgggagggaagcctcacttaccccaggcccagggggaagctccgccttcatcccggatcccgagtctgcatcagaaaacagggcacaaagtgagccagagagactccgggagggtttgggggcacgagtactcggcgcagccggctgctgggttggcatgaccacggatccgccggcaggcgcgaggcgagccagggatccgcgtggggacgcactgcgcggcggatcaaaggaatggaggggtcaccgaccctcctcacagcaaccagccggtgcgcggcgcgggactgcgctcgagactgtgtagaccggagcccagcgtggcgctggaacggagcggcggggcccaaaggcgctcaaggcccggcactagctgtccggagctcgtcggctccgcgtaccagtaggcaggcccggctcttcactcaccctcgcgaacagccacggccacagcagccatcgccctcagtcctaggctccgcccgccgtggtcacggagccgccccgctgcctcgctccgcggctgcagggtccacagcgccacctgggctggaggctgagccgcagaagcgaagcgcgcagccccaatcggactacaatttccgacgggccccgaggccccgccccgcactacgggttgcaatgagggccaactccactttgggctccctatccggacaggtggctcttgccctttagactacagttcccagcatgcccaggcgattgcgtcccagaaccgacgtcccaccgccttcccacatcggatcgcagggctcccaaaatggcgagtgaggctgcggggactcgctgagcagcggagggggagcgtgcagagccgctgcggccctcacagtccggagcccggccgtgccgtgccgtagggaacatgcacttttccattcccgaaaccgagtcccgcagcggggacagcggcggctccgcctacgtggtgaggagcggccggagccgagccgggccgggcaggggcggggataacgggcccgagccatctcggagcggcctctgaggcctgaccgccacccttcgggcctggtcctgggccgccgactcccgacggcctctctgggagcttatctcatgtgtgtgattcgtgcagtggtcgcccgagctcctgtaggcccttaggccgggtcgcttccccgagctaggccgcagctgccctggtgggcgtcactggcctcttgggcagtgagactgcaacacaagcgtccgaatttcccccggactggctcttcagctttgggacttggccctggcgaaaacaagcgaactatccctcgggagattagcgcgttactccggcgagttgccaggcaacttccggccagggttctcaggggggttgcgcagaccgcaaccctaaaatgcttgactacttttgtgtcctcaggcctataacattcacgtgaatggagtcctgcactgtcgggtgcgctacagccagctcctggggctgcacgagcaggtgggactagcacccctgccttgagacagcttcaagcccttccctacacgtggacatcagtgtctccctttacccgctcttcttgttcccgtaggctgtagttcccctttaatcactgccacagggtagggccctggtttatcttgtctgacatttccgggaactccctaagaagcttaatgtccgcgcaacaactgctccttcctgttcttatattctggttttctgtccagtcttactgctctagtagcctttacccctgcatggacaaaccaacccctccccccactacctccacccaggctgtcaaagcacattccttctgtcatctgagcggcaacttgaaattcttttccctgcttatacaaacgattcaccgatttccttttgtgttcttcggctcatttcagtgtgtttagctgtgccaattatcgttatgtatctgtgatgcaatgtttctcctccttccttaccagatcttaaactctatttaactcagtagagctccactgataattagttgtgcaaccctgaacaagttacctgatatctttttttgggacggagtttctctcttgttgcccaggctggagtgcagtggcacgatctcggctcactgcaacctctgcctcctgggttcaagcgattctccttcctcagcctcctgagtagctgggattacaggcggctgcctccacacccagctaatt

SEQ ID NO: 2933 - DNA, 4001 bp, Homo sapiens
gagtctcactttcctcatctgtaaaaggagacaacaagatccccttcacagaattgttagagtagaaataacatatgaggctgggggtggtggctcatgcctgtaatcccagcactttaggaggcaaggtgggtggatctcttgagcccgagttcgagatcggcctgggcaacatggcgaaaccccgtctctacaaaaaatacaaaaaaattagcaaggtagggtggcacatgcctgtagtccggctactctggaggctgagatgggaggattgctggtgcccgggaggttgagtgggcagtgagctgtgatgacaccactgcactccagccagggtgacacagcgagaccctgtctcaaaaaatatatatatatatgaaaaatacctagcaagatccctgtggaagtccattattaccattcttactgcagactcccaaatgatttgggtaggcttgagctagatgacccataagatgtcttcttaggatgacatttgatttgttcaaatcagtggaggaaggggtataagggttccagaaagctccactgaggcaggatttggatctggagctagttgttgcagggtttacaatagagatgaaatggggcggcagcgggggagaggttcgtagagggacaggctcagttaaacagcaggatagagaagaggtcgggcaaagactttctcaagtagcagagacctctcagcaaccagaaaacattcctgaggacctacctgcctggagtgttggaaatccagtattccctgaatttgcacagtactctctgtattggaaacaccccaatttcccatcaaaagcaccaggtcacaacctaaactaatagtaattccactttacgtttatatcgcaatagttagcaatgttcacaagcatctttaagcatcgctgagtgtgatctgacccttatcacaccccggcgtggcagcagggtcctagccactaatgtggtttgagcaacaatggcttagaggctgggtaacttttctacagtcaaacagatggtaagtggtgaatctgggactagaaatccaggttttcggatgaagagacagtcgatttactagactactagaagagaggaaggaacatattctacctcaagatacaatccttggagggggataagtaaagatacttctgcattttctctctgtacctccaaactgtttgatgctgaaactagaaaccggagcgggcaggagagggcaacaagtatacttaggtcttggcgagtgtgttggaagacgggaacgggaaggggaggagaaagaaagtaggaagagtctcaggaagataattcctaagccagccttccaccgcgtcgagggcagcaaccacattacctcattgcatcctccaaactctacgacaaagggtgttaccgtccccactctgcagatgagaaaactgaggctcagaggggagagggagtgtgtggggaaagctggattcagaggcagcgctgccagactgcggaaacacccaaaccgccgaggtccccacccctccacgtcgcaggcaatccgcatccaccagggcggggcgtccgaaaatctccccctaccgggcggcacagccacccctcccccgggcccagctcttcgccctcggttcggacggccctggggtctccgggactccggtatccattgctccccagccccctcctccccgccagtccaggccaggtccggccgcagccggatcccagcagggaagccggtgccgcagggtttgcgccgccccagccccagcgggggcgggcgcgggggaactgttcggggaaggggccccgggggcggccacgagccactcacgcgtcgaacttgttgttcatcctctcgccgccgctgtcgccactgcctcagggagtgacttccgctccaccgggtccctcagccttgggcccgggtacttccggttttgcgcggggcgcagcggaacgtcggcgcgcaggcccggtttggaagcggctatctcgggacgccagctcagggcggctgcgcagagggctggactcagcggcggagctggctgctggcctcagttctgcctctgtccaggtccttgtgacccgcccgctctcctaagggagcgtgtcctggccccctcccgcagcggctcggaaaaaaggcagcaccgcgtcgttgacggcgcgggctctggactcgctgcttggtaaaaaccttcctcttcctccagtgcgggacgcactctctggtatctcttttgacctcccggaggctttcctttgtcggtcgcggcgccactgtactatggcatacctcgttttattacgcttcgcagatagggcattctgaaaacaaatggagggtttgtggcagccctgagtccagcaattgtatcagcgccatttttccaacagcatgtgctcacttggtgtctctgtgttacattttggtaattctcaaaatatttaaaactttttcatgatttctgtgtctgttatggtgatctatgatcagtgatctttgatgttgctattgtcattgttttggggtgccacatacagcgtcttttataagacgtggaacttaatgttgtgtgtgttctgaccgctccacccacagaccgttccccatctctctccctcttcttgggcctccctattccctgagacacaacaatattgagattaggcgaattaatgactctgcaatggcctctaagtgctcaagtgaaaggaagagtcgcacatctctcactttaaatcaaaaactagaaatgattaaactgagtgaggaaggtatgtcaaaagccgagataggccgaaggctaggcctcctgcggcaaacagttagccaagttgtaaatgcaaaggaaaagttcttgaaggaagttaaaagtgctactccaatgaacacacgaatgataagaaagcgaaacagccttattgctgatatggagaaggttttagtggtctggatagaagatcagaccagccgcaacattcccttaagccaaagcctaatccagaacaaagccctaactctcttcaactctatgaaagctgagagaggtgtggaagctgcagaagaaaagtttgaagctagcagaggttggttcatgaggtttaaggaaagaagccatttccataacataaaagcacaaggtgaagcagcaagtgctgatgtagaagctgcagcaagttatccagaagctttagctaagatcattgacgaaggtggctacactaaacaacagattttcaatgtagatgaaacagccttctattggaagaagatgccatctagaactttcatagctagagaggagaagtcagtgcctggcttcaaagcttcaaaggacaggctgactctcttgttaggggctaatgcagctggtgactttaagttgaagccaatgcttatttaccattctgaaaatcctagggcccttaagaattatactaaatctactctacccgtgctatataaatggaacagcaaagcccggatgacagcacatctgtttacagcgtggtttactgaatattttaaacccactgttgagacctactgctcagaaaagaagattcctttcaaaatattactgctcattgacaatgcccctagtcatccaagagctctgatggagatatacgaggagattaatgttattttcatgcctgctaacacaacatccattctgcagcccatggatcaaggggtaatttcgaccttcaagtcttattatttgagaaatacatttcataaggctctagctgccatggatagtgatgtctctgatggatctgggcaaagcaaattgaaaaccttctggaaaggattcaccattttagatgccattaaaaacattcgtgattcatgggaggaggtcaaattgtcaacattaacaggagtttggaagaagttgattcccaccctcattgatgactatgaggggttcaagacttcagtggaggaagtaagtgcagatgtggtggaaatagca

SEQ ID NO: 2934 - DNA, 4001 bp, Homo sapiens
ttggtggatttacagatgaaaagctaatgagatttgctttaaaatatctagtaggtgggggccaggggcgatggatcacgcctgtaatcccagcactttgggaggccgaggcgggcggatcacctgaggtcgggagttcgagaccagcctgaccaacatggagtaaccccgtctctactaaaaatacacaactagccggatgtggtggtgcatgcctgtaatcctagctactcggaggctgaggcaggagaatcgcttgaaccagggaggtggaggttgcagtgagccgagatcgcgccattgccctaagtttcttgttgtctgggcaacaagagggaaactccgtctcaaaaaaaaaaaaaaaatgtatatatatatttgtgtatatatttgtatatatatatatttatatatatgtgtgtatatatatttgtatatatatatatatacacacacttctagtaggtgggatgaaaccaagcaggtcatgtgctaacaatggttgaaggcaggtaattaatacataaaggctcattatactcagttctctattttctagagacagctgaacattagcaaggaaaaaagtaccctatacatcaaaaattcctgtcaaaagtacagaaatttgtgttcccctacatcacccataatccttattttctcattcatctggtttaacaataattcaattctccaaaccaattaacttcctccaatagacctaaaactgaaatacaagactatctttgttgtcttttaattctactcataagctagtcaaacgctaggtgagaaaacgatccaggcttccaatttataattagtaaacttattttaacttcaagacaacatatctgttttgagtcagactgatgaactagcactagtttttttaatttaccttactctccgcctcgtatttaagtttggtgggtagtgtacgaacgtgtaatgtaacagatgttgttcactcccaggaagtcaactctttccatcatgagtaacagaactcaatcgaatgtgacacacagaaatgtctcaaaaatctctaggtaagtaactcgcatatacccttatcctccctccccaaagcattgcaggtggttagaaaggagcgacctcggttggttggtttcttcttcttcccttcctttcttaggggaaggctagagagcaaagaaacgacaaaaaaaaacaggccggaagaaggaaagcgaaaagcatgagggctggacaatcagcccttaaataaacgaaaactgtatccaaatcagattaagttgagagacagcgaactgctaaacacctccccataactctaacgtacctgaaaccgcgagtagagaaacccggccgtacatcacattcaagctcccttccctcccaaagtactcacaggtataagaggcataaaaagaacttccccaccctcgccaagagtagcgcggaaaaaaactcacactggcctgggccacgctggcgaagccgcctgaccctccccgcgcgaccaggaaccctcaaatgactaccccgctcctcaggccggggaaggggtgccgggggagcgaggctcgactgggaggacccgcccgccgtcgaggccctacgtgcccacccggcccgggggcttgggcccgctccgcacactctgggcccaggcctggtaccccgcgaagctcatcgcgagcccagaccccggtccgacgccgcgcccggcgagacccgcacactccactgagccacggcggccgccgccgtacggacccaacccctatctacctgtcttcgctcttgtttttctgtttcttccccattgcttgtcaatggcgctcgtggccccagcccctctattcggtctctcacagacccactgtctcccggctgactttggtctccgctcagctcttttcccctcgtgctgccgccgctcgcacccggctctccacagacccgcgcactggaacaggacacatatggtgtgagttctcagtgcgcaagcgcatcgcccagccgcctcggcgtgaggacgcagggcgcggctcatcgagagctgcgcttcgggtagagcgtctccggttgaccggccgaccaggcagcagcccgagcgccccctgccctcaagcgtccgccacgagccgacacccgcgggttttccacgttctagaacccggaggtggacaatgaagctgtcaatttcgccacctcacccctctcccaacggggaacgcacgcttcggttcaggagtgggctttgggcttccctttatatctttgtattctcagccgcacgaagttcagtaaagaaccacaacgaaccaatagagtcctctgggggtttgcgagagagataaattcaggacaaaatagggacctctcagtaacatccatgcattatgcattatgtacagtcactgaataaaacagaacaggacacagccgatcaattccctaacataggtcttcagcttcaccctcaaagcgagggcgagttctaaaaattcctgtgtttcgaagagtcaagaggggacctacaggggtggtggaaaatgttctatatctggatctggccggtgatattttgggttttaactatgcaaaagttaattgtgctgtatatgtttatgcctcgactttaggaaaaatgttaacaaaagaaaacaaaaaaaagaaaaatgttcattcaacactaacagaatggaaacgcagttcaagcgtcacggctgagcgagagcacagctgtctcatttccagtctggcgcactggaccgtgaatactgaagcacgctcctgagaaagtccggccacgacagcctgcgcactaagaaactgcaactcccacaatgctttgcggccttccagttcggccgtgtacccggaggaaagcaagggtcggacaccttgggttccgggctgctgggcgggaggcgcacgcgcagaactgttcgccacccgaccgcccgccccttcctctggcgtccaaggtgatatcgcgcgaggttcgcagccaataaggaggcggatgtgacggcccgtttgcagccgccggcagctactgcaaggcaaaagccggagtggacgtgtcttttgaaactgctgctctttcacttctcaggcgtcaccgagagctcaggtgaggcagagggtagtgagaagaatccgaccaccacgtccgggtgctggtgaacattctgctgctccacatccggagcggaggaggggcgcggccccagcaccggtgtcggtgtcctggcagaggctcttgcgcaagcgcaccaggaggcgtcgaagttggggccaccgggactgtgctttcctctgtttccccgggcgcagggagtggccggcttgccattggggaggtacctggggttcagttaaggaccaggccccttgattgttttggcggatacctgtaagggtgtccaggaaatgactagggaatttgaggacgcgctgtgtcccgtcccacccttccagcggagctgtaaaaaggaagaatcagaggctgtggtttgaaaaatgaaaagctaacgaggggttgcatcgtctctttaccccattctcaatgctctgaccaccaacacctacacccagaatagctcttcttaatctcgtctttttccagttatcccataattaaattctgggctcattctataaagttccagggtaggcattctctgtgcttatccctggagcacagcttccaacgttcaattcagtatcttattatcttctccttccagccccctcactgagggtcacagtcctactgacatttttcttgggcgatagggagcgtggaaatctttgctgtgtttgaaatacagcacctttccaattttatagcactcacgaggagcttacaatttggttttttagactcaaatacttttgaaacttaacagtgtagtaatttgaacagaagtcaggcacgtgttcattcaacgttaaatacatgtttattgagtacctgctgtgttctatggagatacaaa

SEQ ID NO: 2935 - DNA, 4001 bp, Homo sapiens
ttagtagagatggggtttcactatgttggttaggctggtcttgaactcctgacctcgtgatccgcctgcctcggccttccaaagtgctgggattacaggcatgagccaacacgctcggcctgttgacaaaatttaagcagctgtgaatttattctgaatgaacaacttgcctcagccaaatgcttacctcttactacccaagccacaggatggccaaaaggggaccacacaggggactgtgagctggattctgtgtccaaaaggcagcagcaccactagaagggatggggtctgtttctgacaatggagttactgggacctgggccagcttatcaaaggcgtgaggctaaaggtgtcaccttggtgggtggtcttagctgaagtgctcaggctttgtttaggcctcacacacaggctgggtcaggggcttataatactagacctggttccaacaatggtagaaattcaaaatgcaacacgatgttctaacctttctcagttatcagcaatactgtgcatgtggcagctggctagccagtttgggcaattctaagtctttcatctgacattgcttccctcaggaaaagggctggacaaggctcatacctcatcacaggggaattggacatccggaatgtctgtcacatcaaaaattgcatcctaagtgggcagatggcccacacacaactgacaatcatagttcacaactttgggtgactaaggaaggagggtagcctctctatgaggtcagccctccaggatgccataaaaactggctgctggtgtcaggatgctttgattattaacactgagaggaagaatacctcctggctcttgggcttgacatgtggctcactgtaatccgggggacagggcaatgcccccttagtcctggcaccccaggaactaaactgctctcactgtggcctctggggcctcaacatctgcctcccctttccttttcctccatcatggcctccatgacagcctatgacaaaacacacattggccagccttggcaaggtgacaggcgggtatggtaatagcaatctcaggagggctcttctgttgctgtgtagaaaatgaaccaagtagcatagaatcgtgaccagctttccacacctggctggagcactcctggggccttcagtagggacagttactatctgtagcagagaagaaaagagcaacaattccattaaacaaggaagtactcaaaggcaaattcctgatagttggacctaaggaaacggccttcctgtaaaaatggatccttctccaatcaagtattcattatgcaccctctttaggcaaggagggggtatgattcttcaactgcttgctggaggttagattctctgcataggaatttaaattagatgggcccttagctgatcctttcaccatgcttgtccatgggcggctccccgtcccccaggttccccacggatggggtgtcattagggacccgccatagaggactccgtcccaggcgggcccccaggacaaaactatgggccactttgaggggcacagagacagacgctcaccggttgtgatgcgcaggtaacagagagctcaattcatcatgacaaccagtcagacaggggctgtgagcagcctttggacagaactttcgcatagcctggaggcgtaagacgaggaaagcaatttaacacctcaaggcagcgagtccagggcagagccaggaccagaactcaggactcctgtctcccagtcgggattctctttcagtcttacaactctcggccttgtctcgccccatagtgataatttccaccggatcacattctccctccctcctcaggccggctgctagctccgcacaggcaccaaccactccccttggcaagtgttaacgcgttctcaccgttaaaagagctttccaaacttgggggtcccgccgcctcggctaggcctcatctgctcatgcgcacagccgcttccgtgccggctcccctggccccgagaactacatttcccagtaggcaatggaaacccaaaagaagtacggagagccgggagggtcaatcatcacctgagagttggctcttcgctggctggctggttaatcagtgctcaaagctgcctccgcctcctgactggagagcgaactagcccgggcggagccacagtcctagaggctgagcgcagtcggagctgtcccatttacccgacccgacgccggcgtgatgtggcttccgctggtgctgctcctggctgtgctgctgctggccgtcctctgcaaagtttacttgggactattctctggcagctccccgaatcctttctccgaagatgtcaaacggcccccagcgcccctggtaactgacaaggaggccaggaagaaggttctcaaacaaggtagcaggagggaccctggggtccggggctgcactcgaggctttctcacagatttgggttctcattttgccaaggcagccgctaccagacgtgggccttagtttccccatatgtaaagtactaggagggcttccttgcacgtggaggagccccgctttagtgtgcaacactgtcgatagcctttgccctagtaggccccgggaatagtagtcccaagggtgtggtcattgtccttggtttgcaaggtgttggcacccgccctgccacttgtaatccccgtggctcgtggaactgataatccccgtgactcattcctccacttggttccaggaccttaactttttcacctaccctcccatgcgagctcaggggtgtgggggagcagcacagaaatgcgtaggaaattgcgttttgcccgtccggtgatttaacaggctttgcatggtcccaaatcgtaaggattgaaccctagttctgaaacattggcagaggttcaacaaggcgcctcaggctcagagcctgctctccactctcatctttaaaacatattttgtggttgcttctagagtttaaagagttctgctgctttaaaaaataatggatcacctgtttgatctacggagtccctctcacttgtaaattttagaattctccgtgtcatatcttgctacacaatcggagacagtactgttctaagtggaaggactaatcatctggacttctgagaactgagttttagcttggactctgtcactaatttgctgcataaccattagcacctacctgggctggtctaaaaatgagatgactagcttaactgcttttcaaaccggattgtgatctattagtgggctatgaaatcaatttagtgagttgcaactggcattatttatttatttattgaaacagagtctcgctctattgtccatgctagagtgcagtggcgcgatctccgctcaccgcaacttccgcctcctgggttcaagtgattatcctgcctcagcctcccgagtagtgggcatgcccagctaatttttgtatttttagtagagacagggtttcaccatgttgtcaaggctctcgaactcctggcctcaagcgatccgcccacctcggcctcccaaagtgttgggattacaggcgtgagccatcacgcctggccacaactagtattttagaatgcagtagaatagaaaatatcagagtgcattatacatagttccactaagtattgcattgtgacacttgtttcatgtatttatcttatatacttacatgtgaaatttttttttactattgatctctctaaaaacattaaaaaaataagcagtttgccaagttctcttgtatcttgaaacatcccagatctcagttctttgccagtgattgttaaagaacagatcttgtgtcggaagtacccatatagcaccacttgctatccagttttgtcttctgagaaggtgctgcctccctcagcactgcccccagaccttccctatgggaggggctggtgctgtgatttctcagagctgcagcctctgagcagttctgtcctgcccaagccttttcatcaggacctggaagagccaccataagacccagctattccactattg

SEQ ID NO: 2936 - DNA, 4001 bp, Homo sapiens
tttggccaagggttaaatccctgctcttccttcccttgccctgtgctggaaccttgaactcctctgcttgagcctgagccatcccagagaaggcatctggggctggcgcgtgaggcaggtttgccctcagtctcccaccagccaaactgttgtctcagtatctcctcaaaatggctgtgaccctagcccctgtcctgcccttgctccctgcttcatacagactccctgagtcagccacccaccatctgccctcgcccagttcccaccaagggcccgttgcccggccctgggactcacatgatgctttggggacactggggctggccccaggcacaaggctggtacttgacatatgtctccactccatcctcaaggacacagctcactgtccgggtcaccacgtaggcacaccagttcctgtaggtacaaccccctctgggtccaaggaccaaagatacatgccctggaggagggcccaggggctaccagaggggctgaagaaggctccaaagatgcagaacccttggggatcagtgagagcaagggctttggcatcgccaccctccctatcccccacgctttcctgtgtagcaggagcagataaagacttttcaagatggggagacgcgcagaatggaaaaccacagagcagtcaatcctcatggtggtggggtcccggggagcctctgaatgtacacaatcatgtgtgtccctttctgggcctgtctcagtccccagattggcatgctgtgtgcgcatagccagcccgggccctgtgggtgatctgaacactggcttccaccccacccctccaggagaagacgggcaggccagcttggggttaagtagagaataagccattgatgagcctgcccctcttggggattgcagttctatactcctggccccattcactccggcctctgatctgtgtctggctggagggctggagggaacagagctggagtggtgtcagaattatggattactggatggggtcaagggagccctagaaggggacaaaagttctccctgaggctctggggctaggatacagagggcagctggcaggaaggcctggcccgctcccctcagggcagcttccctggggcatgtgggagcggaccccctaggtgacccaaggaacatatgtgttcagggggtcctggaaaaggccccgtgggaaggtgggcatgtgaggagccacctgatggatgggcttctcactccccctctgccctgcattagcggacacagcagagagccaggcagaggtggcattctgaccccttcctcaccacccaagcctcgggctgggatccagactcttacctgtggcggctggctggccggggggcaatctgggcctggggccccccggggctgagggccccactggaacctgtgtagaggctgaaacctcgaggagggtagctggcggcccctgcagctgccgtcagcaggcagcagaggtagcagctccagagggtgcggggggccatggcggggcgctccacagtggccctcagagactcatcccgcccagccactggcgcctctgccggccccggggatgctgctgctccacaggacagcccgagcccggcccgtccgtcccagtttccttctgatagcccccggccacacgtcttctccttggctgcctggcctgacccctctcccctcctctttcctcctcagctcctgtccgtcccctctcggttccttccgctctcctcttcacttctgagggggtttgttctctgtgccccctctggcctcccgcgcctggtccctgcccctctcaggagctgcgtctcagaagttgcctcctgggcgtccgccccctcgtcccagctggccctcttctggtctccctgtcctctttccctgatgaccggatcctgggggtgacagggctttgcccctgtggctgttcggaggcgcgagagtggctgtggggcgggccctggcctcctcctccctgctggctcccctcccttcccccctgtctggctggcggtccggcctcccccttcctccccccacctctccaaccatcgtgcgccacatctgcttcttgttaactccgggaaagagggaaaaaaaaggaaaaacagaaatgtggagttgccgccgggcttgaggccagcctctcagatgggccacatggagccagggccgaagctgggaaggaggcccagggctggtcactccgactgggaacaggagccagggccgcagctcccctggggctggagcaggcctcccctgggggagagggccccagagagggagcccagaggggagggtgggagggaaggactgactggacaagggagaatgaactcggagggctcagcaggacttcactcaccgtctagtctagcagtctccttttagagatgtgaaaattgaggtcagagtgggagagtgacttgtccaaggtaacacagcaagtcaatggtgaggctgagaacacacactaaatactaggtcagtgacttgggagaaaggaggagaggagaatgtgctgctgggccagggaggaaaaggtcaaggactccactgaggcagatgggaaatccacagatgacagaagaggaagaaagggccttgtgtggtggctcacgcctgtaatcccagctctttgggaggctgaggtgggcagatcacaaggtcaggagttcgagaccagcctgaccaacatggtgaaaccccatctctactaaaaatacaaaaattagccaggcatgttggcacacgcctgtaatcccagctactcaggaggctgaggcaggataatcgcttgaacccgggaggaggaggttgcagtgagccaagatcacaccactgcactccagcctgggcggcagagcgagactctgtctcaaaaaaaaaaaagaagaagaggaggaggaagaaaagcacctggcaatggggagcaggcttctgtcaagcggtagagggcacgtgggcaggaagagaaagaacctttcttaaagggataaatgaaaatgggtcctgggcttgttttggtgatggtcaggccataactggatgagggtgggggtgaggtaaatcgggacctatctttagagcaccaaaggaagtcagtccctggcctggaggcaagtctgatagctctcagtgacaggcaaagagccgtcagcctgacctgaaagttccacctgcgccaccttgatctaaaagcttggtccccgtcaccatctgacccgcagctcttgaccagggtctccagctggtgggatgcttgggagaaagaaacagaagcactagacagaaaggagacaggagaatgctgtgtgccaggcactgcggaggtgcccaggtagcaaaggcataggtaagacccagacgctgtccactaaggagcaactgaggttgttggagaatgggacacaagcccccaaacagagaaccgtcacaagccaggacagaaaaagtgccaaggggcaggacagagggatgatgtgtgttccagctaggaggagggaaaagacagctggctgctggagacagtcagaggagaggctggaaaagacaaaagctgaacagcattggggtgggggcgggggtggggggcaggagtcaagaacagagacaaggcaaggagagagatttcaggctcaggaagagcggtctgcctcagtctcctcagctgtaacacaggaataacaggactctccatcccactttgtgaggattaagtaagtcagtgcatgtaaagcattctagaacagtgtctggcaaatggtaaatgctcaatcaatgttagctcttttttttgtgtcaggaaaaaatgggaccgaaattcagagaggtagattgtggacaaattagggagaggctcaaatgactggttatgaggttgtattgcaagtttttgagtagaagcatatacacatacacgaaagaaggtattgtgggtgagagcgctgaatacggtgtcagaacacaggcaatgtagccccagctcc

SEQ ID NO: 2937 - DNA, 4001 bp, Homo sapiens
ttaaagtgatctcaccactcctacaggatgaggacccaatacagtataaagatagcacagctctccacaacatcccctaagaagacactcaatttttactttagtataagatcagcccttcagcggacatataggacaagtttttcggtccaacacttactgtgaataaaccaacgcatggagctaaaaaagaaccagggaaaaatggatgtctctctaaaaagagcccaacctaagtaaggaattacaagacatcaaaggttagataatggacaacaggtgcctttgaggaggaaagagtaacacaacactcagttgcctcctattttaggatttccactctgaaagcaatataacgacaattttttctgcccaagaaaaagggaaggccaaaattataggttttactatttaatatctataataggcccattgctctttgacttacttttttactttagattttaaaaatccatctcatctcgatattatctggatatagtacggcctatggccagactgctcactgatcagtgaacattaaccaagtagagacttattatcaagaaatgtaaaagaaaggcgtctgaatacaagctacctgcacataaaaaactcaaaatacagttccagcagtaggtatcacacaactgcgttatcagccaaagctgaaactgtttctctcaccattctaacagttgaacttaatcttttactagatttcaatggcctcgaagaatagtaattccagattcagcttctagggcagcgaatactagcctggagttttgattttcctagccagaagattaccttcatctggtgaaaggaacactgaaaaggcacttcagcctatttaataacctcttccctttctccattccacaaagacaacatcttccaaaaatggagaatcctttccttccctgatagaggccccctttcctattgattcattgggcagaatcacttctccccagcatgtatgcagaaccagaaaacacttctgctttcactcttaaagagggtcccccaacacagatgcacctcttcctttcctgcattaagcaaatgatgctccgatgcttctaggtctctccaccactgcaaaatgctcagagaagtggagggattgaaaaggaagttgcctactactctgaaggatactggaaagtcgccttcaaatctaaagtgaagacttgggggcgggggatgcccccttcctgaagagggaatgagggtccctcccctaaaaaggagcctctgttcgggtgaaggcgatccccaccctgaaagagaggcgtgtatgtggaaaggtggtggaaggttgtaccctgaagaggagcctggatttgaagaaatgtcccaactctgaaggggggtaagtggagggagccgtgagtgtacggggaggggtgtgccagctatcggggggcctgagaaggaaggggttcccactttgggggaacgagggccccgcactgaaaggggctccgggaggaaaggagggtctgacacagaggagagttggacatgggggaggggccctcagtccaccggagtccgcggaggggcggcagcctcgaagggaacatgtgcagtggagccgctgccaccccgaggggcaggcgggagggcagggcctgggctgtgtgcggaaggaaaaaagttcctacccttcgcagaagacgcaggactccccagccgtactcaccgagactgccggcgaaaccgtccatcttgcggggaaagcgccgggctccgggcttagaggggcgggcacttcattcagcggaccgacagagtggccgacgctgagcctgacccgctcgttctctaggtcgcccggctcggctaccggctcccgcctccgtcgtccgtccgttcgccctggggtagtaagccgcggccgcccgaaccacttccccgtcacgttgagagccgcgccgctcagccgcctgcccggcctccctcccaggcagcagccgcgagcgccgcgccgcgccgcgccccgccccgcccccgcgcccgcgcgcagcagtagccccgccccgcgcacgccgtcacacttccgactccgcctcccacgtgacgccacggaggcggggtcttgccagccccgccctctcaccttgcctcggcctcggcgtttgtccgcctcgcgccaggctggtggttgcgcctgcgcggtaggcctgctgaaggctggggaccacggtttggaagctggttccaaacaggtggggataaggcatagactctggcctgcgatactctgatgcatgaaggatcctctccctatgtggcccctgggaagcccgcagagccaagactggacccccgtgacgggagatgaccaccacgtgggtcctacaaggacactaaagaagcaaccaagagggagaggttctccctctcccccaatagggtgggggacaaataggggcgaagcttcttgactagctcgataccaccactgccacagccgcagggcccgggacagatcagaagcaaggaattttagtgctggacatgacccaaaagttcatcttgtctaacccttcttatgaagaaaaacacagagccttagagaggacaacctgcccaaggtcatcgaacctagtagaagcaaaaactcagccttccttactctccctagcgttctgtcgtctaggggtgcaaaacgaccatatatggcaggctataggatggcctgctagggaaccataataagggttatttcaaatgaagtaacactgagttctaggcccaactccgtatgactcaagagtgtcaaatcacctaatttatttaggcgtcactttattcatttgcaaattggttgtctggacatgtaaccaaaacatgtaaatatacatagcgttcatattcttcctcccttccccaacacgatttcccatacttctaaagactttctcatggtttgtcaagtccctcctggggctcagttgtgcagattagagtaagagagagaagagctgtaaggtactgaagaactgaattgatctatacataataaattgataaatacataataaaaagctgagttaggggaaaacagagtcctactacacagagttgcaggagagagggacaaacaagaagggagacaagaaatatgtaatgatgagagagacttagaggaattaaatgattgaaaggattgttaaaccttcttggggtatacgtctccctttgttgcctctttaaaaatcttccctaaaaatgtaaattactttgcatttcttatttggatataagacctgtttctgaataccatactatatggagactggccataacgcagccaagataaattcaggttacagactaaacggtgtctaaaatttccttctcttcaaacttaaatgatttacccaatgttccttctgctatgggcattttcatatgcataagtttctattaagcctaagtaaatgtttgagaagttctcaattctgacagctgttcctttgtgtcttcaggccacactctctgccttaggtcgattaaaagaataagaacttggcatattggtatacatatgttttatggtccagacctggaagtgtgtacctcccttttgtccacattccactggccagaacttggtcacatgactgcaagggaggctaggaatgtagtctgtgtatccagaaggaaaagagacatattttggtaacagctctctggtttctgccacactccccttcgtggcattcatcagagttaaaatttttcatttgcttgaatgatttattcaataagcatctcattcattatactgtatactacaaggaaagctgttaaaatgtaggagagttagtacatcccagcagttaagagtgcagactctggaatcatgctgcccagattcacatcccaactcatcatgtactagctatgaaacactggacaaattacctaacctctctgtgcctccattttattgactgcaaaatggagatgataacacttct

SEQ ID NO: 2938 - DNA, 4001 bp, Homo sapiens
cagcttcaacagtgcatttggtttttttccttgtatcagagaaaaaattaggattaggagttcaaatccacaaagtagttcagtgaactgtcacattaatattatttaaccacagagaattttctgtttaattgccactctctcccttcacccaaaggactacatcttattttgatgctgtaatggaaagcactgcattaagacagagagagcaaaaacataatgggtttaaatttttaaacatctaaccttttcatgagtcattgttaatcatttgcacctgtaactttcataatcagcctagcaattagagaagcaaaatctgcagaacaaaactatgtaaggatgccccaagcacaacaactaccatgttagggagggaagaaaaaaagctatttgtgtcatacgtgacatgaaaaaagttttacatgctagttccactaaatcttgagaacattagcactcccatcttcaaaaaaagtcaagattttttaaaatctgtagtttgaatattaagtgcttgccttctgtaacaatttttcaactttaggtctcagaaaaaaaaaaggctctggaatataagcacatcattaggaagggaaaaaaaagctgatctttgaaatcattctctgcactgagaaattaggagcatggacatgacatcacttcatttatttcattgtgaaagacaaacttagagcaaaagtggcaatattctgagaatgtaatggtagttgttctacatcaatgaaacacacaagtttggaaggtataaatatggtctctgtcagttgtagtccatcctcagcaagtcattttccctgtgggctgaggctcccatatgacgaaaatcttccttaactgctgaaggctgaaaaggattccctgtgaacagcatctggcccataccttgtttgctcacataaaagctgacaagggctggaggaaaatgtgtctggtccaaagatgagaggatagggccaagaatcacaatataacccctttccatttaatcgggagggcccctaaaacggccattcatccaaatgagctctcctgtcagtcagtcttgggccatccgctagcagatgttggtcattgtgtgggctggctggtaggattttgtgatccagcagctgccagcctttaataacctcaatgatgctgtggaagcatccatttagtgtataaatatgctttgggcattaaaacactgccaagtgaaatattagagaacaaactccccacccactgcagaaatttcccaggtccaaagcatctgagatgaagattccaaattaccagtagtaaaatttcttttagatcttttttaatcctcttgcttactgagaaacccactgaggagcctcccaaagatgatgcccacacttcaggttattggtcctaccgtgcacctggttagggaaggaagaagtgtttcatagttacccaggctccttccacttgtagcaggaaagaacagcaagaaagcatcagaacactcaactccttggagatttaaaagccagaattccggagggatacagcgaaaagacatctctccctcctcacctacactccccacactgtttctgccctggccctagaatcagcagcccttcagtaattccatgcggctccagagagaatcctctattccacggggctcccggatccgaccccaggtcaaccgcttcccaccttcccagcctccacacgcaacccctccccgccgcccctggccacccccttacctgataatgtcgtcgttgtgtcccaggaagaatttttggctgtgctcgcgggtgttgtaaaccaccccgaccccagccacaaagtagaccacctccttgcctgccgtgtagtacaggttgttgcggcactggtgaccccggtacccgtacacccactccagccggagctggcagcggggcgccgtccgatccgccatgataagccgaccccgcgcgccccccgcccccccgcgcgccggggccgtcctcgccgaggctggggctgcggcggacctgcaggggctcagcgcgcggcgcagggcgctgatttccgcggcgacacacaggcacagcccagcgggccggccgccaccatcatccgctgcagccgccgcagacaagccgccgccgccggtgtgcggccgccagaccccgccgggcgccgggctccctctacccgggcaaggcggctctgggggcgccggcaccggcgcgcgcgcctcactgcacctgcgggctccggcccccgggagaggctctcgggggggccaccccgccttttacatcaggaatctgcatatcccaacagcgatcacccagttcgctcactgaagtttgcggtgcgccggggcttcgcggcaggcggcgggatttattctgcgatagccttgatttgacaggcaacccgggtgagctctgccatcgccgtctttggatccgaaattgacagtctatatccaggaagcgagagcgaggaagaaagaaacagatttttcgcataagtcacccaatccaagaaaattatccccaaactaaaccaagttgggtatttttaaaaattgtcccctactcccgctttctctctccagttccatctccttaatgatatgaaatatgcgtaaatgctgctgcctggcagttgctgatgcgatttgaaggaacgcttgctgtttccctaataagcgagggcgaatatgcaatggtcattttttagatgctccaattagttttcatgtgtgtgtttaataatcatatcctccgtgaaccttctcttcaccgagaaagccataaagaacttagcagctctcattgatcagcaactccaatccgcatcatgaaagattgtcttactcggaagaaacgaggcactagtgcagtcggagggagtgcgctacctacaaacgctcctggtcgaggagaaatcaaataacaagtggcaaaaatcgtgtacttctccccagaaacctctgcgctaaacaccgggtcccacggaatcccgggtcctgccctgagcccagcgtggagaggggtcgcccgagggacccgggggacagcaaccccccacagacgcacacgtcccgggggtcggcgcgctgcgcgagggatgcccgccctcaggactgttcggcccgcgcgcactgccgccctggcggcgccctgcactcctcccactctcgaaccagcctcgcccgcggagcatccgcgcgctctctgcctctaacctctgctgccagcggacgccaccggcgcgtcccggatcccgcgcgggcgagcgagcgaaatcctctgcctgccctcccctccccgcctcccgcacccggggatggacttcgtcactggggcgccgcgggagacaggttcttcctccagccggggctccgggggcggggccacaacgccgcgctagtgaacctcagctgccggttactaggcgagatctcgccgcttggaaacagcgacgccccggaggactggggccgccccctccctctgcctgtccctgtggcctcttcccccgacgcatcctgggaagtgtagtcctctctgcgccggttagggcggacagcgcgcggaagggaccacaagtcccaggattccgcgcgcccagagggagtcgcagcgagacctgtaccggcgtcagcggagcctgcggctctcggggtgaggagatcccggctcaccaaggacgattgcctgcccacgcgggcgttcccttgtgactgaggcgggagctggcgtgcgtgggtctctgtagagaaaagcggtggagttggaatggagacggtctcccagcccaccactggaatttctccttcatcggtctctgagtgttgctgtaaccgacatcctcaccatgctgtaactgactcaagcttaagtttgtttcctacttaagttttccttttcattcacatggattttaatttgttaaagtgcagttctgccaagtttaagaaaaatgctgggaatgtgagctcacttctgccc

SEQ ID NO: 2939 - DNA, 4001 bp, Homo sapiens
tccctttcatttgtttctctaaaagccgggttacctagctctgagccatagacccttctcacaaggctgtggtctggtctacactaacaaaataaaactggaaactaaagtgatgcctgtacaaatcaaggccactctttaaaataaaatttaaaaaaaaagaaaagaaaaaaacaaactccaacaaatttcaaggaagaaaacgaactccaacaaatgcaactctcttttctccgggaaagacaaataattgaaacgtgtgtgtgtgtgtgtgtgtgtgtgtgtgtgtgtgtgtagggccagtggaggatctttattagcaagccgattgctggatgcaaactccggggttcggactggctacgaccttaaaagccctctgcccccgccccctgcccgggaaaactgtcctcggtattccagcagccgggtgggctccctcccgaaggcggcgagcaacggcggaagccagtttgcttactgcaaaccttccccaccttgggtaggagaggcacgtgtgacttggagaagtcgggccaaggttgccgagaaacatcccaagacagccaggccctccacactgaacattaactctccgattcgccctccctgctgcccttgcttcccccagagctggggcacgcgaatggactttcccccgcccggacgcgccagcgaaggctgaggtctcggaggtggtggtggacttgcgagagaagcgtggtgcgaggttaagccgggcggagggagagcgggaggagttgtactctggtctgagactggctcagctgggagagagaattgggcaggctgtggcgagggccagcacaggctccgaggacgcgcctgggcttgcgtccgaactggtatattttctagaaaagcctggaggtctccacctgctttcctgggagggagacctacgcggcgaaggcgcgggtggatgccgcacagctcttccctgcctgggaatctacctccgcggacctgcagccttcccggcagtaacttctaaacagccccgcgcgcccccgagcctcccccgcatcgccgcagcacgggcgccggccggccgcctcggcgggcacagcgtggacactcaccctggaagcggtggccgaagaagcggttccgcaggacccaggggtagaaatggagagggtcccggtgctgggcgccgaagaaggagtgcgggggctgcagcggggaggcgcccagctggtgcgccggatgcacggtcagcgcggggtggttcatggcctcggggaacacgagctcgggcccaccgtagagcgagcggcccgcgcccgcggcggccgcggcagggaagccactcacgaaggccgcctcggccgcgctggggtgagggtagttgagcgccgtgggccggagcggttcctcggaggcggccgccgccaggagatgggagcccgcgcccccgccgccagtgcccccgccggtgccgccgtccttggccaccaaggactctatggtaaagccgcgcttggccgcgggctggaacatggtcgcagccgcgggagctgtgcgaggcagccgggctctggggagcgctccgcgtcctggcgccgccgccttgcggggtgtgcacccagccaggcacatgcacacccgcccgcacccctcacctcccccgcccgcccgctcgcgctcggcccccgcgggcgagccaggcgcggagcggcgaggggtgtgtgagcgagcgaccgcggggtccggccacagcgtacggccaggcgcggcggctgctgcggcggagcgggcagctccaggcgcccgcacaggcgcgggctccgtgctaggctgcgagctgccagtaaggcccgagggttgagctcgtctccctcctttcggagtcccgctgggaccgaccccagcccccggtgtccccgcactgccctgcccagccccggccgcccagcgctgcgaggcgcgagttagcgggcacctgccccgcgctcgcccattggccgccgctcacctgccccaaggtggggggcggggcggggcggggcgagggacggcgggtggggagggagcccgcagtcggaggcaaaagccggactggagccttcgcggggagatccaggcctcctcctcccctcgccactggcttctcctcgcgactccgccctttagctgagtctggtggccgtgccgccgtctcaacccacgcgggagccgaagaaggcgtccgaagggcttggggctaaactccaaccctcccctccccggtgtgtagctcagcctaactctcccattcgtcccgggatgtcgtttcagttctcagagaacttggatccgagcggagggtggatgtttggggtccaacacattggttttcccgaaaaccagctctctgcccccctgctctccgggactctcccactcacccaccatcggcctcctgggccgcggtctgaagctgcgaccttgttcctgaggtttcgcgttttctggatgtcacgggggacagctctggaaaggggacgctcactcccttcacaaggggccaggcggggcactgcgcgggagaagccgccggagcggtcccactgccaccctccagctgttcgcggggctggaagcagctccagtgcccagacacggtgccgcgaccggcttggaccaggacggcgggcctcggcactgggagatccaccccctcgccttctctgaggctctgggggctcaagtgtcggcgggccggaccaggtcagggcctcggagacactgtggcttaaattgaagctggccaagtagcccgagcccatctcaagagaacacgccagccgtcaggacacgcagaagcagcctgacctccctcgaccttcaccttccacccgcgaccgcggaaccgcggacgactctgctccggccagtttttccgtacggcggacgaattccccgggggcagttctcacgacaggctgtgagagccgggactccccaaactttcccaccccaccttcgaggccgcagaaaggcgccgctccgaggcctaggagggcgcgggcggcggtggggaggctgggacctggaccttgccggcgcactgcggagagggagccgcagagagttccgcttcctcgccgctgccggggtccattctagcggcctgagcgctgcctgggcgcgcagatctgggttgggcctcctgacgccccaaggccacggggtccgtgcgccgcgcaactctgcggggactccaggccgggtcttggcagcggcccgcctgagcgccgggagccgtggtttggagagcgctcagggcgccccggccgccacaaagcgggttaaagtctattttccactcgactgctccgaaaagcccccgcgcgccgacgccgttccggcccccttgggcgaggtggggaggggcggccaggggtggggaggcgaggcggccgcacccagcactcctccgcgtcctgggaaccccggggcctggcacggctgagacaccgcagaggcgccttcggaaggaatgatggaatccgtggggagcgcgggttctcgctggcctctccggagatttccagctttctgtgatggtcttttcctctcgtttgtgtctcaggctctttattttccccctctcctgtctcccggctcccctacctcccgacttttcctcctctgatttcttccccctcctccttttccccaccctcagtctgggaaaagtggaagcgccgccgagggggggaccaggacccgaccaggccgtatctctaagggggcgggggtgcggagctgggcagaggtacagaaggagattttcgttccatatggaaggagacaacgacgggattttgttggaacaaggttcccacagggatgcgggttcagttgggtaaacgttgcctgggcctgtgctctgcggtgacagagcaagtgctgggggctgagacaagacaggagcccagcaagctgaacccggcccgagggccttgcgctcctagcctggtaatgaatcccac

SEQ ID NO: 2940 - DNA, 4001 bp, Homo sapiens
aagcaggcgtgagagactggagtacccgaggccgggtttgctctccctagcgccgcagcttggcgttctggggcggtccgcggggccagaaggcatggcgcagcccggagttgggtactcaccggaggatggacgatccgaataacgtgtgcagtacacccaggcgggccatacgagaggctgctgcgagtcagttttgaccacgggcccgccgttggctgagcccataagtaggatagccgggttgccgtgctccgggtatttggtgccctgcgctccggggctccccgcgccgcctccactgccgccgccaccggtgtccgagggcttggctgctgcggccgccgccgccgccgccactgccgccgcggccgccgccgccgccgcagccgggttcccagctttagacgcgcccgcgccggcggcggctggctgggagccgtcgggtgggccacagttcgcgtccggggcgcacaggagcgaggcagcgcctggcgcccgggtgcccaacgggtggacagggtctctacctgcggcagtctggcctctgtcacgctcgacccggcctcctcctcctgcgcctcctctggccgccgcagccaccagaagctgcggtggcggctgctcctttttgcagccgaagtccggcctcaggatgttgtcgatgaaaaagttggtggtgcggtgcagctgggccgctggctgcggctggtgagcaggcgccgcgagatgctgaggcggcgggggcggggggtgtggggggaggtgcgggtggtgggccaggggcggcaggcaaggcgccgcgggcggcgaggggggcgcaggctgcggggacaccggcacgctgtctccatcgctgccgctgccgctgctgccgctggcgcccggactgaggctcaggctgaggccgcccggagtcgccgccgccgccgcgccgagggccgagtcgcgctgacttttaggttccggctgctgttcttccatgctcggccgccccgccgccccggccgccgcgccggcccccgcccccaccgcctcgctccccaccccactttgccagcggcccgtgggggtgcgcggaggaaggaggcaggcgaagcctcagcgaaggcacggggcgggtgcaggaaaaaagctcaggcgtctggcctggatcgctcgttcttatctagcagatagatctcgctgtctctccctctctaatttgtagacatccagatatggagacacttggctatttcttttttctttctgcaaccagattcaatgatttgatttaaatggggagtaagccacggccaaaaaaatgaaggaaaaaaagaaaaagaaaaggaaaaagaaagcaagaaaaaaagctccaataatttttttcttaaagggaaaaaaatagtatttaaagtctagccatcttcctaggcagtagtgaggggtttgacttccccgagtgtcacgctcagctgtgcccagagcgtgaggctggcagcgcctttaatcgcctttgctttttttgcagggagagcgcgtctccgccagcgccgggctgtttttttttttttttttttttttttttttttcaaatctctgacagctcggatctttgcacaaactctctcgcttaaaaaaaaaatcacccaggcacactttttgccttcaaaccggaagcacgtgagtcagggccgcacgtgtgcggagccaatggcgagccgggactcgcgctgacactcgggcctcggcccaatgggcgcgcgcgggactttgcggataaataatccgggggcgtcaaccgctggcggagagggggcgcctcggcgctggccctgtgcgtcgggtccgccctcccccacccgcgcccgcacccgcgtccctccccctccttcaggccgggactcaggagggggcagaagaaacccgggaggggtgaattttgggatgtaggcaaatggagaagcaactccataaacaacttgttagagaaatgcaggattatgggtctgtgagctacgggagcaggggcagtaggcaggagcctggctgttttgcacccccacgcctaagaaactcagctttttattttctcctctgtctctggttgctgttattgaaggatgggtggttgttgtcactgccggtttgtgtgtttgtgggtgggtgtgggtttgggtgtgtgtagtggagggagggggagtgagacagggaggtcggtgatgtgaaatagacctagagttggttactttcagaggcgcaatttgtttttcacaaatagcaaaatctgaaaggcccgctgcgcctagctagcgtcgcacgtttacgtttgtacgtctcctgccggcccgctgcattgctttccctttgtggggaatccgcacccatgcccttcccggtccagactttcgacaacaccctggagctgccctggcgccatagagccaagcccagagggctaggaatagccccagagccagttgcctggaccttccctggcagtgggagtccgggcaacgcagattaatctcaggagggccccggggccggcgagtcagaacgcggatgcgcgctaggccctagcttttagagttcagggtaacctctgtgttagatttccctgcaaagtaaaatcaaataaatgaaagcgctgcaccccaagtatttgccctggctagctgaagttgtgaacagggagtttccctcaattgccgggtgactgaatttcctgggattgctcccaactccctgggtgcctccggctccagctctgtgcgttcttccctagtttgagggaaatgccgttcctccagctgctatcattctcccgtctgccgatctctttttcgctatttcctggtcgaggcacccccaaaattttctcataaccgggaatgtgagggacgggggtggcgtgtggactgaagctctaggcacctgcgggacttgtctccggattcgttttggaggaccagtatccgactatgctgaagcctgcggtggccgagaaaggcgtcagcaaacgaggccttcgggggtgtcatcttagagctccagcggacctcctcgccctgaacgccctccgcaactgggacagtagagaaaggatccctttggaaatattgtctatttgtgacatgcgaaagaatccccctacctccagttttccagaaaagtcacagagggttaggctaggaggaacatgcaactaaacccacaacaagccgaaccaccaccacagtagctgaagtttctcaaaagggctggtggagagcaggaatttatattgctcaccgcatcttgggagcaggcgagggtcccccgatttccggggctgagttcccggctagacttgcgctgcagcctaggggagaaaacctctctccctaacgctgcgctgcagtcttctctaccttcccaagccgcctccaaccccaccttggagtctcccgagtcctcttcagtagcacacccaagggctccccgaaatctccaggcgcccccaccccttctccccgaaatgggggtgggattttatttatatttaagttcgcaaaattgaaatctttatcccgcaagcaagcgtgggtacttaattaaattctaattaggacactatcaatatcctatttagctgcgtagcttttgtgcgccgcggtccctttcagcgcggtaaatagggtctcgacgccttatctcgcctgcaggagacgcctcgagaagggctgcggaagataatttataggttttaattactcttcattccgcctgatcagcttggcgttcatcacaggcctgtgaataaaaccctggtcaaaagctctgtcacatcgcgctggcaagacgcttaatcaaagtgagcggccccgcgcgccgcgcggcccggctcctccacgtaatttccagccagctgataaagccagctgaataatacggcggccctttggagacaccatttacagaaatgactttattgacggcttaacgtcggtaattcattttacctttcatgtagtgga

SEQ ID NO: 2941 - DNA, 4001 bp, Homo sapiens
cagtctcagggctccctcacttgtcttgggtctgagggcgcgacggtgacgagaaaggggggactacggccaggaaaggggagcagggcccaatcccctcccctagcgatcccgcagtgaagggcccgggcgccgagccaggacaggcgcgattcgctcccgtttatcaaatccttatcggtgccccgaggtgggaaccgctgctttcgaccggaggatacacggtttctggctccagtcccgtagtggaagttggaacaagagcaaatcaacctcggcagtgagccctcccggccagtcacctccctcccttagcgagtcggtcctcctcatcctcgcacctctataccgccgctccgccgctggtttcccgcggctcaggcggttcagccggccgcgcgttggattccagcttcccgcagcatagcctcgccaagccgcggccaagcgcggggctggaagctccaggccactggggccgcacgggtggagacaggaggagaaaggggacaggcggcgagccgcacacatttgcagaagttgaggccctgcctgcttctgcgcggccgcgcagagggctcgaaccctcgctcgggtagcgccgggcccggctggactgggagcggccgggagagggcgagagggcagcaagaaatggccagagttgcctctcacccagtgccgagaggctcgcgagggcaggcgggcagatcgtggctgcccttctctgtcctcttcggagacagacacccggacctgccagggacatccagtgttgccgtccgcttcctacacaccgaaccatctgcccccgcagggcaatccaggtcactcactacctactctccccagagtcaaggtgcggcacgaggaagtgggttctccaaccttcggtggggtctggagcccggcagcggggcgctctgaagggtcctggctcctcggtaggatcgtgtccctgagccgctctccgcctcccgcccccctttgcccacttgggccgcggcgcgggcacaggagcgcatttggaaggactccgcgaatccagagaaaaatagagacgtggatgctgccccaaaatgagagaccagagaaagtcgaggacatgcacccacaaacatttccaagcgccggtggccacggtaatctgctgcggggcggctgggagattttcaaaggcaccgcggaagcacctccgacctccaggccatctccctcggcctcctggcctcgccgtgcgcgcaaatccccgactcctccgagccgcagaagtctccactgcaaagctgctgatccgcgcccccaaaccgggcacatgctctccccctcacagccctccaaaccgagcctcgagctccgaagacctctcagcactcttctcccaaccactctcggtcgcgcctgccccgcgcagcccggccctggcctcggaccggccccctgatcggcccggacgcccgcttaccttttcttctccttgtcagctgtcattgtcgctgtggccctttgagacgttcagacgccgagcacctgggctccctggcgggtggggggctgtggccctcgtccgctccccgcggcccgggcgggtggtgaaggtccgaggtgcgcgcaggtcccgagcgccccgcgcagtcaggtggaaggtggcgcgcggcgggctaggtgcgggggcgggggtggagaaaggtgactgggaggaacctgcgcgcggaggcggggtccggggaaggagtgggtggaggctgtcagacccgaaaagaggacggagagaagggaacccaagttcctttttccctggaaaaggagtcacttttctgagttttcaaagaaaaaaaaaagtggctcgaatgctgggagtcggaaggagtcggaggccgggctgagctgaccatacagtctcaggacactgccgaggattgtacggccgcctcaggagcgctggggcggaagcgcagcgggcaccggacccgtgtggcggtccgctcgcgagtgtaaagctcccgcggccggcagcccactttaaaaactccgtcggccggcttggggcgggcacggggcgggcgcggagggcggggggcgggcaccggcgcgggtgtgtgggcgggcacgcgccggcaggccccgcccgcgccgagctccgggcggctcactgcgtcccggccaatggggacgcgcggccgcagcctctgccctgaccctggcccgcctcctgcccccgcgctgcgccccgcctcctgcctccgcacttcgaggacttgtttatgaggtcgtctgggcggcgggtagcggggtgggactccgcgtcggggagaggcagcctgcgcagggccgaggggcggccgggagccgggctccgggattgctgcgggggacggcagttgcgccacagcgtcggtgtcctcgtaccggcgccgtgcccttggaacgagggcaggaccgcgggcagcgccgggccagcgcggagcccctccacgctgctgcgctcctgcgtccctggccctcgggccaggtggggataatttctcggcccccagcggctgcgtttcgggcgtgggcgatgcgcccttttcggtgggacgcagctgacttgaccgtctgggagaagcagtgcaaggaaattgatctagggctgcgcctactcttccttccctctcccagcagggtggttgcttaccggcttgtgccaggcggtttggttttggcggggatgcggcagaggaggccctttgagccgcccgaggccggggcgagttcagaattggagaagtcagtctggttccccagtgtgatcttggagtgacaagagttggccatgtgccctcaagtcactgcatctcaggcctgccctctctgccgccagggtcgatggaagtcctgggaaacccaaaggctacaggtgttggaaatttgtagatttaagggctcacacaggcaacggttagcgctcagggattttccagcggcgcttttgacgctgccttccatctccgggcccagtgctcccctgccccgcgctgagctgtctcccactcgctaccggcgatggggaagggacatctggggagaggacaggggacgcccttagtttttgaaggctgtggaaggacccatgagtttcacaggtgtaacttgaagttggaaagcgagggccaaagaactggtctatatctctccctttagcctcttgccacattttatactagaacgatctacagaagcgatttgaagagaagggtaggtttcagcgccataataaaaatgaacacgtgttttccccgtgtacacagaaagggttgggggagatacttttcaggagcctggagaaggcgaagtggggagagggcaaaaactgacgaagaattgggaaatactttttttttttttttgagactgagtcccactctgtcgcccaggctggagtgctgtggccccatctcgactcactgcaacctccgcttcccgcgattcttgtggctcagcctccggagtaactggaattaaaggcgcccaccaccaccctcagctaatttttgtatttttagtagagacgggagttttaccatgttggccaggctggtctcaaactcctgacctcaagtgatctgcccaacttggcctctcaaagtattgggattacaggcgtgagtcactgtgcccggccgggaagtagacgtattttgtcattttctcagatctcggggcacggagcacctatacaggttgatagtcaacgaattcaaagattgcaaatctctctctagcgaactatttcatggggctggtgggtttcaggaacggggtgatttggtactgggcttctccagccagccatttctagtggacacatttatgtattttaatgagttcaaattggtagatagttctcccttaaccataggcttatttccctcacttgggactagagtgcgggaaaagggcaccttggtggcttccaggtgcctacagtagttcaccacaacagcctctgagtcctggac

SEQ ID NO: 2942 - DNA, 4001 bp, Homo sapiens
tggaaaaaaaaaataatatgaatggatcactaaaagttgtgggttttttttttttttaatgattgtgaaaaaagttttctcatactcacttttcccctcccacctgcactcttccaattgcgctcttcatgttgcagccactggatttttggcaaccacaaatctgatccctgttctaaaatctttaatggccctggtcctagatgcagctcctcctacttgcctgacccatctgtcagcctactcccctctgtttgctctgctcttgtactcttgctgctcggccggagagtctttttaattctggaccatttttcattagctgttccacctttctggattgctctttttccagttgacctctcttccacccgctcccatttcactggactaacttcagacttatagttgaaatgtcttattctcagaaaagcaatctcagacttgtgagtctaaattcgacatctctttcagtactcttagccttttctttataacaaagaaattgtaattaaatatctgttaattattatcttttttactgactacttcccccactcacacacaaggacaaagacttcgtctggcttgttcactactttggcccaacagctggcttaacccgcatctcgcctgacacactagaatgacacagtggaatttttggatggtaggtttatgtggcttccaaaaaacagtagtttctactctagttcctaactagaaggatttcctttagaatcataaaatgcaaatttaagcaatcctatcagaagttggttaaaaaaagtacccaaaacccaaaagttagtcatgaaatatgtatactcttacatgactggtggccacaatatggttggttaattgctttttgataaagcaatataacatacagcaaatgccatttaaggtaacactatattttgtcccagtattcccaataaagaaaatgcaagcgagtaattcaacagcagttacgcatatcgttttcgaataatgttaacctattttctaaagcctgcacagcatattacatgcacaaataatccaacaaggttaactagagctcagcaacgggttatgttagaaactgagttaatgcagttgtgggttacattacaaatgtacacggttatgggaattttccccgtaattctttaaaaacttttaatattagtctaaaatattgccaaacgttttaagagttgggtctcgctcttaggtagaattcgagtaaccacagacacaattaacatttacacaccaaagaacccatcattagcacgacaaccgtcccgggtgggggcggggcgggaccttcagacctcgtctttcatgggaacacacctgcctctcctttcccaagagactgaagtttttctcaaatacaggttagctcgaaaagtccaccaagacagtgacacaaactcagttcgtttttccccttcccttgcgacttttgtctctcccgctggacggcagcccagcggaccagcgaggggtacccgcggctcggggagcgcgtccgctcggcaaacattaacccggctgccccgggccctccgccccggcccgtcgcgcggtatcgaccgaaactcggcggccctgcctcattggccgccgccgcccctccctccggcgggattaatgccctgccggcccgacgagagaggggccggccgccctagggtctgggtgcggcccccgcccgcctccccggggacaaggccgctaccgcaggcgcgggcgaggaagggtccactcggctaggagcgcagcggactgtactgcggcgccgccgccgggcctcgcgcttacctgagctggggacggcgcagccccggcgaccagagcggggaagagccgagcaaggctgagaaaggggcggctcctcggtagacgccgagaaatggcgcccacaacgagcccaccggctctaatccccggaggaccccgacctcccgcccgtccaccccttaaagctccctcccagctccgcccccagggcggagcgctccgctcttaaacgggcgatgacaccgccccggaaattggccggcgcggcgactggagagaaaccggcgaggccgggcccggccgggctggaactagcgccagcagccgggcgtccgcggctggtttaaaggggcgctgccgaaacccagttcccgctgcggccctccgcccgcggaggaggcgcccgtccgcagacagaccccagttagtcctatcacgaaggaggctggtggagctggctgctagattcattcatccattcgttcaagagattaaatccttcgcaaatacttattgagagcctgtcacgtatttcctccctttttctcctttgtagggattaaaatacatttaaatctctgctgttaaagtgactttcactctactggggaaacagtaaacaaataggtgtcacaaggtgattaagtgtaaatgaggaaaaataaaactgggaaagagaaataaaagattactgcttagcagagtgtggtcaggagggtactctaacaaggtgacattcagtccgttcattctacaggtaattgattgaagtgcctacttactgtgagttctgtgttctagacacgagatacgacagacaaccaagacagacaaaaatccttcccggagtttacgttatagcaggaatataaacgagacataaaataaacgagataaattagtgaaattaaatactgtcagacattggtaaatgctaaaaagaaaagtacaagtagggaataaccacaggcagtgagggtttgcgattttacatagcaggtcacaataagaaggtggcatttggctgggcgcggtggctcactcctgtaatcccaacactttgggaggccgaggcgggcggatcacgaggtcaggagatcgagaccagcctggccaacactgtgaaactccgtctccactaaaaatacaaaaattagctgagcctggtggcgtccgactgtagtcccagctactcaggaggctgaggcaggggaatcgctcgaacccgggaggcggaagttgcagtgagcccagatcacgccactgcactccagcctggcgacaaagccagactcagtctcaaaaaaaaaaaaaaaggtagcatttgaatgaagacctagaggaggtgtgggaggaaccctgtggccatctggggagaaccgaagggaacagcaagggcaaaaggccctgcaaggggacaggtctgtcttttcaaggaagtccagtgtggctagaagtgaggaagcaagaggaagaggaggtgacagtcagagaggaaaggggtaagatgtagggccttgtgggccctggctagagctctgagagaggtgggggagccactggaaggtgttaccttgaggaccctctgcttgctgaaatgaaaagagacaaatactcattgagcttcttctcgggatttggcactgcccactcctccaccaccccaaaacgtagtagacaggcttggcagctcatctctgccccatgtggtgttggctgggcagctcaacaggtgctggagctgccaaggtggtttcactggtctgtgtggcatctccgctggggtggctgcaaagaacagctgagttctgcctgggctactctcttgcagatccgctggtgtggcaaaacagtgaaaacagaagctctgaggcctatgaagggctatgcccagcagtcacggagcgtcccttctgctgcctgttaatggtttaagcaaatcacagaggccgcccagtttcaaggagatgaaagagactctacctctttttttttctttaaatattattaaaatagagaaattttccttctccaccttttaaaaacatctttattgagatataatgcacccacttaaagtgtacacttccatggctttgggtattttcacagagttgtagaaccacaaaccacaatctaattgtggaatattttcatcactcttcatgagaggagcagcatgggtgttcagggatgggaggaat

SEQ ID NO: 2943 - DNA, 4001 bp, Homo sapiens
gactacaggtgcccgccgctacgaccggctaattttttgttattttttttagtagaggcggggtttcaccgtgttagccaggatagtctccatctcctgacctcgtgatccgcccgcctcggcctcccaaagtgctgggattacaggcgtgagccactgcgcctggcctaattttttttaatggaaaaaaaaaataatatgaatggatcactaaaagttgtgggttttttttttttttaatgattgtgaaaaaagttttctcatactcacttttcccctcccacctgcactcttccaattgcgctcttcatgttgcagccactggatttttggcaaccacaaatctgatccctgttctaaaatctttaatggccctggtcctagatgcagctcctcctacttgcctgacccatctgtcagcctactcccctctgtttgctctgctcttgtactcttgctgctcggccggagagtctttttaattctggaccatttttcattagctgttccacctttctggattgctctttttccagttgacctctcttccacccgctcccatttcactggactaacttcagacttatagttgaaatgtcttattctcagaaaagcaatctcagacttgtgagtctaaattcgacatctctttcagtactcttagccttttctttataacaaagaaattgtaattaaatatctgttaattattatcttttttactgactacttcccccactcacacacaaggacaaagacttcgtctggcttgttcactactttggcccaacagctggcttaacccgcatctcgcctgacacactagaatgacacagtggaatttttggatggtaggtttatgtggcttccaaaaaacagtagtttctactctagttcctaactagaaggatttcctttagaatcataaaatgcaaatttaagcaatcctatcagaagttggttaaaaaaagtacccaaaacccaaaagttagtcatgaaatatgtatactcttacatgactggtggccacaatatggttggttaattgctttttgataaagcaatataacatacagcaaatgccatttaaggtaacactatattttgtcccagtattcccaataaagaaaatgcaagcgagtaattcaacagcagttacgcatatcgttttcgaataatgttaacctattttctaaagcctgcacagcatattacatgcacaaataatccaacaaggttaactagagctcagcaacgggttatgttagaaactgagttaatgcagttgtgggttacattacaaatgtacacggttatgggaattttccccgtaattctttaaaaacttttaatattagtctaaaatattgccaaacgttttaagagttgggtctcgctcttaggtagaattcgagtaaccacagacacaattaacatttacacaccaaagaacccatcattagcacgacaaccgtcccgggtgggggcggggcgggaccttcagacctcgtctttcatgggaacacacctgcctctcctttcccaagagactgaagtttttctcaaatacaggttagctcgaaaagtccaccaagacagtgacacaaactcagttcgtttttccccttcccttgcgacttttgtctctcccgctggacggcagcccagcggaccagcgaggggtacccgcggctcggggagcgcgtccgctcggcaaacattaacccggctgccccgggccctccgccccggcccgtcgcgcggtatcgaccgaaactcggcggccctgcctcattggccgccgccgcccctccctccggcgggattaatgccctgccggcccgacgagagaggggccggccgccctagggtctgggtgcggcccccgcccgcctccccggggacaaggccgctaccgcaggcgcgggcgaggaagggtccactcggctaggagcgcagcggactgtactgcggcgccgccgccgggcctcgcgcttacctgagctggggacggcgcagccccggcgaccagagcggggaagagccgagcaaggctgagaaaggggcggctcctcggtagacgccgagaaatggcgcccacaacgagcccaccggctctaatccccggaggaccccgacctcccgcccgtccaccccttaaagctccctcccagctccgcccccagggcggagcgctccgctcttaaacgggcgatgacaccgccccggaaattggccggcgcggcgactggagagaaaccggcgaggccgggcccggccgggctggaactagcgccagcagccgggcgtccgcggctggtttaaaggggcgctgccgaaacccagttcccgctgcggccctccgcccgcggaggaggcgcccgtccgcagacagaccccagttagtcctatcacgaaggaggctggtggagctggctgctagattcattcatccattcgttcaagagattaaatccttcgcaaatacttattgagagcctgtcacgtatttcctccctttttctcctttgtagggattaaaatacatttaaatctctgctgttaaagtgactttcactctactggggaaacagtaaacaaataggtgtcacaaggtgattaagtgtaaatgaggaaaaataaaactgggaaagagaaataaaagattactgcttagcagagtgtggtcaggagggtactctaacaaggtgacattcagtccgttcattctacaggtaattgattgaagtgcctacttactgtgagttctgtgttctagacacgagatacgacagacaaccaagacagacaaaaatccttcccggagtttacgttatagcaggaatataaacgagacataaaataaacgagataaattagtgaaattaaatactgtcagacattggtaaatgctaaaaagaaaagtacaagtagggaataaccacaggcagtgagggtttgcgattttacatagcaggtcacaataagaaggtggcatttggctgggcgcggtggctcactcctgtaatcccaacactttgggaggccgaggcgggcggatcacgaggtcaggagatcgagaccagcctggccaacactgtgaaactccgtctccactaaaaatacaaaaattagctgagcctggtggcgtccgactgtagtcccagctactcaggaggctgaggcaggggaatcgctcgaacccgggaggcggaagttgcagtgagcccagatcacgccactgcactccagcctggcgacaaagccagactcagtctcaaaaaaaaaaaaaaaggtagcatttgaatgaagacctagaggaggtgtgggaggaaccctgtggccatctggggagaaccgaagggaacagcaagggcaaaaggccctgcaaggggacaggtctgtcttttcaaggaagtccagtgtggctagaagtgaggaagcaagaggaagaggaggtgacagtcagagaggaaaggggtaagatgtagggccttgtgggccctggctagagctctgagagaggtgggggagccactggaaggtgttaccttgaggaccctctgcttgctgaaatgaaaagagacaaatactcattgagcttcttctcgggatttggcactgcccactcctccaccaccccaaaacgtagtagacaggcttggcagctcatctctgccccatgtggtgttggctgggcagctcaacaggtgctggagctgccaaggtggtttcactggtctgtgtggcatctccgctggggtggctgcaaagaacagctgagttctgcctgggctactctcttgcagatccgctggtgtggcaaaacagtgaaaacagaagctctgaggcctatgaagggctatgcccagcagtcacggagcgtcccttctgctgcctgttaatggtttaagcaaatcacagaggccgcccagtttcaaggagatgaaagagactctacctctttttttttctttaaatattattaaaatagagaaatt

SEQ ID NO: 2944 - DNA, 4001 bp, Homo sapiens
attacaggcgcgcaccaccaggcccggctaatttttgtatttttagtggagacggagtttcaccatactggccaggctggtctcgaactcctgacctcatgatccgcccacctcggccttccaaagtgctgggattacaggcgtgacccaccgtgcccggcctagaacagatttgactcaagttctaaaataataggatcaaagtaattacacacaatactggtacttttaaggccatctttctttggatcaagacccacaaaatagcaaaaatatccaaagttgtgcttattagggttcaatgtaattaactattgtatataatatgattttattttaattttccttcccatggaaaactgagtcgttagaaacaaattaaaaaaaaaagttctcacatacaaaaaaaaaagttctcacagctctaaaccttagggataaatgctgggttttgattataaacatatttatatatatgcacacacaaatatatatgtgtatgtgcgtgtatatatatctattacatatttgtgtgtgtacacacacagttaagttcatcccgatgctacggccatatgcattttctactgaaaatgtaagactttcaagtaactatacatcaaagagaaatgtgattaaataagagcaaagtagtattaacagggtaacataatgaggtcagaactcaaccagccaatcgaaggcataaaagcatttcctgcaatattaatagtcaaaagagaaaaccaatcactgaaacctcgagcttccttttgacagtcactgaagcaagagaaccaatccacacacacccgaggttgacaataaggcgggactgtaggttcattgaagaaattcttgagggtgcagttactatgaacttcgcacgcaagtaacaccactcgagtcataaacactctctgtcaagccagatgaaatccaaccgtctgcaaaatttaacccatcggaggaaaagcagcaattttcccaaaaggtgctgtattatcaaaattacaactgccaatttagatgcactaggtcctcaacttctaaggaccacctcgcaatgacaattctcgaggacaacgcaacgccggcggctcgcttccgggcatccccggctcctctctaacgttgcgcacggagcacggccgtccaggcggagcaggcagagcccgtccgccccgcgcccggctcgggtcggcagaactggccggcgggcggccctcggacgctacgacccgctcggtagtcgtggcccccgccctcccccgccgcagtgctgcaccgcctcatcccgctgcaccttcgcgggcgggggagccaggatgattacattgctgggaggaagatgtttgttttgaaagcacccttccacagtcatttcaaagagaactcaatacaaagccaaagttaaaagtggaaaaaataataatcttgcctagccaaataataccacgccattaattagccccgcgcctgagagagggaggtggaaaggtaaacagagaccgtacgccaagagcggccagcgcatcccctgcgccattcccggccgccgcttacggcaaggcccccttacggcagcgtaagcagcgctgcgagctaatcacaacactgggacgcaacaacatggcggccgcgggcgggcgctacgccggccgagagggtttacgctactccgccggcgtagagtcccgtgcgttagagcggcagcggcgccctccagcgagcgtaaagcgctctgtgaatggcgaggcccgactgacaaaggggaggggggaggagggaagggggggtaataaacactcgagtccctaccgattcctcctccttctccatcccggtgggcatctggggcacggcccggttgatggagacgcagtcgttgagatcaggcatgtccttgccgcggtagataggcagcggcttggcggcgtccagcgcccgcgctcggaaggagagtttactcattgtctccccgccttacaggaacagcccgggcggcggcggcggggcgggcggggagggggggaggactcccgccgcctcctccacctccttcctcagtgcagcgcggccggcccgctcctcctcctcctcactgcccccggccacagcatgggcgcccaccccgcccgaaaacagccccccgcgcccgcggccgcctccacacactagatccgccgctcgcccgcccgatccgctccctgcgccatggccaacatggcggacattaccacagcggcggcgagcgatcccggcagcccgcgcgagagcgcgcccccgtcgcgggaacgcgcctcgccctctccctccctccctccttcctctcccttcccctccctcgcctgcccacccactctctccgcggcgctgccggcccgcgggagcgtgctcggtctcggtccgctccggggagagggggcgggggcggcgcccctccgctcgctggccggtgctttcgctgtgtggcaggtgccaggtgcgcaagttcgcccgcgcccgggagcgtgcgcctctcccgccgccgcccggtcacccctctcgctgggtgtcccggaggaaggcgccgggcaaagacggctgcgccgagcagcgcgtgtgtgcagaagtccgggagcgggaagggaaaatgtcgacccggaccccaccagccatcacccaagcctgtacttggacagcgctatccccaaggcgccctgtgcgcaagctaattcgcatcctccgaggcgcacatccccgagaggtgcaagaggtctctcccatcagtcccatcagtccgttcggaggactggaccgcgctgctggtgccagccctcttctacgccctcccctccgtacctgtccgaaagagctctccaaggtgcagcagcgcgttcatcctcgctttgcagtgagggttcatggtttgaggctgccagatgcaacaagtgaacttaggttccctgtcacccaaacttcggtacagctgtttagtggatggtaggtatttttctgagttcaaaaatagtagctttcctaaaagttcagcttctaaaaatttagccaaggcagcacacatttgcgaagtagcagatgtgtgtcaaatgtggggtgctgtggaagactcgaagaaatctgagaaaaggttcctgcctcagagagctttcaccttaatgggatgccaggatggctggaaagatgagtaacagagacgtaaatagttgaagaaaatgacagctggaaagataagtgacaaccgaaaaaaaagtgtaaatattttaagaaaacaatacaagagatgacacaggcagtaagtagcacatgattaattaccaaacgagatctaggcaataattgtgagagttcagagaaaggaaaggaggcatgactgcagcctaaactggttagagaaagttctcaagaggagggaaaatcaaggtgactcaaataagtactagctattgttgacatcaacctggtttagccaagaggctcttggttagtctttaagcattacacatttctcacaaaaccgtacaaagagagtttttaacacattttaccattttctaataatcgatcatactctaactcagagaaagtcagatgatttcctaaagaccaacagtgaaaaaattgattcctactgtcatttctatgtgacaataaaactatatctcttcctctattacgtccttcttcccctcctccacttcctcccctccccctttttcctcctgttcctcttccccttttctctctgcagtctcctcctttgaaggcagaatggtggatatagtcttcatggtagtgtccaaatagtctaaccagtctgtcgcagcaaaactccgagtattgtttagtggggcttgagtgtttttcatccactttgttgttggaagcaatggagttgctgtgactcatttcttgtaagcagtaccttcctcaagcttatgggcatgtcctgctctctaagtgctacccctggaacagttccaatcctctggaagcaagaa

SEQ ID NO: 2945 - DNA, 4001 bp, Homo sapiens
ttaaggccgggtgtggtgatgcacgcctgtaatcccagcactctgggaggcccagacggagtgatcacttgagcccaggagttcgagaccagcctgggcaacatagtgagatgtcgtctctacaaatacaaatattcggctggcactgtggctgacgtctgtaatcccagcactttgggaggccaaggtcggtggatcacctgaggtcaggagttcgagaccagcctggccaacatggcgaaacccctctctacaaaaaatacaaattagctgaccgtggtggtgcatgcctgtagtcccagctactcgggaggctgaggcaggagaatcgcctgaattgcagtgagatgagatcgcgccgttgtactccagcctgggcaacaagagcgaaactctgtctcaaaaataataataataataataaataataaatacaaaaattagccaggcataaaggctgacgcagaaggatggtctgaggccgggaggcgtagtctacaatgagtcaagatcttgccattgcactccagcctgggtgacagaacaaggctgtttcaaataaaaaaataaaataggccgggcacggtggctcacgcctgtaatcacagcactttgggaggccgaggcgggcggatcacgagctcaggagttagagaccagcctgaccaacatggagaaaccccgtctctactaacaatacaaaaattagcggggggtggtggcgcgcgcctgtaatcccagctactctactcaggaggctgaggcaggagaatcacttgaacccgggaggcgaaagttgcagtgagccgagatcgcgccattgcactccagcttgggcgacagagcaagactcagtctcaaaaaattaaataaataaataaaaagaaagaaagatacacctaattactaattatgggattctcaaaatgctgggattatatgtttttactctttacggttattatttctgcgttccctacaataagcctggcattactcatatgatccttagaaaagggaaaacacccacacgccctgtgtggtccgggccgcctgccgcgcgcaggtgcatagcggccctggaggcctccctgcgggcgcctgtccccgcctgaggcccacatccggggcccgctgcaaggacaagggcgagcccgctggtccctgtcgtaaagactccgccaccggctggggctgttttggaaccccaagtccaccccgaaccgaggacgtgggtgcgccagggcgcgaggcaccggttcggtggccgcaggaaacctggacgtggccactccgttccctgcctgtcccccgcctccgcccaaggccatttccctaccaaggcgagcaaagctgcgaagtgaggctgctccccgggacggccctcgccgtttcctaccgcgcggagggcctgagccggagcacggccgcaccgtccggtctccacgctggaaagcgcggcctcttggtcccctccctattatgcccgtttcgggggccgagggccgggggccgctgccccccagcccagcccagctccacaactctgctccaatccgcgcctcaccttcctgagctgcggcaaaagtcgccgtcgccgcggcaagcagaagcccgaacgcgaggacctgcgggggcgccatgctgcgcgcgcgccgagaagaggggcgcgggaggggcccgggactcgcgggagggcgtgcgccgggagtgggacacgaggagccggccgggcagcgcgaggcctggggcacgcgggtccgcgtcgggaggacagcgacgagggggtccccggaccgcgtcgaaggtgctcgctcgccgaaggactagcgctctgtgcgcgcggcggggcggagcgcacacctgcccgacctggcggccccgcctctcggccccttcccgggactgctcacctctggccgctggtgctcgttgatgagtcaccgcccgggagttgggggagtgagtaggctcccctcccccagccccggcgctgcagttggggcgcggccctctccacaggtgtgggcccgcgcgccccgctccgccccgccccaggtgcttcgtctccatggcggcgttagggatctttggtggcctccgaggaggtttgaagattctgtgctgagacttccttttaaccggaggagcgctgctctgaagccttgaagaatggggcctggggggaagggtgcgggaactggatagaggaacgtggaggctaaaggaaatacaaacacaggcagagaaccttccagaacactataaaaaagacctttgagcttttacctggcaatttaattatactcctttgaaattagaaagaaaaaaaaaagaaagaagaggaaagaagaaatcttggctctcttgggaagaaaatgagtgtttctttataattactcttaataattcttttttcgttttcataagcatttctagcacttgaagatgtaagaaaaggtgttcccaggctgagcgcggtggctcacgcctgtaatcctagcactttgggaggccgaggcgggcggatcacctgaggtttgaagttcgagaccagcctgaccaacatggaggaacgccgtctctactaaaagatacaaaattagccgggcgtggtggcgcatgcctgtaatcccagctactggggaggctgaggttgcagtgagcagagatcgtgccattacactccagcctgggcgacaggagcaagactccgtctcaaaaaaaaaaaaaaagagagaaaagaaaaggtgttcccatagagccaaatactgagaaccgagatgatttcgggttttggttactattaaagaaccaaaatgttgatgacgccttcggaaagaaaatatagggaaatagaaagaaaggacagtaatcgatttccgtgcagatgaattcaaatcacaacacactatattattacaatattaaaataattataaatacttcatatatatactatttagtgtttttaaatgttattttttgttagctgtaatatcattgtaacctattttttaaaagctttttatccactaaagaaatcataaaagtaagagttaaaaagaggaaaggaggctgggcacggtggctcatgcttgtaatcccagcaccttgctgggggcacaggtgggcagatccgaggtcaggagttcgagaccatcctggccaacatggtgaaacccatctcaactaaaaatacaaaaagtagccaggtgtggtggcaggcacctgtaatcccagctactcaggaggctgaggcaggagaatcgcttgaaccagagagtcggaggttgcggtgagccgagaccaaaccgctgcactccagtctggcaacagagcaagactccatctcaaaaaataaaaaaataaaaaaaaaagaggaaaggtaaaaaagcaattttaagattcagctaagtttgattaatttctacaagtatatgtcaaatcaaagcttatgtttatattaaaacaatcatttctatgttgtattctgttgaagtgccggcaagttgattaatgtaaatagtcatgctgttctaagtacctctataatttgttttgtataatttaaatttcacgtggtatatgaaataaggtatttaggccaggtacggtggctcatgcctgtaatctcagcactttgggaggccgaggcgggcggatcacctaaggtcaggagttcgagaccagcctggccaacatggtgaaaccccgtctctactaaaaatacaagaagttagccaggcgtggtggcgggcgcctgtaatcccagctactcaggagactgaggcaggagaatcacttgaacctgggaggcagaggttgcagtgaaccaacatttcgccattgcactccagcctgggcaacaagagcgaaactccgtctcaaaaaaaaaaaacaaacaaacaaaaaaaaaagaatagtactaacaaatcaggaacaagttaaccagatttttgttgtctgctgaattttggatgttttcaggaagtttgcct

SEQ ID NO: 2946 - DNA, 4001 bp, Homo sapiens
ttgtcttgggctcccaagtttttctcccccccccccaaaaaaagagggggtttaaaaaaaagaaagaaaacagtctctacatctggggcgagagaggtctcaggggacgtcctaacaagtgtgtgaagtggccaggagaacgcgggatccacgattcctctcaggggaatgaataaccctagggaccgaggggcggcgacggccgagatggcaccagaaccaccagaagccacgtcggaaggagatgggagatccagagggcgagagagggcccctttcctcccaagcgatgtctgtgggcaggtgtataaatctctcagagcctccgtctggagggctccgggtaccggctgcccagccaaggctaagttggtttttggctccctccttcggaacagagaaaacgatagattacacagggatggatggacggatgtctggagagatggaaagatgaatggatggatggatgggtggatggatggatagatgaatgggtggatggatggagggatggatggacggacggacggacagatatatggatggatgcattatggatggatgcatggacggacggacggatgcacggagagatggatggatgcatggatggatagatagacggatggacggacggatagatagatggatgccggaaaggagaagaatgagagacggatgtgagactagatgcacgcaggccagagcaccagcatacgctggaacagagcacgagcatacactcgaacacacgcgcacacactcaggacatctgcgcacagacatacaatcctccgcgtccgcttccacgcaggcattcgcgcacctacatacacgcagttgcacgcgcgcgcacacacacaggcacacacacgcagacatgcacacacacgcagacatgcacacacaccacacatgcagacatgcacacacacgcagacatgcacacacacaccacacatacacacacacacacacacagttcgcctctccctgggtttctcagaaactaaatgatcaccgcccccccgccccgccccacctcccgacacagacacacaggcacatacaatcctcccagcacgtccgaacggatgcacagaaaactgagcacccagacgggtcccgtcgaccccgcacgttagctctaaactgtgtgcaattctggggcgaaaagctaaaactcgactgcgttcaacttgccggcgggttccccaagtctgcggggcgaagagctcgggcccctcaggcccgcaatcgcaccctcggggcgctgggcttggcgaggagaaaggtgtctgactccgggtgctagaaatcaggtcactggcgcctgacgagcggcgccacgaccgctgcgctgcggagcaggccccgcagcccggtcccgagaagcgcagggctcgggaaactttgcagaaaccagagctcgaaaggctttcgctagaatccgggagcaccaagccttcactgtgctccaggctgcgttttcccctcgccccgggctggctcaggagaggacgtggttcttgtaattttttttttaaatcccggcgttgtctcccgtgcatcccctcagggcgcctcgagcgggcctctctggcggatgctgataaactttggcctttggttacaaacttggacagacccgccgcgtgcacgggtcaccgcctcggggcaggctgtccggcggttccccgctgccccttcgccgatcccctcgcctcagcccccttctcccgaatcgggacgcaccattcacactgggctccccccgcaccacctggccctgcgctcctgaggacccctcacccgcgatggcccctcgctgtccccgaccacagaaaggccgtcccgctcttaccttcattcgcggggtataccctggaacctgtgacagcgtcgcaaatcccgaagagacacgaaaatagggcgaaatagaaaatcccagccatggttcgccggtgccaacgctgctcctgccgcttctatcccagtggaataaatgcttaagttaggagagcagcgggctgaagacattgccaagggggcgggcccggccggtgacgtgagcccgccagtccggggcccgcggccaatggcggcgcagacagggcggccgagccccgccttcaccgagcagggcccgccccagggttccgccccctccgggctccacggggcgcgcggtctcccggggctctagggggcgagcacggccggtccccgcccccgcctgccggagggagccagcgggatcccccacgttacctcgaaggtcgagcccctggacggcggagggactttggaaaagctcggaattgaccgaggggagccagagaagaggttggaaaccttttctcccaccacgggcggtttaagatggaggaaaacgctcttttattgaaataaaagaagtctaagctgacctgcggttgcttctttaggagagtcgacgtgtctgcgtccagcgcgcccgggctgagctgcagactcgcgcctgccaccgccaccctctgccaccttgccctgttttgtctttatggcgcttccccctctgaaatactctttgcggggagttttgtggctctatcactcgcttcttccctggctccccagatgcctggagagcggggacctacttggtccccaacgtccagtccgcagcagggctccgtcactgtctccagagactgaacgaatgactttctagcagtaaggaagtccccgctggccccgtccccctgcacacgccgtggacctcgcccagggcccaggacgccccgagatggccttgggcagggaaccagttgtggatttcccgggggcagggttgggggcagtccctggaaccgggcctagcccgtctgggagcggtggggtagaagtgaaaggcttaagtgtgggtgcggggacttgcagccgcacagacaaggcagaccgggactgggaagctgcccggagcggctgctgcgactctccgctccgacctagccggggcagccctccctgccccgggagaagacggcgagcaggaggacccgcagagccccgcccggctgctccggccccgggggcactggcaccatcgggctgtggtcttttcccgatgcccgagccgtggacgcggccacctaagagcggtccggcgaaggcagcgcagccggtgtcccagggaccggtccccaacgccactcggtgcatttccccaggcgctggcaggggcactgattcctagcaatgaggcctcccttccccttcccaggccgcccctcctctgactccctccagagcagggccgagttttcctggggagcctgggtcccggcggccgggcggccgctgggaggtggaggagcctctccagccccggccgcagctcatcgtgagccaaccgcgccacctgccggccagatgcgggagtgtgcggccccggaggaagggcgagcggacaaagaccgcaacccgcaatccgcaaccccgcagagaggtggtgcgtgcgtttgggcgagcttttcagccaccgccaagtctcgtgcactagggctactcctaccgtggggctgcggacagcgctcaagaggtcctggagtctgtcgtgactctcgcctgctggatttcaaaagatggaatcggaaagcgtttcaaggagaaactcctaacaaaccttccgggggttgcctgagtggctgctctcggaaaagcggatcctaaataaagcgggagggttatagggcgacgtcgaggagaggacaggtctcgagtcactgctacagtttcaggtcactgggctccgcagcagatcgtgttttctcccgtggctcgagagctgcgctggtttctcatgcaaactcagagccgagctaatgacatgagcaacttttacttttacacaagatgagcacgcgtgccgaggcgctgggcggcggctgtgtgagttggtggcccagacgaacagcttgtgcgagactctgggcatttcggtttctagatacaag

SEQ ID NO: 2947 - DNA, 4001 bp, Homo sapiens
gtattgagtaattgcaatagaagaatatttaggttataaatgtgtgcttttttttccccaaggaagcctcattataactaaaatgatatcaacaaactattttagtgaacattggacgcttgctaaatcgacctttgttttccaggatgataggaagtcatctgctgtcagatacaggaacttatataataaaaaagggggaaagatcagaacagaaaattacacgaaacttctagtaaattaagacacttatttagttgaaaatataaatctagggaagattctttataagaaaaaggagatttcctattataaacactgctcccattgaaatagctattttattggcacttagaaagtcagaccctagtaaggaagaaaatgttttatatgtcaatatttaccctgcagaacagacaacaaaaggggagtagagcttaaggcaaaacaggaggtatctgggttaacagccttctaaaatgaaagttgaaaagcactggcccgagttaccaagaaggctctggaccctctttccacttaaaatgttaagacaagtcatcacctcggttcagaatggtatggcacaatacggcttgaaagcagagaaacatgctatgtgaccttctaaggacccttgctttttttttttttaactcgagttaaacaaaatccattatgactttttcagttattcattcattccacaaatgcttactgggtgcctagtatgcacatagcactgtgcttaagccatgatggtccacaagaaaactctaatgagttgggcattatattctaatggcgagacacgctaaagcagcaattccataaacgaacagagcgcacatttaagggggaaaggggcacgtagggagggcttctttgaggaagcaatatttaagctaagatgtgaagatgaacgggtaacaacaaggatgaagggttaaagcccatatttcaggcttggtcgactggatggttagagtcattcattggtaaaggaactgcggatgggaaccagatttggaggaaagttaaccacccgcatttatttactggggtcctagtatgttgccaagcgcttcacaaattcctctaatcattttgcacagcagaagctattactttcagtttcatacacaaaagagaggctgagcggggttaaaatgacgtgcccaagacgaaataaagaaatctgacttttgtaatcaggtttgtatgtgctcgaaagcccgcgctctttccactccacagctccttcctgtgcacctccctttcatctggtggccctagcgccacaagctgccgcttaggaagtccctgccgggagcagaagtggagacatcagcaggatggcatcggcaagtcgctcccctcccgggcctcatctgccaaacgatcatctcctcctccgaagttgtatgcatgacaggcgagtggaaacttcactaaaatgaaggcgattgacacaacagaaggaactccatcctttcgggggcttacgaaaataataagtttaaaaaaaataggaagggaattccctcgctccatgatcactgagcgctctcctaaggaaaaggaaatctcccggggggtgccgactacgggcggcgggcttaggatgctcccacgctccccgacccccaatccccaggacccgcaggacctccggaggaacgcccgccagcccgcccggagccacgcggcacaaggtgacacggaccgcgccgcgcgggcccctcagccgcctgggcgaggccgggagcagggagaggggcatccgccggcccgcggtaccttgtacttatcaaagccagccagctgctccgggctcacgtattcgtagccagccatgacgacccgaaaactgagcgcccactcggcagcgactcccggctacaaggctgtgacacacaagcaccacaccggctgggcaaggatggcaaagactgggctgcccgagaaggtaggagagccgcgctccgcccaccgcgcacgcgtagccgcctcggccccttcggccgcctctcagtgcgcaagcgcagcccacgcttctccccgcccatcgagggggggttgctagcccgctcgagcggcccgtcccccgacactgctgttgtccaatcggcgtggatcaggcaacactaagtcccgccttccagctctcttcgtcgcttcatttgctagcgtcaaaattggtgagctgaggtaaggcaagagagggggtgaaaggtcaatttcccagcgggctttgctcccggtcccgggggaaggtgggatttctgtggtatccgcacttgcgtggtgatctggggtataccgttttagtcttgggggtagagtgactgcttgcgaaccagttcagcagtgcctcaggtaagaggacttagttctcccgctgcagcgaagtaaaagaggaaggaggtctgtaccgcgagccgctcccagctcctggtgcggtgcgctgcgtgccgtagaaatttagtaaacgtggttagatgtagagaaggccgagctgctgccggggccacgggagtctttgtgcggtcagcagagggacttgaaagacaggtgaaaggacattggagacaagcccctcaggtctatgttgcttaggaaccttggaccgcctcatcgcactccgctctatcaaaccgttccaaattaagattgctggtgtctcccgaccagataaaagcagtgatctctcagtctcgacgagtccttaaatgcgtttgcaagaggtgttttacataactggagcccagttaattgtaaaacaaacaaacaaacaaaaaacactagatcaatggctagtgagtatctactaataaaattttataatagttgctgctttttattgagcgccttctgtggggagaacttcacatacattatcaaccccataacaacactgaagtgaaaggcattatcccctttttcagattaggcagcctgcccagagtcacttagttacgaagctcggaaatgatcgacccaacatgaaatgagttctgtgttatgggaaaccactacttcagggagcctttcagtctctctgggtctctgaaataagggcgattattttgagatacttttatgttcattcgtttaacaactatttattggggacccgagatatgccaaacacagtattattactacatgtctaatctcccctcctaaagcatgattcttagaaagtaatagataatcttatacctggtatatggtagataataagcttctccccgccccctgagacagggactgactcacccaggctggaatgcagtgacgtgatcacggctcactgcagcctcgacctcccctggctcaggtgatcttgcttccgtctcccaagtagctagaactacaggcgcacaccaccacacccggctaaattttttgcattttttgaagaatgggcgcccgccaaccaataaacttcagtgtcctttatcacacttgccctcgagggcagtatttgcatcttatacatcttaattttccccatgttccataacccagggggcttgcaaataatacatgatcaacgtattttattgaatgaatgagcaaagatctctttgatatgctgtgaagtaccagttttgagaagaacattagaaatgagagtctcggccaggcgcggtggctcacgcttgtaatccctacactttgggagcctgaggtggagggattacttgcgatcaggagtttgagaccagcctggacaatatggtgaaacctcgtctcaactaaaaatacaaaaactaaccgggtgtggtggcacgcgcctgtagtcccagctactcaggttattgaggcaggagaatcgcttgagcctgggaggtggggttacggtgaaccgagattgtgtcactgcgctccagcctgggcgacagagcaagactccgtctcaaaaacaaaaccaaaaaaacccttcatacttgtaaaacttagttaattgtggaaagccataaaatgtgacttcagtg

SEQ ID NO: 2948 - DNA, 4001 bp, Homo sapiens
cgaggaagaggacagctgcagaactaatttggattacattccttgcagaaattctgaaaagggcttttcggcatagctcaactcggagccgcacagttaataccaaattgctgcggactcggagcggggtcccccagtggcagaggctgaaccagacagcccccagtaggtcgcctcgtagaaattcctctcggctaagcctgcatgtcggtcgccaatgcctttgaatgggtcaatgtgcataatcaacccattgagggaaaatatgaagggactcgaagtggggagggagataaaaagagatgtatctaagaggccgcttggaatgtcaagtccgtgttggtgtgattccggaggtggctggagcgcgggacctggtatgcgtgaagaatttcggagtaattgggagggtgcaaacggccagcacaaacgcctcacatgtgccattcgaaggtcattttgaaagactcgataattgtaacttgttatttactaggcaaaggaggcggcggcggcggcggcggcggagcgggaaaactacagctagccgttttcttggtgaggtcagaaggacaccctccgggggcctaaagcgctccctatcgccactcccgggggctttatcacctcaagctacttcccacgctccagtcaccatccctggatggtttcggaaatctctctggctctccaaaaggcaccccttggccacgtcaagacaccggtcctcctcagacctctcccgtcccactttcatccccaggaaactctagtgtcagaaactttgagctccattgcactgcaggtgctgtcattagtcctgcaagccgtggcgggccagccccgccgcgctgcctctcggggtcaattagccctttgcctgcccaggtacctggggctcgagctctccagcaagcagtggccgcgcacccatcgccgctgccgctttcgcctcgggtggatccagtgacccgcaggctcggcagcctggccgggcagtaaacagacaagtttgaaggactccggccaatagcaagttgaactacaggaagaactcttcccggagccaaacacggcaaccgacgggaaggccgggcttctggctcaagtgtgccaagcctttttttttttttttaagaggtcaggcaggcgagtaagcgcccctcaagtcaatggggagagggctccgggaagccggcggaagaggcccagaactccgggccccggaccgaggcgcgcccgcctgctgcactccggctgcccgggctgggcgcgagttgcgtctgacgccacaaggctcgggcgactgggggcgcagcggtcgccagcagcacacacaggtgcaaagcccgattttctgagcgccgctctccaccgcccttcgggctcggctcgggagaggcccagccagcaccgccccaggaccgcggccccggcggtgcgggttctgccctcggggacccgacagggacagaagagtctcctctgactggggatttgggtctcccatgtcccgaacaacaggcgccaccagaagggatcccgcttaggctcccaaacaaaacgctcgggaaagaaaagcagggggttaaggagagaaaagagggactcagagtgatttttcacgataaataaagcaaacgcacacatacagggtaagtttcaaatggaaagaggggtgaccgaaagcccagggaagaggccccggtcaagcggtccctccacgcctcccgggatgggtgaagagggcaggggagccactcgaggcagccccgccggcggctgcaggttcggcgaccggagtgccagaaggaacccacctgactgagaatcgctgggctggacggtccccgccgccacgagaaggctcacccagacccaaagtcctgtcgccggcttcattttttggaagtctcagatcccgtgctgacaattacatgtccaaatggcatatccccctttcgggcacgcggaggagatcccccagccgggcgcgcgtgggggtgcgaggggggcgggcgcggcgcgcgcggtgtggcgactcccagggcgggcgaccgagtccgcgcccgcgggtccagggccggggcccgaggagggggcgagtgtgagcgcgtgtgtgcgcgtgtgggagtgtgctcggtgtgtgcgcttggcgctctgggccggactgtgcagctatttccccgcgtgagccttcgcttgctcgctccctcctcactttctctctctctcactggttggtcaacaataaaaaaggaaggggggcgaaaggtttccaaaaaaagttgattgcaaagaggcggtaggtttccggcctctccccgcagccgggctatgttctgctccttcttcagtttccttgcacctccagtccaaatcgggaggggagcggggcggggggagcttctcgcttctccccggatcccgtccttctttttcctctcagctttcctcacacttgtccggcggctgcggtaattaaagctccgagcgtcatttccagcgctccgcggtctccagctgcagcccacagagaaattaataagactccagaaaaaaaaaaaaaaaaggtgcggggggcggtgggaataaaacaaccctccacgcaaccaggccggctctgctcagccgcgcaaaccccgcccatgctctgacccaactagccacgcccttcccccccccttccaaagggaaatcttattggctcagccactccccaaaatcctgggcctccggagttgggaaaacacctgtcagggaaagggagcctcttggtgggggcaggggaagctggatttaaagggctcaccgaagccatgcactgaagcactcgtcttccctccctggcagaggcctgggacagctggcctgctgagtggacggaccattggagggccgcttacggaaattttttttttttttaaacaagaaagtcagcattttctccgttgccccacggtgctcatctacagacaagactttccctagaaataaaagtcaatgttgctttcagcaaaaagcctccgcccgcagtactctgccactcatggtccacaattagaaagtactttaaaagtgtgtacagcaagtaactggtagcccctgaggattaggtagtggtaggggtataatcaccgccccgcctcccgcccccagttatgccatctctccgattactcccacatttctaaactgaccaacattgagccaaactaaactttcacatttataaaggcatatcctttgatttttagattttatgtttttttttcacctttggagttcattcttattaagcagattctagtccaaagccactgatttgatcttaaagggctagaaattgtccccagcctgaaagaatttaaggaggccacatcagaacataattaaccttaaatgattctgtttattctacagtagacccagctttaggccccttccttgtcctcactctgcacattcatggtccctaatctggaggtcattgctagttacgaaagtctctgaccttttctgaatctaaaatattctgggactgggtcatttcaatgtacatatcccttgccttttacagctctgaaaccgcaccctggcaagggccagaatctgctgggggtagttattggtttgctatttgtacaggcattctatgtatgaatcactttccttttttggtttttctagaagcagcaaatatataaataaaaagtatcaggggagcttaaaaatcaaaccaccctgcctttcatttgagaccttgatctccatttcccactctcttatctatagccccatcccttaagaatttccatggagctgagaacagataggaggtacagatgcctgaagcctgaagctttccctttcttagacccacagcaaataacaggctccatgaagacgcccaacaagctgagcgtgcggttttaccagaagcagcctagggcagagaggaactaagcctagagcagatgacggagacttgaccagaatgg

SEQ ID NO: 2949 - DNA, 4001 bp, Homo sapiens
ctactttcttactccaaatacattaccattggatattaggttttgaagacaaaatttgaggggaacacacacaattcagtccccagcacactcactttgggctgcatttccaaattctccctggctacaatgggcctgaattagtagcccctctgtgttaatacccacagctgggagcggctcatgagaagcgtggcctcacccagaacacaatgctggatccagagtgtagcggctcatgagaagcatggcctcacccagaacacaatgctggatccagagtgtagcggctggggtaatcagtcgttatgctccccacaggaaatctgaatggcacattctcatggctgccacaggctgacaacatggagcacctatgcctattgttacattagcagggcaggtggaattgctggtctcagctgtcacttgccttaataaactgcataattccatcagggactccagtcttgctgagcttcctgaggtactcggtgatgtcactggtttgcagcccaacgctgacagctgcatacaaggagtaggcagttagtttgtactcatgcacatgggttggtcggcacactggctctgcaatagccaccaagaagtcttgggcatatttgtaaactggagagaaggcttccaagaagatatggccatcgggagcctgagagataccaaatggacaaaacagacaaggaaacatgagttgcagagactactgggctcttgcccatatcattatcaagaaagaataagctgcccaacaccacagatattcttgcaagcactccttcagacaactgtggggcctgttacattaatcagatacagaagagtaaagaaaaatagaagaaagtgtttccaaagtcaacagctgtttcctactattctgcacagagaaagcccatcttactggctatcctcaagttaccttttggctagatttcaactaaatgtataacattaattatttaaagtagagcaaaagcttgctaccgaacatgtcttccattatttgaggaaacaaactgttacatgataaatgctatttattcggcagataaaaggattcactacatggggtagggctggggaaggagtgagagtaaaccgaggggttagagctgttggaagcccaggtccggccgccacacgtgtgcgcaactgctcgctgttgccttgggctgttccaacgtgtgtggatgaaaattctctcccggccagttctaggggcagtatcctgaatgtcagttttgactctgaggatgcccaagatttagctgccgctccgcacactcctgggccctgcccaagctaagggcatgcttaccacccagaggggcctggaggtgtggtcgtccttcagcggcatttgcagcctgtagtccttggctccatattcatccactttggtgcctgactcatccacctgcttccccgccgccgagggaaccgcttcctgagggtcgttccccggggcgtcctcttcatcatcctcttcatcctcatagtgccgcttcctggatttcttcttgtctgcaagataccaacacagaagtaagcccagcaggagccttcagggttccctccgcaccgcttggcagcatttcacctgcgccgccgcaaactcctagctaagagccacctgcatcccgcaggcgttgcgcccctcacccgtctcccctaggccgagttcgctgggctgcgcccaggtccagcatctctcccgcccaaaggcctgtcccaacggggtgcgcgcgggagggccagcagggtcggccggcgcagaggcccggagcagctccgaggcagagcggggggcagggccggcaagggcagtcgtggctgagcgtgcccgcgcaacgtctcaccgcggtccgctcggtctcttttgcccatggcagctacagcagcagagagaagatgaccccgctcccacaggcccgccgcggcatccgctctggggggacttccggctcaatccggaagctccctgttgtccacacaggatgtcccgcctctaggcgccgtgatgtgggtggctggaagagcggagagccagcgaccgccgatctgttagctcgtgcgacccagcggcgggggtcctccactgttcatttctctacaactgaaggaaaatactgtgtgttgagcacctgtgtagtgcgcgaattaaaggcctcatccttctggaacttaaattttaatgaagccatgtgggcaataaatgtgtgtgtgagagagagagagagagaatgtgacctgagtccatgggtaaggaagaattcttttttttaattaaaaaaaatttggctgagcacggtggctcacgcctgtaattccagcactttgggaggctgaggtgggtggatcacttgaggtcaggagttcgaggccagcctggccaacatggtgaaaccccatctctgcgaaaaatacaaaaaaaagtagccaggcatggtggcacacgcctgtagtctaagctacttgggaggctgagatgggagaatctcttgaacccagaaggtaaaggctgcactgagctgagattgcaccactgcactacagcctgggcgacaggccgagagttcgtctcaaaaaaaatttttttcttttttttttttttttttttgagacggagtctcgccctgtcgcccaggctggaatgcagtggcgcgatttcagctcactgcaagctccgcctcccgggttcatgccattctcatgtctcagcctaaataaagcagattaccctcaataatgcgggtgggcctcatccaaatcagttgaaggccttaagagcaaagacaggtttctcaaggaaaaaggaattctgcctccagactgcaacacagaaagttctgactgagtttccagcctttggactcaaaactacaacatcaactcgtacctgaattcccaacttgccaacccccacaattgcatgagccaattctttaaaatcaatcaatcaatctcgcttgctcagtgggcctcttggttctgtttctctggagaacgtaacacagatttttggtacggggaatagggtactgctgtaacaaatacctaacaatggggaagtggttttcaaattgggtaatcggtagaggctgaaagaattttgaggcgcatgatagaaaagcctctattgtcttgaagagccttggtagaagtatgggcattaaaggtgattctggtgacggctcagatggaaaggagaaatatgttattgaaactggaggcaagtggtagagagcttgcctgaattgtattctgttgggtggaaagtagaacttataagtgataagcttggacattttgctgaggaaatttctacatgatggttcaaagtgaggcctgggccaggcgcggtggctcacgcctgtaatcccagcactttgggaggccgaggcaggggatcataaggtcaggagttcaataccagcctggccaatatggtgaatccccgtctctactaaaaatacaaaaattagctgggcgtggtgtcgcgcgcctgtagtctcagctgctcaggaggctgaggcaggaggatctcttgaactcaggaggcagaagttgcagtgagcagagatcacgccactgcactccagcctgggcaacagagcaagactccgtctcaaaaaaaaaaaaaaaaaaaactgaggcctgctttctccttattgcttatagtgaaatgtgagaagagatacactgaaggtggaattattcaacaaaaaggaaccagaacttgaagatttggatcattcttatactcacattgtaaaaaaaaaaaaaaaaaaaaaaaaaaaaaaaaaaaagagagagagaaagtatgctctggagaaacactaaggatgtggacaaccatttatttgcaagagattaggtgtgtggcttatagacccaatcacccatctccacagaaacctggacagttttgactagggtacatagatgggatgaaatgaaggaaggctgttggactcccagga

SEQ ID NO: 2950 - DNA, 4001 bp, Homo sapiens
atatgccttttctgatgccagtaatgccttctcttgttttaacagatgaattctatacttgcctcttccttcaggtttccaagattctatttgtgtctcttcctctaaaaatcctcctcttattctttgatcctcctgcttcttttttcagttagtcccttaatcctccctgttcccagaaaacttaataaataacttttgttactagcatacatttcatcttattgtaattatttatatatatgcatgttatcaagggcagagacatgtctctcttatttatttctatatccccagcaactagcatggtgcccagtgtatagaaagctttccttaaagcagtccttgaagagttttataccaaaacttctcttactcctgcctcagctttaccaaaatactgcatgtcccttccagaatcttctttcacctctaacctggtgaaagtagtaagagagatgagtagccaggtaagcatctgtgtgtggacaaggatctttttattaatttttaaaaatgtttattttttattgatatataatattgtatacattttgggggtacatgtttgatacttgtatacaatgtgtaatgatcaaatcaaggcaattggattatccatcatcttaaacacttatcttttctttgtgctgggaatattacaatttttctcttctggctaaagtatacaataaactactgttaactataacttccctactgtactactgaatactagaatttattccttccatctaactgtatttttgtgccccttaatggacttctctttatctcccttcttcccgtccagcttctggtaaccaccattctatgttctgcctccatgagatctacttttttagttctcacagtagtgattttaaatcttcagtctttagttatttcaatattttaaagtttcttcaattatatgcacaagtaaaacttacttctgccattaactctagtggggcctgagtattctttttagggttactatcttcatcatcatcttcatcattggtatcatcttcaccatcatcctctgctgattctgacaatttatcatcaatatcctgaaggcaatattcattatttttctcctgctttacaatgactgcatctttgctcacttcacctaaaagagaatatacctaatttaatcaaaagagatcgaaaagttcgcaaattaaattttgccagatcctattactattcattaaactgatatattaataaaagtaacataattatcataacaaacttatattcaaaacactacatattttaactcatttaaatctctcaacatcaaggcggtatgtactatttttattcccatttataggtgaggaaactgagggacacagaggttaaatatactggccaacttcacacagctaattaagtggtagatctgtgagtcggtctggccctagattccatattcttaactatatcttgtactatttttactaatacacaataaaataaatatacttctattaaagtaagtttaaatcatctcctggggaaatactactgagtgagcctgctggctccttcagctttgtggaagtctttcacagtttgaaattgaacttgtgttacatccaccccttcttgtatgattttgagtgcctgggaagtctctgagatgccttctttgatgggaaggtagccatgagctactctaaatagtgtatatacattgtgttagaaagaagaaaatgaggaaatctaggagagcttcatagaagacaatgttaagaaaacacagaacaacaacaacaaaaaaaggtaaaactaatgactctaaaacaaactcctgactctaaacccaaaatgctaccctgaaaaggaatatcaagttcttccaagagtatgacggttgtgttattcaggccatctgtctacctgtttctggttcatttacagtctccatcagctcacaaccaccctgactgtccagtgtgcacctagcctgtagactgactcaatgcactgatgtcaccaagggaggtcataatgaggaattagggacattttgtgatgtcacaggaactgtctcatttacttcacaaacagttagcagcatgagagaagtttcctgatccctagatctaaagcagtcctctctccaggagctgtttatttacattatagcacctaccacaaactgcaattaccttacttatgtgtttgtgtttttatttttatttatttatttttttggagacagggtctcactctgtcgcccaggctggagttcagtgatgtgatctcggctcactgcatcctctgctccccaggttcaagcgagtcttgtgccttagcctcctgagtagctggactacaggcgcacgccaccacacccagctaatttttatatttttagtagagatggggtttcaccatgttggctaggctggtcttgaactcctggcctcaagtgatccacccacctaaaagtgctaagtttacagtgtttgtgtttttaattgttttttcttttagactagtcaagtgcagtagtgagaagggtagaaagagtaaaaccaggagttaattctgtagctatgaacaatcaacttggataactatctttgcatcagcctatttttttattttttattttatttttatttatttttatttttaattttcaaaaatttttaaacttctttttgagacagggtcttgctctgtcacccacccagtgcagggacatgatcatagttcactgtagcctttaactcctgggttcaagcaatcctcctgcttcagccttcctagtagctaggactacaagtatatactagcgtgcttggcaatttttcttttttaattttaatttttttcaaagatggggtcttgctatattgcccagtctggtctcaaactctagggctcgacctgggctgatcctcttgccttggtctcccaaagtgctgagagttacaggcatgagccactatagctggcctgttttttatttttaatagtcagctgtctgacttctactagaatgtaaactttataaggacaagggctttccctattttgccaacttttgtatccatagcctctaaaccagtgcctggcactctggctttcactctggttattaaatgaatggaacgtgttaatgctttcataggtattttaattcattccaggacttaagactctgtaattaccatcttatgtaatgcatatccatggatctcatacctggctgaatataagaatcacctacaacatgactttggagaactactgattctcatgacccgccccagatctacagagttgtcagttcccaaaggtcgcagaaaaggagggttcaattagaagccatagttagttaattcaatgaaacaaatgttattacctgtgctttcttttaagcaggaagatgacaataggtcagactgtagatttgttaagatatctttactttcgatactccttgaagatactctattttcagtagtctgtaaagagactttatttgcaatattcttagaagggacttccttcctatatgttagacagtgaaaaaatattttcttaggtcataattctgtttaatgctttaaacacagacactacatttaatgtaaacatacaatataatatgtcaacaataaactaaatagctaaaatgtagtatcttctttgtggaaaagcattacaaattattttacaatgattaaaattctattgctgactggcatttgttatcgtataacaattcttagactcttttcagagttctttaacacagagcatttaagtaatcagttatataaatgtctctggtacatcacagtgatatgatggaataaaactaagaaaattagccttgagtttttaagtttataaatcgatttttgccattgctaaatgctatgcttatgcagagtccaacactaatattagcccttggacataatataaaatagcctttttcattaagtagcttaattaaaaat

SEQ ID NO: 2951 - DNA, 4001 bp, Homo sapiens
atagcttcaaatgtgtatacaaatggtgtcaaggatcatccatcacttacattcattttttaaactgactaaatataaattttatatatttcctttacagtgtaatatagtgctaggattccagactctggagtcaggttgtctatgtttaaatcccagtaaactgtgtgaccttgagcaaattccttaacctctctgtgattcagttcctcaactgtaaagtgtggataaaaacaccacctaccttatagagttaaattgcaaaggttaaaataattagctaccaataaataataatagtagcactcatctcctgccagaactgcagttactataactcctcctcctatactattgttaatatttacagctcagggaggccagtcctgaaggtgaactgtcacaaatgaagccagttctaaacgccgaaactggatggggcaaagaagggagaaaacactgaggatgtggctcaaccggtgagcgtaggtagaaagctctggaattctggagtgggtgcaatgaaatacctagagatgctggaatttcagctctggaaaactcttaacacgtaaagagaaatgttattgttattattgttctccagagattacaaaaaccaaaactatttcaattcacaaaaaacaaaataaaaattaaaaaataagttggatttggggatcattgtatttggtttttagaaaaatgaaacatattaaaagacatttccggtgtccttttcagatttttaaaaagcgacttccaggggttctcctagggtaaaaataagattcagccaagacacctatgccaaacaataaattgatcattataccatgtgttactttaaatgccacaggggctcagtgtagagtagtttgagtagtcaaaagaacaatatcaacattttggaagtttcaagtcaatttcatcatctcataagatgagaataaggcccgggaatataaatgatttgtccaaattccatcgaaatttgtatggctagcaagttatatctagctagtagtgatgtcttaactaattttccaaaaataagtaaaagaattccgggcaagggcaaggactgagggaagggggtcgggaagccctgggatgggctgggccatcttcgttatttgcggggaaggagttggtgcgtgtgcaccggccggtcaaagaatggtagtgtagacaagcctgtcagaatcgcccagttatctccacacccgtgtagacacgaacggcgcttcctcacctcttccgaccactgcgggaggagggtgccgcaagccaggcgcaccccagtggcgcgcatcctcccttcccggcggcccctggcagccacggggcccggggcccagagccagaaccaggtgcggtagagcggtccgcagactcgggcgcccggtctgggggtggtctgctgtgggggctgggtcagactgcacaccgggctagggagagggagaccggtcgttgcctcggagtgtcttaccagctggcggccctcttcagcagaccatccgaagggcacacaccgagagccagcccggctagctgctcgcgcggagctgggggctccgagtcgggaacgcagcgtcgccgtggagactgcacggcgcgtggaggaagctcgggcagcagccgagggtgggggctgggggaattgggcgacggcgggggaggtggcgggggcgggggcgggggcaggggcagcccggggaaccacggagaggcagggtggaggcgggcccaggccgtagggcggtggagggcgcgggacggagcgggcgcggcgaggagggcccggggcggggctgggaggcgggtccgggggggcggggcggggcgggcggccgagctgagggacagccccgcggttgtgggtgtcccgcggcgccggaaactgggcgcacacaccctcggattgacgtgcgcacgcgcaccggttaccttcaggagcgccgaagaaggaaagaaggttggaatgtcggtgtccatacctgattctaagcgagggagagggaagggggcggggtggcctcagagttttaaacttggggagtaaaaagaagtcttgagttgggagagatgggtgtccctggtagtggatgaacaagtgtcccctgcaggacttagtcccccaacctgaggtcgccccaagaagattatgggtctccggggggagtccctggacgccagttttcccagaagtcagattcaagtgattagaaccagagacccggctctcccccagctagagcagcccaggttccctctagcgccagagctgctgctctgccacgccggccaatgggaggtattagtgtttaagtaactgcttgggtcacagtagggggtggggagcttttctgttacagaattctaaaggtccctcaagcttggcttctaggaaggaattggttatttttctccacttgggatgccggaagtaactagaatcaatttgttgctaggcaacgtgttttgaaggacgcgtgtttgttggactcaaatctggattcgactttcacatggtagacacataatatcaggtgtactccctatttaatctctggagttgctacccgctgaggatatgtaccttggtagatggttgtgaagctaaaatgacataaaaatgtataaagctctgacatgtggaagatgcttaataaataacaaattttattattattataataaaaatagaaccagctggaccatttccggaaccaagagaatacagagacgtggccattttttaattctcttagtcatctgttcacattcattctttaaatctcctgtgagcccttgatgataggtaggaggcaaaggaaaaatgccagaatggaagtttttgaaaagaactcaatggagtcattgacaaatacatccctagtttgataaggacatagcaggccactgcctcctctattacaggaacacccttacatagaaaatgtcttgtttgattgaggacttttcatttaaacaaggccaagggtatgtcttgatcaacacatttgaaaacattagttttgttgaatttgcttagtactgatgaatggataatggctgactggttattcccattgatccactacaaggaagtgtaagaaaacctcaaatttgattaaactttctttctctacctattcttccccctgacagaaaagctcaagttcatttgtaggatgcagtgtttagtttacttactgctcctgaagggagcaaaaatggattaatgggctgggcacggtggctcacacttgtaatcccagcacttttttttttgagacggagtctccctctgtcccccaggctggagtgcagtggcgcgatcacggctcactgcaagttccgcctcccgggttcacgccattgtcctgcctcagcctcccgagtagctggaactacaggcgcccgccaccatgcctggctaatttttttgtatttttagtagagacgaggtttcaccgtgttagccaggatggtttcgatctcctgacctcgtgatccgcccgcctcggactcccaaagtgctgggattacaggcgtgagccaccgcacctggcaatcccagcactttgggaggccgaggtgtgcggatcgcttgagctcaggtgtttcagaccagcttgggcaacatggcgaaacgctgtctccacaaaaaaatataaaaaattaactgggcatagtggcacgggtgcggtggggtaagggggggtcgaagctgtagtgagccttgattgtgccactgcattctagcctgggcgacaaagtgagaccctgtattaaaaaaaaaaaaagattcatgaccttggagaataaaagtatgttctccacatcgaggagtggttagagtgatctggcttccaccttgggcctcaaggtcttcaagtgccaagtggaaatacatgcactacctgcccctgtagctcagaacatggaatgagagaaaataaagcccctgacacagagcctcgcacatgaca

SEQ ID NO: 2952 - DNA, 4001 bp, Homo sapiens
cacaggtgccaagagtaaaaaattttaatgacataattcttcaaacatctgccatattcactccaagtgtgctctttggatacaacaacaggtattaaagtattctcttccaagcctgctaaagttatatctgattcataacaaaattttacataggtatttcaatgtatcaatattttgtggcattaatacaaagagaaatttgacgtcccagaaaaatatttacctagataaattcagaacatttggttcacacatgtaatcccagtattctgggaggctcaggcacgaggattgcttgagcccaggagttcgagaccagcctaggcaacatagtgagaccctgcctctagaaaaaaaaaaaaaaattagccaggagtggtgggatttccctatagtcccagctactgggaagctgaggagatctcttgagcccaggaggtcgaggctgcagccagtggtgaccgtaccactgcacttcagaatgggcaacagactgagaccctgtctcaaaaaacaaacaaaaacagaaaaacccaaaccaaaccaaaccaaaccaaaaaacccctaacacttgcaaatagaaagctatgtggtaataacatccattaacttgacacatcttgttttgacatcatagtgtcacttactgtttcaatgaaatggtaatgaaagaatataataaagtattgcaagttgaatgcttgaaggtaattggaataaaaagtttaaaaaaattttgctttttccgggacttcaatttgaagtaaatgagttaattactacatggtaagtgtcataagagtacaatatttattagcctgcagtaggtacacgtggacaggaagacttttcagcggtccactcccccaagagggaattttcatttccgcgaggttacaaatgttcttcactacaggaaaactcaacatagaagctcatgttctggggactcaaataacagtcgtaatacatgaaaactgtaaaggatattctgcataaagggtcgttaacatctcacaggccaaatagccctctcagaaacaactaggaaaggaaaaagttcccttggagctgtgcgtttgcgtatgtccgtgtgtgtatacaactgagggagaacgaatacgagagagggaactcgagtctgaagtactgtggtgtgggcagggtgacatgtaatactgaaggaaagaagtctgctggtgaagtaagagccacagttaattttccgaaaggaagatgagtaagtgcacctgacgttattctacgaaagctgcttctgcagggtgggaatgttgggaagcaaggtctagtgcgacagaattgaaaaggtggagagcaggtgattgctggatccctaatgctcagcaagggggacgcatccacataacgtgagaacgaacgaatgaatgaacgctgcataaaagcagctttggcttggggaaggtaagagtctgcagagaaggtcttggggagaaaaagcaaagaaaaccgagggaagaggccgaacccttagtgtcaggaggaggggtggctgcggggttagtgagggcactgaccagagagaactcggtgccgggccagttgactcggaaagggatgtcatcgctgagttgaggaagggctcggccgccgccggacgcctccaggaggccgcagaggaccagtaacaccggcccgcccgggaccagactccgtacgccgccgcctccttcctccatcctccgccgccgctttctccagccaccgccacaacctcctctgctccaggaggagaggaggaggaggaggaggtggaggaggaggcggcgggactataaagcgcccgggtatcaccggcccaaccgccgccacgtctccttccggagagcccggcaacgccgcctccgcccccttgagcctcctgtcaccgtttccggggcagacgacatatcaacatccgggggtcgcggagccgtccgcctacgggggccgggacgtcgcctgcgcgtctctcgttttcggacggctgcagcatcgcggtggggatcgaaagcgggggcttctgggacgcagctctggagacgcggcctcggaccagccatttcggtgtagaagtggcagcacggcaggtcggtgagtctcggaggcggcagccgcttcctgaagccattcccgctgctctccagtgggcaggcagaggtttgacccacacggagtgatagcgggaagaagacagtgtgaaccgtgcgggtgcgggtccttagatgagaaaattcgaagtagcgatgagatgtgagaaatggcggtgttcctgactgacctgccttcttgcagcttttcttctttttctccgcatttggcatttgtacacttcatttttcccgcttgaggcttatctccatctcttctgctgtggaccgtggccatctcgttacttaacagcttctgactaacgcagggcagtttgttcagcgactgcaactctgtgttaggggaaacctggggtgaggtagcccgccatctccccgtaggtgaataccgcaagcctccgaatttggcgtggtgggcgactctcgtggaatgggcagctagacatcacaaccctacatttttaccctccatctctagattgaagtgttggggtgttgttttatcaaggaagctggtaaggttccttatgtgaggtttagcgccagatgaatgtgtgtgtttatgaactaagtcacgtctgactgcatccccaaattagacaaaaagttttgtttttccctccccctctttagaaaaaatgccattgtctgttttgatctccaatataatggacatagagtgttggctttagagaaattaccattccctaaagctcgacagtcttgctagatctgttaaagactggtcgcccccacttcctcagatttgaaccaaatcaaaaagcaggaaggacagtcccatattctatcttaaaaatttttttttaacatcaggaatccatagtatcaaagaagataactttcttcagaattgttattcgctaattatattcagcacttcttattaatgcttaatgtgatccagactcctgggatttttgttgttgttgtttgttttgagacaaagtctcgctctgtcacccaggctggagtgcagaggcataatcttggctcactgcaacctccgcctctggagttcaagggattctcctttttctcagccttccgagtagttgggattacaggcgcgcgccgctacaccctaatttttgtatttttagtagaggcagggtttcaccacgttggccaggctggtctcgaactcctgacctcgggtgatccgccctcctcggccttccaaagtgctgggattacaggcctgagccactgtgcctggcccccctgggcttggtaaaatgccaaataaatgggtttctgtctttggtcacacagtctaggcagggagattgtacaaacaaataattgcaaactattatagtagtaatagtcaattttttttttttttagcatttattctgtgctaagcactagtcttaagtcatgaaggaaaagagatgtatttgacggaataaaaatgaaaactgtctgtgaggtcctgttttagcatttagggctatagtgattgaatctgtgttcaatagagctgatgttcaagtaagaggggaacttaaataagtaaaataatttctagtattggtaagtgctgcaaagaaactaaggttatgtgaaagacaatacctgtaggatgtgttgcttttagtacgtaagtcagaggagacttctgtgaggaagtgacatttgaattgtgacttgaatgatgaaaagaagggagccagacaaatttctaggcagaggccctgaggcaggaatgagcttgatgtgttggagtgatagaaagaaggccagtgtggctggagtgtaagaggaaagtggtagaagaagtttgagaagcagaaagaggccagggagacagctctgtaggcaggagagtggacaggacccgatgta

SEQ ID NO: 2953 - DNA, 4001 bp, Homo sapiens
tctgtcatgatgtgcggttgaatccgatctggagagagagctttagggaaactgagtgagtagatccttgataagatacctgctcttgccttcaagtcctatagttccaactcctactctaagagcacaaattattcactttagtacataataacaaggttcttttcctaaaagtatccagacagagattagagcaaaagcaagaggatttgtcagatctgccaggagccatgagcaagaatccagccaatcaccaccttctttgttgcttgccagttccctggcagagttaaaggcatccttttgatttacataaacaaacaatctgaagcaatcaggcttttgtgttggcatgtagagagggactttcagcttgtcagtccccctctgggaacagagatttttgtcccttttcataatggcccattgtaattttccctgtaacaggagccacaattgtcccacagctttaatccagagagaatgaccaccttgaggcatattagttctgtgtaaccagcttaacatttccaaacagattttgttcaagtaaaacctcagctattttgtaaaggacaatggcattgtttcttatttattaaaaaataaaacagcttatggaaaaaacctataaacaggacaactttactgtaaatggttctggctgcagatttgatggtgtgcttccagcaggctggagaagggacctatgaaataaacaaattctaccaacttgctaataccaaaagttttataatttcagagtaatttacttagtctatagcttcttatcctctagtttatgtctgctgaagcccagccgatcctttaaaaccctaataaaattatcgccatgaaggtttctcctcccccaatcagaattacaatcctttctattccatactgatattacacaatgctggtaaaatgtagaggaccaatgcaatctgcccttgggagaaacaggtgattatgttaaatgactgctactgaccaccccttcctttttaaatctttttcttttttggatttctcatagtacaaaatggttccagagcctttgcccacacagctccttctatgtgaaatgcccttctcttcctcaagcccaagccctgggctgaccagcttccctaagttctgtttttaagcttaaatatcatctccttaactacactatctctaaccgccaggattaggacaggactctgttacacattgtctttgcccttcagagtattcttcatggttgtaactaaataagcaactgcacaattatctctgtaatgtctgtttcaccaactgcaaactaagtttcatctggcgaggggccagtttaacttgcttacatgtgtccccagcacttagcatctggcttggaatagtagcacgcaataaaaataattatatatatacacatatatacacaaataattatatatatacacatacataacaagaattatattatatatataatatatacaataaattttatccccaagagaataaatttcagatcatttttaaagagaagaagaataggtgttgaagagttgtagtaagcatatcacctttaaaagtgtgtctagggctgagcccattcaggtctatatcagggacaacacctcactcttgtataatcccctctcccttgtccttggaagacatctctaatagatcctagatctccctcccgcgtcatcaccagctgttctctagtcagcactctaattctatgtttgtttgattgtttaactgttttaacaaacgctcatatcacacttattatgtgcaagctactgtcctaattgactcataaatagtaatacacttactcttcataacagtcttctgaggtaggtgctgttgttatctccattttatagactagaaaaatgaagtgcagagagattaaggagttcagctagtaaggtcacagagccagcaagcctactgatgagagtttgcagcacagatgaagctaagcgccatccctggcctgtgtgcagatgtttccttggaccagagatcccacaggggttcggcattagcaccttggcagtagagacagttgtggccaggagagggcagcagagagcctaaggcagtctcaagacctgccccagagacaccctgcagctgctgaggatgatgttctgggagcgtcctcccaagaaattcaactacaagcttactgttgagaagatattgagtggaatcatatgggagaatgcagaaactaagaccaagcttaggaacaaatggggacatactagattgtgagatccttagggcaggaagtggcactaattcaaccaaatgccctgcgataaacacaggagtacagaaatacattagctccaaaggtcatgcctccaatcactccgttccctcggggctgccaagtacctcaatccagggacatagcaaagttgagacagttcagattcattgtctctcctactcctagatttctattaccccatggcaacgggcacctcatacccatagcctagcttttatgggaattcgtgtctttatttttggattgccttctttctaaaaccatgctgtgacattttttatggccttaaaattatttcagttttggaaagatagagaaatgatccagagttctgtcatccttggctaaccatgtgtttacatttatttaaaaacatgcttttatgctgccctagggaataatggaggtcgggtaaatggtttgtaacgtgtattattttttcctacaagtagacggcaacatgagacacatttagcaacaagatgagtctatccaactactagataaaacataggctattttgttcataaagaggtaagttgtctcccattatttgtaacaacctatgacttagaaagtatgttagaatttgcactatcatccttacttcaaatacaattgcagaatgttcactgtatgaaacatgactgttttattttatgtagtttactggatcttgtggctttttccttagaagaatttcgctcttgtcacctaggctggagtacagtggcacaatctcggctcactgcaacctctgcctcccaggttcaagagattctcctgcctcagcctcctgagtagctgggattacaggcatgcgccttgatgcctggctaatttttgtatttttagtagcggggaggatttctccatgttggtcaggctggtctcgaactcctggcctcaggtgatccacccgccttggcctcccaaagtgctgggattacaggcataaagcactacacctggcccctagttattattcttaatgctaaaggacattgtacaaatgtaaccattattaaatctaaagccaaaaaaaaggtaatgaaaagattttcatataagaatataaagaatcaaaataaaattatgtaaatattcactttccatttgtccaataccaaatgcttaatgttaaggctatcttaggtccagaatcaggatttggggaaaagtcataaaatcttgatctttaatcttaatcatatgtgaaaagccaagccacaagctaatgttatggctaagagatggtcacagagcactgaataaaaacaagaaatacatttaaaagaaaaatgttgatcctggcagcttgaagccaatcttaaacaaacattgacttacatagttgggacaggggtattgtttcaattagggttggaagggaaaggcagaaccactaagagatggagcaatccatctatcaatcgatcaattgattgatcaatcagaagggatttgactttacacaatggtgggtgccagtgaagctgcctctatatgtctgctgttgcatttgatgctggagcctgaagtctgcagggcaggaagttgggaagggatgatggatagaaacttaaagggggagagcaagaacaaactgggttcccaggtataagctggacacacgggggcaaactgaaacccgcgtcggctctcagtgcctctgaccttagcggttggaatg

SEQ ID NO: 2954 - DNA, 4001 bp, Homo sapiens
ttgtatttacattagaggcctataaagtaaatcatttcgtgagattactttaaactgtatgttggccgggcacagtggctcacgcctgtaaccccagcactttgggaggccaaggcaggtggatcaactgaggtcaggagttcaagaccagcctggccaacatggtgaaactccgtctctactaaaaatacacacacacacacacacacacacacaaaatagctgggcgtggtgtcaggtgcctgtaatcccagttactcaggaagctgaggcaggagaatcgcttgaaccctggagacagaggttgcagtctgccgagattgcaccattgcactccagcctgggcaacaagagtgacactccgtctcaaaaaaaaaaaaaaaagctgtatgttaattgtagacttttaggaaagacccgtttttgaaacatttacctttcacaaggtgcacacacagatttggacacaccaaatcaaaaagtagggttgactcagtggactaacttaagagatagacatcacgttggtatgccaatcagctatgccattccatgcagcctcagccttgaacagtctggaatgctttataaggtggaacccacagataagttaagactctcttatctgcctacagcagctttgaaaatttgaagtcattgcctggattgctttgtcaaccccacgctcatgcaacatttcatggaaagactgtcatccatactcagtcaaacaatttctgtgtacaaaactgtagttcttgttaccttctctgaatgtcatttcatcagcactagtttcttggagagaaagatctgtgatagccttatgaacaataaagagtttctcttctgggttttctaggaaaaaaatataaaatcagtattttaacatttaaaatatttattgttcaacagttaataagttatcaatttaaactctaggtagaagtctttaattttaaatctgatcattaaaatttactatttcactctttggattcattctttatcaattcaatttatttacttaatgatcactttattgattgtaatctctcctttaatatttatataagatatatatataagatatagaaccataaattcagagaacttcagttatatttagaaggaaattttaacattttgaattctctttgttcaaataatatggggctgtccataatcataataaatacagtagttaacatttagccaatacttaccctagacttgtagttattattattattccgccttcttctagtgaaaaaaactcaggcttcgggagacagaaagttgtctggggtcacagctgtcaaatagaccagcctggatttcaccagaggcagaggtttagtccttatactatgcgtagtagaataaagggctacatttttggggtgtccagctcatttcgataatagtttatcaaaaaaatccagggtaaatttataagtcaaaacaagaaaattaaggagaagggaaacactttaccttttagcattttgtcctccatggatgagttgagcagcatgttcccttgtaattttcttctttcctcctgacttcctttggtgagtgcaccttccagactgggttctaccctgtagtgtggcagggggctgtccacatcagtcaattcctcactgattttagtgattgtttgttgaccgttttcaggtggtttatccccattacactcagcctgggtaaatgtagccggaacatctgtcatgatgtgcggttgaatccgatctggagagagagctttagggaaactgagtgagtagatccttgataagatacctgctcttgccttcaagtcctatagttccaactcctactctaagagcacaaattattcactttagtacataataacaaggttcttttcctaaaagtatccagacagagattagagcaaaagcaagaggatttgtcagatctgccaggagccatgagcaagaatccagccaatcaccaccttctttgttgcttgccagttccctggcagagttaaaggcatccttttgatttacataaacaaacaatctgaagcaatcaggcttttgtgttggcatgtagagagggactttcagcttgtcagtccccctctgggaacagagatttttgtcccttttcataatggcccattgtaattttccctgtaacaggagccacaattgtcccacagctttaatccagagagaatgaccaccttgaggcatattagttctgtgtaaccagcttaacatttccaaacagattttgttcaagtaaaacctcagctattttgtaaaggacaatggcattgtttcttatttattaaaaaataaaacagcttatggaaaaaacctataaacaggacaactttactgtaaatggttctggctgcagatttgatggtgtgcttccagcaggctggagaagggacctatgaaataaacaaattctaccaacttgctaataccaaaagttttataatttcagagtaatttacttagtctatagcttcttatcctctagtttatgtctgctgaagcccagccgatcctttaaaaccctaataaaattatcgccatgaaggtttctcctcccccaatcagaattacaatcctttctattccatactgatattacacaatgctggtaaaatgtagaggaccaatgcaatctgcccttgggagaaacaggtgattatgttaaatgactgctactgaccaccccttcctttttaaatctttttcttttttggatttctcatagtacaaaatggttccagagcctttgcccacacagctccttctatgtgaaatgcccttctcttcctcaagcccaagccctgggctgaccagcttccctaagttctgtttttaagcttaaatatcatctccttaactacactatctctaaccgccaggattaggacaggactctgttacacattgtctttgcccttcagagtattcttcatggttgtaactaaataagcaactgcacaattatctctgtaatgtctgtttcaccaactgcaaactaagtttcatctggcgaggggccagtttaacttgcttacatgtgtccccagcacttagcatctggcttggaatagtagcacgcaataaaaataattatatatatacacatatatacacaaataattatatatatacacatacataacaagaattatattatatatataatatatacaataaattttatccccaagagaataaatttcagatcatttttaaagagaagaagaataggtgttgaagagttgtagtaagcatatcacctttaaaagtgtgtctagggctgagcccattcaggtctatatcagggacaacacctcactcttgtataatcccctctcccttgtccttggaagacatctctaatagatcctagatctccctcccgcgtcatcaccagctgttctctagtcagcactctaattctatgtttgtttgattgtttaactgttttaacaaacgctcatatcacacttattatgtgcaagctactgtcctaattgactcataaatagtaatacacttactcttcataacagtcttctgaggtaggtgctgttgttatctccattttatagactagaaaaatgaagtgcagagagattaaggagttcagctagtaaggtcacagagccagcaagcctactgatgagagtttgcagcacagatgaagctaagcgccatccctggcctgtgtgcagatgtttccttggaccagagatcccacaggggttcggcattagcaccttggcagtagagacagttgtggccaggagagggcagcagagagcctaaggcagtctcaagacctgccccagagacaccctgcagctgctgaggatgatgttctgggagcgtcctcccaagaaattcaactacaagcttactgttgagaagatattgagtggaatcatatgggagaatgcagaaactaagaccaagcttaggaacaaatgggga

SEQ ID NO: 2955 - DNA, 4001 bp, Homo sapiens
gtgggtagaggcctcattgcccttggctcctgccagctcacccccacagtgacagcatgcccgcctgcaggattcacctcaaaggccaccagcctgtcctcttggccctccatggtgcagcctccccttggccagctcgccccaggctgcccccccaggcgggactttgggctccttacctgccatgcgcggctgtcaggagcttgaggcaggtcaggtccccactgacggcagcgtggtgcagcggccgggctccctcccgggtctctagcgtggccgagtggccctcgtggagcagccactccaccagcactgggtgtccaaaacgggcggccaggtgcagcggggagacgcccgaggcatcttggtcctaccaagccccgggtaggtcagtgagtggggggtaggccgtgaggtcagagccagctgccggaggtgggccctgggcgagggctcacactgcctgcaacccagtgaaggggcttccagctccttcctccttccctccgtttctgcctgcaacatggagggaggtgctccctgctgggactgaggtgagaggagggccaggactcaggtccaggtcttgggaggccacctctggcaaccctgccctctcctgggcccgtccccagtgtggagaaggccctttcccacgcagtcgggtgcccgcagacacctgcccactctgctcatggtcagaaaggcttcccaggacacctacctctggctggtcccctgccccagtgccctcccgctggccacagggtcccggggccagggagcgttcctaccacaggtgtcaggggtccagcagacctgggccttctccaagggccctgtcagaatggatccccaggcaggcacagctcccgcctgctgcccttgggtttggcggaagggccgacaggaacaggatgctgggccgggactctcaggtgctctggcgagccaggtgctggggaaccttcccgctccgcagtctaagcaggccccaccggcccccacctcaactctgacctctgggcggcggcgttctaaggccggtcagtcctgctcaccctcagccctgaaagctccacagggctgagcgacagctctaagggcctcgcctgcacaaaggggactgggcaggcaggataggggaggggggcccagtagaaacgatccggacaagacgatcaccatcagcagccctaactcccgtcccccagggctaggctcccagctctcaagcccaagttcccacagtgcttctgtaaggatccctttctagaccctttgggaggcaggccctgtggaccaggcctgatcagagacaggggtcctgatatctggcaagacccccactggcaacgcccagcttcctggcagggaaggtgataagaaaatttaggaggtgttcttggctctcaagcctttgtgctctgagaggcgtggggcagagacggtaaccactgactgagtccccaagagaaacaaagggcccagggccatggagcccggggtggccagtactctgatcctccgtggctcacacctccctggttccaccccagccagcttcgtggagccaggctgccccatccccgctcacctgcagaccgcagcccccctcgcggaccagccagcacagctcggccaggctgcccgtggcagcggcgtcatgcgctggggtggccccgttgtgggcccgctggttgccgggcagctgggcccgctgcaccaagaacttgacgcagtccaggtggccagcccgggtggcgtggtgaaccaggccggcccccagagcatcggtgatgcccgggcccagggcgccagcctccagcagccgctccaacgtcgccacatccccatccttggcggccacgagtgcccgctgcttctccatcctctggcccgggctctcagtggcgactcatgcacaggctggggcttcctgtttcagacgtggatgaagctgccggctctggttacccgataagctgccacagggcagatgggaggcggtggggtggggtcgggtggggggacaggccttgaggacctgcccaagccactcccacagtgtgagggtgccaggtgcctggagctgggaggatggagtacagggcacagggaaaggcccacaccaggctaggtcagggctgggtatggccagcagagaaaggaggctggccctgaggctgctcagatctgtccagatggcaggaacttcatctgtggagcgagggctgaggatacacgccactgagcttctcacaggagccccgagtggcctgggagacagttcccccaactctcacagaagggcagacccccagccgccaccacagtgtgtctgaagtaaagggtgcccagtaggtctacatgtttggctgtgttgacacccacagagctgagcgccccgcctctgggtcccggccctcggccctggaggctcctaggaatctctggggacacagtggctccacggggcctgcaatgggctcaggaccctgacttgggtgtgtccaggcctctgaggcgagaaggtgtcagcccctgcctcggccccctctccaactacacggaccaagtctctgggctgcagccccaagggcccaagtacatttaacccctttccagattgttctggacaatccatagttcttctttagggaagtcaggaccaccacagcctcttcctggcagcaatgggaagctgcagatgggggacccattacatttgtaggggcttccggagacacagcctcaagctggatttctgggctaacgcatcatcacacaatggtgacctgggggctgctgcacccctggcttccccccgacaggctctgtcagatgactttgtgcccaagcgcagtgcccactagagaaaccacaggatccccaagtcgggcactgaaatcttttattcgttaatttagtttctggcaagtgtttcctcaaaatcatcaagtagttccttgaaccgtaaaaccacacattaaaaatgttattccactgaaaatgactcctatgcaaatatcgacatgtgatgtgtgtccaaatgccagagcattttgagaaaagaatcctctgcaaataaaattaaggtaaaagctgagtcagggatgatccgattcccaccccaggaatgacctggagctgcaccaactcagcgaggttggagctgaaaccctgagttaataatgatcaaaagggacaagacaggaaggcctggggaccgtggacagggaagtgcgcagccctgattgccagtgggcggaacagggtcaggctcggggaagcaggaggggtggtgggcggtgggcgctgagcagagcaggcctggccgaggctgggggccactgtgcactgaggccagaggagcagggtggtgggggcagctttggaaagggactaaaaagggcctgagaagagaccactctggaaaggtgcatgtagaggccatgatcaaaacaaaaaaatcaagtttcctacgttcatgatagcatttggctgacaatgagttataaatacttggattctatcttccagataaaaacaccttccaggaaagggcactcacaacaggcgtgcccagttcccagtggggagggtggataaagctaagtgtttccgcttcaccactggaggacggttctatgtgggcggtcccatgtgggcggtcccatgtgggcggtcccatgtgggcggtcctatgtgggcggtcctatgtgggcggtcccatgtgggcagtcctatgcggcgttggtgtcctgggccctgtgagctctgcaggggtccagggaaggaaactgggggtgcacactcgctggcactccaggacaaaatgcagagggggcatgagacagtcatcctggcacagccctcaggagggaactggagggacaaccctgtgccctgccacgggcttcccagaagcggggtggggaaggcggccccagtgctaggcctggtcctccagctgcgccacggcctgcttcaggtcctgc

SEQ ID NO: 2956 - DNA, 4001 bp, Homo sapiens
aataattaattacctaactgctttgtcaatggagaattctgatcccaaaagatatcattctgtccatctggatcattaggagaactgaaggaagatgacagtgagtccattttcagcgctctctttggtgtttcatacctttctatataaaatatgagtaaaataacaattgttgcattttaaagcattaccttacttcgtaagaccccaaggtcaaatagctgagactaacttttatagtccaagataattttttttcccagagataattacctgaaccgtaacagaaatgcttgtttcacataaaaatccacgcggcacttcgcaaacttcacattgtaaatagcaaacacttctagataatccagaagctttatgaatgcataatacaatactgtataacctaagtcattctatttattaccattgagtcttggaggctttggggaaccatctgtaatttataggtacattcaaaaatccaaagtaacccaacagaaacctaaatatgtttagccccctttcaccaactctatctaatctacattaattgccattcttcaaaaaccattagtgatccaatgcttgggaatttttgtctagaatcactttcaaatttttataaagatttttgttcattcccaaattgctttataggagtattattaaagacatgtaaggtggccgggcgcggtggctgtaatcccagcactttgggaggccgaggcgggtggatcacgaggtcaggaaatcgagaccatcctggctaacacggtgaaacccctgtctctaccaaaaatacaaaaaattagccgggcgaggtggcacacgcctgtagtcccagctacttgggaggctgaggcaggagaatcgcttgaacccgggaggcggaggttgcagtgagccgagattgtgctactgcactgcagcctgggcgacagggcgagattctttcccaaaagaaaaaagacacgtaaggtataaaaaaaaaaaaaaaaaaaaaagcactatttcaagaacatgctccagaataaaggcttttgtatgagtttcagttccaactaagatttactagaagtcttttaaaaagtaacacctaaaactaatcgagacgaaagagatccttagtatcttatttggagggatgttacacacaggaacttccggtttattcacaatgaggtgagacatctaccaggctttgagacaaactttaacttttcctatgaactcttctctaaagcaggtcacagggaaaaaaagggtttaaagagaaataacttctccgggcaaaaactgaggttagcgggcctatcagctgtttcttctcactccaccactgctgctgactggaggagcagcctggaaagcagccgccctcccgcaaacaggtaaaccacattacctattcctgtggcggaggcaaatggatggtcaaacctaacggggtagtgctgaagttcggggacaaaagcccatcggggagtggtataggattatttttggactctcgaggggtgaatcccagagacagaatacacgctccagactccacccccaccccagatttccctgttgcaagctgggatgtggggatgcggcgccgaagccaaggcaggccgcgctgccgacgtctcaccctcggggttacttttactgcacagggcggcggtcggaggctgctctcgctgccgcactggcccgggaggcccctctctagccccgcagggccacgaaccgcgggccgatctcagccgcctcctccctggctcgaccaccgagccgcattcctccgccgccactgttttgtgcggcgttttcttcgggctagggctgtcatcatgtttccttcgccgactcattgcctatggcccgcctccaccagccgcttcttctttcacattttgcaaagggatgagtagggcaacagcactacaaaccgcaccccgcaccaacggcagccgccattttggtcggtggggcgcgcgcaagaggcggccgctgattggctgggtccgggagaggggcggaactgttaaggtgccgagggcgcgcgcacttccgcagccgggacaggagcctgctctggaggagtgtctaggctcaaaatcctccagactggtgggggttgttcgggtagtagtcaggtccgcgtaaactgagagtgggagcttgtgagttggaaagattgaatacactagcaactttttattgaatttacaacgaaaattgcacgttagtcaaattcagattattgagagtcttcgaatttctcaagaagaggaaatacagttaatttttcatagatgctatgtgcatagaaaaatccaaaagaaagtagaaaaaattactaaattaatttaagagttgctggatacaaagtcaatattcaaagatcaatgtgtttcaatagattagcaacagatataaaattgaagttttaaagagatactatttataatagtgcatgagatagcaagtaactaggaataagttaaagattgtccttcctacaaagagaactataaaacatttttgaggccgggcgccatggctcaagcctgtaatctcagcactttgggaggccgaggcaggcggatcacgaggtcaggagttcaagaccagcctgaccagcatggtgaaaccccgtctctactaaaaatacaaaaaattagccgggcatggtggtgcgtgcctgtagtcccggctactggggaggccaaggcaggagaattgcttgaacctgggaggcggaggttgcaatgagccgagattgcgccactgcacttgcagtgagcagagatcgcgcatctgcattccagcctgggcgacagagggggacttcgtgtaaaataagtaaatacatacatacatacatacatacaaaaattagccaggcgtggtggcgggtgcctgtaatcccagctacttgggagctgaggcagagaattgcttgaacctgggaggtggaggttgcagtgagccgagattgcgccactgcactccagcctgggcaacagagcaagactccgtctcaaaaaaaaaaaaaattttttttttgaaagaaaacgaagacctaaataaatggttacactatgttcatgggttgtgagactcaatattgttacaatgtcagctatttccaaactgacctatagattcaacataaatacatatgaaggcccagtgtgtgactgtgtgtgtgtaacatggtaagttttttctaaaatttatatgaaaatgcaagggaccaaaaatatcaataaactcttgaagatctctcgaagaataatgagggttgatatctaccaggtatcaagacttatatggtaattaagacagtgttatgatggtgtcaggatagacaaagatgaaagaaacaggatagcacagaaacagacttccatataaatgaacacgatttaagacaaaggtgacccttctgagcaatggtaaaaggacttttgaaattaaatagtgcttggtctatttgatgttcatgtagaaaaagaaagaaacatgacctttacctcaaactttatccccaaatcaggtgcatatatattcattataaatttaattgtagaagataaaataacattttagaaggtataaattgtcttcatgacagaacgcatttgaaataaaacaaaggtcaccaggcataattataaatgtgactacacaaaattgataatttgagaacttctgtccattcaaaaacaacattaaagagaaggaagggcaaggcacaaattgggagaaaatatttataagacatatttaagggcctatatataggttatatgaagaactgatacaaatcactaaggaaatgattgactgtcaaaaccaaaagtggatgagacccttgagcaggatcttcacaagagaaaatattatcaacaaacttatggaaaaatcagattcatttttaatcaggaaaatgcaaatgaaaaccatatcagaatggctaaagttaaaaagactgacaatatagg

SEQ ID NO: 2957 - DNA, 4001 bp, Homo sapiens
atttggcaacagaattctggcactggaatggagggaaagactgggacagagactggtataatcagccaaactagagcagataaaaggatgagagctggaaataatggcactcttcatgaagtgaaacattaaacctgggcttctcaacctcagcactattaacattttaggctagataattcttaaatcttggaagcggagtgggggaggggggagatgtcttgtgcaatacaggatgtggcagcatccctggcctctacccaccagatgaataagatcctcttctacttacatgatgacagccaaatatgtctccagacattgctggatgtcacttgggaagtaaaatcaaaattccgttgaaaaccattactttaagccctagcatccctgctttacagatgaggaaatccagctacagaaaggtacaggaaggccccagccaggattcaagctggtggtctcactccagggcccgggctcttagccactgcgcttgactgcctttatggaaaggagattcaagccagccttctgaacagtattacacatttcgtgacagactggatgacaagaaggggatgaattaataagattcaaaggtgaaacctcagtgcttgccgctgaactcagaggacagtagataataagtagtttgggtttgaatataatcaaggtatattaggtcaaaacggaaaaagcctggtcccttgtactatgagaaaggaggtggggggggggcgggggagttggggggacggttcttgctcagactaaaaagaagaatcttctgtagggctggacttgaagtgtatgtgtggtatagaccagctaggacccaaatcctggctgggccctttcctagctagctgtgtggccccatctcattttgcccgtttgtaaaataggggtaagagtccctacacacaggcttgttatgagaactcaggcagttaataagaacaacatggcaagccagcacgatgtggttggcactcctctccttccaggacatcctcatttcctccatgtcccaacgcgctccgtactgcgtgccaacacctccccttacccctcaatagtaggggtggggacccccacgcagacctcccagatagagcagcgtggactgtctgcgcgcccctctccaaaagcaaagcgtcccactgggactttagggggcgccaacagcctttcactccctgatgcactcggctttcggggtcctgggggtcgccaaatgcgcgcggcgagttggctgcctccgaaacaaaccaggtaaatagtccacggtgcagcacgtacatttctggcaggtccgccccgcgcaggcttgggatagaagccagtcaggctcagcccagctcccagaggcacaggagagaagcgctagatttgggaacgacctgctttccgaagctgggctgcagaggcagggagttgagagttgttctatccagaaagaagcagggggggcgagagaagaaacaggaaagtgggaggaagaggaggcaaaaaagaaagcgctgggaagcagagttccctgtgggacccagcctacaacacctgggcagggacttgggaacaaagcagctgcttcaggtcagaagtgctctgggtgtttccgaaaagagggcgcttcggagaagccggagcccgctggggatgccgggcgcccccagagttcagggagcgctctcgggcacctcttacctttgctggggccccggcgcgcacttccggggactgcgcttggggcgcgcggggccgagcagggggacccggagctgatcactgaggggcggacacgacaaagcgctgcccgggtcttgggccggcaccagtacctcggaaaggaatcccggcggaggggccgccggggtcagggctggcctggggatgtggggtcccggcctgggtgctcacggacggcggcgccaagccccgcagaagctgcaggagcccgagtcagtgggaggaaaaggttgtctcatttccttcgatctcccccctcctccacccgcttggctccggacctgccctccctctcccccgcccccttctgcaagccagcggcccatgtgggcgcccgcaagacgcgaaacctgaacggctgcggcgtgcggcacctccctccgcgccaagttagttcacgctcccaactcctgcctgcctccccgcgctgccgactgtccgcaggaccggggaggttccccatcggcagtccccaacctatcccggtcctccaggctttccccctgctgggacgagcccagatttgaaagcagacctccaagcccctgccagcatccatcctctcattcctgtcccgtcgcctgctttgagcctgtattcagctactcaactcagacaggaaataaccacttactttgttaaatttgatcaacttttttttttttttttttctgagtgggaagttaaagcctgatgcataatctcgaaggaatgttcatttttatcggaagaaatgcagctgaggcctctgtttggcctttctctttcagggttggggttttgtttgttaaaatcaacaagtattttattgagagtgatgggcgctcagctgggggctggaaacgcagaaacaactagagggacaccctgttcctatacaatcgtcataggggaagagtgcagggagagaacaggtcccgggttgcggtggtctcttaagagatgggtcacggagtgaaagagccttctacagaatcaaaataaaagcttggacagagggaagacggaataagaaagccttcaggaggcggtctagcaaagagcacagccagggcagtgagtgatggtggggaacagggaggaaaatattgtgccagtccgttaggaaaggagaggagctcctagaagcagtgtgatggaactgacaagatctgatgaccaagggcttgaaagggagaagatgaggagaggatgaaggagagaggtgactcccaggcctctggctagagtagccagtgaccacgtggatgactagaatcccagagtgccttctggagctgctactccaagtgtggtccagagactggcagtactaacaccacatggaagctttatggaaatgaaaaccctcgggccgcacttgaaccactggattagtatctgcagcttaacaagatccctagatgattcaaatgtgcattagaatttggaagcactggctgctagaccactgactgtatattatgctgtatattggactgattgtatattagactatggagccctgggtgtctattagaaacacctggggagctttaaaaaccaataggtggccccagctccaccctcacaaatatttctgtaattgtctggggtggagctcccacatcagttttttttcagatgctctcaagatgatctcatacagccagagatgagagccactgtttcagacttactcaagagctacttcattttaccttgaaatgctgctcttcaaaaggaaaacaacacctatctgtagatgaaaacgtaaagacaggttattccactctcatgcagaggcaactggtctggtagaaagggcccttgtttcctaaactaatcagggaacaaggttctagcctcagacagcactaaattactctctgaacttgagaaagtactcccctctccgacctctgtttccttatctgtaaaaagaatacatacttgcctgactccaaattccacactctggcatgcaagggccatcatcagagctccccctaactctccagctttccagcaggcatatggagaggctgtgatgagaagcggggtttcctgatgtaatactacgtgtgttagccaagggcacagccctgtacgaatatcagagatcagaggtttgtgtgccgagtacaggagcacacatacaatcagtgctcagtaaatgtgtgttgaatgaactaattagtaaagaaataaatagatagggcacaggtgccaataggtgagcacagactttctatagatgggcccta

SEQ ID NO: 2958 - DNA, 4001 bp, Homo sapiens
actggatggcaatgtgttcatgtccccagtgcccaaatcggagtgatttccattgcttaaaccagtgtccgcgaccagcaaccagtcggtctcctgtgtctgaacacatctgatggagtttgggatctactgtagatgtaaatgaagaatctaagattttgatcctaacagaagaagagctaataaatgaaaggctgattcacttgcttcatttttagtccacactgggaatctgttaaattagcaggtttgattaatgtattaacaatacaatactcttgatttattttaaatggcttgctatacttcccagaagcataaggtttacttgtaatgagatgtgcagggcaacagagcttcctatgacttcaaactccctgggcacatgggaagtttggtctggggggcttttctctgtgccaaagcccctgcttgccaggcctttcctcctcatccttatttcctctttccttctctttaatcttcccactgtctccttcctctgccttgaacatacctgaagctcccccatgtttatgttaataatgtattattatttgataatgaataataaatcattgttaccaatcaataattattattaaataattaagtaaaatttaataattaaaggatattgtttaatattaagtaataattattagataataataaataaataattattaaataaaccttcaagattctggacccatttctagatattgtcctttttttaatttttattttattttattattttgggagtacaggtgatttttggttacatagataaattcttcagtagtgatttctgagatgttagtgcacctgtcacccgggcagtatacgctgtacccagtgtgtagtcttttctccctcacctcccttccaaccttccccctcaagtccccaaaatttattatattgttctatgcctttgcatcctcatagtttggctctcattcataagtaagagcatacaatatttggttttccattcctgagttacttcacttagaataatggcctccagctccattcacattgctgtaaaagacattattctgttcctctttatggctgagtagtattccatgatgtacatacaccacattttctttatcctctggttggttgatgagcacttaaatatgcaaagatatggaactatgctttcacatctttgcaattgcaaattctgctgctataaacatgtgttgcatgtgtctttttcacataatgacttcttttcctttgggtagataaccagtagtgggattgctggattgaatggtagttctacttttagaactttaaagaatctccgtactgttttccatatttactttcccatcagcagtgtaaaattattcccctttcatcacgtccatgccaacatatattgttttttgacattttaattatttaattttaatttaataaatattttaataatttttaattatttccagatacttttatttatacttcactcttttcataaccaaacttctcaaataaatggtattcacttgcctcactttcttaatccccttcaatcctcagctcacggtagtctggtttttgtccccaacacgccactgaaactgccctcattaaagtcccccatggctgcctcctgctaatgctcctcatctccctgcagtacttgctgctgtagccacgtccttcttcacaccccctcctcctttcacttctgtgcttctccatttcctagatcccctcctacctttgtgatcattcctcctctgtgaccttctttaactggctttgcttggtaacagacacatctgttcgcatcactaaaatgcttcaggggttgcccacctcttacaaaataaaatcaggtctccatagcatgggctgcaacgtccttcagggtcagccgctacatatctctcccaaccattcagtaccaacccatcttctgcttcagccatgtcaacctttttgcagtttcacaaacaggttatgctatttcacgctcctgtacctttgtacagaatgttcttgactccacccccatcctccactaaggaattccagctcatcttttaagactgaggacaaaggtgagcaattctgggaagctttgtctgcccccaaacagaggcagcaaccccacctgagtcctgggcatctgtgacacattttcactgtagagctctgcaccctgttacgtctcccatatccgagtcctgtgaggtcaataggttcttgttcatctctctgtctcaggtttgcacactccacctaccacatgattagggtgcaagaaatgcatgcttcttttacttctctaatttaacataatttgccctgagctttctattcatttcatagaaaattttaatctcagttattactggggcatgtcccctccccagagtcagacggaagtccagtgtcaggtagaggtgcatgacgcagagcatgcaaagagactttgtctacctggtcaccatatccaggcttgttttccaaaacagcatggaaccctgaggcaagttcttctaaggcttgggcctggggattcttttcacagaggttctcaaggtcacagacttcaatgtttagttatttctaccccagtgccactttcagcccctcagctgccctcattgttcgtgctgttggaaagcaaggtccagatgatcatacttcaagggcaccccagtgactctgttctttctctcattttcagagactccctcagtctccagtcagggtgcacaccttcagaaatgcaaagctcccactcctgcccatcacagagcagcatgattctcctcaaggtgcatagggagctgaaacaaaaacagaaatagggatgtctcctactggaaaacctgttttcagccccgcaacgaaacagctctcaaagacaagggcatgacagggtcttgctacctttttgaggcaaagagtaccctcagtgaagaaaccaagacataggtaaatatctcgataaattgctctgccataaaaccacccatgaatttctttaatttctttaattacttaattaaaagcagaaatggccatgaaaaacacaaatggaattgctctcccaaagaaagacacctctacctggcagccctcgccactaagcctaatcctccttctcgttcctttcctaaggaggaagccctaaaaggcctgggattccctgtctgtggcccaggaacactactcacatggccaagtttatttgagctgctgacttgagctgctgacttgggctgctgacgcagggtatttgcagcagctgcactaacccactttttctcatggatgattttaatctctttaatttttgcccagcctgtgagaaaactgaaagcgtggttgggagggggcgggagatagaagttacaggtcatgagctgagtggcagctaaatcctgtgggaggaagcaaatgcaagtgtaatcctttcaggaaaacaagtattactggagaggagaaagctgccaatgtaactttgttccaagaataaatagcacattttccctcagtgtttgcttttctctctttgatccccttgaagccctctggaaatgcctggccagcaatttttctcccctctgaggctggggagaaggagccacaagcactcacttgagattcctcaaatgaaggcatacagaggggctcccaggcaatgctggagcatgaggcctgtggaagccctggatccagacgtcggtgtgaagtttaattaccacaaatatgccacggtgtttgcaaacatgcagtcatcatgcccagaagcagttaaaaagggaataataatagatagggtatacatgactaaagccactgggagccatgggagtttgaaaatgggaaaggaaaggcaaagctcaagtgggttaatgtttagctttggtcccaagcaaaataaatgcctgcacacagtgaggctgacaagagcatgccctcaacacggggagtttatggctcaagtgctctag

SEQ ID NO: 2959 - DNA, 4001 bp, Homo sapiens
caccattcgggggccttcttagatccgtcaggccggacaaccgttcggattcggtggccgggaaataaataagccaattcctttggtgactaccccccgcggatttccagacccttagctaaatctagccacccagaaaggggaaaggggaaaaagaaacaatcaacccagatgcccccggggaggccagagcaggcatgcactggaattgataccttgatggtggtttcgggcaggttgagtgccgcggccagctcgcaccggcggggccgcgacacatagttctcccggtagaactccttctccaggcgcgcgatctgctcgcgggtgaacgccgtacggtagcgccgcacttgatccgcgccagagccggagccacccagcgccgcgctcccgccgctgcctccgctgcctccatgcaggcttccgaggcctgagcccgacgccgacgtcgtggtgccggcagccgagccgctctctgcgtaccctggcaaacaaacgaccaacagcgcatgagtggctgtaggaccaacagcccggcgctggcgctgcgcgcggatcggggaagccccgtcaggaaggagagtcgctgccggaattgatggggtctgtcatgcttacaaattgctgccgttaatggaatcaataaagtttggggagcccttcataagcaaataatagaaacggaattaggagatttcttttttaataattagaaattttcaaccaaggaggaaaagtggccgagggaaaatgcctacctctgggcgcagtttgggaagctctgggtttcccatggtctggagaccgcagggcagctttttatacggcctctaacctttatctgagtcttcggggtttcaaatattttaagagttccaacacagcagtagctcaaacccaagccaatagggggtgaaatatacttttcaactctttctcccgctgacctaaacagagacgccggcgaggcttcctccgacttacccagaagaatgccccctccagccctgagggcacaggggcaggggagttcagagtagttgcccagggtacctttcccaaaagcaactcggctgctgactaggggtctaccggctcgctcgggctcttagacacgagcgcagaaacattttctcggactcaggagcgagggcgggtgggcctggtgttccaggctccgcaggcctgagcctggcgggaaagctcaaggagcagaactggaaggcacggtcccagacatgcgtcccgcccccgcccgtgctagctcggtgtagcttgcctgtggagggtctgagaggggaaaaggcaccgggaaaggctggcgggggccgcggaggagcaaagaggatgggactggagagcgcggtgcggccggcgcggttacctttgccattgttttccttaagctgagcggcgccgaggcccccgggggagcgaagcgcggagcagcccacctccacgtcgctgctcatgtcggcctcagcggccgcctctgaataatggcccggcttcttgcggctctcggcggcggaggagatttcggaggagacggtgctttcgctgcccgtgtgctgcaggttgaacaaagtgtctatttcgaatttgcccttggcggggagttctcccagagcgctgtgcaggggggcagacggcaggcgcgggcttaggcgagccgggtgctgcgaattttccagggcctcgagcacagcattgccagccgagttggacaaattggagaatctcttgcccgccgtagggctgtgcagccctctctccatcagaatcatctcttttcttattctttccatcatctcagctttcttaaaaatgtcacagtggccctgctgtcccgtcctaatgataggctgcgcctagggctaattctcattcagccccagcgaacgcctctaaatattattatcgctttcggagggaggcggaaaaattgtgggatgccagagcgagggaatgactggtcaaaatgacccatacatccttccgatcccgagatgtcattcatcaaaaagtagcgcccgctcgtcattaaggtacgaatgacgctgttcgaataatcatttattgtaacaggtttataagcaaataaatacaccctcctgtcagtgggtaatgaaggcagcttcagagcagacaaatagatccaggtaggaggcgagaagagacaagtgaggaggaaggctccggtcctttgcccgctccgagccagttctgctcgcccgggggtttggcctcgggggtgaaattgacagtctgattaatagagcgcgccgcggcacatttcccccttcatttaggggcatcattacgctctcagtttgctaggttgccccttaggtcctaatcatgcagcgccttcttcatttttccttggacacagatacgtattaaataatagataatggtttgactttccagagtaggtcctcgggaaggtttggtttttttttttttttttttttttttttttaccatttacaagctgggggcataagtggggggagataagggggaggatgcaggaagagttgcgtaaggagaagaccttgcgcctctcctatctggattacttatctttcggatttcggaaccaaatatgtattttatttaacaaataggacgccggagttctttccctccctatttcttcacctcagcctaaatgctctcctcccaccccgggagagagagagagcggaagagagggagagagggagagagggagaaagggagagggagacggagtgagagaaagagagagagagagagagagagaaatagaaatatcctagagttttgaaagcgctttcttgctacgtggccgcggaggtgcattgggcccgcgcctccaaacggaaatcattaggtcctctctgattttctaacaccgtctgcagagtgagatctgaactcgaagtccccggttttttacttttataatcctgctgatagaaagccttctcgcctacgcattttcctgaggggaaacgaactaggctggacgatttgatagcagaattcgacagctaactttaaacacagtggagatttacagcgccatacgggcgctccgaatccacgctcacgttgccagattttcccctccctcctcaaatagaattatttgcggcaaaggcgctggatttcgaggtcaaaagaggaaagaggagacagccttcttcccctacctccccgctgccctcccttcccctttgcttttcttccttctctctttcctcccctcatcaaccccagccccttacctgcggccacaggtattcccagcgttgggtccgggcgcagagagtcgccgaacagccttacagcagctctctgcggcctgggcttggaggctgagcctcttggcgacaactttgatagtcataatgacgccggtggcaaccattttaacgaagatcaatcttcactccaggccgctcctcatctcccgcggttgcgcccacccttccctgaccctccaagcactgtgcccacccgccaacggcccagccggagagagattcgcggacacaggcggaggcgagggaggacggggatgggacgcggaggtccgcccgtgagcttctgaagcggctgagagaccctgacaatctgggcgctgggcgcgggtcctgcatccccacatttagcctcaatccgaaccccaaccagggccccctcttctttctgccgacacacccagaacattggggtgtgttagggggcaagctcgagatctattcgcctatagctcttggcgctttccttttaaccttagacccgttgggggcgcatcaggaatgtaaggggaagcgaggtgtgaagtatatttatatacatatatacacacatatagtcaatgccaaaagtttatcttctgttcccctcggcgccaacttatttcaacaacgcgagctttgcttagaaaatcaattccacatctttaaggtaataaacggaaagctcgataggcaggcggtgcc

SEQ ID NO: 2960 - DNA, 4001 bp, Homo sapiens
gtgtggaagaactggtccaaaaaagggagctaaaagtcactttaagggacaaaggggccaggcacggtggctcatgcctgtaatcccaacactttgggaggctggggtgggaggatcatttgaccccaaaagtttgagaccagcctgggcaacatggcaaaatcccatctctacaaaaagtttaaaacttagccaggtgtggtggtggtgcacagctgtagtcccagctactcaggaggcttaggtgggaggatcttaactcaggaagtcaaggctgcagtgagctacgatcacatcactgcactgcagcctaggagacaaaaggggaccctctctcaataaatgaatattaggttggtgcaaaagtaattgcggtttttgccattgcttttaataaataaagagacaaaaggcaaactactaaggatagttatgaccaggggtggtactggcagaaatgtgctaacaatgtgtcctggagaaggaagctgtgcaagtggagaggaggagtaatttccagcctgccctccaattagtctttcctgagtcaacttaccccaagaaaacgcaagcagtgagtaataacttttctgatgggaggggcagtgacccaagactgtgcaaggagggtaggatagttatctatgtattggctgcatgatcagaatgcataacagtaagggataaggatgagttggttctaggacaccagtaacatgaggggaagggggaaagtagttcaaaactgggcttagtgagtagttaccaacagtaagtacaggtagccgataatccccagctgaggcaaaacagtggttaagtgtctgggtccaggctatccgagtaggaatctgagtcccccactttattttctctgtgaccttgggcaagtcacttaacctatctgtgccctgtctgtaaaaggagagtaatagaacctacctaatacggttgttttgtagcttaaataagttgcatttgtaaatcactttatacaacgtcttggactttatgtaacaagtgctacctaaatttgttaaataagttgaggtaagtagggatttcttttgacatctccaaataaaatggagatgtgcgtgcaaaaaaaaatgataactggggggcggcagcagggtcagttttccccagcgatgaggaggctgcaccgtgggcgagggtcgtcctcgtaacagggaggcagggataaaggagcagcggctcccaggagaggggcgcgggttggggaaacttccatccaggcctaggatttccagggactcgtttctgagaagtggctgtgattctgaggcaagactttgatttcgagcactagaccatggagtgaaattctgtgttgtctgaagagcaggactcctgtctagggcaggacgtagttagagacggagggagaagggtgatgtccccagggggaagatctgccgggagccaccaccatctgtcgggcgccctctcgttccccagcgccggaccagcctcggagggagaacgaaggctgctcctgccccgagggaggcagcgggagggtcctgagtcactgggctgtagggcgccgggaagggaccccgcgtcggggctgcgaagggagacccgcctcgcccggtatgcagggtctctccgaagggaggggccggcgccggacctggggacagccggccggaggcccgacccagaggagcctgccccgtcccgcccgttcccgcccctctgtggtcccggcacccggggtacctgagcgtgggcccgatgcaggccgtgtcagtgctctcgatctctcgcaggatccgctcgtgctctgccgctgtctccaggctctccgcctccgccatcttaccccgctccatagactgggggcgccccgcagcgcgtcccctccgtcggctcggctcaccttttccctgccccacaatgccgctcccaccacaggctccacagccgccccagcctctggctacccgcaggccgacccctccctcaggctcgacacgcccccttgcgtcaccgcgtccgtcggcgttctgcgtaatgtccgctgggatttgtagttctctgggaaatgctaggttggattccattcattcatacatggaatccgcaaatactagttgaagcccactgtaagcaaaaacagttaacgacagtgcgtaaacagtgatgatcaagtcaggcagtggcactaaacctacaaattcttgtttaccacctttgccacaaagtgccaaggctccgtcggcgcgaataataaagtctaacttaatgtctgacagaggccttacagtctagtgggggagacacggggagctggagaattcaaaactgtgagctgtaagccagttccgataatggagttcagagatctcttctggttgccaaggcttcataaagacactgggtttcggaggttaaaaggcataactggaaggtgtgaggagaatccagacagccaaaaagaatttcatttgcactgacgtgtaaagacgtagtagtaagggatgggtctggaaaggttcgctggagagaaattacgaggagccttaaatactgggctgataaatgtgtactttgttctaatggttccactgatccaacaaccaactgcaacagaagcacctggaaacatttttttttaatacagactgactgacagtcatacatctggagattctgatccaggcatctgcatttcatgaactcatcagttacaatttaaaaatcggatttattaatcattgcttgagtttttacgtaacacaatgaatgggaaggcactgaaggttttttgggggtttgtttgtttgtttgtttttgagacagtgtcttgctctgtcgcccaggctggagtgcagtggggcgatctcggctcactgcaagctccgcctcccgggtgcatgccagtctcctgcctcagcctcctgagtagctgagactacaggcgcccgccgccacgcccggctaattttttttttttttttttttagactgagtctcgctctgtcgcccaggctggagtgcagtggcgggatctcagttcaccgtgagctccacctcccgggttcacgccattctcctacttcagcctcccaagtagctgggactacgggcccacgccctgggactaccacgcccagctaatgtttcgtatttttagtagagacggggtttcactgtgttagccagaatggtctcgatctcctgacctcatgatccgcccgcctcggcctcccaaagtgctgggattagaggtgcaggtttttaagaggagtgacacaatcaaaatgtgggcgttaggaaatttggtgaagggcaagtgtgcaagatgtgcagagacagagaatttggagataaggcaacactgtaggagatgagaaggcctaaaccagggaagcagcaatgagaatgaaaaagaatgaacaagtaggaaaaacatcaaaaagagagaattgacaggatttactagataccaaaaaggttagatattactccaaggtttagtaccagagtgactagtagaagagagtttccactgacaaaaaaaaaaaggcatgagagaagaaccaaactggaagtttaggctaaataatttgtgctacaaccatactatagactattatgcaatcattaaaaagaaagacaaaagactctatggtcatacatgaaactgtctccaagttgtagttgttgagtggaaaaatgcaaggcatgaaacaatatgtagactctgtcctcatttgttttttaaaagaataaatattcatatatacgctttgatatatatacacacacacatatacatatatataatattacatagatagaatctgtctgaaaaaatgcccaaaaaactgttaacagtaatggcatccaggaaaaaaaaaattggaaagaaggagtttgaagtagtaagaaggtaatttgtaattatcatttgcactcttggaattattttccttgtgcatgcactgcttttttaataaaaatagtag

SEQ ID NO: 2961 - DNA, 4001 bp, Homo sapiens
aggttccaaggaaagttctgacagcagaagggatgccctcctaccttgactttctcccctgtcattgtctccagctcacattcctcccccaccgtgaattcgttttggatcactttggacccagcggtgatggtgaacttgaagtgcttcccattctgcacgatttccgacacccccttgatatccttccccttctggatgagctcttccggcagacctggtggaaaccgtctgaggtttagatatgggcagaggtgggagtttcatgaccgtggtaggtaggtgagagaaacgacatgacatggagggacagagaagggcactgtgtctcccaaggggccacagaaactcactgggggcttgtcagcagcatcggctgtggcctcagaaaggaagggacagtgacctggcctggcctgctgctatcttgccagtcaatttataaaaaggacactcttctggcctgaagaaccgttcctcttgtaagcaccctggttcttgctcactctccttcctcattccctcctcctttgatgactttgctcttggagtgtgagcatttcattccccatacccctggtgaccagagagttgatcttccaagctaggtccctcctgcaagtgaaaggggagctgctgataatcatgccaggccaacatacacaaagcggcactgtgccaggcaagcctgtgtccacctctgcagtcaaggctctggaggaagacataccagcaatcccttgccctgggatagagctttaccagtttcagaacttgtctatgctgttatacaaattgaggttcacaaaaattttgtgggtggacagtgagcacagagggtcctgttgcatgagggagagatgagagacacagaggtggtatggcttgcctgcagaagatccttctctggcagcactgaaggtccttctctccctgcccctgctgtcttcagcacccttctcattcttggcaccctcccttgccatgccacaccctttgcttatagggctccctctgcctggagcatgctccctgcccccagttccctagacacctgtcttccaaagctcagcctgagccttctctttacctccactgagccatccccccatgctctctgtgagccacatcctcctgtacatgaccctaggaggcacaggggttaaagcagggtctctgagaaccagtgcctgcttccaatcctaacttaaacacttcctacttgcatgaccttgcttgtgattactaaacctttctgggcttcagttgcattaactgtaaagtgggaaaataatggtacccagcttagttttttggcaaggaatagatggggtattgcatatcccatggtcagcacagtcgcctggcacagtcagcgctccatacacctgagggaatgccttattacctttatttcttctcttctcttccctgataagaaaatgccttattgcctttatcatctgtctccctggtatctatccagcacagtgctcagtgtgtggttggccttgaatcactgtttgtttgaagaatgaataaatgcaggaataggatcacacaacgaagtgccaatgacatggccatcaatccagaccacaccctagttcagtgctctttccacttgcctatggggtggccttgtgcagtgaggacttgctgcaaataactccagaagtcagtaaaatgccccctagtttgtgtatatagcctgaatctctccccccatctcaacatttggaccctaaatagccactgctggtagagctagaccctcactgatgtgacccacagctttgcctttcagtccagcactcaccgattgccttcatgaaggcttcaaagttttcctggctctgcagttggtacttgccggagaaactcatggtggcaatagagctccctcttcacgactgacctgcggctctgccgaccagactgtccactgtaggctgttttatagggggctcccttcccttcgaatagcggccagaggtcagcagctgttgattcctttatggccaggttcaaacattaactcctgagagcaatggtcaatgataaagaacaggatgggcacagcaaaggtttgctgtaattcagcaaacattaatgaatatcagtcaagcaggaagccttatggccctgcagcctttaagtgactctccgcaccccacgaaatgtgtgtatatgcaggtatgtgtatatgtgcacacacatgtgtatgtatatagatgtgtgcgtatgtgtttgtacatcggtgtttatatatacatatatgtattttgtacataaagatgtatgaatgtgcatatatgtaatgcatatatacacattatatgcatgtgtttatatatgtctgtacacatatacacacaagtgtgtgggtgcatgtgtacacacacagaaaaataccagagaattcctttgaactcaaaacctcaccttatttacataaccttatgatctcttctcacccccattattacacaaacttattttttagagttgttatcagccgctagtgttattttgtattctgggaattcctccttgatgattataggctcctccacaggcctttttgaggtgttaaagcagtccatgctaaatggcaggtgtaaaacattgagacgcattttattaggcagagacaaggcaggagaaagtggcacctgctgacttgctccagccccactgagaagacaggacaagggatctggggttatgtgtaggaaactggtcttgtagggttatgtgtaggaaactggtcttgtagggttatgtgtacagcactggccttggggagatggcccagcagggcttccagtggccttgggatgtgccagtttgttgtgaagcacagagaggcgtggtgcccaatgggtgcacgtcccagttcctgcctctgaggcagctccttacaagcaccccctcacccctagattctctcccttctttgtctggactttggcgtcaaccttttcacctgcagcctccagccttcatcctctgggcctcctctactctgtggttagacagatcatcctgaagcataggctgagtcgggccactgctccaggcatgagcctcagtggttcccatcacttcagaggccacaggtcctggatggcctagtgtcacgtgacgggtcatgatggccacccccaataacacttccatgtccctatcatgagttctaatttttggcttggaaaatgactcccattgcctaaacttctagcagggctgccagccctcaaaaggcaactccagtctacctttccatcctttttccttccttctcctcaagccacagttccagccacagggccaagtggacacatcgggggcgtccatgccactctctctgccctccgtggtctccagcatttggacatgttgatccagcaaagcacttcagaagttctctcctccacccacagtcccagtgccagggtccttctacagcatccctgacaggtggtgttaaggtgtaccctgccacagggaggtcctcacctttggagcagtgtgggcagagaacactcactaatggagtgtcctgccatgcagattctggcaccagcagacctttccctccagcacagaggggtgctctggccctccctgcttggccctcctctgacagtgtctaggacacaaggtgcctcccaggccatgaattggggctgtccctgcagcaagcgaagtgggcctgcatgctgagaacttatggctttttataatcaccacgactacctgaacagcgggcaggaaggggcgaggtggctcaaagaagtatgggcacacccacagtccttctctcatcttgctctgagctttgattatacatcttttaacatgtctattgtactaaaggggtccatattagaccctggtctccagatgggatgctgatttttcatttttgtatatgtaaggaagtaaaaaatccattgtcttaagaactggcatgagaattcctagtgtgtgtgtgt

SEQ ID NO: 2962 - DNA, 4001 bp, Homo sapiens
gctgaatgaacaaataagtgacagaagcaggggcttgacatttcactacttgggaaagcttagtgcttgttaacttcaggagacatggctgtgccttcccacaagggccagttgtagtggctcatgcgtgatatccctaacaatttgggaggccgaggtgggtggatcacttgaggtcaggagttcaagaccagcctggccaacgtggtgaaaccccgtttccactaaaaatacaaaaaactcgccgagtgtggtggcagccacctgtaatcccagctactagggaggctgagacacgagaatcgcttgaacccaggggaaggaggttgcagtgagctgagatcgcgccactgcactccagcctgggtgacagacgaagactccatctcaattaaaaaaaaaaaaatcctcagggctcagatcctgttttgagtccaaggctccacttaaagacaaacactattctcttgttttgttcttaatccacgtctggcctctattccttaccacatggtgccttccctgaatggttccttgctcttacaacaaaggcggtattgtacagccttctatgcccaaaaatgtggaggcagctgatccccagactcttggtcctcacctggagattcaatctgccttgttcagttgaagattcattagacttaggtcaccactgttgtggcccaccagtttgactagaaaaccgagggctttgacttctctgccctgctgtcttacacaagcaccaactgtgccactgtcaaaaggctgttcgagccaatgtgcacacactcagacactccacatgctaacataacagtaactgctgccgctgaatgccaactattaagtgctctacctacaatgtctgatttaattctcgacaattgtggaaggtaggtactgttagcctcattttacagatgaaacaattaaggcttaaagaggttaagagatttgcccaaggttacacagtcctagagctaggagaggaaggagctgggatgtgaatccaagtccaggtgacatgaagtccttggttcagaagcttgtaatgcaagcaaaaaaatccagcttcagcccccatccccctaccaaggccattttaacccagaatgttgtggtgagaagtggggaccttccataggaaatcctccaaagtctctaaagattgtagtgagaagtagggacctcccacaggagatcctccagaggccgtaactgctaacagacatgcgtggggaaactacaggcgccctctggctgttgcctcagggacgaggctggttaccagctctccaagagaaccccaggccccactgactgttcccttcccacatgacacacacatgcaggttcattccaaccttacagcaatctcctcaggtagagcgccctcactttaaagaagaggacactgagactcaaagggatgatgtcaggtgcccaaggtactagtcagaaagtggccctggggcttctgcaacaaccactatatcacacagcccgagctcaatccaactctgcaagagtccataagcaaaggggcggcgacatgaggtggaaacagtagcctccatcaaacaaagcctgagacatgggtgtgcacgtcggattccatcccaccgtccactcgcctggaacccgtgccggtcccccagtttccccatatgcccagctccagccccgacagttagtgagtgctcacacaggtccgccccgtctgtgtggtcagaagcggctggggatccggtactagttctgcgctccgcgggagaccggcgccacggacacccttctggcctagacccagccaggctcgtcctacctggccgcggcggccgatcttcctgcgctgtagggttagagctcgcggggccgaaggtcaagggcggcgggcgcctgagcactgccaccagtgaccgcagccagccggggaaatgcagcagctgctaacccagggccactcggccggatcacccgagagaaaagcgggcgcgatcctgtgacgtcacaggcaatggccactagcagggcgccaatcccggaggggcgggcccatcgtggggcgggcggctccggcgggtcttcaggctacgggttcagccaggcgccagccgcgttctctggagacgctctctctcggagggaccctgcacttgcctgaactcgagagtgggcgctgcccgaaggtttgtccctgggcgcttcgctggcctcatccggtctcggccttgttctgggcctggcgcctttcccattgttggggaaagtggtctaggagaccaaggcagcgtgctgggtggcagagaatgatttgtggcttctgattctgacatatgtcgttgaggaggggagggatgactgcccccgttttacttatggagaacctggggccagagctgttttcccagggtgacacaggcggtgagtagtggagctggcattcctgaccccaaagcgcagcgtttcccagccactctccgcagccaggccttcacctgcactgctgggcgcaggtggggaagtggggaaacgggactccatcccctgcagagggcaggcgtgtagggagtggcagctgaactccacagacagctactgctcagctcttcagctgccgactttgaacagtgtgaggggctctgtacaagtggcccccacattactcaaggaccagatcatcaagagctttacttgtcccacgaaggagtctggaccttgtttacgtgcacaggagaccgctggaaggttctcagtggcgtgccatgtcccgacttctatttgagaagtttttctctggccacccgtctgaggaaaggtgtctgggtgggtggtgcggttgagaacaatggtggtgcggtgcgtggtggagaaggtgagtgtccagagatgttcaggaggaagaactgacagctctgaatgacaggaggtggaagtgagaaggaaggaggtacaaggccaactcctgggtctctagctcggtaggtgcagggccgttcatggagacagggctcctggaggagcagcgggtctggggagaggatggtgagctccgatttgcatgggacatccaaagggcattgaacggtgggcagttggagacatgggtctggagcttgggacttcagcctagcttgcagaaggtcaccacagatattgaaatggaacctatgggggtggctgtgatcagggggattcgctgaggagaacctggcacaagggtttcactaagccatagctcccaaagactttctgaaaagctaagttacagcctggaagaaaatatctgtaaaggctatatttgataaaaagacttgtatccagaatatagaaagaatgcttaaaagtcagtagataaaatcaaacaattcaattttttagatggacaaaatatttgaactgacatttcatcaaataagatatacagacagaaaattgggacatgaaggctgggcgcagtggctcacgcctgcaatcccagcattttgggaggccgaggcaggcggatcacaaggtcaggagatcgagaccatcctggctaacacagttaaaccccatctctactaaaaatacaaaaaattagccgagcgtggtggtgggcgcctgtagtcctagctactggggaggctgaggcagaagagtggcgggaacccgggaggtggagcttgcagtgagccgagatcgtgccactgcactccagcctgggcgacaaagcaagactctgtctcaaaaaaaaaaagaaagaaaaaattaggacatgaaaagatgctcaacatcattaatcattaaggatatgcaaattgcaagcgcaatgtgacaccatctcacacctactagaatggacaaagaagactgattataccaagtactggcaagaatgtggaggacctgggattcttgtacactgctgatgggattataaaatagtaccaccacgatcgaaaaccatttgtcagtgtatgaagagaattaaacatacacctaccatatgatgtagc

SEQ ID NO: 2963 - DNA, 4001 bp, Homo sapiens
acctgtaatcccagctactagggaagctgagacaagagaatcacttgaacacaggaggcagaggttgtagtgagccaagaacatgccacatccctccagcccaggcaacagagcgactccaaaaaaaaaaaaaaaaaaaaaaagaaattatccacagagctcaggtcctgttttgagtccaaggctccacttaaagacaaacactattctcttgttttgttctgaatccaagtctggccactattccttaccacatggtgccttccctgaatggttccttgctcttccaacaaaggcagtttgtattgtacagccttctatgcccaaaaatgttgaggcagctgagccccagactcttggtcctcacttggagattcaatctgccttgttcagttaaagactcattagacttaggtcaccactgttgtggcccgccagtttgactagaaaacagagttttgacttctctgccctgctatcttacacaagcaccaactgtgccactgtcaaaaggctgttcgagccaaagtgcacacactcagacactccacatgctaacataacagtaactgctgccgctgaatgccaactattaagtgctctacctacaatgtctgatttaattctttttttttttttttttttttgagatggagtctcgctctgtcgcccaggctggagtgcagtggcgcaatcttggctcactgcaagctctgcctcccgggttcatgccattctcctgcctcagcctccccagcagctgggactacaggcgcatgccgccacgcccggctaatttttgtatttttagtagagacggtgtttcactgagttagccaggatggtctcgatctcctgaccttgtgatccgcccacctcggcctcccaaattgttggtattacaggagtgagccacggcgcccggcctgatttaattcttgacgcttgtggaaggtaggtactgttagtcccattttacagatgaaacagttaaggcttaaagcggttaagggatttgcccaaggttacacagtcttaaagctaggaggggagggagctgggatgtgaatccaagtccaggtgacattgaagtccttggttcagaagcctgtaatgcaagcaagaaaatctagcttcagccccatcttcctaccaaggacattttaacccagaatgttgtggtgagaagtggggaccttccataggaaatcctccaaaggccctaaagattgtagtgagaagtagggacctcccacaggagatcctccagaggccctgcaaacagccatgcgtggggaaactacaggcgctctctggctattgcctcagggacgaggctggttaccagctctccaagagaactccaggccccattgactgttcccttcccacatgacacacacatgcaggttcattccaaccttacagcaatcccctcaggtaaagcgccctcactttacagaagaggacactgagactcaaagggatgacgtcaggtgcccaaggtactagtcagaaagtggccctggggcttctgcaacaaccactatgtcacacagtccgagctcaatccaactctgcaagagtccataagcaaaggggcggcgacgtgaggtggaaacagtagcctgaaacgtgggtgtgcacgtcggatcccatcccaccgtccactcgcctggaaacccccagtttccccatatgcccagcttcgtcccctgcaattagtgagggctcacatgggtccgccccatccgtgtggtcggaaacggccgggaacctggttctagttctgccctccgcgggagacctgcgccagggacacccttctggcctaacccagccaggcctggtctacctggcggcggcggcggcggcagccggtcctcctgcgctgagttagggctcgcggggcgggaggtcaagggcagcgggcgcctgagcactggcaccagtcaccgcatccagccggggaactacagcagcggcgaagtcactgccgctcggtgcgcactccagcgagaagcgggcgcgtcctgtgacgtcacaggcaaccacccctagcagggcaccaatcccggagggcgggcccagtgcggggcgggcggcgccgggggctcttcaggctcagggcataggcaggcggcggccgcgttttctggagacggtcgctctcggagggaccctgcaattgcccgagaccgagagtgggcgctgcctgaaagtttgtccctgggcgcttcgctggcctcatccggtctcggccttgttctgggcctggcgcctttcccattgttggggaaagtggtctaggagaccaaggcagcgtgctgggtgggagagaatgatttgtggcttctgattctgacatatgtcgttaaggaggggagggatgagtgaccctgttttacttatggagaacctggggccagagctgttttcccagggtgacacaggcggtgagtagtggagctggcattcctgaccccaaagctcagcgtttcccagccactctccgcagccaggccttcacctgcactgctgggcgcaggtggggaagtggggaaacggtgctccatcccctgcagagggcaggcgtgcggggagcggtggctgaactccacagacagctactgctcagctcttcagctgccggctttgaagagtgtgaggggctctgggcaagaggcccccacattactcaaggaccagatcatcaagagctttacttgtcccacaaaggagtctggacctcgtttaagtgcacaggagaccgctggaaggtcctcagtggcgtgccatggcccgacttctatttgagaagtttttctctggccacccgtctaaggaaaggtatctgggtgggtggtgcgggtgagaacaatggtggtgcggtgcttggcggagaaggtgagtgtccagagatgttcaggaagaagaactgacagctctggatgacaggaggtggaagtgagaaggaagcaggtacaaggccggctcctgggtctctagcccggtaggtgcagggccgttcatggagacagggcttctggaggagcagcgggtctggggagatgatagtgagctccaatttgcatgggacatccaaagggcattgaacggtgggcagttggagacgtgggtctggagcttgggacttcagcctagcttgcagaaagtcaccactgatatagaaatggaacctatggccgggtgcggtggctcacacctgtaatcccagcactttgggaggccaaggtgggcgaatcagatcaggagatcgagaccatcccggccaacattatgaaacgccgtctccactaaatatacaaaaaattagccgggcgtgttggcgggcgcctgtagtcccagctattcgggaggctgaggcaggagaatggcctgaacccgggaggcagagcttgcagtgagcccagatcacaccactggggaacagagcgagactctgtctcaaaaaaaaaaaaaaaaaaaaaaagaaatggagcctatgggggtggctgtgatcagggggatgtgctgaggagaacctggcgtaagtgtttcattaagccatagctcccaaagactttctgaaaagctaagttacagcctgaaagaaaagatcttcagaggctatatttgataaaagacttgtatccagaatatagaaagagcacttaaaatcaatagataaaatcaaacaattcaattttttaaatggacaaaatatttaaacagacacttcaccaaagaagatatacagatagaaaattgaaagacatgaaaagatgctcaacatcattaataattaaggatatgcaaattacaagcacagtgtgacaccgtctcacacctactagaatggacaaagaagactgattataccaagtattcgaaagaatgtggaggacctgggattcttgtacactgcttatgggattataaaatagtatcactacaattgaaaatcatttggcagtgtatgaagagagttaaacatactc

SEQ ID NO: 2964 - DNA, 4001 bp, Homo sapiens
ctttctcttcactactttccaagacgcccatagggaagagcaggtaacagtgaagaccagcactcctcagttccccagtgaaaagcaaaaagagctcgaggtcaatccggcactactggttgtccaaagggaggttacttcctgtagtgtcatcagaggcaaataaactatagactctagttacaatctagtccaatttccccagtttaaaaacctgaagctctcaaaacaatttaaataaaatttagccaaataaagatctttgttgctaagtgaatgccaaagtgctacaagatcctgtggagaagttctcaccacttcagcacaggcctccaggaaagtgcagggagtcttcctttctgttccagtaacacagcagcgcctacctagggctgcaggtggactggtcagctccaatcaaacatcaggaccgcccacagcacaggtcaatgaactcaggaactagggctctcaagctgttttcagctcaggaaagaatactaggggtgtaaaactgctttctggcagcattttggatttctcctgttttcacaataataagccaaatgggacatattaatttgcagaattgcctttccaggcagccagacgcagcagactcctaagggcctggaccagcaggtgcctggattggtaccttctgctcttcagcagcgggggctcaactcacaagcctctgcgtcagtctcttgggtccctttcacactgtagctcaaaatcgcactcaattctaagcagctgtaactggccatcgcccagctcggtcacactcaccaagattcacagccccgcacacggccagccccgcccccagccttctgggcacacacctcgggtccggctctgctcctggctgggggtctccttggccttcttacaggtgtacagccacttgatgatgcgggcgttcctctcgatgaccgaagtggtgctgggcacctgctctatcagctcctcctcctgcagcccctcgtcgtcgccgccgctgtgccgggagaagccgctgccggaggtggcgacgctcacgctgcgcaccttgagggtcacacagtccgaccccgcggtgaagttctccctccccagggcctccaccacctcggggtccaggccgcagtactggaagaaggtgtcagactcggccaaggcagcggaatagcgggagctgaggtccgactgtgagcgctgcagcccccgacgcctcaccacccgcggctctggcccagggggcgcggccgggacactggagggcgccgcggaccgcgcggctggggctggggtctcggggattgcggggtccgccgcggggccaggagtggtcgggaccgtctccgggttcccggccttgccctcgtctcccgtccggggcaccggcgccttgtccttacccggcccctggaagagcttcttcaccaggcttgccctggggccgtcggcgcccgatcctcgcacgaattcgcatttctgccggtagatgatcagcgagtccggtctcaacggcttccgcgcaatagccctgcgcgccaccggggccggggcgcgggccgggggcccagggtcgttccccgggcacttgatcgcccccgggccgctgccctcggaagcgacgccccggccagtccccggccgaccccgcacatacttggcgcgatccgccgccagcctctccactgcgctcctgcgcgccggccgcgcggcgtcggggtcccgggtagccgcggggtcccggggaaggagccgctcgttcgggggcgcgctcagggccgccagggcgcgcatcttcgcggggaatggaccgaccggggttccgggtccagcggagacgcgctcgagtggtagagccagtcagtcccagggccggttccgaagtccgcgccgggtggggaacggcgccccagtgcccagctgcccaggcccggggttggggagaaccggagtctgcaccgattggcgaaactccccagttcccgcccctcccgacctcatcgcccacaccgactggcaccgcccccgcccccgcccggtgccccggccctggccgcgtccccgcatccccgctcgtccccgcccgtccccgcctcctcactcccgcccgggcccgcctccctggccgctctccgggtgccagcgcccgccctcacctcgcgtccggggtcccggccctcacctcctgcccggtgccgtccccgccccccctcaccttccggcggcgctgccaaccgcctggaggacgctggggcgagcaggctctgaacccccactcgctcagccccagatccccgaggtcactgctggacgcaggcatttccggggagggggagcagaggggacgtccccccacctcccccgggcaggtgcctcacatcctttgaattcttaaagtgacctcatcgtgtttggaaacttgactgtttaattttgtctacctgagctcatattcttattaacagaaaggaataggacataagaggaaagaacacgcagcgcacgccaggatcagcctacgtgttgggtggcaagaacgcagggcctcggattgggtccgactcggtcgctggccggcagcgggcgtggccgggcccgaggaccgagctaggactctcagtggggcaggctggggccccaggcgcggctcagtggatttggaagaagcccagccaagtgtccagaatcattgctatttttacggtaaccgaggcaacggggaaaccacgagttcaccaggcagtggatcagcctaggaatgctaagagtctaagataaaatacttcccaaactccattatttcaaaaatttggacaaaatactaaagttatctctcagacatgtgaaatgttcacgttatcgcgttgtgaagacaactccgtaacaggctgtgctttcagccttgtggttgaacgctccgagcagcagcagcccggaaggcagggagggcgacaggtgcagatgggcccccaaagtgggcacgaacacctcaccaacgaggaagaggaccgcagcagggtggtgctgagtgggccttgggggtctttaatctccttgagccccagcgaagcaaaatttcatagggatagtagcacaacaataaatcgcctcctgaaagccagaccgcccagacagcctcgttggaacatgtaagactcataggaaaaggagtctaggccaataaagtagagagtgggagaagagaaggaaggatgcgggggtggggagtgaaagagagggacagagatggagaaagggggagctcctgggttgccacagatggtttcctacaggatgcgggaggatggggccttgaggtctaaagtccagcctgctctctgcttggcaagcctgttccctaagtcagaggaaaaaacctttttaattgtgtagcccaaagtgtcttcttttcctaatttgcactacttcatgggcaacagcagcacttctaagacagagaactgcaaagtacaggacctctggaatttgaccctgggtccacaatttacctttggacaggtaacaaacgttccaggttgttttgtcacctgtaaaaatttctgttttaaatttacaagaaaagacaatcccattaaaaagcggacaaaggacatgaacagacacttctcaaaggaagacatttatgtggccaacaaacatatgaaaaaagctcaacatcatagatcattagagagatgcaaatcaaagccaatgaaataccatctcacgcaagtcagaatggctgttataaaaagtcaagaaacaacagatgctagagaggctgcagacaaataggaacgttttcacacattgatgggaatgtaaattagttcaactactgtggaagacagtgtgacaattactcaaagacctagaaccagaaatatcatttgacccagcaataccattactgagtatacacccaaagaaatacaaattattgtcttatgaagatacatgcacacatatgttcactgcagcactactcacaatggcaa

SEQ ID NO: 2965 - DNA, 4001 bp, Homo sapiens
atgcctgtaatcccagcattctgggaagccaaggcgggcgtttcacctgaggtcaggagttcgagaccagcctggccaacatggtgaaaccctgtctctactaaaaatacaaaaattagccgggcatggtggcggtcgcctgtaatcccagctactcaggagactgaggcagaatcgtttgaacccgggagttggaggctgcagtaagccgagatcgtgtaactgcactccagcctgggcaacagaaactctgtctcaaaaaaagaaaatactattcatcattttccagggcaattctctctaaataagtattatctaaaactttcataaaataaatagtaagaaagagtcatcctattccttccatttcggaaactatttcatctgaatttgtttcctgaaattcccaaccattctgcctggaaaattctaacagaagttccccagacaaggaaagacaaagatatatgttgacaaaaatgaatacgtaagtaaaaaccacccatttctttccttaaggcaacaagattataaattttattcctttccacttcccacaatttgaatttctcttttgagttactctttatgaatgactccattggcacccaacagctccattcaggaccttccccaagaaagcttccaggtaaacagaaaaacaacgaatgttagctccctaaaacaataacaagatggagacaaaacactggattctgtttttctacattcaaaacacagaatcagtacacaaaatcagaaatacacccagagcctcagacaaaacccataaaccttcctaaggaatcttgtttaattttcacttcttgctacccatttatcaagtcttaggaaatgctaaaacacggttctcagcctcctctgttcagtgatccaaatctgccactgctaatgcattcagtaccccagatctgaaactgttttgtgaacagaaatacttagcagcagcagatatgggctatgccaacattaaccttgtccctaaaacaaagtgacaaaccactcctagcctcaccctcaagggagggtaagcagtaacgactcctccaggagtaaggccaggaagccaggtttatcattaacactcatcagctcaagcccaaggtttagccgctgcacctccaccaccagggagccgtgcggggcgggcagaggggtgaatgaggcgggcgggcgggcggggcgtagggtaggcccgggaaaggcggggccgcactgccgggtcccccaccgcccggcaccgcccccagccccgcccccagccacccgggctccgcggcagctctgcagtccccgcgcgattgcagcgcgcgcccgggaccccttcccgcagccgcctcccccttgctgcgcgacccccagcacttacctgctttgcaaaccggggcgctggggctcctcttctccggcgagcttcggctctgctccggagacctcctccgatgccggacgcgggctgggggtggggccgcgctcacctcgccggtccacaggtgggtgggcgacgagctgggcgacgacacggtgcccagcagcggcggcggcggcggcggccgtggggggctcccgcgagctccaggcgcggcgctgcgcgtggggctggtgcctcgcgtggacgtcgcggacgcgcccgtctgcgtggccaccgtggggctggtgcgcgcggccgcgttcccgccgccgcgcgtggggctggtgctgcgcgaggcggtgcgcgggccaccgccgccgccgccgcctgcggggcctgaggcgccaccacagcagccaccgttgttgttgccgccgccgccgccgccgctccgcgtggggctgccatgttgctgctgctgctgctgcttcagctggaacggaaccgtcgccctcatgggctgcaagcggctcccgggtcccccggccgtggccaccgcaccacccccaagggagccggccggcgtgggggacccattgcgcctcacccgctgggacatggtcccccccctccccggtgactgggcgagacggggggttttgttgttgttgggctgcagggggaggattctcgaggccggagggcaggccccccaagacggggtgacgaagccggactccggggtgcagggggagaccgggccggggcaggcagcaacgaggtggtgcagccgccgccgccgccgccgccgctcctcatcaacaatagtgtctcctctgctgcccccgccccccacgatcgcccattggtgcagcgtcagccgcgctcgagccgctccactgctcccattggctacgagcagctcgggtcccgggcccccgaggccttgagagcctgggtgtgcgcggagaccgtctgctctttaaagagaaagagacccgccccccgcggggagggagcggaggaaatgggccctgtgtgtatgtgtagtgtgcgcgcgtgtgtgtgtacacgtgagtgcccgtgtacgcgcgcgcctagccacgcgcgcctttcctttcccgccggggggagccctggggactcagactctggaaggttgccaaaggaaatgtccagacccggagcagttcccagggatggtctgaagccttttccgcataactcatttccttaccccagtgttcacttgtgttcacctgtacgcgcatctcgttcgggcttttattcttaatgtttttgttctgccctaattccatctacctatgggcagggctcaaaaggagaagaaatttaactaatcttactggcattttacgcccctctccttttattttttagagctctacaaagaggcaaatctcagaaagattaaacttgcctgttagaatgcgattttagatagtatctatagagttcagttaccacatgttattcctaccctcctgtatctcaagtaatcaagactattttaatcagctgcttcgctgttccctgataccttggaaggatggctgctaccttaccagtttgtaaagtgctatagtttacagagggccttatttgattctacacgatcattgtttgagacagaactgggacagccatccatatttttgtctagcggaggaaacaagtctttggtgtggcaaagactcgggaaggcaggcagtgacactatttctaaaatgacctaaagggctcctcatcaagaaaataaaaaatggtggagccaaaacctacactcccacctgtctggctataaattgcctatccatgacctcttttccctctactatttttattagttgtacatgctagacagatttcgtcgtgtaaaaatgtgggagtggagggcatagtatgattcactctggacctgaaatcctactgggtccctttgcgcggtggtggaaggccttttttttttttttttgagaagaagtctctctctgtcacctaggctggagtgcagtggcggagtgcactggctcgaatctcggctcagtgcaacctccgcctcccgcgttcaagcaattctcctgcctccgcctcccaagtagctgggattacaggcgcgtgccgccacgccccgtaatttttctgtttttagtaaagaggcggtttcaccatgttggccagggtggtcttgatctcttgatctcatgatccgcccacctcggcctccaaaaatgctggaattacaggcgtgaggtggaaggcttttaaagacctagagaggaggccgggtgtggtggctcatgcctgtaatcccagcactttgagaggctgaggcgggcggatcacctgaggtcgggagttcgagaccagcttgaccaacatggaggaaaccccgtctctactaaaaatacaaaattagccgggcgtggtggcacatgcctgtaatctcagctactcgggaggctgaggcaggagaatcgcttgaacccgggaggcagaggttggaaggagccgagatcgttccattgcactccagcctgggcaacaagagcgaaactctgtcttaaaaaaaaaaaaaattaaaaaaaaaagacctagagaggaaatt

SEQ ID NO: 2966 - DNA, 4001 bp, Homo sapiens
gcaatgcacggcagctatcatgactaaatacacacatgctatgttaggttttcgaggatggttacaaaggaaggctttaatttcaagtttttttaagaaagcattctatctaacttggtatgtggtaaaatttgacagtgatgcaagatgcttaaaaattaagtcaatacgagttgatgggtgcaacaaaccaatatggcacatgtatacctgtgtaacaaacctgcactttgtgcacatgtaccccagaacttaaagtataataataaagaataaaaattaagtcaatagtactgcaaacttaacatccctaaacaagctcggccaacatagtgagaccccgtctctagaaataaaataaaatagccagacatggcggcacgtgcctgtagtcccagctaatcaggaggctaaggcaggaggatcacttgaacccagaaggtgaagacctcagggagctatgatggcaccaccgcactcgagtctgggcaacagaggaagactcccatctctaaaaaataaaaaaattaaaaattaaaaaaaccatatctaaacataagtatgacttcaacttccttaagtcagattagaagagcttgtgacattcctgagcccaaagagtaaacaaaggataggggtatagttgatgggcatttaaacggcaagcctgagaaaggaggccgattctttaataggattctgatctttatagtagaatcctgtctgattctactataaagtacttgtgtcagctgcaaattcatggaatctgaactttcttatctgtcagatgagattttatgagatcagtgattctcaaccctgttacagattacagtcatccaagaagctgtaaaaaagttacctaggcctggatgttcccagagattcggatcaaactgccctggggtgggaatttatgaaagaccctaagggacgctaatatgcaaccaagtctgagaaccactagcttaggcccattccgatgtaaaattacacagctccatgagcctctacaagatctgagacaaaacagaaatacctgaagcagaatcttgttgccatcgtagtcctgagtctgccacctggtgctgctgataggcatgcatggattgggtagcagaggcactaactggccgatctcttgaaccttaaactgcagcaccgaagactctttggggtccactgacattcccgggggcagctgcttcagggagagctgcagagcaaagctcttggaggcatagagcacgaagaaacaaaaattgctcttttgcaaggtcgcttctctctgcaggatcatctcgtagagtctgatggcgtcttcatagttatcaaaactgcagtacagcgtcaccctcaggatctcggagccacagtgcacctgcctcaccccccagatgggcagctgactgtccaggctgtagaactcctgattggcaaaaaagtagggacacagccttccccgagtgtcctgggtggggtagcactgccatggcgaatgctggagagagtccaggacgcgaaatagcctatcctctcccgggctttcgtgcaggaagagcaacacggacatccctggaaaccgggaccgcttggaatgggacttttcacagtatttcacaggactggcccgttcagacacctgaaagagccggacctctgggcaaatgcaatccaggagctggtccagagtcctctgcagaagggagccgtgcccagagttggcaagaagatggacagtcatggccagaggcccctgtgtctcatccatggaggaactgcctgaggctgacaaagacagcgtgtgtagaaggcccactgttcaagtttctgaaatgaatgaagaagcggcccagccttcagcccgcctgaaaaccttcagctgcagcggctacttctgagcagagctcttaaccagactaacacgtgctcctggccacccgtggacttacggcaagagaagctcacaccagctcgggttcagcagcctccctctccacacagcagcagcggggtcacgtcatccagcttgtgcataatgtaactgcttgtgtttagccttttcaggcgttccccagggtttctgcgtgacctaaaaacctataatcctgagaaacacccaaatgggcggctcttatagacacttagtacaggaaatgaccggccgaaaaggaacatgagttggctctgttaggctgatagcaatctgtttagttgaaaagacatccattttatcaacttacaacgggttctcatttcctacttacggtttacagtagcctgctccaccaatctgaatacaatgacttcttgaaaacaattctcaaaacctgaccctttgccagttttttttttcctttgtctctttatttcattttgtttctgaacattttctgctagggcacgaagagaagactttatctaaataattttgacttcactgaaaattatttgctgtaccgaaaattctgagtgtactaaaaagacattgagaaaattagtcttcctttattcacgcaaattctttagaaagagtgagagctttcctataattgctcatataattataataataaataattataattaacaattgtaattataatttttagtgtctaatgaggatctactatgtaccagtcataaactgttctaattcttaaagtaattagttttgttttgttttggagatggagtcttgctctgtcgcccaggctggagtgcagtggcgtgatcttggctcactgcaacttccacctcccaggttcaagagattcccctgcctcagcctccccagtacctgggattataagtgcgccaacacgcccagctaatttttttgtatttttagtagagactgggttttgccatgttggccagactggtctcgaactcctgacctcaggtgatctgcccgcattggcctcccaaagtgctgggattacaggcatgagtcaccacacctggcccttaatgtaaattaatttaatcttgcaacaaacctatgaagaagagattactagccccaaattacagatgaagaaactggggcatagaaaggctaggtaacttgcccaaggtctcacagctaagaagtagctgaaggatgatttgaacccaggaacttgctgcactgcctctctggggccttgaagtcccagcctgggtattcttcttgtaaggaaaagatataaaagcaagttctggttaaggatctagatttgcagactcttgagctgttgaatcttaaacggaataatcttcaatgagaaagttgtcaagctctaaacactcaccctaaatgtgttctaaatattgatttaaaaattatttgtggccacgcatagtcgtcacgccttgatcctagtactttgggaggccgaggcgggtggatcacctgaggtcaggagttcgagaccagcctaggcaacatggcaaaaccccgtctgtactaaaaacacaaaaattagccgggcaaagtggagcatgcctgtaatcccagctactcaggaggctgaggcacaagaatcacttgaatccagcaagtggaggttgcagatcgcactactgcactccagcctgggtgatagagcaagactccgtctcagaaaataaaaaataataaaaataaataaataaataaatatttttaaaaaatcatttgctctcctgatagctgtgctcctcaacaggtatgaacaagcactttttctaaacacaattctttttaaaagaggcaattggaccaggcgaagtggctcacaactgtaatttcaacactttgggaggccaaagcaggacaatcgcttgagcccaggagttccaggctgtgctgacctaaattcatgccactgcactccagcctggacaacagagcaagaccctgtctcaaagaaaaaaaatgtacttcaaaaagagctgtaaaaaattaaaataaaagaggcaaatttatgaatccttataatgaaacacagtgtgacaattttttacattaaaaa

SEQ ID NO: 2967 - DNA, 4001 bp, Homo sapiens
aatagaaccagaaattttctttgtgactgagattgcattattcttggaaaaggagaaaagacaaagaacaaaacaccaaacatcaataaaaatttttatctaaagcactgacaaatgtctcagtactgagaacatctgggaacaaacaactttaatgatgcacctctttcccaattaaatttttgagaaaaaatgaaattttgatttaggttcatatataggaatataaattaccattaatagaaaaaaatcacatcttataaagtttttctgacatgcagtaccgaaataaatttaggaaaattgtagagttgctgacactacattagaccttatctcctaagctaaaggcaatatttcaaacaccttacattttagaaatttataacacttcttttaaaatcattttccagtgctgctctcaaaattgtttttcaatgacctacaaaatcaagtttttatgtcgtttgcccttccataacacatactgaatagaattcctattttaattctacattttattgtggaaacaatgaattataaaatttttttaaataagataatttagttaattatatctataaatatattttgcctctgtccgagaggttcagagtccactttttaaacctaataaataattcataagtagcttctcagacttgcttacagaacaaactacttaaaagttgacttttttctgccgggcacggtggctcacgcctgtaatcccagcactttgggaggccgaggcgggcggatcatctgacgtccggagttcgagaccagcctgaccaacatggagaaaccccgtatctactaaaaatacaaaattagtcgggcgtggtggcgcatgcctgtaatcccagctactccggaggctggggcaggagaatggcttgaacccgggaggcgaaggttgctgtgagccgagatcgcgccattgcactccagcctgggcaacaacagcgaaactccgtctcaaaaaaaaaaaaagtttatttttttccccatattcagaccaccaccttatttgcacagtccctaacttccacaatatcctggggggaggaagggatctaccaactaattttctagtcattttccaacttacactgagctcctactgtacatttttaaaggattccccacttttctgaagatctttaaaaaatgttgtcagccttgaccctcaaataaattcacgaactacaaaacatgaacctggccacattcatcgcaaactagtatctgtcaagtccataattgggataagctcttcgtgactactctatcctccatgctaccacccttcgcctagagaacctgccaatgtaaatggcactcaagccaatgaaaaaagtgttctaacacattaataggttgcaagacctcctctcccaggagggacaacctagttgtttgggtaaataacagccaaagattacataatgtacagcaataatgagtgttcagaatctgaccgccagtaaatatttttcttctccgctccccctcaccacccccaggaaatggccctaagaagcaatcactgggatttctcttaactgtcttcaatgccgtgtccttttctcgcctggggctttgtgcaaagaatcccttcagccctcacgacaccgccttgctcccgcctctcctccctctctgctggcgccaccgcagcccccacgccctaggtgggcccccacgtcgccccacaaggctcggcttccacccgcctcggctgccgccttctcctcctcacgaccctcccaagatgctacctggtttacgagaggttccgggaccaccaacacaccggctaccgcctttccagaccaccctcgccagctcccgtctgtagtttccgcggccgaaggagaagaaaacccctcttcatctagcactttgcctcccccaaagacagcaccgccgcctacctgtcaccctgctgtctccggcttcctaccgccgccgcctcccgcagcagcctgccaactgcagcgcaacaaccaaccctctcattgggtgagaacacgctctcaacaacagcctcccttattggctgcagtatgccggcagccccgccctgtgtgcggtgtctaaggattccgtccccaagcaaggacaacatattatcttccccgcccttctcttttctacagtatctgttacctcagtcagattgaggatgcacatatactgggaaaataatcgacttccagcgtccctcatgtagtctctacctgattcaggaatctctaacccagtatcggaacgttaagcggcttctccgctttcctgccgtgagaaactcgaggtgacaacctccgtttccggttggctccggttgcagagttgagtgtcctgagaggtcagattgctgtcaggtaaattagggagttggtgggaggcccgttgattaggattaagagctagactctattctggggagtgcagaaaaggagagactaaatggagaaggatgggaggctgggagggagatcaaagaactagcaggcgagaactaatgaagtcctagtttagagttggggtaggaagaggtggttggaggattcagtgatcattactgtagttgttaaatccaggtgcttgttcccgcttctgccacacgcaaaattgtctttgtttgcctttggatcgcaaaggcagaagaacagcatcactaaaagtaataacagttcatttgttttttatgttctaatattcatataatcacagtttttaatacgaggaagttaagatatatacttgatagtcttcggtaaactaaaattgcatgtagtggaagtagcattatcttcttatttctttcttagggaaaggataccagcacattttcttagagccagcttcctttagtggaggttgatcttcatgagacttttagattcacttcagacatagatagcttttaaaatttttggttgcatgttttttctttatttaactaatttccttactgttattatttgagctgctctgaaacggaaataaccaccatttttcagtcctcagcacaatttaagtcaatttttctatttttattttttattgtcaagtatatatacagaagggtgtataaaacatacattttaaaaaattataactaacagaagcagacactcctgtatccacctcttagattagaaaataaagcattgccaataacttagaacatgcagtcttaacaggggtgattttacatttcaaggggttgaaaattggtggggccggggtcggaatcttagttactacaatgatttgtgtccctccaaagggccacagtatataaacagttatacagtatatatgtagtgttaaattttcatggcggggggtgtgattaggaataaaatgtctagaaaggttccttacagggacaatagttaaaaattggttgaaaaacactgccttagaatctcccagtatgtttctgtgattccatctcctccaccaagaggtaaccattatcctgacttgtgctaagcactcacttgttttactttaatttttccgtctatgatgaattcctaaaaaatgaattgttaggcatttcaatctatataaatgggttcagagtgcatgtgtatttttttctgactcaccccttgctcattatccatatttgtggagattcaatcacacttttgcatgtagttttttgttgtataatattctacagtgtgactataccataatcccttctattgttattggacatttgggttgtttacagttgggagagagaataaacaatgtggctataaaggttcttttaaaaacatatttcttaggctgggcacggtggctcacgcctgtaatcccaacactttgggtggccgaggcaggcggataatgaggtccagagatcgagaccattctgaccaacatggtgaaacccagtctctactaaaagtacaaaaaattagccgggtgtggtggtgcacgcctgtaatcccagctactcggtaggctga

SEQ ID NO: 2968 - DNA, 4001 bp, Homo sapiens
ttcatttcctcagcacttctgagacactgacacatggacagtgatgcttccggaagttcccattcctgtccgcgctgcatcctgactgatgctgacactgagcacagttttgggagggaccttcctgggagaggccttgggctatctgggctccaggcaaggctgccagctgggaaggaaaccggcccaagagggcttagatgaggtcatgggtgctgacgctgggggctgacggaaggaccctgggattttagagctgactgggcccttttatcagagacaaagccggctgccaagtcactgcctttggttcctggctgatctggggggatgcagggccttcttttgggagctggctgaccaatgcgcaggccagggtgttgtggtgggaagatgggggctgcggtgccgaggagcctgtggttgggcggagaaagggttcaggggcccagggccctcagcgctgctcagtgcttccttgtgccttagagggtcaactgcaccacctgctggctgatctcccctctaccccctcccaggaccctcttccacttcctgtgtgccctccgtggaaacatggggcgaggatgccgcacaccggccaggaggggtgtgcccagctgaccctcccagctgcacctgtggcctgtggccggaccctgaccccagtgtggtttgcaggtagagctgtaacaggcagaaggtggcgtcccaggagacggccccagcaatgggggtgggtattgggcagctgccctggttccagccacaaggggtctctcagaaacaagccttggagcctgggaggacctctggtgtcactgtgtcccccacaaacagggtccaaggccaaaactccacctggaagcccctgagccccgtctgcctcctgctgacagtgccctgacatttggctgctgtgcccacctgggtggtttggccaactgcacggggagggggtgccttcagtccctgggaagtggctgggtgtgatggggccgggatagagaactctgggggaccccaggcctggctgcacccctgtcctctctagtagatgcgttcctggctctcccctctactgcccctgagcatcttcagaataaacagcaccggccgcccaccccggcttccctggggcagccctgtctccctgacccaaggcccggccacactgagggctcctctgaagttctcccctcctcaggcctgggccacacctccccaaccggaccaccctctgctcagcagtccaggctccaaaaccctggagaggagggggcagggcagagctcaagatcacccactcacggccaaaagccacctgatcacttgactcaaagccacatgtcattccccaccctgcacagccccccgaccccagatccgcaggaaaacactttttgttttccagataattgcaccaaatagattgggggcggtggcagtaattcgcttacactttttacaaatgcgttcttcccaatttcctcaaatcaagttatttacactttatctatttcccaacttccttctgtcccaaaagaaaaggggggtttcgccgacctagtagaaccttgctttaagtcaaactaccccaaagccaaagtcaaggctgccccgccgggctgagggcggcgtctacacggccctgagtctctgcggagccccggagccccggtgccaggcgatgcagcagccctcgggggtgagggcgggctcggcctccacgtccgcctcccgccgccccgagccggggcgtgcgggcgcgggctgggtctggagcgggcccgggcgtcttaccggcggacgagcggccggccccgcgcggctctccccggggccccggggcagctcgttcccgggcggcggctccctgcgggcgcggctcctcgagggcgccccaggctccggggaccccaggcccgcggcggcggcggccagcaggcccgcgtagacgagcagcaggcgggctccggcggggcggcgggccggggccatgcgggcggcggttccctcgcggctccgagcgcggcgtctcggacgccccgggctcctcgccttataacgcgcttgaatcccccgcctcgcccgagaccgcgcgcccgcccgcgccccctcccggctcccgtgcgcgctgcatggggatggggggagtgtccgggcgggggagggggagtgggggagggggcacggggagcggggcagggcagggagagcgaggggtgttcccctgctgggcgcgtcccccctgcaactcctggttctgggatccctccttcgcgctgtccagcgcttctgcttcctggggagcgaggcgccccttctcccagccctggaccctcggccctcgcgaccccattttctttgcggggagccaggcgctgcctcctcccagacggctcgaggcatcctttctccccgctctgtcccccacgtcctctgcagggacccccgaggtaccccctccccattctcctggctgcgccccgcaaggcccaggcctctatgacacaggtggagcaaatctgagccgggagaccctcagggccccttctcagcgcccctttcccaggcgggaactcccctttccaggccgccctccgtccatggctggcgtgctctgagcgcagggattcactgttcttccccacctgtcgcacctgccgggacccagaagacgcagggagccaagaaacaactcaggacagccgccctgccctggtggggctgagcggggcctgggctgggagaactgacccctatcgtgccctagcgggggtgtgggggcagaccagaccggaagccaggctgcccaccgcccaccggaatcagtgcccccagaggtggaccagaccctgcaggcctcggagaaggtggcagagaggcctctgggcggccctaccaggaaagagccagccccagccccaccctacccctggctttgttatatcgcatgcccttttgactatctgccccaccactggacgctaagccgaggagggtcgcacacttggctcgcttgccccacccccgaggcacctgcccctggtgggtacacagtgctttttgttaaagaacgggagaaggctccgctggaaaagtaccttacactcacaccgagggctgctgttcccggggaactcttttgagaagagcccgctggggaaaggaggccttaccctgtcctggttcacaggatgtggcagcagggactgaaaggggcaccagcagccgcaggtggtgccccccaggcttggggatgggccaagttccgtcctcagatgcaagctggcctttgtcgcctgccttttctggccactcatgcgatgttccacctggctggcctcatgcctggcaggtggggaaaccaggaaatacttcatactttaggaaaagcatgggatcagaaggtaattattccctgtgattccaccccttttcccataggatatgggaatggtgtagagttgggtggggaggacgtttaaagaaaaacataccctgcccagcatgagaatctgcccggcaggggtaagtcccatggacttactctgtgaagatgtctttcaatggcaggtgaggacacaagagggaagtcctgcctttaaaagccacaaatgggccagacacggtggctcacgcctgtaatcccagcactttgggaggccgaggcaggtggatcacctgaggtcaggagttcgagaccagcctgaccaacatggtgaaatcccgtctctactaaaactacaaaaattagccgggtgtggtggcgagcgcctgtcatcccagctactcaggaggctgaggcaggagaattgcttgaacctgggagatgcaggttgcagtgagccgagatcacaccactgcactccagcctgggtgacagagcgagactccgtctcaacaaaaagccacaaatgatttttttttttaaaaagaccaatacaatgaaaacatttgaattcctataaaacatgcaagtctttaagacacatttg

SEQ ID NO: 2969 - DNA, 4001 bp, Homo sapiens
agcagctcctgcaggtgaatctggaaggtgagccagctctcagccaggtatctgcacaactcgggcacactcagcaggtgcggccgggcgcctgaccccgcaccctcactggggagacatgacatgacccctggaggcctcagataccagcttcctagacacttaaatccctctgagaatgccaaagatatctttagtctaaaaaagcaaatgaccccacctctcaaaaggaggctgtcctggtcttagaagcaaagccaggaggacccaaccctctgccccaaaaggagcaggcacgcaaacacctacacaggagcctaggaccatgaaaaacccatggcttgttaccagttcattcacaatgctggggcactgccctgctccatggtgacactggcaccagcaagcaggacaggatgtgggcatttgtcttcaagaggtggcctgtactcacctgtcagagtgtggctcctctggggatgatgctagagagagaggaggggggcaaattattgagtggtaggggccctgggagacactccccaaggcagaaatagttgtccctcctctgcagccccagagcaccttcttcagatgccaatgggggagctgttacatgtttttgtttgcgtctgtctcctttagacattacccttctccaacataagaactagattttactcatgcttatctcccaagcaactcacatacagcctgtcacctactaagtaaattatatggataacaagaaaaacaacactgacgttctatttataaggcttatatgtgaaacactatcataagtatagcatgtgtattaactcattaatcctctcctcacctctctatgaagtaagttctatcatctgtgttttacagataaggaaattgagacaaacagaaattgagctacttttacaaggtcacagcaatggtaaatggcagaacagagaatggaacccaggtaatatggctgcagacttcaccatcttaaccactgcacctacagtagtattagtttgggaaaggggcaattctcattttagggaattccgtacaaaaaggaagtgggccatgcctgggaggcaggtggcctgctgtacgttcccctcgccacttaaccccacccagcggaatcaggcaccaagcaagtacccaatgggtgcttactgaatgaagaaacactcacctgaaacgtcagggagaaagcgaggctgccagagatccagcagaaaataggccaaaagtgagacgctgagtaggaagaagggccggagggacgaggaagacagcaaccttagggagagacaggcacctcagcagtgagtgggtgagacaggctcatgcatccatctcagaaggtggaaaggcgcctactgatggggtaatggcacctccaggcctaactcgcgactcacgactcagagatagaaaaaaatgggcaattcaagcggatgtcagcctgcaaaaactggggatgggtcatgcccccaggccaagtgataacccagaaaggggaatggtgctctcgacccctccctcccccgctcatcccggccccgccccctcctccgcggccgttaccagaagaggccgttgagcgcggccgccgtgaccaggctgtgcagcggcttctcccacaccagcaaccgctgcgccgccgccagcaccgcctcccagccgcggagccgcagccacagcgtcgtggccaggcgtcccaccgcctcggccgtggccgcctcctcctctgcctcactggtggcctcactcatgcctaggctcagacccagacccaggcccaggctcaggcccatccccggccccccacccgcgccagtgttacccccgccaccgccgctcgccatagccccgccgcagccgccgcccgagcccgcgaggagccagggctgcgcggccgccgccgggggcgcgtcaggcggaagggggcgccgcggaggacagcagaggttgcggacgagcgtcacgtgactgcggagcgctgagcccgtcacgtgacgcggcctaacccccccccccccggatagggcgggccgcgcatgcgccccggcggctgccgctgacactgcgcctacacaggttcgttttctggttgacgaagtaccccgggttccgagtccgggtctaggtccaggcagtcgagcccgttttcttatcccacagtaggcagggcggctagggagtgtggtgctgccccggtatccccgtgtggggcaggaagtgggcttccagattcccagtatccccggtagggtctgcttctgctcgctcgggaagggcggtggccgtcccattactcaaccaaccctcaacgcactggtcctcccagttccctcccctcagtgggtaaacaaacacacaccagcgcttgactcgacagactcgaaaacaacatctactcagaaaagttgtttctttcctatctccttaaactttcccacttccacatatcggagcttcttcccacctcggcctactcaagcatgagatcggaggcgggaggtgggtttcaacacaaaaccttgggtagatgcagtttacttttgggtggacgtgttgacacgttttgaggccttacattcgcttaagatcacagaatttcctcagtagccttaggtttaaaagttcaaattacagtaaaaaaaaaaaacaccctgagtttctcttccttttcatagttcacccactgctaaatttcctgtgtgtcctttcagacgcttttcatatgcattgctgagtatgtataatatctctcctaaaaagcaactgggaacaacttcctgttgtgcgtttcgtcttattcacattaacttctccattgctacgcctggcttgttcatcctcagtgcggcgtggtcccccctacgaattgtccccatttctcagaggcgcctggggcttggccacgttccgtgagaccaggagttcgagtccggttcctgcccgcgggtcggggcgggaggctgggccagatgggcggcaggaagtgccaggcgctgacttgcaggcggcacccccgcggcttgtaaacgccgggcggacgcggcacaggcggagtacgcgcctcgcagccgcatctcctttctgctccgcgaggtgagcgtcgcacggacgcttgacacctcccttcccgggcctagggcccccgcgcgccgcgccaagcccggggcggaacaggaagaggcgcccagttcagcccgggccccgccttccgccgccggggggagggagctgcgagggcgagggcgaggacggcggcccgccccggggaggcaggctggcaggtggacaggcgggcaaggacagctccgcgagccccctacaactcgtttccttccgttcaccttcgcagggcggcgactggcggcgcgatggacctgaccgggctcctgctggacgaagaaggcaccttctccctcgccggcttccaggacttcacggtgagtgggggtcccgccccctccccggcctcccggcgcgcccctcccggcctgagcggcgctgcgagctcgcctgactgctgtgccgggactgggcggcagctgctcgagcagtgcttccttgaggccgcggctgcttgggccgggagggagagccgcggagtataggaatgggcgtaggggtggccacacgagggcccttctcggagaacttctcccggggaaccctcgatgggggtgggggcattcctccctctatggaccaggctgccattggcaagcgatttacagaacgcgggtctgggtaaggcacgggccccctagcagcgaggccggcctgtcccctgccccgccttccagcccagagccaggatctgcatcatacctttccgtgcccttcaccctccgctgcccctgccctgtttcagttcctcccaggacaccagaagctgagtgcccggatccgaaggaggctctactatggctgggactgggaagccgactgtagcctggaggagctctccagcccggtggcaggttagg

SEQ ID NO: 2970 - DNA, 4001 bp, Homo sapiens
atggggtttcaccatgttggccaggacggtctcaaactcctgacctcgtgatccacccgcctcggcctcccaaaatgttgggattacaggcgcgagctacgcgtccagccaggaaactttatactacacagtatacattctgtatttggtggttatgtcaaaaggaacaaacaaacgcctcctccccaacaaactgcataagggctcttggtcatgaactcccctggtaactccccattacatcatttctttttttttgagacagagtctcgctctgttgccaggctgaagtgcagtggcgcgatcttggctcactgcaactacacctcctgggttcaagagattcccctgcctcagcctccctagtatctgggactacaggtgcgtgccaccacgcctggctaattttttgtattttagtagagacggggtttcaccatgttggccaggatggtcttgatctcctgctctcatgatccacctgcctcagcctcctaaagtgctgggattacaggcatgagcctccgcgctcggcctacatcatttctataggaaatgatgttcaacttaaggcactcgaccgccaagactttttccaaaatttcaaaccctgtgaaaactggttggccatcagtatcacaactgttaacagaaccaagacactaaagccaagagttttgaacaaatgcttgtcatctcctgcaaaagtctgtatcaaggactacagtgctctgtctaggatatttctcacctggaacttctccagctcactggtgaccaaagcctgggcttgagccagaggcacatggcagcgctcgatgcactggtgcacctgcttcatggaggcctggctgtcctcacaacagctggcgctgcaccggaacatgagaccctggggagaaagggcagagaggttaggtaggaaagtctctggggacagagatgactatggagcactacaggagttagaaggccacgtggatatttgcacctctctctccaccttctgctttcaccttccctgagaatagacaccaggaccttaaaaccaccactggggaaaattatcctcaatgtctagtgtagtgtttcatggtgtccttgctgctagctcatcggcacctgttgcaccgatggttgggtgaacagaggttcgcccgagtgggtgagggtagggtggtctgacgaagccaaattctgaaaaccaggagcctcttccatggggttcagaggtcagcaacctagcaatacaaattccaccagagggcagccgacccactaatcaatgactcaaggggcactatctgggaaacgcatactccgtgagagaagcaggaccgaaacacacagaggcattgcggggctcagagaagaacagtgtagaaacccgcgctgtgtgaagcgaggttgggcgcaagagaagcaggcatgacctggccaacggggaggccggaagtcctcgcctttctggtctttcacgttggcagcgcctctgctgggcctcgggccgctcacctgcggaaggggccgcgtaagaggggaaggtggtggggcgagcgcctgccaccaggggcttcccacctgccgccgaggacgctcctgccccgggctggaaggggcggaaaacagcctcgcgcacggcaagggcacacggatttcatccgatccgccaaagcttccgaagtcctgtccgaggccgccccggcgaccccagggccgcccacacccggtctgcggggacgcggctgcagtgcaaggcgtcgcgtggtggctgagggaagggcccggaacccacccgctgagaagggggtcctggttcggccccagccccgctacctgcatcttccggatgttctctctttccagactcttcaccatggactccaccgcctcctgcacccggagctgctgcagctcagccatggcgaccccgcgctgccccgcggcgctccgcgccggcgcccatatggaatcggcgtacgggcccgccccctcaccgcccttcgccgcccttcgccgcctgcccttccagggcccacgcccccccctggcggccgaacggagccactgcatgctggtgtccgcgagcccaccgccctcctcccgcttgggaaccggtcactgggacacctgccctgcggctgctgcctgcctttcctcctccctcccatgtccctccctttacattctttaaaattatttaatgtaatttacatacagataaatgcccagatcttaggcgtgctgcttgatgagttttaacaaaccctgtccgccgggcgcagtggcttacgcctgtaatcccagcactttgggaggccgtgggcaggtggatgacctgagctcaggaatttgagaccagcctggccaacctggcgaaaccccgtccctactaaaaatacaaaaattagccgggtgtggtggcacatgcctgtagtcccagctatttgggaggctgaggcaggagaattgcttgaacccgggagggagaggttgcagtgagccgaaatcacgccattgcactccagcctggacgacagagtgagactctgtctctaaacaacaataaaaacccaaactctgtcttgtcccaatctccgtcctttctaccccatctccccacccctgccctaactggtctgcttctgtcactgtagattacattttctctttctagaatgtcatatgtatgttattatccaataagtactccttttctgtctggcttttttagcatattgctgaaaaatacttagcctaatgctttcgagattgagctgtgttgttggttcttttttgctgctgagtagtattctattgaatggacataccacatttgtcgttgttgttttttgagacagggtcttactctgtcacccaggctggagtgcagtgatgtggtctcggctcatgcagcctccacctccctggttcaagtgattctcatgcctcagcctcccgagtagctgggattacaggcatgtgccaccacgtctggctaattttttttttttttttgtagacacggggtttcaccatgttagccaagctggtctccaactcctgagctcaagggatccacacacctcggcctcccaaagtgctgagattgcaggcatgaggcatcggtcccggcccacatttgttgatccattcccctgctgatgggtgtttgggtcttttccacttagtagctattatgaataaagtggtgactatgaacatccttgaccattttttttttcttttggagatgggatcttgctatgttgtccaggctggtctcaaactccaggcctcaagctatcctcctgcctctgcctatcaaagggattacgggtatgcaccaccacccagtcctggaccaagtcttttgtagacacagattttcttttcttttgggtaaatatctagaaatgggattgttggatcacagggtagatgtatgtttatgcatttatttctcataaaaaatgaacttcagagacaaagcaggggctacagatcatcaatgaagcagtcatcaatgaagcacttacatgccagcaacatgaaactgtttctgaattcctggagcagttttttttttggaatgcctcactgtcccacccataacagtactgtcgtgtgcattcatttatcgaatacattagctaggggtgcgggtccagaggggagtgtcagtggagaagggaaacacactccgtggagaaggggaaggggcagtgttggaagaggtgtgctggaggaggtggtccaggctggcaaggagggagtgagccatccgggttcctcaggaaagttttcttagaggagataaggcttgaattgaggctttgaattgaattgaaatgagtgggtgtttgcttggcatatggggctgaagagaaagccatgtcaggcatgggggtgcaaggtgggggtgggggaggaacaaaggaatggggccgtcattagaatttaacgattttctgccattgggcgctagatggcaggagaac

SEQ ID NO: 2971 - DNA, 4001 bp, Homo sapiens
cttgtccttcatcctcagatctcgaggaacaatttctgtttcagggaaaagaaagtattatattacctgaaggacgcattttttaaaaatgtgatcttaagtgaatgttgaagaaaattggagctccatattagccaagttgctttgcacaaaataaaaaagactggggccctggattgcaacacacgacagtgaagaagactcaatatcagggacatttattttccttgaaataacagtaactgctcctgaagctccaggattatgtcggctgtctaccccgtgggatgcagacagagaccacgaagttacagaggtaagaaaactgttttttttttcttttaaacatttaacttccagtgaataagtcacttttaggcactttagttttaaggaccttgggaatcaaatcccacaacatttcaaagtttttagagaaaacctgacccttcaaacaaaaaaatgggttacagaacattactttatctagatacatatttagagtaaggattaaaagaccacgtttcagtgaggtgtaaattagtgggaatatgcatgaacctggtttgtagggtaagaatcccagggaaagactctgccaagcaaacttcttccaccagggttctccgcacacagtgggtggggagaaccctgcaagggcgttcttcttgagttcagctttgtttttgcgtatttacagccctctccatcttcactcccccgttcagggctcctggctgagccccgactgtgtgtgaagtcacgccctctgaagaggagcattcgcatccacagctgaccccctagtgagtcttcattcactcctaacttgacgcagccgggataaaactgaccttatcatgtttgacctgattgtgtcacaaaagcattagacgctttcatgctttcctgggaaattccccgtgggccaccactctgggcagggccatgaaggagcctggatgcttccttttcagttgggaaagctttgctggaaatgcttccatttccaaagtgacggttgacagtttagtgtggaaaccaccgacccgcgccgcagctcacgcgcgccagaaggagaccaggcgcttctccgccaggcctcatgcgcggacctattgctgctattttctttttcttaaaaaaaaaaaaaaaaaaaaaaggaatcctgctgttcagtggtcaaaattgatgtctctttttgaaacgtgtttctcaaagacaattctatttcccagcagccccggccctcgggcgcgctcggccccactcacccactcgctgctccggcgaaggccccagccccgccgcctccgcgcggcccagggcgcagtcccgcccgaggagctgcaggcccttgtgctccgccgagtggtgcttccgcagctcctggacgagttccaccaccagccgcagcagcgcctgtccgtccgccggctcccggggctccgcgcccccccggccgcgccccgccgcccccagcaccagcagcagccccaggaggagggggtgcccgggtccgcgcatcgtgcgctcggggccgcggggctgggagactccgacacgcgccgagagctgggctcgctgcgagagaaggggcgcggggggccggagagaaagtcagcgggggagggggacggagcgcggggcgggggaggggaggggaggcgggaggagccgctggcgctggacccggcccctcacctccgcggaccccgaggaacaagccggcaggtgagggagccgcggtctcctcgacgatcacgcccgaggtcccgcccacggggagcgaccgccgctggtgcggaaaggagcccccggaacccgcccgcccgccagcccggcccctcctaactttcgcccgaaaggccgcgtccgccgagcgcgctgcgcctggcgcgggcgcaactttctttcccctttggaagccgcgggtgccaggcagctccccggccgcgggcggacctcggaggggccgcgctcccgcgcctaccgctctccaagaaggcggcgccgcgcgccgggcccggcggccgcgctcaagtttccagcgtcgcctttgcgcggtggtcgccggcgagcgccgagtccccgaagcccacggaggaggccgggtgcggaccctcgcgctggccccggccgcgccacgtgctggaagcccctccacctcccggccatggcgccctcccgcacctgcccggcgccacccgggagccacctgcgcgtcgtggccgggccggttacctggagccgccggagtcgtcgccgtctgtgcgcacgtctgtccccgcgccccgagctgcgccactactccatgcccggcgggcggagcgcacgggacgcggggactcggccgctccgagcgctggacccacggccgacctggggtgcgccggctccgagtcccgcctcagacctcggggagcttcttatccccgcgcccgccgacgtcaggcgggtccccaagggctccgagcggggctttaattagaagccgctgaagtgttagtacccccatgcggatcttcgtcagtccccccgcctcacctcgctctcgcctccccccgtctcccgctccccctcaactccgcccccgcccccgcccggtccccccacccgcatctccaccgcgtctccccctcgcccgcgccccgtctcccgcgccccttccctccccaccttccccatctcccgtctcctcctctcctgccccaccttcccccactccccgtctcctcctcttccccctgttctcctccccccgcccctcccccagtctgtttccctccgttcctgtcacttgtgacaggatgagaagaaacgcctttaccaggaactcggttctgtttttgtctaaatgtagatcttgggctattaaaaagggagctgcctgattgcttcgacatttaataagtcaattagagtccatccgttttggagggatccgctctccggacctcgaggggtctgccccgcccgagcccagtccccaggttcgggtccccaagccctggtccccgaggcggggcggccaggaggcaggagatgggcgggtgaggactctccacggcccccgaggtgcgcacagctgaccacccgaggaggggcaggacctgcaccccctccccagaccccctgcgagaggacgagcgaaggtccctccccggcaaggaccgcgccatctgcgcgctcctctgcgctggaccctcggcccgcgggtccctcgcgccccggcagggaacgcccgcaggagggcacttgcctcccggactcgtctttaagaaagtttggctctttggccgaagcccggcacatctgtgaaagttcagcaatttgcctcttttattttattcttgtaaaatgtattatcaatcagttgcgcactttcccattcgattggtgctttctgggcaagagctggacgtcttccaagtccgcgatctgtttgggaaaggtgttctgagtgcaatcagagaggcggagtgggcgagaattaaaggcctgcaccatgatcggggcagtcgcaggaccgcggcgggaaggtgctggcccaggcgcacgtgagcgcgggcggtgcgggcggaaggctccgcgccccgatcccccagctcccggagaggccccgtctgcgcccgtccccgcgtcctttctctcttcctgcacggggtctgtctcctcaggaggagaaagtgtccggcagagctgggcggggaggcagcgtggagagagaagatatgaaatgtgccggttccggaccccgccccacacccttgggatctgcgttctctccgctcccttgaaaaacagatggtttgatttcacagcgaggcttttctttttctttttgcaagctacatgactgaaatgtgaacatttctgctaaaatacactcaggaaaaagtaaaattttatgtcaaacagaccttaggcacataaaaggaggcatttttcgtttctctctttccccttcccatgtccaagaagacacttgagttccacgg

SEQ ID NO: 2972 - DNA, 4001 bp, Homo sapiens
agaacagtaccaaactcttaagacttggcttcctttttttttttgtaggatcctgtcctttccaaactagattattgtataaactgatccctcctaaggtaataacagtttctaacacaaatttgcagtttaacagggcactgtggaagcatatctgcaacttagaagtgactgactcctttaccacagcaagccaaagttgagtttaatctttgggaaggcacacaaatgacactcccactggcaactcatttacatagattgctctttagaggagacacacattctttcatttggttctcatagagctgagatgggaaaaaagagacaattattatagttattttacagataaggaaactgaggtttaaggaaattatgtcctaacaccacctaggaagtggcagggaatggatcctaatacagaactcttcaatcctttttctccatcacgttgccttgttgcctactgaaaattgtgttgaggggtagcttcatcatgaacaaaatcggtcctagcactctgatcctggttcatgttcagggtctcagtctgccttactctggataacttcaagttgtttgtctgttggtgaaagattggtcacaaaaggtgttgctaaagatgttctcattaacaattttactgtagattaaagagatcagaattccaaaatatccagtgatttcagttagtcctcaatcataagtttggtgtctgagaagctttggacacatggtattaggaaattttttctatctgcagattgctagtttaaattcaagattcccatcttttttttttttttttttttttgagactgggtctgagatctcagctcactgcaaccctcacctcccaagttcaagcgattctcctgcctcagccttccgagtaactaggattacaggggcgcaccaccacgcccggctaaattttgtatttttagtacagacggggtttcaccatgttggtcaggctggtctcgaactcctgacctcgtaacccgcccacctcggcctcccaaagtgctgggattataggcacgagccaccgcgcccggccaagattcccatcttttaagtgaattgagcagatggcagaccctgccctctacctgctggactggtgtccacaacagatttaacaatgaaaactgatcagtgaaaaggccgtctcgctgtaccctaaagagctgtttaggaaacactgaaacctcagtgatttgcttatctgtatccgtgtctgatttagccagtgaacacgtgatggttttaaacacacatctttagagcactatgttgagatccgcttataaccaagatcttaaggtaataacgaaacacacctgacagaacagttttcctcaaattactatatatagccagatatatctctatatatccattcccgagatgctggagagtagagagtaaaattctatactttgcacttgccagaagcagagtaacataaatgttgtctaggaagcttttacaacagactggtgaaaattaaaacacttttcaacgcctcgatttagagtaattttcgtgagcgtagagaaggggctgggccaggaccaccaagtagggactatgtgcacagggacccgcgtttaccagcctgccctcagctgggcggggaaccggacagccctcagcctgcacccagcccatgcgaggtcccagcccaagtcccgccccagtattaccgatgccccagcgggctgagccactttctcctcctcttcgtcctccaagatcgcctccgctgccgccagggcctttaaggggtcttcgcgttcgtactgggcgacccgcgctccagtgatgggatttaccggggtctggagactggaggccaccagcttcgccactcggtgggaggtggccatcgccccgcctccgaggcctgagcgcctgcgctggcccgggacgggaaagctggtgcggcccctggcaacccgggggcgcctagctagggagccggttgctatgggcgccgtaactggggacgctacaggagccgccagggaccaaaagtcacgcaaaatccactcaggctgccagagacccgagtcgggtgcttactggatcatggcagtcagtaccgagtctgttggctggttccgaaggttggcaggctgaacagggcacttattccactcctttgcgtctaaccgcctgaacgcagacttctcacattatacaatgaaacaactgcttttgtgaagaaaagaacgcttttttattaactgcaataacatgttagaaggagacagttgatggaggagacggcggcggcggaggaaagcagggcgtgttactgggtggcggtctcagaagagtgacaaggttggcgtcccgctacctaacatgtctcccgcgggggccagagtgggaaggagggcggtacattctactctgattgacttgagggctagcaggaatccaccaatcagaaggaggctcccagttgtccctctcgcttttttcttgacatgaccaataaaagcccagagttgggtggcgcctgaccctcccactaatgagtgatagtgcaggtattgtaaacctggcgtttgctttgggttcttcagcttgagagtgacaggattgaacggcacaagtgcccaagagtcaccacagacacatccatctccctcatccgtatcttctcttcccactcgggatttggacgcatcaaatggcgccttccctctgcaccacgtggcagtaagagaagccaaacctcaaaatagcggacgtggtgcagtctcagacatctgctccctgagcccctgcttactgaggccgaggctgccgccccctatctactccctatctaccccctctctatcctttgccctcctcctgctccccagccctacgaccggccccctccggtcagtattttcctcgttatgcgctgcacatcgtcgagaacccgtctctaaggtctgagcccttaccaaacctttgttctcctgtctgggtgtgagcacctacaaagtctcctacgtccccacttccttcaggctgctcttggttttagctgaacagttgcttcccatgctggaacagatgctgactgggttctaagcagaagccagagccagaaccatgagatatgcaccgccaggtgtggccaagtttccaggggagcaatttccagtcagacacggcagccagttttgtggctacaaaactgcctcagcctccggagtagctgggattacaggcgcactcccgggaggcggaggttgcagtgagccgggatggcgccactgcactccagcctgggcaataaagcaagactccgtctcaccaccaccaccaccaacaaaagtattgataaggaattatagcagatgaattataaataatgaaatatcctattctctttactgtaaattcctcatagacaattgcttctctcagaatgctttcgttggtttatgctgtactcctgtatttgtggccaacttatggttgcaattgtttaacaacctagttccaacatgaatgttggttaatatttttgtttttatttgtgattaagatgagagtgacatatccaagatctatgtcagaatttcacttgtcaatgttatgagcaacttctttgctgaaatagataatcattttctaacactggaataatttttcttaattttttctgcaagtcacaatgtaaaggctacagataacacaaacttttaagtttactctgcattaatattttccacatccgtttcttaagtttaaatgtccaatgtttagcttttgctgatttccatgatgtcaatattcccatcatagccaatttcaagccaccaatgtgacatcacttaataagaatttgagaaaagatgtctagtagcacaccattatatagtatttccaccatacagatacagtagatgcaaggaacataaaagaaagtgaagagttttaagaaattatctttgtttttgacataatttattgtaattaac

SEQ ID NO: 2973 - DNA, 4001 bp, Homo sapiens
ggtcaggagttcaagaccagactgggcaacatggtaaaaccccgtctctactaaaaatacaaaaaattagctgggcgcagtggtgtgtgcctgtaatcccagctactcgggaggctgagacaggagaatcccttgagcccgggaggcggaggttgcagtgagccgagatcacgccattgcactccagcctgggcgacagagcgacactccgtctcacaaaaaaaaaaaagaaaaaagaaaagaagttctctcccccaaactttaccttcattaccaaggtttgggtttgcattttactgggaggaattcatgtatttctgcacagtacaatcagacagacttaacagactggacacaaggcatgaaaaaactattactctattacgctggtgtactgttcttttaaaattgtgctcggccaggcgcggtggctcacgtctgtaatcccagcactttggaaggtcgaggcgggcggatcacgaggtcaggagattgggaccatcctggctaacacggtgaaacctcgtctctactaaaaaaaaaaaaaaacaaatacaaaaaaattagccaggcgtggtggcgggcgcctgcagtcccagctacttgggaggctgaggcaaaagactgacgtgaatccgggaggcggagcttgcagtgagccgagatggcgccactgcactccagtctgggaaacagagggagactccgtctcaaaaaaaaaaaaaaaagtgctcaattgatccaggaaaagaaactgtctaagacaacttgggtataatttccctttaaactacggaactccaccaaagtaagcctgctttgtaaagacaaagagaagcaagatcttcacaatttctgcaacactagcttcaaaattagaatagccttacactgctcaaatcttggctgtcaaagcaaaaataacccactccttcatctacaagagcttaaaaatgtgtcctgtttttgccaaaaccaaaaagttttatttaatctagaatctttcatccatagtatttgagaaaagtgatctcaaattacacaaggatgacctgaaagtttaaggagtggaaactatataaacctttttatttataaagcttccttgcatgcgaaaacactgcaaaatattcttgtttgactttaatgattaaacattaactcaaacagcccatgagatgcacacttcatgttcacatacactataaaacagaaatacccttatttgtggacgtcgtaaaggcgcactgcactcttttttcaaagttaacccaggctaggccacgaaacgtcctttctgaaggaaatcttaaaaatctgtaatttaaatcgtgccttttcaagctggaaggagaacgctcagattccgccaagcaaaaaaataaaaataaaaattatctttacttcgtgggtagacaaagtgagcagttacacattggaaatgactattgtcacaaagctctgcccccgggtttcacgctcgcattcctgacggctgtgaccccgacctttaggagaacgccccgcgccgcgaagccacctcggccacctaggcggcaggcccgcgccgcccggaccgcacctgcacgcgtacgtgtccggccgagctccgcccccggcccccgcccggccttgcccgcggcacaaagcgcagcccaggccggtccagacgcccagcgaccccgagccgcgggccgaccttggcgccgccccgagccggccgcacaaagcgccgcacttccggcctggacgcgcagtcgcccgctgcccgcccccactcaccgcgccgcggcggcgacctgggcctcagtgaccagcgcacgccggcccgcggcgggcttggccgtggggcgaaacaaggggggcgtgccgaggagacctgctacgataagaggctgaccctccgagccccgcgtctccgccgcctcccggacgccgcgctcccgctcgctcggctccgcttggcccggcccgcctctccgcagcccgcgctccccgccgacgctgcgcagccaccggagccgccgacctcacttccgcctgagcgcgccgcgacgggggcgcgccgggcacgtgactgcgcagcgtgctcgctcccgccggcgccctcgagacgcccggatggacgagcgcgagcgcgagcgcggagtgggccggtcccagttggcgaaagggccgggtgtagctgtagtttttttattaactgtctgtgaaaaaagtatttaatttatattttgagatagtcccgcgccgcagaaacctttgtgtgtgcccagacgccagggcgcggatcctcaggccgcacccgggagtcgagcacaccccgggtgaccgccactacggggtcggagcggggcggagctcagctcacagattctttgccagtgcggaggctgcgggcgcccgctcaggagtgcagattttagagaatgcaagtcagcgtttcaagtgtagaagtgcgggatcatttctatagacaagagttcagggaagtgtactagaatgttagggggttttttggtttttttttgagacggagtttcgctcttgtcacccaggctggagtacaatggcgcgatcttggctcactgcaacctccgcttcccgggttcaagcgattctcctgcctcagcctcctgagtaattgagattccaggcgcccgccaccacacctggctaatttttgtgttagtagagacgggggtttcaccatgttggtcaggctagtctcgaacccgtgacctcaggtgatccacccacgttggcctcccaaagtgctgggattacaagtgtgagccaccgcacccggccaaatgttagtatttttatgtaaggcttagtgtatagttacaatgatttggttagttcagggtgtctctctgggggaggtatgtttattatttcgtattaaagaggtgcgtgtcttggtgtttgtgtttggggtgtcgtctggtctgagctaggtacaggacgacaaaggagggagttattgcaataaagattagtgatggaagggaggaggcctggctctggtcttttttcagtcgtttatgaaataaaaacagatgggcgcggtgtctcacgcctttaatcccggcacttataggaggccgaggcgggcagatcacgaggtcaggagttcaagaccagcctggccaacatagtgaaaccgcgtctctactaaaaatacaaaaattagctgcgcgtggtggcgcacatctgtaaccttagctgctctggaggctgaggcaggagaatctcttgaacccgggaggcggaggttgcagtgagccgagatcgggccactgcactccagcctgggcgacagaggaagactccgtctcaaaaaaaaaaataaaaataaaatataaatgtgataaaaggacaagaagaaaacatggggaaattcctttttagtattggagtaaagaaggcttttctacattattacttgaaatccagaagtcatgactatgaaaagctttggtcggcaaaaagcaccataagcaaagtcaaaagataaatgattaacaaggaagaaatagtcccaacacatgtaatagacaaagctaatctctttaatattccaaaagcttccagaagtcaacaataaaaagccctaccacccaatagaaaaaggagagttcacagcaaaggactaagtctggctgttagtcatatgaaaaatatccaatctcacttctataaagaaaaatgcaagttaaaactctttgaggtagcagttttcactgtgattggcaaacatccaaaaaattgacaatgctattggtaaggctgccaggaagctcgcactctcagacattgctggatgggaaaggggatcgtctgatgatgtgtgtcaaaataaacgcacaaacaatgtttcattcaacagctgcacttctgggagtttgcctacagagatacttatagatgtgtgaaataaaatgagttcacacctattaattgcagcattgtgcatagtagcaaaatactggaaa

SEQ ID NO: 2974 - DNA, 4001 bp, Homo sapiens
atgctggattcaggtttcatattattgcagtagttcataaccctaatcacaacatatatatatatattacagtagtcaaaattcatttaatattcctgaaaggtccattgaaataaaaatatactgcaaaccataaaacccaccaacactctcccagacttcggcttcatagtgaatttatgaaatatctctattaatgaggccaatcaatctgatatatccaatttccttaactttagcgaacagtatgtctaacagcagcctcacccaaaccatattatcactttcagttattaaaagctgggtaggaaaaccaccatacactgtatacctttcaagacttttagccacacttgagtgttattaattggtttaagagggtgtcagaaacacatgctttcctgcacactttggtgatttcatcctatgctcagagcactctgataaattaaatcatcctggctgtgtcatgaatcgcagctggcatgcctgtgtactgctttttgacgatgagcaagcaatacaaaatgtgatgctgattccactctttcaaatctcattttcagcactcatatagtgttaccaggcaggattttaaaacaaaaacaaacgtcataataaaattcactttggtttcacaaaacctaagccctcgtgccagaaaattggaggctttttttctttccaaatagcagacaagaatctacagccatgaagcgaagtgggttgcggggtagggagatgcaatatacatggataatctagctatttgcttaccgatggagctttaatggggggaaagagggaggaactgcggaactgttacagccacctatactacagccgtatttctacaccttcactgaacagtgtcaagaatctgcctcatttaagttctactaacaagtaaggagatttctctctctagggataggcttttgctgttctaacaccactccagacttcaccttatgtgtccccctctccttttccctttccttcaattacaaactcctgttttgttttgcttcatcttattgtactaaaagagttctttgcaataagatgaacccttaaacccttcctggggtaaagagaaagagaaataaataataaaatatataaagatttctctcttcatggctaaatttaaatatagcaggcatggagaaatggtgaaaaggggtgtgtgggtgtccatggcaagatttctcagtctctaggagagaaaaggatagagaacaaaatgtttaagggatttaagaacggtgtgtgtgtgtgtgtgtgtgtgtgtgtgtgtgtgtgtgtgtgtgttacagtcattcccagggcagagggtagaattcaggaagaagggagggaaaagaaaaagatcaatccaggcagtcacccacccccagccttcccgacccctctccaacccaccgcagtgctctgagctgctcagaaagctcattacccggagggcagattcccgacaccagatcaagggaccaaaggctgggcagccagtctggggagagagatcgggagggatggtgacaggaacgaacgaggataggaatggatagggaaggggcgaggaagccggcgaggccctaagagatcgccggccgagactgaaagaccgggctgggcagccaggacctacctggaaccgtcaaggtggaggttgccccaggcacctctgtcctctcctcctcagcctcctccagctgcttttgctgttgttgttgttgttgctgctgctgctgctgctgttggatgaggctgaggtcggagcggctgagttccgctctggcggccgcggggaccagccgcgctttcagcagcaccacggccaggccgagaagcagggtgcaggggacacgccggcagagcctcgccatggcctagagccagagggccgcggcggcatattgcggggctccgggcggcggcgggcgccagggctgcgggctcctggcagcgcccgctcgctcgctccccctcgcgcaatctgccaagcactccctcaccggcaggaggaagaggcccgggaggcggagggggcggaggaggagggaaggggagttcgcatcctcgcgcatgtgacgcgcggggaggggcgagccggggcccgcggtcccgcgccccgcagccacctggggccaggctgctccgagaggacgcgatgctggggctgcagcccgggtggagggccctaggggaaacagaaaggggaggccttctgggagctggtagaccctcacagcgtccacttcccactgaggcaccgggaagatttgcagagagtggaataaaattccttccacctgagcccaaagtagcagagaaggtggtatattgattacccccatccagcacatagcgtgggtggcaccaacggatcaaaaagccaggatctcaaacaaataggctttgctgcatcaccgccatcattgcttagctagaagttaaactgcagcgcgccagattttgactaaacttcttttctctgccctagtgggaatttctttccatatcattaaatattcttaattacattttatctaattctagcctatccttttcatttgttcaaaaaaatcttactaaatactagttgcttaccatgtgccagcatttcttcaggtgcttggaataagtaaaatacaatccctgcattccaggagctcaacatctattaggggagaggaacacaggaacaaattagaacccaatgtggtggctacaaacagaaaagcaatacaagtccagaggtctcagaattggaagaaaatatcttgtgtatgtaggggctatgaaacaccaggagaggtagaatataaaaaagagtaagacttccacacaggagaaatcaggaacgtggaagagtgtgtgtgtgtgtgtgtgtgtgtgtgtgtgtgtgtgtgtgaagcccagatgtgtgtaagcacagtgggcttgcaaaagtgtgagcaattattctaatggaggaatgacagtgttttagattgaaaaggagagtggagaccaggtcattaaaaaaataataataacaagcatttctatagtacttactgtgtgctcaagtacttcacatttgttaacttctgtaataaacttagatgctgtatacagaaattgaaattcacacagtagatgataatgaaagaaattaatcagggaagaaacttgctaccagttgtgcattttaggaggatcactttgctctcagtatggcagatggattaaagggggataaattggaagagaagatgccagtttagaggtgtttgccaaaacccataggagatgccaaaggtcattgaaactgaaaaggagaagaaaagagtaggagacacagtatataagactacaataaacagatacggttaattggaagaggaggagatatgcctagtgtgacacctaaattgacaaattgagatcttaggtggctgcttatgaccttatcaacattaactggcctagagtaatgagccctgccttgttcagttgtggtctctttgtatttggagtaactgtgggacatctcatagtgcaatataaatgtcacctgctgtgacatcaccccatttaccattgtagttcattgtccttttccacccttatcattcttaccttgtccctcccagtgttttcaatatgctggaaaacaacaaacttctcagtactggaaaagtattttttggttaagcaaatgaaaatagtgtatatataactaatggtttagatgttttgtcctttccaaatctcatattgaaatgtgacctccaatgttggaggtggggcctagtggaaggtctttggttcatagaggagaatccctcatgaatggcttggtgccctcttcatggtaatgactgaattcttgctctgagctcacaagagatctggttgtttaaaagtgtggcaactcccttctctctctcgcttgctccctctcctgtcatgtgacacgctgtctccctttcaccatccaccatgattgtaag

SEQ ID NO: 2975 - DNA, 4001 bp, Homo sapiens
ggctgcctgctcagtgggcagctgactctagctgctgcaaaatgcctttcactcaaaggtgctatctaccagtgattatatggcattccaattttacctggaagggagatgcagctaccagctgtttcttccctctcccaaccacaaagtaacacatttttcatttgtctatctgttgtttccaggtttttgcttttgccaatcccctccctcacatgccttgaaacaagcactttcaaagacaaagacataaacaacaaaagggtgcaggctgaggtgggtcatcttctctgcctgcgtctccaactctggatcctgcagttactggactcaggccatggctgactccttcatcacagctaagatgctgctgggtttaaggcactgtgactttctgtgccactaagaccgacaaaaagctgccaagtgaacgatgacacaaagaaagacacaaactgtgggacccagcccaacttcagagctgctaaaatgtgaacaaaaatgcatcccggaatggatggaaaccgatcattctagttggtgtgacctgctccagtgcctacagtacgtgtcctgacagcgtgggaggggatatgaaggccccccagtcaaacaggagacagcgttagtctccaaacttaactttgttatctctttccctcctggggcccaatacccgccagccaggacctgtttctcctccatctcacattctttccaggttcaggactgaagtcgtcttgttcagctccttgacttggccatgctcactctacaatgcagcccatggatggcgccccctctgcccagcacatccctctgcctgggctcttgtctccccgaatcctgcaaaccccagccccagcctttagcgttcagccgccctccccgcttccctcatcctccctcgcgtcctcgcagtgagatttcaacatgtcatctcagtttttttgttcttttactttcctgactacaagaaaaataaaataatctgtcttaaagtgtagcatgaggccaaataattacggaatcccaagtgctttgggccctgatgtcaaaagagccaagatgaattcagaatattacaatggtgctgtttctgcgaatactgctttttcaagacgccttattcctaacatcatgttttatatccatccttttaaacaaatatttaatagcttgggaatgctggcgagagcagcggctcctgtcagcaaggactgagctcacaatttgaaagatgaaaggagatgcgttctacccacaaagaaaacggtctccagcatcataaactccacatccatcaaaccgggcaggggctgggaatagaaagcctttctggaaagaaaacaccagctaccctttgcaccctggggaacattaaaaatcaaaacaaaacatgccacatcaaccaaaacataaaccagttctcaaaccaatctaaggttccaccccaccaaggccggccgcgcagtggcctgtggagaggagggcccggctcacgtcggaacccgaaccacgcggggtcgcaggaacctgaaaagcgccagagtagcccggcggccgcaccggggctgacctgcaaggcctggaccagccaggagtcccagggaagtcgagtgctctctgagcgctaaccacgcgcccctgcggttcctcggcctcagtttccttacctgtaaaatggagccgctgatcctgcctcctgagttgtggagcgaggcccgcacctggaagccttggccacatagggcgggaagggcagggctccggggtgagggagggtggcgggaattcgcacggcctcagaggacggggccagctagccgggaaaggaagcaggagcaggctccccaggcggcgcagtgggaggaccccaagagttgcgtccctagatccagggccgccaacgtggaacctaaagatccagttctggggattgagttccgactccaaaccaagcggccagctcacagccgccgccgccgccagctggggagctcgccggccaagtgcgcaccctcttcctgttagccctccacgtgcgcgccctcttcctgctcgccctccacgtgcgcatccacgtgcgcgggaattggctggcggaagctcctgcccccaggcagtcctgggtcacgcgcacttgtagtagcttgcatttaccaagacagtgagacagtggcctggcgcggtgtctcatgcctataatcccagcactttgggaggctgagacgggacgattgcttgagcccaggagtgagagacctgcctgggcgacatggcgaaaccccgtctctactaaaaatacaaaaattagcctggcgtgggcagggcgcggtggctcacgcctgtaatcccagcactttgggaggccgaggcgggcgaattgcctgaggtcaggagttccagaccagtctggccaacatggtgaagccctgtctctactaaaaattaaaaaacattaaccgggcttggtggctggcgtgcgcctgtaatcccagttgcgcgggaggctgaggcaggggaattgcttgaaccagggaggtggaggttgcaatgagccgagatcgcgccaccgcactccagcctgggcagcagagcaagacgccgtctcaaaaaaaaaaaaaaaaaaaaaaaaaaaaaaaaaaaaaaaaaaaaaaaaaagccgggcatagtggtgcagtgcctgtagccccaactacttcagaggctgaggtgagaggatcacttgagcctgggaggcgtaggcagaggttgcagtgagccgagatcgtggcactgtactccagcctggcgaaagagcaagcccccatctctaacacacacacacacacacacacacgtgtgagatagctgtgtctgtttggcagtgatgagcttccctttatgggagatttacataattattcataaaggagcgggaatgggcattactgttaagcatgttacggggtctcccagatgtgcatgtgcgtgctagtacaccacatcacatgtctcattagcattttaattcctcacccaggggtgtgttttttagcattaaaatgagcataggtcattccaaggacactctaatcatgggtttctgcacttgtgtgaatttggggattttcccttctgctgttcatcctcttcgctgcaggatgttctaactaggagcctgatgcagtttatgcaccagtgggcggtttgttctctacatcaatctggcaagttcattcccctttaaaggaggctatgaccactgtatctaaccgacctcattttccccctcagagactttgggtccatgttcttatgaaatgtggagggctgggtcattttttctggagctgcttcgtgctgagacaggaccagggcccgaaagtctcttcttgcctgatttaaagtgataggggtcatatcctccactgggataagttgaaatccttgcataactatcaatctaggaattgttgtaacctagaagacacagactttaaaggagcttaaacaagcaaggaccaaaggtcagtagtaataagatggctattgtaggtcccatgaaaggtagcagaatgaagcatcacatcattattcagcaagcagaagaacaaaaagagctcctacaaataggagacctgagatgggactaccttatgttaaagtaatattaatctctttatttggggtgttggcatcttttcttgaaaatgaatgttaggtcttctataggcttacaaaaggatttttaatttttagttgttgatgtagagtcctgtggaaacgtaagggaaacagtttttatcctagagagatgcacccagctggcaatgtcctggattctctggactatggtgtgttatggtggtcagctgggcttttgagagtgctcctatgagaaggggttcagttggtttcattggttttaaagaagcccccaacgagggtagcaacaagggagttaggcattcacgtccttgagtctgcaaattaaaggttgggtggctgggcacggt

SEQ ID NO: 2976 - DNA, 4001 bp, Homo sapiens
taacgatccctatctccattcttcattcccgagtccccaggggcagcagagtacatcgaggtttaagccctgctccccaggaagctgagcccgggatgcccactctgcagccctcacacccaccacatccctgctctgacattcacccagggactcataggcctcactgttccaaactccacaacctgcaggccctggggcaccttgttgctcctgactcccaccagaacttggctttcaggaaagctgggcaatgtctggaaagtcaattaggaagaactggggacaggccaaggactcagactcagtgacaaccacagtgaaaatgaacagggaggctgggcccagctctgcctacagaagaagggatgccctgcacgtcgagacaaccctgcgcttatcctgatgtgctcccatcccctccctggcatccagctcctgcatcctccctaaaccatgctgtaaggctgacaaccccagatcaacaaaaggcacacaagcagggacaggcagacatttggcccctacacctgcgcacagggcgtccccagcgcctgcggcacgggtaacagcactaattacaggtgagatgctgagcacctctgctcaacacagggaggcagcctgttggtctctgccctggcatggccctggggttctggaaggacccgcaggccatgcaatgtggacagccctgcctttccctgctacctgtggtggtggcaccgtggtggaggcaggcgggtgctgggtgctcactcaccttgtggtctagctcggcactagcctttggctgttgctcctggcagggtggcaagggcacagagtccaggtattgcctgagagatgatggcctcatgaggcccaggagccggctgagcgaggacagctggggaggagaagggaggctgtcactcacagagggtggtggccaagagctcagggtgctcccgggaatcggcctggacacctcagctggtggcagtgtgttagggcactggcttctgagacacagacccacctctaccttatgaactgtggcctctcggatcctgagtgttctcatctgtaaaatggatcacacatacttcccaggagaggaggggtacccaaacatacccagctcccccacgccccacccacacacacacagacccacacacactcttccccccacagacctgacacccacccactcacccacccactcatcctccccacacccacacatacccaggcctcccaccccccacccactcacccacgtacacacagacccacatccacacctactcaccccctccacagaccccacatccacacccacccattcacccacccacccacatacacacagacccccccacacatacccactcatatccccagacccccacacacccccacccacatccacctacccactcacccacatacagacctacatacacacccactcacccccccacagaccccccacccacagatccccacccacacccccctacagacccccacacacccccacccccatctacctacccactcactgacatacacagacctacatacacacccactcaccccccccacagaccccctacccatagatccccacccacgcccactcacacacacactcacccacatacacagaccccctatacacccccacccactcatccccccacacagacccccacccacacccacccagtcatcccccccacagaccctcacccacactcacccacacccatccccaccccctgcactgccgctctgcatctgtgggcccaccctcccttgcatccctctcttttggtttaactcttctctgtggaggtttggaacaccatgaagagagaccatggactaagtccccaacagtccatcaccatgagcaagaccaccatcatcttcattccgcctggcctgtgtcttcagcccctgccttccactccccttcccgctcttttccttccaggggattttaaagcaaatacatcgtatcgttttacccataaagagcttctacagaaaagataaggatttccccccaatctaatcataataccatttctttcctaacagaatcaacgagacttccttatcatcatccaacacctgtgttcagttttctctgtctctaaaatgtcctccaacagttggtctgtttgaagggagattcaacacaaggcccacacactgcttttggctgactatggcacctaagctattagccgccccagcccccatttagtttttgaataaactgcccaacctctctgaacccctctggagggaatgtgacctgcgtaagtccaggtgtctacagttagccgctccttctggcccagtgcatgcacttgattcgggtagcctgggcccagccccagcaaggactgcccagctgccctgaagctaactcttggctggggcagaggcaggcaggctcccagcccttggcctctgtgaggccacagcagccctgggggcagggcggggagtaagtgggagcagatccagggtagttcacaaaagcaccatctctttagatggcacagaagcagggtggccatgggctaggggcttgagccctgcagcccagcccccctcttgagcttagcctggctggcacacctggcttcctccggtgactcacctaccacctgctcagcacatcagccggttatgggctgagacagcccacaagagcagctgggctgggggctaggagtcaggcccagggcctcagcttctgggaggcggccagggcttctcagcctagtttctgatccttttgggaggggggaggaaggttctgggcgaagggaggcaccatctggggcttcacccaaaccatggctgtgccaccttcctcaggcttcacaagtcaagatagtttccagaacagttctgcccactcagggctcacagctgtgcaagcatagggtcaggctctgcagcccacacccccagcgtggcctttgggcaggcctcgcccagccgggaccctccctgctacgggaggcctgggtggggctgggcaggggcgcacaggacagcactcttgcgatgcttgctcttgtgtttttcctctcactcatgaaaacagcttggctgtgctcagtgcagcaagctgctgcccctgcgatctgcctgtgccgttgtgccttccgattgtttattcccttttgtttccatctctggatgctccagccagcctctcccccacacacaaacccctctccaggataaggggttgtttgggccttgcaggaaccagcggggatgggccagaccagaactctccctacaccgacatcactgctggcagctggctctacaaacactcggccgcttagggcagacacctagggcgagaagcaatgatccctcaggaagacaggcctccaccagccttctcagaggcagggaagaggtggtggaggctgatttccagagaagcaactggccacacagcatgttgctcctgggtgcaaatcctggcttcctcctcacctaggacaggaagccaagatcttaagtgtctgcaaagacccaacgacctgcctgctgcttcctggagctggtgccctgcctgggccttctgaccagacagcacctgcctctctcttccttccagccgttgctccacacccaccttctcagtgaggcccacctgcccaagttcccatctgtctgcctatctatctatctaaacagaatcttgctccgtcccccaggctggagtgcagtggcacaatctctgctctctgcaacctccacctcctgggctcaagcaattctcctgcctcagtctcccgagtagctgggattacaggcggccaccaccacgtccagctaatttttgtatttttagtagagacagggtttcaccatgttggccaggctggtctcgaactcctgacctcaagtgatccacccaccttggcctcccaaagcgctgggattagaggagtgagccacagcgcttg

SEQ ID NO: 2977 - DNA, 4001 bp, Homo sapiens
cacacccccagcgtggcctttgggcaggcctcgcccagccgggaccctccctgctacgggaggcctgggtggggctgggcaggggcgcacaggacagcactcttgcgatgcttgctcttgtgtttttcctctcactcatgaaaacagcttggctgtgctcagtgcagcaagctgctgcccctgcgatctgcctgtgccgttgtgccttccgattgtttattcccttttgtttccatctctggatgctccagccagcctctcccccacacacaaacccctctccaggataaggggttgtttgggccttgcaggaaccagcggggatgggccagaccagaactctccctacaccgacatcactgctggcagctggctctacaaacactcggccgcttagggcagacacctagggcgagaagcaatgatccctcaggaagacaggcctccaccagccttctcagaggcagggaagaggtggtggaggctgatttccagagaagcaactggccacacagcatgttgctcctgggtgcaaatcctggcttcctcctcacctaggacaggaagccaagatcttaagtgtctgcaaagacccaacgacctgcctgctgcttcctggagctggtgccctgcctgggccttctgaccagacagcacctgcctctctcttccttccagccgttgctccacacccaccttctcagtgaggcccacctgcccaagttcccatctgtctgcctatctatctatctaaacagaatcttgctccgtcccccaggctggagtgcagtggcacaatctctgctctctgcaacctccacctcctgggctcaagcaattctcctgcctcagtctcccgagtagctgggattacaggcggccaccaccacgtccagctaatttttgtatttttagtagagacagggtttcaccatgttggccaggctggtctcgaactcctgacctcaagtgatccacccaccttggcctcccaaagcgctgggattagaggagtgagccacagcgcttggcccctttgcaatttacttgctttttatcacctattcccccccactccctggaatgtaaactctctgagggcagttttttcactgcagagtccccagaacctagcaccgtgcctggcacatggtacatgtctagtaagtatctgtcaaatgaacaaatgattgaatgaataaatgaacagtcaagactgcagctaacattttctgagtagatgcaaacctttatccccgatttgagccacccgaagcccacgttttccaaatcccaaactggaagacacactttgacaagaggtttactgtgttgcaagaagtgccccaggataagaagcaaactcctgatttcctccccaaacctgctccagctgcgtcttgcctagggtaggcaaagggcgtctccatcccgcctgttgcactgacctagagtccttgtctctgttctcttgcatcgcacatcccactgtctgtacttgggaaatgcacctacaacctgaccacttctcaccgcccacgctgctgtttctccaggccaaaccactgtcatctcttgccaggattactgcaatcacctccttcctctccactcccagtaatctcttctcaacacagcaggcagagtaatttttaaacgttgtataaatcagattttgtttcttctctgcccaaatccttgcaggggctccccacttctgcgcagaagtcaaaaccctcaccgtagccttgaggctctggctaactgagcctccacttgcctgtgtgacctcaatgctgtaagtcctgtccttcaagttcagttctccaacgtgtgcttctgctcctgctccatggggcctccgctgcagcttgtgggagatacagagcccagcagcttggccatcagggactcctgcccagcagtgccctgcaaattgctgtgcccagatccagccccaggtcctctgctcctacaccagtcaattctaaacccctgtgcccccttttacagtgaatcgattgataggatttctccagcacttgtgcactgatgaggaaagggagggacggcccttgtcctcctgtctgtgaaccgggactaaagcccaaggacccagcagggcacttcaccatgaagtggcgggtgtggtccaggatgtccagaggcaaggagagagctggacaggctaaggcggtgccctgcagtggtcaagggcaggactttaatctcagctctaggcggggtacagtggcttatgcctgtaatctcagcactttgggaggctaaggcaagaggatcacttgagcccaggagtttgtgaccacccttgtcaacatggcgaaaccctgccgctaaaaaaatacaaaaattagccaggtgtggtggtgcacgcccatagtcccagctactcgggaggctgaggtgggaggatcacctgagccagggaggttggggctgcagtgagtcgtgatcacaccactgcactccagcctgggaaagtgagaccctgcctcaaaaataaaataatcccggctgtaccacttccctgttgggtgaccctggaaagttcccctatctgtaaaatatggatgacagtaagtctgagggccttgggctgctaggaggggcgagcactgaggacagcagccaggacacagctgtgctgttgtacatgggagctgccactactgcgggtcgggggtgacaggtggaaaggaagaagaggcccagacacagcaaaagctgtgtgcagagggcaggcagggcctgtgaggaggcccgatgagaacatgcagcactggcaagccccgtggaggagacattgggaaaggggcatgtgggctgagtgggtggctgtggggacgaggtggccctttgaaggagtgtttcaggaaggtctgacaggccagactggaaaggggagtgcctggcagcctgaagacctgggaggaggctgtgagcagccctgggcttgcagtggagatggggaaggagctccaggaaggccatgggcaggcccctgccagtccttcctatccctccagtcgccatgaatctctcactccctttctcctttttgcagtacaagcactgactcagcctccaagacctggctcagggcatcttctctagcagctgccgcactgtgcctggacagagttagtcactatggccgtggccgacttgctcacccctctcttctgaggtcatctggtgctgtctccccagtgccagtacctggcacagagcctggcactcaggttgctcagctagtgtctaataaacacatgggtgcatggtgggcatgcagcaagtgggctggacctggcttggccctgacaggctgcaagaccctggcccctggggagcctgggagacctgcctggccaggatctctcaaggggaggcagcgccactccatgtactttaaaaaaaaaagaaaaaaaaaagcgggtcttgctctgtcgcccaggctggagtgcagtggagccgtcatggctcactgcagccttgacctccagagcttaagccatcttcccacatcagcatccccaccccaagtagctggaactagaggcacatgccaccatgtccagctaattattttactttttgtaaagaactccagggctcaaatgattttcccacctcagcctctcaaagtgctgagattacaggccagagacactgcctcccgcgcccccattccccactcttttttttttttttttttttttttaagagaaggtgtctggctctgttgcccaggctgcagtgcggtggtgtgattatagctcgctgtagcctccaactcctgggcccaacgacccagcccttcctccatgacacttcccctctgccactctgacctccaccaggaaggcagccccaccaagctctcctcactctatgcacagctgctggccaagaaaaaacaaaatgaagcaaaatgccaagccttgaactggctctaactctctctctggccacctgtgtcg

SEQ ID NO: 2978 - DNA, 4001 bp, Homo sapiens
ccaaggcaggcatatcacctgagccaggaattcgagaccaggctgagcaacatggaaaaaacccatctctacaaaaaaaaaaaaaaaaaaaaaaaaaaaatatatatatatatatatatatttatatatacacacacacaaagattagccgggcatggtggtgtgcacctgtacacccagctacttgggaagctgaggtgggaggaacacttgagcctaggaggcagaggttgcagtgagctgagatcatgccactgtactcccacctgggggacagagtgaaaccttgtctcaaaaaatgaagcgaaattaaattaaaataaaaatgcagacatagatggaaaacttgatagaaaatcaaggaaaaattagtagcatgattaaccctaaggggaagggaggcagctgtgataaggacagggcccacgggggtgggttctgggaggcggccagtttttctgtttcttggcctgggaggtggctacatggacattcactttataattattcctcacactgcatgcattttatgcattcttctgtctgcaataataaacttccagcctctgtgctagtgagcagagtctggtgcctctgaggtagccgtggggtcaatgggaggatgcgctgccctcagaggcaggtctctccagagctcaggttgacatctccccatcccttgcccccaactacctccccctttcttcaaatctgttagtctcaggctccatgggctgaaactgagccagtcctgggagccagcctgtggctagaaggctgcagggccgtctcctgcagggcattggtgagaagagcgagggactgcccagttcaggatagaagcgattatgggcccctcacaccacttcctggggccaggcaccaatgccctgtggcctgcctcagtgatgctccgacagagtacgggccccagtccctcccctcccagcgctcctgaggaaatggcagccctctgaggtcccccgccagcaccagcccttgtcctggagaagtgactggcaaaaccttagtttcaggagactgaaatgtgctccagaaaggaacatgccaatctccacctaacaacagcatcaacaacaaacagtaacttccattctgcgcatgggctaacgtgccagctgccctcctgactgtctccatgctcacagacagcaccaagggggctttttttaaacccttcttcacagatgagaaacctgaggctcagagaggcaaagagctcaagtccacacagccagaaagagggggggttagaattcaaacccagagcagagcccctccaaggcctatgctctcacggggtgccccagcacccctaagcacgggtgccatccccacagcatgcccccacccttcccggcaccatcgcccacagcaccccagggagctgttgccctgtgaagggttcaccctgaggtagagagcactgcccacagaggccatgactcggggaaggggtcagcccaggccagcccctccttccttggctcccagtgctcagagaacagtgagtccaacctcctcccctagagctgccacatgaaggcccagaaagggtcagagacatccccacggtcacacagcctccaagtcacagcaggatgctttttctttctctgtgtgtttgtgcttgctccagttcaggtctttatccctccctccagggacttcaggggtcctgacccagcctcccattcaccacctacaatagatggcttggtggacctatcgtctctcacctctctgtccagaggccaaacccctgtcactggaggaatccagggtccttggtctctatagagacgttgatgctcatgggcccagggaggcaaggacggggcagccccaggcctggcccaccctggcccccaccagccacacagtcctgggccgcagcctcctgtctgagcaggggctgggtggccacgagctccactgctggcgtgctccagctctcagcaaagctctccttgaataaacaaggctgcatagcaaccactcgctgaaggagcccatagctccctgcgcgggggagagaccgagccgagagattttccccttggtctcattgcctctgtggctcaccggagcacaggcactaccaagtggccgacctgtcctctagggtcatggacaccacagaaagagagagcactgggcccccctgcctggtgactgcagccaggaagtgcatagctggcttggtgcagggatgttgttggtagaactcctggttttgctcacatggcctctgggctcaatctgcttctgtttactaactctcctagaggcagaaagacagagtgagcatccaggccttggcagcaggcagctgggtttgaatcctgatcctgctacttccagctgtgtgccctctggtcagaactttacctttcttgacctcagtttcctcatctataaaatgggtacaccaatagtactgacttgatagggttgctgtaaggatttcaaaggtgcatgtaacagcttgtaattttgtctagcacttggtaggctctccatcacttccccagaaatccttgcagagcagaaagcctgtggccttcgtcccaaccagatttctccaccttaacttttggaaaatgtgaatcctagcagcccatgtgtactttctcactgaacccaggctcttgggcggaaatcccaggctggcatcctctctctggaatgacagccagtcccactcctcatgctacccccttctagccctcaccatccagggggcacacagtggaagccaaggactcaatttgtatgcaggcttgcaaacagccactcgcccaaagatactatgaattttcccaggcagctcctccccatattctgtacaaaggaatcagcaggtgtgtggaacacacagggatggctggtgggaggccaactacaccccacgaggcctgggctgctgaaatgcttgcacacggggtagctccttcctgggactctctcctcttccctgagatggccagggagggcaggccttgggagtagctgctgtcatttaccaagatccaggagggagcaaggagggccagccaattatgactgagaacaaggtccctctggggcaggtgctggccccaagccagaggtcacagctgacaaggcgaacggaactcctgaactccctgtagcagaggcccagaaaggagactcttcctccaaaccaggaacagtggctgtgcggattccccttgggagacaggtatgaagatgcccaggtggggaaagagaggcctggcaagttaagcccttgccccaagccacacagcttgtgagtgagagcgactcaaccatgggaacccagggcggggacgtgacaaggcaggttttggtgtccctcagctctggcagggagatggtgtgtgtgcagctcccccaaagcccatctgcatgtcgctgcttgagtcggagcttctagaacacagatccgatggccgtgccctgctggacacccctcatggcccctgctgtccttggtgtaagggccagacttagcaccatggctgccaagcccctctaatcaggccccactgcatcctccttcagctcctgggctctccacactctgcctccactggatggccgagcattatgtgttcccaaggtgggctggccatgctctgtgccaaatgctagagacacaggaggcagcacagcctgccctcaggagctgagtgatggagagaggccccagcaggtaaccccctgcttgttcctgtgttacctgcaataagggaggatggataacacagcacagcccttaagaaccagggctctgaagcccctggattccagactggattctgatcccagcaatgacatcttaggcaagaaacaaactctctgagtcttggttctttcatatgcctagcaggaagactgcagatcctccctccctggggtggctccagtgaccctcagtgtgcccgccaggcacagagcacgcactcaccctc

SEQ ID NO: 2979 - DNA, 4001 bp, Homo sapiens
cataagtcaaaaaccacagaaagttccctttagttcaactggtccagaatctcagagctaattagtgagagctcatggcctccaaacaacatcatccacatctagggacttgctatttccattatgagtttgggtaaagctgatgcattttaatccccactttagggctttttcagttggatcactatgcactaatctctagcttttattcttataggactaagtgtgaacaaatgaaaaggcaatgaaaatccagtatctggaagagataaattgttacattaaaaattattgctgatgaaaaatgatacaggttcttagaactgttattcaatttctgattcttctttctattctgccacactgaatgcatcacaacaaactaaaccccaaactcaaataccaaatctgtgaataagagaaatctcaaaaaaggaaagttgttctttttacccacatatttaatagcttcacatgagatctaaaatgatattcaaacagctgcccaggtcttcctaaaataaagctctctttgtaataggaacaggatcttgctttaaagccttctcagacttattttaagaagacaggccaggcagggtggctcacgcctgtaatcctagtgctctgaaggcccaggcaggagaattacttgagcccaggagtctgaggttacagagagctatgattgggccactgcaccccagcctgggctacagagcaagaacctgtctctaaaatattttttttaattaaaatgaagatggcaactgaaaaagtatgtaaaacaattaaacatgtatcctgacactacaataaaaatttagaatctatttatttatttggagaagcagaacatattgacaagcatcttgggaagtcaccttcttaaagaacatcctagtaagattgttaacaaatgttatgtacattcttgagtcagattctcaaataatctttgtttaaagaaattaaacagtttttgtctttgatggctcttctttgtgattttgccaggaaatataaggaaaaggtcatgatttgcagcagcacttttcgaaatccacagctttctgtgcacacacatagaaaaattaagcatctcactgctccgaccgccactagggcaaaaggggaaaaagaaaggaaatttccaagagtttttcacagcgaggcaaatcataggatgacacaaaataatgaaactttttgagaaaatcattaccagacgctgaagtatgcagaattgactggcaagcccagacctggcttctgccggggagctggggtggctgccttcacccgcccggctgcccgcccccgtcggtgcgccagcccccaggctggcgactggaaacactcttggccacactctcggccaaatctgagcccgaacattccccttcaacgcctgctttaaagcaggcactgtcacaatcctgagaacagaagcgaaattaagataaacagttcccaaactcgaggggtccccccgccaaaatgacgtctcaaaacgccacgttatctcacctccattaaagaaacggactcgggctccggccattctcttaacttttctggcctgaaatgttcatcataactcgcagttttggtggcagccatggacaggagaatccctgagggatgaaaaggtaaactgaggctgaggaagacggttaccgttgagagccaggcctttgggctcagggagtgttcaaatcccgctcggcccctttctaaaagctgagccgagtcacccaacaaactgggatccttggcgccctaggcgcttcaacaggcccggctacccactcccgtgtcgtcctcgggccaaagcgggcctttcctccggggcgcgcccccctggccctgccacagccctccctgggctccgcgacccccaggcccgtaggcctccccgggccccacctcaggccagctccgggggaagtcgcaggccccgcggctccgtcccggtagggctcccccgaggccgcgtcctggagcggcgacggagaaaggagcccgcgggcccgagcgtcggggcgcatgcgccacgccagatcccggggtgctgccccgacgccagctggacggtgacgccgaagtcccgggaaaaggaagggcgccatttgatttcacagcaaacgggcggtgacaccgacttcccgggaaagggaaaggcgccatttgatttcacagaaaacggaaacgcagtgatgaagcccagcgcctggccctcgccctccctccacgtctgtctcgggggcgccctcccctcgcaggagccagggcacgcgggccttcaaccgccgaggcccccgccgcccttctggacttttatcgaggcatgtacactaatacgaaagagaatttgccatttacctgtaagattgagggtgacaacgtaagaggaatggttttaagtgacgcgtccggctccttactcccactgaagggtgaaggtgccacaggtggacctggtttggattctgatgtgaagaaaccgacttcaaaacatttgggccaatcaggaaaatgcgaaaactctgactacaaatttaatgatatctagaattattgttaatagtttaaggtatggtacattatcacaaccaagatttgacatagctacagtcaagatacaggatattatcttgtatcaggtgtatcaggacaccactacaaggattactctgttttcagccaatgtttcttcaagtatgttttttagtcctgcctgtttctctcgtccttctgggattctgatgacatgaatattattatagcccccacagccacttaagcctctcttcttccctccacccccagtctattttctcattttttaagattgggtaatttttattgttctatcttccagctcactgattctttcctccatcttctctattctactgttgagcttaactgctgagctttttattttggctattgtaattttcagttctacaattttcatctggttcttctttgtatctcctgtttgctcaggatttttattttttcatttgcttcaagtgtatccatatttgctcattgaagcagttttctcatagcaactttaaaagtctgtgagcttattctaacatctttgtcatctcagtgctggtctctattgaagtctgaacattttcagtttatattatgagactctggatcttatttaaactttctgttttagctggctttctccaacaccaatctaacagggttaatgaggttaccacctcattactgccagatggagataggaatccaggtgccccagttggccttcattgacacttgaggggccaaagttcctcattactgctgtgtagaccatgatttagagattctagtcaggctaactgagagaccattcagcaaattacttccttatatggtataatcttctcgagaaaaggagctgaatctatctcatctttacatctttctcataacatgggaccatctatgactgacccaaatagcaggcgaacagaaaattcctgttgagtagacgacatacacagaaaagtataatatactgatggcttaaactacattaagtataagcaaaaggtgatacaaaataggatttttaatttctacctagcttcttccttacttcatttgaaaataaaagtttccctgatttactgaatcaacttatttcaatctcatatgatttaaaagcttacctgagcatttgtctctttacttgatgttccctggcaatgtcgccttttttacatggtgaaaataactgttaaggatttgaaagattctcctttcaataggtagtgcttcactgagtcttcacctaggctcttgctgcaggctctgtgtctctttctacataccacaactaagtcagttaatctcatagtattaaaatcttttgttactgtttctcccactaactttagggcagagagcctatgttggctcatccttatatccccagaacctggcagagcacctgggaaaaacag

SEQ ID NO: 2980 - DNA, 4001 bp, Homo sapiens
ggaagctttgggagtactgaatatgtccaccatcttgattgtggtgatgttttcgtgtgtatacatgtcaaaacttaccaagtttgtacactttatttgagacagggtcttattctgtcacccaggtggggatgcagtggcacaatcacagctcactgcagcctcaaattcctggggtcaagcaatcctcctgcctcagcctctcaagcagctgggactataggtgtatgctaccacacctggctattattgttcgttcgtttgtggagacagggtctcagtatattgctctgcctggtctagatagaactcctgggctcaagcgaccctcccacctcagcctcccaacgtgctgggattacaggcatgaggcacagtgccagacacacactttaaatatatgcagtttactgtatatcaattacatcttaataaagctgtttagaaaaaagaaactacaatctaaaaacaatataactggctgggcgcaagggctcacagctataatcccagcattttggaacaccacggtaggtggattgcttgagctcaggagttggggaccagcctaggcgacacagtgtagagattttttgtatctctacagaaaatacaaaaattagccagacatggtggcgtgcgcctatacttccagctactagggagtggaaggatggcttgattccaggaggaaacatagcaagaccctgtctcaaatataaataaataaataaatacatcatatcaaaatttgggtgatgcagctaaggcagtacctcaagagaaacttatagctatgttacattttaaaaggtatataatcaatgacctatgattccaccttaagatgttagaaaaaaacagcaaagtgaatatacaaagttagtaaagtgaagggaataataaacagaatgaaataaaaacaaacaatagaaaaaacaatatatttagcacaagccacttcctactgcaacgatccaagtaaaaaaatctccaaatcccacactatttgatatatacctccataaaacaaaggggcttgggctccaaccattcttttgagctcttgagcttgggaagtgtgccagttaccagatcatcactgtctacatttttcattgtggtcacaaataacaatgcccctggaaaaactaaaaatcatcttatttagtattgaacatttcacagtcatctgattttctcttctgtttaataccacctgtgtccttgcacacacgcaaaatggattttgaacactaaccatccagtttccctaacaagaggccttcactacagactccagatgacggcttcagagccagcctcctttataagcaggcgagatgctctttgaaagaatcccccgtcccttggaatggattcccacgtccccctccaaggcagcccattccagccagtgtggcagcttcagcctggcctctcggagtcccatttgcaacacttttctgactttggtggcctcgagtgggaagaactgcaactttctggccacagaaacacaggctgagctgcttagagaaggcagggaggggctttcggtcatactgcgcgagtcttcgagctctgagcggctcgaagtcctccccgaggcacgggtgcgacggggatgtcgtaggcgtccgcacccgctctcgctcatcgcgcccactcccggcccttcctcccacccactaggccgggcgcctgcggcctccacgccagccccgggccgggggcctcccgcgcaggcgcgtcgtgcgcggggaccgcccggcctggcggggaggtcgccggccgcgacaggcacctctctgccctcccaaggccagcaggcccgcggccgtcctgctacacactcgggcccggcccgacgaccccggagccgtccgactgcggctggaagggagcccgcccgcgtctgcggaacgcgcgaatgttggcgcccaccgtctcccggacgcagcgccgcgcgagcactccgccccctgcgccgcgggttccacagcgagtccgcgcgggcggtgccggggcggcggaggacggcttcaggcccaaaggggattgggcggcggctctaggtggcgggtcttggtttgcggaaggggctggagtcgctgcttctcggtgaccggcgcgtggcccggccaatcctgccgccgccacccacccgcaaccgcgtccgttgacggtcgggtccttggtcgccgggtccttgcgggcaccacagagcggggtggcgtccgctccctcgagtcctcggtgccagggaattcaccgctcaccaccccctgccccgccttgggtcctgctcggggaccaaaccactggaaggcagtggcgggaaacgggcgcctgtgccggaggtcctgatgaggggggtccaaggcttggggacttgtgcgggaaatgtgggtttaagtgccttcaaggtgtttttagtccattgggatgttgatcagcgttcatagctggcgctgatgcaggtcaccgggaagggaatgtgtgggtttatggccacgcataatctcttttagtcgtgtttaacttagcagggtagctctccatcctggctgggttttgttttttgtttttattttttattttacagagtttttctcagtgtgtaatgtttgtttttaaatcgcagataatcctgatgtaaaccattgacatagccagaaaatcaccaggctgtgattttccaaactcagcttcataacctattctgtgtgagctgtgatttttctatgattctgttttcctctttgggtactggtgggccctgaatgatggaccaccgttttcaccctgtaccttttcaaagtacacttgctgatcttagaactgtctgcagtgtcttaaggacatttgtattcacatgccttttaaaagctagccagagtcaatggcttcaactgcactttccctttcagagttgagggaacatgagccatttgcagagcttattgttagacaccctcttgggaaccaagcatgtggacagtgcagccctcatcaaaatccaggagcggagcttgtgtgtagcatcaccaggtttcaatgtaagaaaaaacaagtttggacctaagacttgatttacttattatttctattcttccaaaaaatgaagcagacatgacttttttttttttttgagacggaatttcactcttgttgcttagcctgggatgcaatggcatgatctcagctcactgcaacctccgcctctcaagcgattcttgagccttagcctcccgagtagctgggattacaggagtgcgctaccaggcccggctaatttttgtatttttagtagagatggtgttttaccatgttggtcaggctagtctcaaactcctaacctcaggtgatccacctgcctcggcctcccaaagtgctgggattacaggcatgagccaccgtgcccagcccagacatgacttttaaatgaactttttctgtaaagagctacataaatattttaggtttctaggcttagtctttttactgttgatataaaggaatacctgaagctgggtaatttataaagaaaagaggtttatttggctcacagttctactgcctggaagactggtcatctgtgaaagcctcaggctgcttccactcatggcagaggtgaaggggagccagcatgtgcagagatcacagtgggggagaggaagcaagagagagcaagtggagaggtgccaggctctttctaagagccagctctcctggaacaaatacagtgaaaactcacagcttcccccagctcgcagggagggcatcagtctattcatgatccaaatacctcccattaggccccaccgaaaacgctgggaatcagatttcaacatgagattcaaactatagcacagggccgtagagtctctgtcacaaccactcaactctgcaattgtagaggaaaaacagccatacataaaagaatgaatgtgactgtgttccaataaaattttatatttatggatactgaagtttga

SEQ ID NO: 2981 - DNA, 4001 bp, Homo sapiens
atgctcctgaaatattccatctggcagtctagcaggtaccacctttgggaatgtttccaccatagggttttgcaccagctgagggacaggagagcttaagcatccttttttcactaagcctatatgagtcctatctgtggctgcctcctgggtaaagacactttatttaaaaacaattcttaggctgtcagtgacactaacattttactccaggcttcagtctttatctggtacagaacagaagttacacatttggaggtacaagggagccagagatcacctgtaacccccctttagctcctatgtggtctcttcagctggctctagaaaccaaattgataccagcagattgacaggagaaaagcatgtactttttttttttttttttttttttatggagacagggtcttactctgtcacccaggctggagtgcaatggcacaatcagcctcctgggtagctaagactgaaggcataccaccatgcctggcttgtattttttatagagacaggttttcaccatgttgcccaggctgatctcaaactcccaggctcaagtgattcggccaaagtaagatgcttttgtaatttttagacaaagaacaataaatttgagaagaaataagacaaaatctggctagggatagtaaatttctagggaagtcactaggagatatatgggggtggggggtgtaaaactagtggaagataagggttacttccttaagtgtatttattcagttccattgcagccccgtttccagtctctggtgataagggctttttgccctagtatggggagggtacccctctcagaggaatctttatgacttgctacatgcaagaagagacaggtcagctagccttttctgaaactacaatttctccaatgctttcacctcaaaattaacaatatacctatcggacatattctgagatggcacatgactccttcaagggtatttcacacacatgctaggaagtgaggggttaagtgtccctgtgtgctttttcagatacgtggcttcagagagagcaagaaggctgaggaggatgaggagggcagggtgaggctctctccccaggctgatgatctcctttcccttgtcttagtacaagcaaatgctggtgaatgctttcacggagcaaattctgcctcacttctccacggagggcccccaacgtctgctgccggttctggacagaatctacccagtgaccgaaatccaggaggcccataagtacatggaggccaacaagaacataggcaagatcgtcctggaactgccccagtgaaggaggatggggcaggacaggacgcggccaccccaggcctttccagagcaaacctggagaagattcacaatagacaggccaagaaacccggtgcttcctccagagccgtttaaagctgatatgaggaaataaagagtgaactggaagggtggcacgcggactggggccgccgcggcggggttgaggtgggagtccggacgggcgtcgcagcggggattactgaggcccgatcagctgacgctcaacctgagggcccctccagggacggagattctgggtatagttacagcgtcagccgtgacacaagccgccagaaccccacatattccgccttgcgcacagctagaggcccaggcccaccacctccggcacctgcccgcgcgccccgcaaccagtgggcaccacagcaggccccagccctgcccgctactcacctgggccccaccccacctctcgccgccctcctcaggccccaccacctcccgctacacatctgagccccgccccacctccaccactttcctcagccccaaccacctcctgctacacttctgggccccgccgcacctccaccaccctcctcaggccccgatcccttccgctactcacctgggtcccgccccagctcagtcctcctcaggccccgccttcgcccgctactcacctgggccccaccccacctctcgccaccctcctcaggccccaccacctcccgctacacatctgggccccgccccaccgccaccaccctcctcaggccccgccccttccattactcacttgggtcccgccccagctcaccgccttgctcaggcccggctccctcccggatactcacttgggccccaccccagctctccgcaccctcctcaggccccgccccctcccgctactcacctgggtcccgccctacctgtcataaccctgctcaagccccgcctcctccgctccccagttactcacctgagacccgccccagctctccgccctcctcaggccccgccctctccacccgggttcctctgctcagggcctccccgaccggaacatctcgccttttggaggctacgccccgccctttacggtacagagcccggaagtgtcttggactctcgcctttccatcttccggcctcgagtctcgctcaggctcggttttaccccggagtctattcgaagggggctgctacgtcagcgcgtctcagcgtaagacggcgctattccgctgtaacagcttccggcgggtcctggatgttgatgtcctgcatctaacgcggtgtaacccccgaagccgagcgagctccggaggaatttcagtatctgctacggtaacttcatcagcccgccaagatggcgatgcaagcggccaagagggcgaacgtgagtatcgggtgttctgcggagggtgggagaacttcgggtttgactttcttagcggcgtggatcggagcattcttgctcctcctccgtccccagagcggagaactccagaattcctatcctgtcagcgaagacactatccggccccatcctcagagatatgctccttgagccacatttctgtccccaccccttttgagagttcctcagtctctaccctagtgtcagtgatagtgttacccctatagcctctttgcttgacccgcacctaaggacctggcgttaggattatctccttgacttaaagtcgatatctcagaagagtcctcaactaacttaatggttcaccaacaactaggacctgggattcccctcagatcatggtgcttttcggatccttcattaacacattaattaaaacaatattttttgagcacctactatgtattctgcttgccatgtgggacataattcatcaattatatttattgaatagctactatgtgccagacactagtcttacgtattgggaatacagcagtgaataaaacaagtccttctgcttacattctagtgtttgagagtacagtgttacggaaacttttaaaaaaaaaaaactcaaaaaagagattagtcaacagtaaaacgcttagaggtgtaagatgaagttaggccgagtgaggtggctcatgcctgtaatccccgcacttttggaggctgaggtgggaggattgcttgagcccaggaattcaaggctgccttgagccatgattgtgccactgcgcagcacttcagcccaggagacagagcaagaccctgactcaaaaaaaaaaaaaaaaacagaaagaaagaaagaaagaaagaaaagacaagcaattgaccattgtatatgtaaatggagacttttggtgaccttgatgataggaatcatttcagtggatgaaaacttgattgcagtggggtgaaaagatggtggaagttgagaaaatggaaacagcaaagacactctgtccatgagttctcatttaaataggaagtagggaaattggatgatagttgacttttttttttgagatggactctcactctgtcacccaggctggagtgcagtggcacagtcttggctcactgcaacctctgtctcctgagttcaagcaattctcctgcctcagcctcttgagtagctgggattacaggtgcccaccaccatgcccggctaatttttgtatttttagtagagacagggtttctccgtgttggccaggctggtctcaaactcctgacctcaagtgatccacctgccttggcctcccaaaacgctgggat

SEQ ID NO: 2982 - DNA, 4001 bp, Homo sapiens
tccctgtgatccctcggacaggaccagggagcccaacagagatgcgtgtatgtcagcttcatcacttttccattcattgaaccaaaactgagggctgactgtgtgctcaaatcaatgtgaccttagggaaataactcacttgctctgagcttagtttcctcatctgcaaagtggaaagagcccctgccccatggggctattgtgaagatgaaaggaaataacaccagtgaggtcctttgccacatttggtatctatttttagcactgaggcagtatgcgcccactatgtgcccaagcccgtgatgctgctgctgcccccttcccagagccagagcccagaggcaggagggaatgtgggcaggtctgtttccacctcgctttcccactctcccctcacaggaacccagggccagcaggaggtgaagttctgccagcccccagcctgggcccagcgcccatgtttatgactgtttatttcagagcaagtagaaaggagaaattagagccatgaaagacaggacaacggaccaataaaaaccagctcccagaagagtcagaaggaggaagacaggcaaaactgtcaccatagcaacacaagacagtcagaagcacgcaggaaaaacagcccctgctctgcctcctgtctccactgcaaagcaagccctcgaaccccaaccagagatcagtgaaagccgacaatgatccacccaaagaactctggtacccaagcccagacctggctagcagccactctcctcctgctgccccagcacaagtcccagccttccagggtcccagatcagcattctgtgccctggggactcgacactgtgcagatggcccaggtcccatccagaggagatagtgactggtgacagagaggaaagtttctaacagggagaaaaggagggtcacagagcttcaggggagatcagggccctaaactccagccccatgaccctgtcttgggttccctggggagcaggcgggtaaacaagggtgtgggagaggacatcaggccctggacacagaaagattgctccatcagttctggacctggcacccccaaaacagtggctgggggaattctggggatgcgtggggaaatagctttggaggccttaaatgacaaagatcttggccctggtctctggggacactggctagcgagtaggagcagcttggaggaggacccagggacgggctggcccattttgacagagaatgtctcctggcagacaagacaggtgtctccaccaaaaagcatggctggcctgggaccagcattttgggaagtgggtcaaattgttcccaaagctcagtattggaaaagtgccttttgccaaactggggttctgggttctgggggaggagagagggtgacggcaaggtgtgctgggtcctaggcacagcagctttctggctggctaagaacgtctgtggcaggtggcaacagaagggtccaggtgtgcaggggctggggagggggccatccctccctttggggctgtagagagtacccaggaccccggggcctcgggtggtgggaaggggagtgttaggggtcccctgcaagaatggagcttatgatacctggggtggggggtaagtgagtgagggacgagggagggtggtctgggaaaggaacacaatcaggaggcagccctctcagaaagagggcaacggggcacaaagccggacctctgtccggcgatcgctagagaagggctcccggacggtgtcctccgctctccctccctcccaaaggctgcaggggcgtccgggaggagaaggatggcagggaggcgcccgccccgcctcgcggtgccccgcggtgccccgtgcaggccgagccccgcgcccgcagacccccgcccgcgcccctgccgcgcccccagccgcgccgcgctcaccgagtcgccgccgccctgctctgccgcccgctccgccgccgccgagtacgcctctcccgcggccgccgcagcctgcgagacggcctcggagccccgccccgcccctccccgtccctccccgccccgccccgcccccagcccggctcgcggcagccgccccgccccggccccgggggatccccacccgcgctgtcaccggccgcgtcctcaccctagcctggacaaccccatctctttgcccggctctgctctctgctcccaggagctggtgcggacccgccccagcacggtcgcccctgccccttctcagccttggccacttggccttgccttcccagaggaagcccgaaccagacctttctgtttctgcacaccaaattcctccacacccacggttgccctccaagaaaaagaaatccccgcaatctctagacgcatattcaccttcaaattaatgcccagccaaatcatcccaatccctaggcacactccaaattacttgagattctgaacccagtctcgctcccagtccctttctgcccaccctattaacagatctccagccttggggcccgcagttatccgataggaccactgtaaagtcttcccaaaggctcaatccaaaacatgtaattaaccttaaagagtaagtctgcaaaaacacttaaaaaattctatgatgcaaaaagaaagtagtgggttacagcgtcattgacgtgatcattgttctaaaacatctgccatggaggctttttgcattagagagagggagattcaggaaaccggagaggactcagcagtgccaaacaggttgtgagtcagagctcctgttgaggggagggagagctcctggggaccccggcttcgggtgcttcctttcccagtccatcagccagaacatcatgaaacatgtgttaaatccccatagtgtgccaaggtacgtgcccgaagctgcatgggttggggccctgtgtgggctgggatcagaggaggcgggaagcatcaggagaaggtgttcaggcccctctcctttctgagatccagggtgtttcccctgggaggacttgttgcccaagcttcctttgcactctgaaaggctctcctgaactgcccacagaggctcttggtctgttttttggcaaaaattcacagagggcaggaaggcactgtctagttagagtgaaatattttcccacttggaaggggtccttaggaccagaagaaacactttcccgttctctttttgagttttccccatgccctagaccagcctctgttgtcaattcctgcaaaggtgttttttttgtttttgttttttgagacagagtctcactctgtagctcaggctggagtggagtggtgtgatctcggctcactgcaacctccatcccccggggttcaagcaattctcctgcctcagcctccagagtagctgggactacaggcgcctgccaccacatccggctaatttttgtatttttagtagagacggggtttcaccatcttggtcaggctagtcttgaactcttgacctcgtgatccacccactttggcctcccaaagtgctgggattacaagcgtgaaccaccgcagccgtctggcaaaggtgttttatctgtgagtggctctatgagaaaagccttcttgccatgaggtaaaccatgtctactacacacacacacacacacacacacacacacacacacacatacacacacccctaaaattttctggcttaatctgtccaccttgagtttggccaggttttgggaagagtgaggactaatcagccacaaacaccattcatccccataaaacactatcatttcagaccatgagaggacttttcactttacacccatctgtctctactaatacagctcaagtttgtgagtagactatttgatgcatgagatttcacttccacacacttagagatggcttctgtttcaataatcgagggatacctgcatggtattgcccagcccattatgaaataatagggttttctaatgatcagtgtggaatttaataattgaatgtttcctaagacaaaattaccagatgaaagtcttttaactttatcag

SEQ ID NO: 2983 - DNA, 4001 bp, Homo sapiens
gtgcctgccggcacctcccctcccgccttgaactcccgcttgccaaagcggcaccaggcggcgaagctctccgagttcgtccagcagatctcctcgctcttgaggcccaggtggccgcaggcgttctgcaccaccagctcggccaccagcgggcggtagcggtaccagctattcaccacccggcccacgttggccgcgcccgcctcatacaggctgtcctggcggatctcgccttggtgcaggtggatgatctgcccgccgcccacgtagacggcccagtgcggggcgggcgcgggcggctccggcgcgggctgcagccacagcagctccagcaggtcgccgggttcgcagagcgctggcagcgcggtgaccgcgtagacgcttaggtcggcgccctgagggccaccgctcactttggaaaagatgcattcctggccccgaaaggcggaaaactgagtctcgttgaggaccagctggtgcagcaggtggtggtggtggcggctggggctctccgggcagggggtgcaacccgggggggccttcacgccaaacttgtcgggctgcccgcgttcgtccaggtcttcctcatcatccgagaagaagtaggcaaccccgacccgcagttcgtccttttcaatccccgacgggtcccctgtgggcaactcgctgtagttgaggtgggtgatgcggtccagttggttgcccatcaatgaggtggcgaggcgagggccaggagcggggatctgcggaggcacagagaggcagagacaccgtcagagtccgggctgcccctttcggtgtccctccccaagacgtgcagtgcccctgggacctgccggctagcttacgtgccctcaccggagtcaccctttccagccgagtcctccgtgcctccccaggggtacgaggggcggagaagccgccacaggtcaggcgagagcagacgccaccacacagcctccgaccccttccgggaactcggtccaactcccagaagaaaacacccaggctggctggagagcttgcggggtcccggtggggaggagagtgctggctgtggcagtgtgggagacggacacccaggaaggaccgaggggtgggctgaaagggagaagggagcctaaggccagtgagctgggagcaagctcccatttctgtccccaccctctccagcccacctcccagttttgcactaggttgccttcctccccttacagcggctcgcacaatgacaatcagacacattctcaggcattcacttgacaccagcaacattttggacacttgggagtccagacactggcagcctggtatactggtgtatgtcacatacacccacaatgacaaaccttcgcgacgacacactggcacacttagaccccacacattcgtacacaatttcagctccacgcttgcacgctcgccgttgcacgtacgcccaagcacccgggcacacctgccctcacaggcaggtgcactctgccccttacttctcttgccttgtccccatcagggccaatgggactgcgccagggcgaggctgctctgtctaaaataacctaacaaagaggcaggggaaggatggagaaagccagtgcagtgtatgtgtgtgggtgtgggtgggagcgtgtgtgtgtagagaggttcacttttagcccaaagacccctctccctcctacccagcacaggatccaaacaatcggatgaagaaaaaccgtttccaaggcaaagaaagccgcttctccctacccgtgatttccctgctcccgaaaccccaaactcctttaaagtctcctggtccccatgggtgctgaggaagcggcggtggcgagtgggtcctgggctgcgcgtggggctgcggctccgctctaccccgagccgaatcgtgcggtgcggcgcccgtgcgcctccaggtctgcgctggccggggcgcctgctcccactggacagtcccggctcggctctgctttcccaccgccgcgccgacgactctaagtagccggagcagccggtcccagggcccgccccaggacgcgctcattggttggggcgggtgctcgagctgtgtcaatcttcgccggcgggggaggggagcagaggcgggcctcctgtgcgctttgctctgctccgctccgccccgccccgtaccccgcacacccgaccgcgcgccgccccggggagcggaggtgtgcgcacccgcggggggcgcggcgctttctgccaggtgccgatgcccgcttgcgcccgcgccccccagctcatccgagctgattgtgactgagaacacagcccgcccgcgttccgtgttccaggaagacagactccagcggggaagctgagtctgggtatggagaagaaaccccagggcaccccagtatggcccaggcactgcgagcggcccggggcaggcagcgacattgcccgaggcgggcgtctgggccctgctgggatcccccagagccttggttcccgatggcccctaggctggtccttggatcgaagacccttttcgttccccagacgtctttgaaattgctcctgcgacgtttggctcctcttctttgactggagtgaggctgctgacccagagctgatgcccgatttaaaaggagcttggtgtcaaatgccacccaaaagcctgagctttggccggtgcattccctggctgtgcctatgatattggcctccaattttctgaatataggaggagtacctcacaactcatgtatgtgagttcatacatgcaagcagagagtaggatgtaaaagtgttttccaagcctcagaattgggattgctaagcaagttttgtttggttttgtgggaaaggaggctccagcagtagttaatgattacatttctggatggaaagttaatgaatgaatgtgttctgaatattggatgctgaaaaaatgaacttcatatatacaacattccagaccaatagtttcaaaagttcctaacattaagcctcaaagagttcttagacatctggttctggccccaatgctactcatctttaagcctgggctccagcagcttttctatgaagcctcttttctttcccaatgaggaatttgatacttcctatttgaaccccccacctcttccctacaaagcgaattccttgagaatagactttgcattctgcacaaccttgtattctgggcctctttcccaatgctagtcatgcagtgtgttccatcagtaatagtaaaaatgaaaacagcctgtattgaccacttatacgtggtcagacacttaagagtaaattaagtagacaatttaatcattattcctctgtagggtactcactaatatccgaattgtaacaaacagggaaacaaaagctccaatactagtaccagcaatccatccaagcctacgggataccagatccagtctttcactaagttatagtgtttattgaataaaatcttgtttcataaaatgagaaaactggtgtttcagagaagttagatgattggctcaaggttacatggagactgatccatattacaaccccctttttctttgctagacttttctgcttgaatatcttcaaaccgccaagcctccagtttatgtttgctttctgaaggtctctgtacacccccacagcctccaaatgcagtgatttatcaaattagatgctaaaatattgctggaaaaaatggttttaaatgaccatcggtatacaattgatgtacctaaatctttttggaaatttggctattgtccatgtgcatgcaagttatcagaaaacaagttgccattcgtggaactgaccacaggttgagatggccttttttatacttgccataagtaataaacaactcattttggccctgaagtcaagagaattgaacaagtagctttagagataaggagtgagttattggtcttgttataaactggacttcagggctgtctgggatgagggtatctgaagagttcattgttgatgtctgagaagaactctttgaaagcaactcagcgttt

SEQ ID NO: 2984 - DNA, 4001 bp, Homo sapiens
ccagcctggtcaccagagcaagacctcatctcttaataaataaataaatagaaaaggtagtcatttaattctaatatttctcagttaatcctttaaaagtacatttcagttaattaaggctgacttttaatatttgaatgccaccaaactaagtagttaaggttaaaatttataacagttttcagaaaatccatggtttacattacactctatgtcaagtagttatgtgattacaattactacagtaacaattacttgtacagtacccaaaagaataaaaagttaaaaaaaggagggggaaaaaaaaagacaataatgggaagaaacagcatccgtggccaattcttaagtgaccactatccatgcagaaagactacatttaataaggtctacccccttcctttcattccactcattccactacagtactatagtgtcatttattccagaaagaagcttctaggatttcatttcctttcccagtaaagggaccctcctcagggctcctcacagcatattttcccagtatcctgtgaacccctcttccacctcaccttgtactctaagggcctaacactgccacaaagaaactgttcctaaaaaagtcctaatgaatgaatggtttcatgtgtgaacaagcgattcagtctgagatgtcaactaaagagactattttgctgaatgactttaacatatgccctaatgaaagaaagaagccccctaaagtctggaatatttataaaaattcagagcaagtttccaagaaaagaacaatagtatttcactgtgacaaagacagatgataagcaagactacttcgttcctaaaaatttctactagggtagtaaattattcaaataggcagactttgggaatcctcaaggtgttttttcctaaagaaaggtttctctcaaaggtttccttgtcatggaaaaacctaagagaaaattttgataaagaacttgttacttagaaatacagctagctaaatctgtactttgttttgataccgtacctgtaggtaagtatctaaccatacaatttgtttctggaaccacatttagcccaagagggtccacgttctcaagtttaatagagtacactgatctgggtgacccagtgagataacaaaccctatttccagcttctagatactgatgaattatggttgaataaatatcaggagaaggagagacacaatgcaaaacaaatacgcaggttcttcgtgggtgaagacgaccctggtctaatggggctcaacgaggcagagtatcacagagtcaaagcaaactgctggtggttcccagggacgtggtgataggttagatgcacaagcgagctggccagcggaacagatgcagcgcccatacaagtggcttagcgaagcctgggtgcatgcagagatgactgggcaaaggagaaattttgagagaagtggggtggggtaggaggaggggctcaagatgggagtaggaaatttggagaacaagtaggaaagcagaatcaactttggcaacctttagagttgaggggttaaggggtagggcaggaggatgaagcgaggagagaagctcggggagtgggggtggcgaaaatcagagcccagacaatgacacgcatgactgacaaacgctgcgggtagctcgcctgcagggagcactgggcaggcctaggggtgttgggattggaggaccccgagctagcagtgcagacagtggacgtggcattgggggtgccggggccaaagggaagcgacagccaggagccacggggtgcggcgtggagaggcaggtgtctcagactggggcgcaggaggtgttcccagggggccggcagcgtggggcttgggagacccgtgccctgacaatcttaccctagatcttccaacgactccaagatgtcagtctccatgaggtcacactccatgctactgtggtattcaaatttccgagtcgtcaggctcccctcttcgccggcaacgcgtacactcgcgcatgcgcgacttccccggaacttccaaatccacagctggcgcctcagctcccgcactgcgcatgtccggagcgtgcgcaagaaacttggtcccactgaccgccccacccctgcccactaaagaattacagggcccgcagttttgcacatgcgcgttactggatcgtgaagctagccgcccagagaagggtaggaggaccggctgcgtggcagctgggcgtggggaccacgcgaaggggagcgctctcggctctcgttattgggtgtacgcatgtgcgaatgtagggggcgcggcgggccgggaaggagcttggaagagtctcgggacgcgggtggagtcggctgttaaaccgagtctctgcatcccagacaggagatcgggtggctcttcgtagggtgccggcatgtgctagccttagcttgcaggtcatgtagaaagggagaattcttgcgctcccgtcttcaggacgcgggtgcgggccaagtgcagacggcagatagcgtgccatttgatttcctcgtggctgcagtagctttatttcagggttagggatgagccaactttccgcagactatggatgttcagaaagttgggtcgttttccctcatgcattctctacctgatgtctaaagcccttcccagacactaagcatgttattttaaggagaaggggagcttcactccatagcaaatagaatagaatatttttaaatccacgtagtttagacagtgaataaactttttggctgtactgtcattacttttgacattatttgcccgggtgaaacattgagttcacgatgtggatgtgttgtgatatcttggcagttactgagggtgtgtttagaaattactgaaaaatcagaaatgttttcaaagtgatggcatatttagaaaactatatttaaccataagttggcgtactgttaaatcgtgtaggcatttaattaaagagttttcatattgatacctgttgattttattctatagttctcaagcatttttgtgtctgatggatagatgttcctatccttagtagtacctttttcttttctttctttttttttttttttttttatgagacggagtcttgctctgtcgctcaggctggagtgcagtggtgcgatctcggctcactgcaagctccgcctcccgggttcacgccattattctgcctcagcctcccaagtagctgggaccacaggcgttcaccaccacacccagctaattttttgtatttttagtagagacggggtttcaccatgttagccaggatggtctcgatctcctgaccttgtggtccgcccaccttggcctcccaaagtgctgggattacaggcgtgagccaccgcgcccggccagtagtacctttttcagtttccttattttgcatcatctgaagtgggggtaggttttctgcacttaccatgggcacttgatatggcccattatgatgcagtcaccataaggctgtgtgaatattagtcacattctacagatgaggacactaaggctgagtggcttaataatcttcagcgatcttaatgcctgtaagtatgaaactagattttgagattgaggtatatctaaatccatattccttcttttttgactagtcaaataaggatttatacgcaggatgtgaaaagaggaaaatttagctagttgaatttgtttaaacttgtatatattgtacataattaccttataataattgaataattattttcctcatagggttgttgaaggtgctaaacaaaaagtcatgcctaatacaaaaatcaattttgaaagaaaaagggtttcattcttgactcacttttgatgtaagctgtgttcaatattgaactaatattgaatataatattgtgttcaatattagtgaatgaacgagtgatgacttccctaaaagtattagtattccctttctttctttaaaaaaaatccagcttttgcaggaatagtattctctttctaattcacatcgttagcttaaatgaaggattgc

SEQ ID NO: 2985 - DNA, 4001 bp, Homo sapiens
aggaaatatcatccaaacccaaattgagatacattctacctaacagccaatctgtactctttaaaaatgtctagcttataaaaaacacaaacagactgagaattgttccaggttagacatgacaactaaatgtaatgtgggatcttaacaacagatggtaggggatgggggtataaaacatacaactgtatcataaacaaaatttgaaatatggactctatcttagataatagtatatcattaaatatcctgattttaatcactgtactgtggttatgtatgagtgtgtcctcgttcttatgaaatgtatgctcaagtatttagggataaaggggaactacgcctgatttgacctcaaatggttcaggaaaataatgtgtatacacacccacccacatacatatacttaacaatgatcagtaaaatggagaaaatgtaaactggtgaatctaggtaaagggtatactggaattacttgtactgtatatccttgctacttttctgtaaatttaaaatatatacaaaatatttttagacacgtaaaatgtttaagatttaaataaactgctaaggcaggtacaaattggaattctagctatagcaatggtcataaaagaaactttcatctaatctcaattctaatgggtgtacttgtttcctaaaaggccttagcagatatagacatacataacagtattttgcctaaaattaggtataacatgcttcctgtaaaaaaaaaaaaaaaaaagtaacttaaaatttttcaacttttctaaatgttgtctacaagagaatcatattttcagctaggtaattcaagaagaatacttctaattggagagggaaaggtggattaacttttttccatatggaataatgaatttttaacctctactttctgtgatggtcatatggtaattccacatatactcaaagactatgcgtgatggtggggaagtgggcacaaggttgagtgtaatggtcagaaaggaaaagtctacactcctaacctaaggtatcctggtgcaatgtaaagagaaaaaaatccaggactgaaatcacacagcctgcgtttaagggattctgatgtgatcatcagcaaataacgtctccggtttcccataccttgatttcttcaactagaaaatgggaatgatgattcttttaaaaatttctgcctcaaagggctgaggattaagtgaactatttacctggaaagcgctttgtaaacttcaaaaccctacacatgtgttagtatgtgtaataaactccatatgagaggccactggaatcagcaaagttaattaattccattgctgtcatgcttctcctagaagatattgtaactgtgggtgtacaggtacatacgacttggcaaagggccaaaataaggttttcttcccaaatgttctttctacaggaaacacgaaaataattagcccagattcccgagtgaactcatcaacatccgtggaggtggagggtgttaaaatcgagttaaggcaaaatttacaaaaaaaaaattaaaaaacagtcaattgcgggacactgaacgaagaaggaagccaaactcggggaagggctagggagagaggaggcgtggccccagccccgctccacgccgcgcgcctcctcgctccccatccagcgcggcgaccaccggggtggcggcgacagcggcgcttctcaaacctttagtctcccaagagccgttacgcgccgcccctctcaatccccacaagtctgggcccctaacctcctagcccgtcacagacttctccgcgcagctacgctgcaagaggctctcttagctagaaagcaaccactgggcgggtacctgagccgagatgaatccctcatacacggttttcgaccggttctggggcagaagcagggggcactggcgcaacaggctcgcttccgtcaccgccatggctcgaagtccggagaaacacagaaaagctctagacctgctgggtcctgcacatgcgcagtccgctggcgctcggacgccgcggagcggaaaccccagccttggcgggaagatcctggaggattccgcgggcggaaatgaaggtgaagcgcaggccaggccaagtggcgctctgcgggaggcgacatcagggctccccaaccggtagtgggagggaagattgccctcaagtccacaggactgactgaccaagatcattctagcctcaattgtcccaggagccctttcgatgattctgttttactttattgaaagactgttacaactttggtgttgcatttcctccagaataaaatgacttttacagcctggacgttgtagcactctgtcttctttgctgttgtcctctctcccttaacatacagaataatgtattattttgtgtataattattgtaatataatgtataacacattgattatatcatatatattacagttctgtggcttactaagttcaatcagatatatttgaggcacacacatgtatacgtatatgtgtattgattagactcaagtcaacactggactcagttctgtgtacggcactcacaaatatataaagcaaaacatgagtaaagattgctgatggacttgaacttaattttcctctgacagcgcttgcaatatgtttttctaactcaggaatgttatccatcccatcttattaagagttgattaaataagaaacctactaaaatatttaccatatgattatttgattttccaattttccaattttccaatgcatcacgtttgagccctactatttgaaaaacatcattgtaatgtgccaaaggttgagcaaagattatttcgtcccctacccatctttattgacctcaagacagaatttgacatcctgaagattcttaaagtttgacaagaatttgtcacagcattctggatgcttacagaaaagaatgctggagcagtggttagatataaattacattaaagcagtggttctcaaaacgtgatcctagaacctagcaacagcatcacctgggaactatgtagaaatacaagttttcaccgctgatggggttcaggatatgctaccccaaaatatggccccttgacatttgagaaaacaacaaaacctaagatcactctctgaccttctcccatccttcttccctgaggcgggtcattggatcctcaatccagaggtgctcttcctatacccacaggaaagaaatatccttatctctaaagaaacggagacatagaaaagaatctgaacaaaaagacctttgacaacttaccccagtttattaccattagaccatgctttgtccaaccgtacttccccacaactgtccactgttccttctaaaaatgcacaggttttcctgtttctttgggcttcatctctgaaggctcccatgccacataaaacttaaataaatttgcacgcttttctcttattaatctgtcttttcttataagggactcaaacaggaatctagcaacaggaaagaaagatgtttctcattccctacaggcccctatttcaaacctcgggaatcccaaacactggcaatagggctcagcagtctgcgttttaacaagctctccaggtgattctgatgcatgctaaggtttgaggatctctgcaggggcaggacataacacctgctttattttgcaactcggtaattaaggacggccatgctacatgttttcctataagaataaagtagaggctgtgcaaaagtgggatcaacacaaagattaagagaacatatagtcccttacttcaagcactttataatttatctgtgaattaagatctttattgtatccagtatgttaaacttccccaccaccacactttcccccatggaacttctaccctttctttaaagttcttctcaagtgctatgtctttttggaaagcttttttaatcttctgaaaattattgctctccctaatcatttagcatatttcctgctgcatcgtaggtgctaataaattatttactaaatatcttaatttgggttgt

SEQ ID NO: 2986 - DNA, 4001 bp, Homo sapiens
ttccaagaacatttatttctgagggtgcagagtatcaatttcaaggttgagtttctttaaaaatcaggagctaatttttaatgaattaacattcaaaggatctatatgacctaatccactacctgacaattgctggtatgagggaaatgtggccccaagaccactgagttcagagatgagtctgaaaacaattttaacatgaaaatttatgaaagatatgtacacacactacatacctctcaacagcctaagaagaatcttgtgctggcagagagcagaaacaaagactgaaattaacactgaagatatcagctgacttcatcttatgggttaacctattctattttgtaattctgtgaaaatctcatgattatttttaattttcgaaaacatttttctatgttctttttaatagcaacagtccagtcattcaggactcatacattctttagctgaagttattttattgatcttcatttactatcagttaacttttaaccaagatatttcccacatttgttatcataaacttttagtatttattagtacaaatttttcccctttcctagacacaaagacataagacctgttattactggattttttttccatttcagaagcttgagtttctcttcataaatattttcataaaaagctatttccctaatatcactagattatctatcaacatagtcctactttatatttaaactagctctgatatcagcccatagtaccttccaatttttagcaaagtgagatcagtgtcaatctaagccttttttgtaaaaggatccaatttatgactgatcaaaatgcttgcttaacaatgtttggttttctaatttgatgtgcagtgctactacatctaaaacaacaactttgctttttctatacagctattcctgagatctgtattctcaacttcctccctaaatttttggaaagactatttagtaataaaaaaagtccatagattctgttttaacttttccattcttactcatttttactttccacgagacaaacctaataatgaaaagcaatgttagttaaaaatgttgtttctaaaggcctgtcaaagcttgtatttagcatatatttttgggggttgtgggggtgatgcagcatagttcttaggtttttctattgctgaaataacactgtaaatctcttcctacccatgccttaaattcctcagtatttctggtcttgcacaacaacatatctgtgagcttatatgtcttcttagaaataacagacttactttggaacataagcacttaggaaatgttcaaccacttgtgatcttgcattagtacattttccaagctattctaggcagatagagcaaatcagagaaagttcttacctcttgaagggcgtaagacaatgcacatcaccaataaggcaagcacagcagaggtggcaactccaaatacgatttttacccaagtctacataaaataaagagaattaggcatacacacagttcctgctaaatagtagaaatggcaagattttgtttacacctaaatcctttttctctcgccccacaaagcttttgattgttttccactgatccggctataattgctggaattcttccagctctgcaaggacaaatgtttctacagtatatttagaacaattttccaatcccaacccattgaggaagtaaatacttatgtacaaatcttcaccttctaaacaatagaaaactctgatcacgttcaatccagccaaccctaattttttaagaatacttgaggttgcttatactaaccttcatttttccagatgtttttgaaagttagctaattctgtcttcagagcgtgggtcactggatctgtgaaaaccgttgaaaaggaccaagtctgtctttgtagttggaagctgaagccaggacaaggtttttttctttccacggacttttgaataccgtgccaagtttcaaaagatttctgtaaaattagaaacagattttgggggcgttcttggccctcaaatgaactgtgagtgactcaagggaagttttatagccttctcatccttgtaactacaccaacatctgcttacgttgacatacagaggtttttattttttcttttttaccagttcaggtttatgttgcattttcttctagaattcactgaaggatcactttagcaagtcattgggttttgcataacatttttatttgccactaaaagatgaatttaaaataatgaaacttgcaggtctgtacattaaacatatatctactttttaacagaggaagaacattgaagccacataagattttgtgagaaatgtgccatataactgcacttttttttcctctggaagattatgaggtattgcagacagaaatgtttttctttcagcacaatttctttgtccatatagcaccatatgcactttcagtaaatacagaagtttaaaaattcaactgtctaaacccacggctgctttactttaaagaaataaaatgccatctggtgaaatttagtatgggttaggtgtgtatgcacaggctagaaagatggaaagatcagtaagaataatttaccagcagacctttggaagaatggaaatggctttacaagagtggtatttttgctttcctctcagaatatcttctgagagaggagaacatctagtaattataaagatttaaaaataaataaaaaagcatctgaaaagaaaagtaaatcttatgtataatttcattttggctaaatctacataattccaaagaaattggtcatcttgacagattagtaaaatggttgactgaattaaaaaaaatacacatacaacagtttcttggagtgttctgtctgttttaatgcaattcacttggatagattttgtggttccacgtaaacacagttgttaaatctactgtgtccttaatttttccactaatggttttcttttttcgaagtttataatgttcccaacctgattaaaacacttcatggcaacctttcttggattgtacatgaaaggtaatggggaaatgttaccaaaacatgttgctgtttgccttagtcaacttctctggctaccacgggacactttctccagcaaagagcaggacagtggcttgtgaacttcctttcagacattctccagacatccctccctgaattccagccttatgaaaattctgttgaggaaaatgagtcattaggcacttactggcagagaactgtattcctggtggctggggctgggccctctcctttgctgttggtggagtcacctctttacaaaatgaagtaatcattaagagtaatatccaaggtgtgctatacacttgtaggtatctccaagtgattgtgaaatcctcagatctcagataaaagccagcagccaggtcctgaatgaactgtttctgtgtaagtcctctcagattgattgtcttctctggaacacaccgtgttctcagaagttctgccctagcctgccaaagccccagagtacacaggcactttttagtgggtgatttccaagactttacattgtagagagaaactataataaattattagggtgtaattaaaagaccatgctgagagcatgttagctctagcaattaagaatgcactgacatgtgactggtctgagcaccacttaggattctatgactgtgtgtgggtgtccacaagatactcatttaataggctctatgaagaggttggagtgctttaagatacacttaagttgccactattagtaagggtgggaaatgatgagagtgaaacaatgtctgtttaagtttttttgttttttccttggaaggttgggtgagtcaagctgtaacttctggaaaattcttactagtttgaactgttttaagaaaaatgagactgactgcagaaataaagatgtcgagtttttccatctgaattcatggtttagggaggtattgtttttataaagtcacacatgttcattcgtttgagataatgtgaatgtattctaattttca

SEQ ID NO: 2987 - DNA, 4001 bp, Homo sapiens
acttaccttgtgccaggcatcttgttaacacagctttttttatttatttttttatttttttgagacagagtctcgctctgtcgcccaggatgaagtgcagtggcacaatcttggctcaatgcaacctccacctcctgggttcaagtgattctcgtgcctcagcctctcaagtagctatgattacaggcgtgcgccaccagcccagctaatttttgtatttttagtagagatggggtttcgccctgttgagcaggctggtctggaacccctgagctcatgcaatctgcctgcctcggcctcccaaagtgctgggattacagccactgtgcctggccaagtaaattttaaactcattttttgaataaggaacctgaggcagagagaaatgaatacaccttatatcaacttcctctttgggaaaggaattagtatacaaggaacctggaaatttactaacgactgatagtcctataggtaaataagccagcaaacgtctgcagtccaggaaactgcatcatcagcatttagtttgttaacagtgaaccacctaatgagaatctgcaacaaggatagggcacatgagaagtacagatggtatttgcaagtaccctaggtgtgaccctaaactggtcattccacctctctcaacctccctttcctctactttaaaacggggctgtgcaacttggtcatgtctctgaagagttttggaaaactgaataaataacgagcatgaagtgcttcctaaacctttaaggacctcaaaaaacaaaacaaaacaaaactttcaacaagcagatgtagaaaatttaaattatatttggcctacaagtaaaggttactccatgcttccctacctcaaatgtcctctcccatctctctggtactgagaaaatctgtgtcgcctgttataaggcagtctacacaagaccaacacgctaacccactgccacctcagggttatcaaacatttacacagtggcccagacaaaaatatcccacggaaacaaaacaaaaacaaaaacccagagagaaaaaccaccctttaaagatttggccttgggttttaaatttgcccatccctttttaacactatgtattgacaatctttccttcaatgatgccttgttctaatttctgcttttcacatccattaatggcacatgataggccaggggttgctgccatagcgtaaacggaaaaggtgcccgtaattcgggtgtgtaatgtactgggccatattctggtccccagttttcatgggtttcccaaaggctacccactggcttatgagtatttctagcccttagtggagtaaaaatattaacacctaacacttgattcccacctttaagatacaatttaaagaaatgctaaaaaggcaaacggctcaaaatgcctccaccaggcacctccaggcccataccctgcgggtccctatggcccactctggggtgtccttccgggatgggacactccccggcccacggccctgccggcctccacggggcacaactcaacccgcgagtccacgcgggacactccccggtctacagccccaccggcctcctccacgcggcacccctcaacccgggagtccacgcgggccactccccggcccaccgccccgcctgcccccacgcggcaggctccctacagacggacgctcctctaacccggacccgcctaggagctccagccgcctcacgatggccttcagaggccgggcgggaccatctctggtggaccgcggcctcagcgccccccccgcctgggcctctcgcctcgggcctcgggcttcgccgcccacccggagaggcccacccctgccccacgcgcccaggccgcttcacgtcctcaccctcggcctctcgctcgcccgccgcgtcctcaccggcctcgcccggcctccgcagtcgcaagcagcagccgccagactcgcgtcggcgtcgcctgctcccaactgcccgccggcagcccccgcgcagcgcgccccgccctgaccccgcccccgcgacgcggacgcgcagtcgattggcctgcggggcgccagggcggagccttcccgtcccgcggcctgaaagcgcaagatcgagttctgattggtgaacggacggagaaggggcgggagcaggcaggcagctgcgtaggatataaatctgtgcagcgctcggctcgttgggcggggcgtcggcttgctgagcgaggcaatgtcctaggcgaagccaaggctcgctgggcggggctagatcttgggcggggagtcggctcgttgggtggggctaggtcctgggcggggagtcggctcgctgggcggggctaggtcctgggcggggagtcggctcgctgggcggggctaggtcctgggcggggagtcggctcgctgggcggggctaggtcctgggcggggagtcggctcgctgggcggggctaggtcctgggcggggagtcggctcgctgggcggggctaggtcctgggcggggagtcggctcgctgggcggggctaggtcctgggcggggagtcggctcgctgggcggggctaggtcctgggcggggagtcggctcgctgggcggggctaggtcctgggcggggagtcggctcgctgggcggggctaggtcctgggcggggagtcggctcgctgggcggggctaggtcttgggcgaggtctaggctcgctgggcgcggataggtgctgggcgaggcctaggcttgctgggcgcggataggtgctgggcgaggcctaggcttgctgggcgcggataggtgctgggcgaggcctggctcgctgggcggggataggtcttggcccgggccttgccggctgtccttgcaccctttggctcagtccctggctgccagcctcctccttcctccaacgcattgcatccctcgtgggactacagggaccgaaggggatcatcgaaggatcgcgcgaggctgtgctaaggctgagacaggctgctccgtggtggcggccaggacggccttcctctggcctagggacccccacccgagaatggaagactgacttgctgtggcacacttcccttctcttgagaagttcattgaactcctatgtgttcttcaagaccctacccatcgtgctctcctagcccggccctgtcacccactgtcaccatgtggctgttgagggaataattaacttcaggaaacacccgggcacttaagagactcctcctatggtgctgtggattccagagtgaaacctgacccttcgtttcccagaagcccagacaggagaaatgctggctcaggggaacctccatttctcctgagacaactatggggtctgagacccaggcacaccaagactgggctcagctgtgcgggatgctcccctcatgtgccacccacctctggggcttttcctttaaccaacccccaatgacaccaccaggcccagagtggtgcacacaccccagaacagaggatccctgcctgcagacgggcagggccgggtggggatagtgcaggtgagagcctggccagagggtggtactgacccctggtaggatgcagggtgtgtgctggtgacctgaggctggcagtctggagggaaggcagcaggcgtggcagctgtcagctgaggaactagagagagcaagtttcagtatccaggggtctgtctataaggaagctcagaaaacactgatagcaaggtaaaaggggcccaaggtggtcctgggatgatcagtccagtgggcaggaagaaggctagaggccttggagtgtaggtgtccagccacccagatcaattcaggtttccagtttcctttactcaagtggcagagccgccttagcctattcttgaaaatttataggttagaaatttcttcctagatatatttcaatcattcacttatatttccagtaatttagtagttgctattatcaatgcgatttcttttctcactacattttctaattagaaaatagatatcactgacttcttagtgttaattttcaccagatgtct

SEQ ID NO: 2988 - DNA, 4001 bp, Homo sapiens
ggatgggaactgattatagatgttttgaacaaatatttgccacctaccatcttaggcaattcaggtatacagactgagcattcccaatccaaaaatctgaaatctgacatgctccaaaacccaaaaccttaaagtgcagacatgatgtcacaagtggaaaattccacacctgactccatgtgacttgtcaaaaacacagtcaaaaccttgtttcatgcaaaaaaaaattatttaaagtattccataaaattaacttcaggctatgcatataaggtatatgtgaaatataaatcaatttcatgtttagacttggtcccacccccaaaatatctcattatgtatatgcaaatatcccaaaatccaaaatccaagacgcttctggtctcaagcattttggataaggaattattaacctgtaccacatcccattagtgagaatatggtttagaagggcaggtaagaaatataaataagctcattataaaataaagcgattaggcgattagagccaagtacaaagggtaagagtaatacaatacccttgtatttcctttactttcagggacttatggcagaacttacgaagaatatcacatagagaataggtactatctaaaagtacacacttaggaaagattcttaaaagccagctttattttcactgtaacagtaatcttattctgggaagcggtggctgtcattaaaccaattaggcctttgttaacacactgagccctaaaaacaaaaaaaacagctctcacgaaccagttggtccagcctttatacaagctaaaaattatggggtgggggccgggcgcggtggctcacgcctgtaatcccagcattttgggaggccgcggcaggtggatcacgaggtcaggagtttaagaccagcctggccaagatggtgaaacctggtctctctaaaaatacaaaaaaattactcgggcgcgatggcggacgcctgtaatcccagctactcgggaggctgaggcagaaaattgcttgaacagggagacggaggttgctgtcagccgagatcgcgccactgcactccagcctgggagtgcagactccgtctcaaaaaataaaaataaaaaaaaaaatagggtggggcagctgctacggctgtgaggtaactgataactgcatttaatatctccctcctttttttcaatggttgtgtttttagaactgattaaaagatgaaatgtagaatgaagtctacacccatttaatactccccattcaggtctcagatcaaatgttaccaccctatctaaagttgttcttggcacaacaccttttctttccttgatggcatttaacattatccgaaatcattttattaacgtgctggttaattgtctgcctccatcagacagaacgtggacctgacgtgtcgtgtgcacagctctagtcctaagctcttagaacagtgcctgacacataacaggcgctcaggaaacattaataaaacgaagacaggtggaatgccgttctccaccccgctgcacaaatctctcctcctacccccttataaactgagttcccacagcgctgctattgcaattaactggctacgctcgggatgcaaccccgggtttccttcctgttctatcccctggcttggatgtcggtgccaggcacgctgtaggcactcgatggcagatcgctgaatgaatgacacggcaagccgggcacaagcagtggcaccgctgcgatgccggttccgaggctaccacagcccagccggaccgccaccatcatcggccttcccgcgtaaaccccggcctcccggagccaaaaccttcaggaaggcatgaatgtcgccacattgcccttttggagggaggccctgcctccgagaagaggcgtagggcccaacgtatagggccgccactcactgtaggtgcggcccagggcttggaagagcagatcacgcttcacgctgacagtcggcatggtgtgtcgaactcactgcgcctgcgcagcgagctgacccgggcttccctagcgaagcgcgtaggacccgcctcttcttgtgcgtgttgtcttgaatatcgccattctgctggcaacagttcctgttctctttttaacctaaaaacactcatcatgccattacctcgctgattaaatgtatctttatgagactaatagcttaaaagcctgtaagaaagatataatttgatagaactggctaggatttgtcaggcattgtaatgtactgaccctgaagtcccggatgcttccagggcgctaacggccggggacgcccaccaggtgggcggggcgagagtggggcgcgtcagggagggggtggggcctccacgtgggagatcttgcctggaggtggtggaaatgcgagtggagagggttcaaggcttcctgcagagaaaggtgtgcaaatcctggcggcgggagaggggctgttaacagacctcagtttttacttcattctttaatctctcctctactcgtataagtgatatacctgtgctttgtttgaactttacggcagccctataagggaggcattgtaagagacctctttttttgtctatttgctcagtgctctctgctgtcagtgggctgtgctcagccctctgccagcattaaatttcctccttaaaacaaccctgagtgtaataggctgaataacggcccccaataatatcagaccctaatccctgcaacctctaaatgtaactttatatggaaacagcgtctttgcaggttaagttaaggattttgagatgaagattatcctggattcgaaagacgaacactaaatggaatcacagtatcctcatcaaatcataaaagggaggttgagagagacgatttagccacggtggcagagattggagtatggcagccacaacccaaggatgccagcagccaccagaaacaaagagacaagcacacactgggggtgagggggtggaggagcggggagcatcaagaatagctaatagatgctgggcttaatacttaggtgatgggatgatctgggcagcaaaccaccatggcatacatttacctatgtaacaaaccttcacatcctgcacatgtatccctgaaataaacagagacaaggacagattcacgcccagcccatggggcagccctataatgcatgctgatttgggcccagtgaaactgattttgggtttctggcctccagaactgtgagagcataaatttatggtttaagtcagcaagttcgtggtaatttgtttcagcagccaagggaaactaatacatcaagataggtaccattatccctgttttacaggtaatgaaactaaggcacaaactggcagttccagggggagccttgccctaatcctttctactgtacagtgagtgagggcttcttccaaagtccttcacatgaggggagaaaagctgagccagatgtaagccaccctaactattaatcaagcagtttttcactatacagtattagctcccctccatgggaaggcagtcccttcccagtgaccaacataacagattggcaacaccccataaatggcaaacatccccaatgcaaaatacagctttccacctaaaattggtgctttctgctcaattaataagcaaaggactagtgccaggcatgatggctcacacttgtaataccaacactttgggaggctgaagtgggcagatcacttgaggtcaagagttggaaaccagcctggccaacatgataaaaccccatctctactaaaattacaaaaattagctgggtgtggtggtgggcacttgtaatcccagctactggggaggctgaggactgagaatcactttaacccaggaggcagaggttgcagtgagccaagatcacgccactgcactccagcctgggtgacagagcaagactctgtcttaaaagcaataacaacaacaacaacaaaatagtaataataaataaccaaaggacttcctgctgacctgctctgctttgggcactccaaagtgttctgtgg

SEQ ID NO: 2989 - DNA, 4001 bp, Homo sapiens
acaactgatgggtcgaaattgaaacactctccaggagaatggacaaatagctcttagacgaagcatatttgtaaccaatgactctaggaaaacaggtgtttttttcatttatatcacaagttttcttaggtaaacaaaaccatctgcaactagtcgtcaggtgcaataagcagggatacaaataacagtttttccttcatgtattttgcttccattacaatgactgtaaacgcattccaatgtacagcttctataaaagaattggtttaacatggttatgcttacatcattaatatcaaaatgattccaaaattcaaattaaagtaatacattttttctgcattaactaaagactttttcttagtctaaaccagatagcagaatttgatcaaaaaataaatgtccagaaaaaggggcttctttctgcaccccattttaaaagtgttttaaatctgacatttacataaagttttcaaatttaccataaaaggaaaaaaaaagcccacaaactcagagctgtcttttcgaaaaagaggaaaattgtttaaaataaataatcaccttcaaagtttctaaaaagtgtaggcattaattcagagccatatatatttatacatacatatatatatactttttttttttaatttttcagaagtatggtctcaggtttatttgctttcaggataatttcttgcccctttttcttgtgcccttaaagagctcaaataattcctttctttagaaaataaataaataaaagaagtcatataatttaatcattactggccttggataggttttaaccaatgaacgacacaattaaagcaccaatcaagaaatactaagaaattaagtaatgtttcaagtcatgctgaaacaataaaagaactaaagataattatgaaaaaagaataatttgttttaaaaatatgctataaatgtttacatttataattgagaagtaatggttagaaaagcagggactaaagtcatataatctaatatttctgcaacatgttaccatttacaaagaacgtttgaaacacattatctcattaaattctctcagctaaccttccaggttgatattatttccattttacagataaggcaaaataggttcaaaaaggtttaaaaaatccttctagtactagtgaagcagggactacaactcagttctttccacttgaacagcttcattacacaaacaaatcaacgctgtatcactaaattcatgtctcagacccctctctacggctatgccaaacagtctgttcacaagaaaaaacgacgcgacagtacaggctattttgtggcaagcagtacagcatcctgacctaagctgacctgggtcacaaacctgcacaagaaaaccctgcacaaatcaaaggtatcctcaagatactatattcatccactgagctgctcaaagtggaggcagctcaatggttagcatagaaaggtgtcgagtccccagctttgccccagctgaatgaccttaaggaaggaacttaactacaggaagggccttgggaccctaaggggtatcttctgcgccgggcataaaggagagctaaacaaatgagtgaatgaatggggtctcagccctgccctagtccatccgcacttcagagaacccaatatcccgaaggaagcctccgtatctcaactgaaccctatgtccccagcccgaaaacgtgctgggtgggaaaagaaaaatagccgctgccacacagtcccgacttgccagcaaggttttccctcagcgcgccgcaaattttctggaggatcctggggttatgaaagctcagaagtcagggttattcctggtcccaacacggaacgaaacaggctcggatgtctcgcccaaccctcatatctcagggtttataacctttcttcgagagacatgacctttcccatgagaccttgcccccaaaccaggaaaaaatgcccggcaggcgcagcgtgcactgcggaagtcacgcactacatatcccagggtgggtcgcggcgaggtgggtgaaatggacgtcgctcacgcattttgggggaattctgggcattgtagttcctcattgagggaggctctagcgcagtacacagcttaagctgttgaagaagatataggtcgtttaggtgattctctactatctaaggttgttctcctagtccttggaagtctactacttttataatatacacaaaaatatacttaggaaaatgaaatttaaaaatgtaaacatggaaaagacacgtacagatttttcttattattttttagcatatacgaaataactctgtcgagtaactttgaaagtatgcaaactcatactctcagtttctgcacttatgtcgtggataggtaccagttctcagaccatattttttttttacttaccatggtattttaatagtcccaagatttgacacttgacacttaaaaaaaaaataccactaataaataaccaaagtggaatgcttaccaaagttacaacagacataattttcagctgataatcactacaacaaagtaaggctctaaaggtaccaaactgatatttgttggaatatgctgtgcaactttcttttttttattttatttatttattttttttattgatcattcttgggtgtttctcgcagagggggatttggcagggtcgtaggacaatagtggagggaaggtcagcagataaacaagtgaacaaaggtctctggttttcctaggcagaggaccctgcggccttctgcagtgtttgtgtccctgagtacttgagattagggagtggtgatgactcttaaggagcatgctgccttcaaccatctgtttaacaaagcacatcttgcaccgcccttaatccatttaaccctgagtggacacagcacatgtttcagagagcacagggttgggggtaaggtcatagatcaacaggataagaatttttcttagtacagaacaaaatgaaaagtctcccatgtctacttctttctacacagacacagcaactttccgatttctcaatcttttccccacctttcccccttttctattccataaaaccgccattgtcatcatggcccgttctcaatgagctgttgggtacacctcccagacggggtggtggccgggcagaggggctcctcacttcccagtaggggtggccgggcagaggcgcccctcacctcccggacagggcggctggcggggcggggggctgacccccccacctccctcccggacggggcggctggccgggcggggggctgacccccccacctccctcccgggcaggtcggctggccgggcggggggctgaccgcccccacctccctcccgggcggggcggctggctgggcggggagctgaccgcccccacctccctcccggacggggcggctggccgggcggggggctgacccccccacctccctcccgggcggggcggctggcctggcgggggctgacccccacctccctcccggagagggtggctgccgggtggagacgctcctcacttccctgacggggcggctgctgggcggaggggctcctcacttctcagacggggcggctgccgggcggagggtctcctcacttctcagacggggcggccgggcagagacggtcctcacttcccagacggggtcgcggccgggcagaggtgctcctcacatcccagacggggcggtggggcagaggcgctccccacatctcagacgatgggcggctgggcagagacgctcctcacttcctagatgggatggcggccaggcagagacgctcctcacttcccaaacggggtggcggccgggcagaggctgcaatctcggcactttgggaggccaaggcaggcggctgggaggtggaggttgtagcgagccgagatcacgccactgcacttcagcctgggcaccattgagcactgagtgaacgagactccgtctgcaatcccggcacctcgggaggccaaggctggcggatcactcgcggttaggag

SEQ ID NO: 2990 - DNA, 4001 bp, Homo sapiens
aggtacttatactgcatgatcttggcttctctcatcatatgttcacagagctgattaaatgcagggtggctaaacatcagtcgtttttcaaagcgcttctggtcatcagacagtcttttggcaattgtccacattgctgtgaaatagttgctactaggaaatgtgggcgcttttgaaaatgcatctaacacatcactcagggaattacattcctcagacagttttctactgctgatacggtttggttttgtttccttggtaagaacatcttcattggagacttcatgattaaggtttactttcttcaattcatcatcagatttatcaacagggacaagagactgctttgagtcaaaaaacagtcttttagcataaagtagtctttcaattctaagggctgttagagtgcttatgccctttgtttgaaagccaacatctgatttaaaaatgaatgcatcctgaaagagatatctaatgatatcagttgattgcattctgttatgaaagttatttaaaatgttccagtttgaatgaactatttttggtttgcaaagtcccaaacaacatagcctcatagttctgcttgttgaaactaatgtactgaattgtctaaggttccagaaaaaggagcccgctttgttattcattttgctctccactgaaacacttccaaatggcttcaaagttgtcaacatgaaaccaacgtcacttctactagtgaaaaagaacacgtgctgtcgttttcctgtaggggaagaagtaatgaaaagaataaaaattaaaacaaaacttttacttaaagaaatgaaatgcatttaacagaagagaaaatggggaacctatggagccattaaacatttacataaaacagtaaaagttttttttaccaatgtgggctccctccaatctaccacaatgtgtccagtttcaaagaagccaggtcactttggaagtagtcattgtattaatgagatttttctggtgcaaaagcgttccataaagctttctctgtaggagagacttttgttggcattgttatggaaatgtcctcggtgaaaattaggggattagcattgatagatcattttcttttctcttctctgttttttttttttttttttttttttttgagacaaagtcttgctatgtcccccaggctagagtgcagtggcgcgatcttggctcactgcaacctccacctcccaggttcaagcaattctcctgtctcagcctcccaagtagctgggattacaggcgtatgccaccacgcccggctaatttttgtattttttgtaaagacggagtttcaccatgttggccaggctggtcctgaactcctgacctcaggtaatccacccgcctcggcctcccaaggcgtgagtcaccgcgcccggctgatagatcattttcaacatgacgatttagcaacggccgaacccagaccatcaagaatagggacctgggcaggtagaacggctcagtggaagaagcagaaaacgaaagcgatgtctgcacgtggcctgcgcttaagaggaagatcttatacaaccagccagcctcaccagaccccagaaccaacttcaagagcctgtccttccgcagctgggccgcccagcattaacccacctcctttaaacttacttccaggacaactcgtgagactcttctcctcgaagtaaaaagtctaggatgtgatacgggctgccgctaagcccaagctcgtcctccactcaccttagagcacaagaccgtgactacgtacaggagcagccatgacagcttccccgagaagctgcgcttctcacgagatcttacggattccctcaaaggtcaaaaagcatatgttcgcggctgtagctgaaggacttacttgaagaaagtttaccaaggagaatgactaatttccctgcatacaggagtggggctcggggataccacagagcttataagggcgatgtttgatcgtgtatcgcaacgtaacccattcaggtcctaactttaaacacctaacctctgctgggcgccagactttgtagtgcgcctgcgccttgcccttggctgcgtggttgccaggaaaccgcgaagccgcggtccctgcctctgagtctctctcgaccatggccaaattcgtcatcgcgggtgagtgatccccgcgtccgcccgcagattgctcaaaacgccgacaacagctcacctcccatggccgctcggcttggcagcctctatacggaccgctccatgctttgctatagatttattcaaagttttttactggaccgtgacggtgcgccaagcattgtgggacactggggatgcaatggagggaaacatatccctgccttagaggagctttcagtctcatggggcacagaacatgtacttttgatacggtgtgattaacgcgatgaaggagacctgcacaggcctctgggagcgtagactcctaatctgggtttgggggatgagggagaggtggacacaaggaactggctggggaaggtattacaggagctgagttgtgaaggtgtgagctgaggaggctattccaaataaaagcagagaggcaggaagcttcctggcctaacagaagatctggatatgtggggcgtgacaggacctggggctacaacaggagcaggagccaggtccttgcatttcatgtaggtcaagcaaaggtgtttgaactgtatcctgaaagcaatgaggaattatagaaaaattttaagcaggagagtagtcttaatgagtttgcattttaggaagcctgtcttggcagcaacggagagaatgattgaaagtgctggttgacagcaaggactcaactgagaaggcttttattacaacaatccatggtacctacctcctctcctcgtaaagtttcttaaaagagtagactgctcttccatctccagttctgccttccaatcagtcttggaagaaggcttctacttctgcttcctgacagaaactgctgtcaccaaagtcaccactgacttttatagaagctgtttagtctttgacttatttgatctctttgatgcattgaacacaattgacatctaccatccacaggagatttttttttttttttgagacaggctctcactttgtcacccaggctggattgcagtggtgcaatcgtggctcacagcagctttgacctcctgggctcaagcgatcctcccacctcagcctcccaagtagctgggactacaggcatacaccagcatgcccagctaatttttgtatttttgtagagatggggttttgtcatgttgcccacgctggtcttgaactcctacgctcaagtgatttgcccaccttgacctcccaaagtgccaagattacaggcatgcaccaccacacctggcccagaagaatatttttgaacactgactaaccacatggtgggaagtcagtggaaaacacacagagaatgttgcatgtatgacactgacagggcagggttctataggaacgatagcagggaccttacttaatcaggtaagggtttcccagagggagagattttaagcagatacctgaaagatgataatgaattacctaacagagaagaggtagaaaggaggggagcaatttaggcatgggtaactgggagtggggttagagcaaggagaactagtttggtgacaattgagaatataaaataagtataaaattgaaataagtttattaggactgaagcaaatagtacaaggaagagaatttcataaggtgaggctagagttagataatgtagattcttttgagccacattcagtagtttagactttatccagagtacatgaaaggtttttagaaggggaggagggcctaatcaaatctgaattttatctgaatgttacggctatagtgtgggacaaaaagactggataccaagaaaccagttaggagactagtgctatagtccaggagggagttgattgtgacctggcctagagtggcaaacaatggagatggagagaagtgaatggattgga

SEQ ID NO: 2991 - DNA, 4001 bp, Homo sapiens
ttggtgctgcctcccctgcgcgcgggacaggggagagaggaaggagggatgctggcctggagagaggcaggagggacactgacctggagagaggcgggagggacactgacctggagagaggcgggagggacactggcgtggagagaggcgcgcgggacaggggagagaggcgggagggacactggcctggagagaggcgggagggacgctggcctggagagaggcgggagggacactggcgtggagagaggcgggagggacactggcgtggagagaggcgggagggacgctggcgtggagagaggcgggagggacgctggcgtggagagaggcgggagggacgctggcctggagagaggcgggagggacgctgacctggagagaggcgggagggacgctggcctggagagaggcgggagggacactggcgtggagagaggcgggagggacactggcatggagagaggcgcgcgggacaggggagagaggcgggagggacactggcctggagagaggcgggagggacactggcgtggagagaggcgggagggacactggcctggagagaggcgggagggacactggcctggagagaggcgggagggacactggcgtggagagaggcgggagggacactgacctggagagaggcgggagggacactggcgtggagagaggcgggagggacgctggcctggagagaggcgggagggacgctgacctggagagaggcgggagggacgctggcctggagagaggcgggagggacactagcctggagagaggcgggagggacactggcgtggagagaggcgggagggacgctggcctggagagaggcgggagggacgctgacctggagagaggcgggagggacgctggcctggagagaggcgggagggacactagcctggagagaggcgggagggacactgacctggagagaggcgtgagggacactggcctggagagaggcgggagggacactggcctggagagaggcgggagggacactgacctggagagaggcgggagggacactggcgtggagagaggcgggagggacgctggcctggagagaggcgggagggacgctgacctggagagaggcgggagggacgctggcctggagagaggcgggagggacactgacctggagagaggcgtgaaggacactggcctggagagaggcgggagggacactggcctggagagaggcgggagggacactggcgtggagagaggcgggagggacactggctggcctggagagaggcgggagggacactggcctggagagaggcgggagggacgctgacctggagagaggcgggagggacgctggcctggagagaggcgggagggacgctgacctggagagaggcgggagggacgctggcctggagagaggcgggagggacgctggcctggagagaggcgggagggacactggcgtggagagaggcgcgcgggacaggggacagaggcgggagggacactgacctggagagaggcgggagggacaggggagagaggcgggagggacaggggagagaggcgggagggacgctggcctggagagaggcgggagggacactggcctggagagaggcgggagggacactggcctggagagaggcgggagggacactgacctgggaagcccgcggctcggggcaggcgaggatcaggagcagaaggaagagcgcgcgcggagagctgggcaccatcttgccagtcggaatcccgctgcctgggaggggaaataactttgcctccgctgccgagtttgtcccagcgatgcggcagccgtccctgcagggtgcggggcgccgcgcggccggggggcggctggggcagggggggaggcgggaggccccgagcgcagcgcgtcccgcggggatcggcgccgcccgggccttgcgagggtccaggtgcgcccgcagctgcccgcacgagacagtccgcgcgaggcggggaggcgccggcccctgggctaaggacgagggaggaggggctgcccggccgggaatgcgcccgggagcgcgcccaacccgcgacgccgaggacgagcgcgggcatcctcggggcctggcagggatgggcggccagtgccccgcatatgtgcgggtgactggaagcccaccctgggcgggttcactcccgaccgtcctatttcccaaccaagtagactgaggctcagtcaccaaggacaagtggcagaacagaaacccaaacccaggtctgtcctacttcaaagcccacgcgacaccctcctcccgacattcctagaagggggccaggaaatgggcttcataagcttgacgtggggtggactgagctctccatccgaataaactagtgtccctttaaataatgcaatggggccgtgagaacacgcacgcacagtgagtagatacacacacagtgatacagtgaggggatctacgtccttctgattcactgtcctccttgctcaagggaaggagaaactcagtttaaatcggaggtcaggttctagaacattgcctgccttgctgaagtcgaatcaggaagtgccaggccggcatgagcagtctgaagtcccctgccatcagggctgtggtacaaccagatgcctcagacctgagctcccggaaggcatgactgacgttcttcctggaaggttttctgaaggcagtcactgcagatgtcctgggacacacaagtctggtcaagccccagatctctttttcctcttccacatttcactttgttgagcccactcagagctcagggaacggggagcccacaagactgtgaccacagagcaggagctgtttcccagcagaggccagaaaggaaagctggagtcctggcttagtcccttcaaactgctatagcaaaataccataaactgagtggcttataaacaatagaacgtgtttctcacagttctggagactgggaggtccaagatcaaggtgtcaatagattaggtgtttggcgagggccagagttctggttcccgtgtcctcacaggggaaaggcagctctctggggcctcttttctgagggcactaatcccaattttgagggctctgcactcatgacctagtcacctcccaaaggtcccacctcctaatgccatcatcttgggaatgaggtttccaacatataaatttaggggagacaccaacattcagaacctagccagtgccccaaaaagcaggggacatggtttaggctggcctcctgggcattggttgcccaggaaatcctacagtgctgctcccccaaccttcccatgcaaaggaggtggaacgggacccatgtaaatcttttttttctttgagacggcgtcttgctctgttgcctaggctggagtgcagtggcctgatctcagctcactgcagccttgcctccctggttcaagtaattctcctgcctcagcctcccaagcagctggggctacaggcatgcaccaccacgcctagctaatttttgtatttttagtagagacaggttttcaccatgttggccaggcttgtcttgaactcctgacctcaaatgacccacccgcctcagcctcccaaagtgctgggattataggtgtgagccactgcagcctgcaagggatccatgtaattttattttgcattcctggttgaacatcctgaagagagacatggtcatacccctgcttctccctatccaggtggagaggacgggacagcatggcccgatccagggcagcctgtggagatggtggttttctgcctcgatctctcatgtgtttgctgtctgtaccaaaagccagtgccctgctccctctctgtctctctgtcctctgccctatccttgaaaagcttcctcctggtcagtgtggctgcatttattaatattttgtgtcctatcccaccttgtgtttacatggcgaccttctctggaaggccagctgttctggctctcagccttgttctggctatgcgctggtaaccagacatcgggcagatgtaagc

SEQ ID NO: 2992 - DNA, 4001 bp, Homo sapiens
tgtactgcatacagtggcaattctggaagaagaacattatttgaacggaacatcagaagaacactgatagacatatgtgaaaggaaataatgagactacagatttttaaaatttacccccaaaatggtaaatgtatcaaagaaataaaacacttttaccaattatgttgcacaagatctccaactgccttgaaacatcacattctttcaagcaacatatagcaaactgctttctctaagactacctttaacagtgactggtgaaagccttttaaactattttccgattaacatctccctccttcatttgttaaatattgtgatcaagtataacaatgaaaccgtttttaaggaaataatgtataattttaaaaaacatttaatctcaatccctttaaccaatggaggtgtgacaacaaacgcatgtaaaattaaccttaatccgccaactaaaacacgcaaaatgtctcctaacaattctcctcctccttaaaacaacaaccgtacacataaatacggttctgacctctaccactactgcgaacagctaattaataaagagaatggttatgtttggagaccaaggtgcaacaccccccctcataaacctcccaaaataaccacatcatccaagtagaactgaacattatttttgctaaagcaggatttcaacctcggggagcctcagcccttagacaatggtggttaccagacagtgctaaacagttgggtccaaatgacacatttcactaggccttggacacaacacacacacgcgcgcgcgcgcaaacacacacacacacacacacacacacacacacacacacacaaaatatcccaaggggccagttctaagcaaggggcgttcaaaccccactaggagacggagagtagcaccgcggcatggggggtcgctcggggaggacaggcgagggggtgtcgatagagcggaagggtaactgcactgcacacgagggagggggctggaaatggccgatggattctatatttatttatttaaaggtcttgatttaatgggtccttcccaggggttcgtaactaaagacaaactgcgcagcaaacactgtggggttgggagaggagtcgctgctccccctaccccgtgaccagggacgggggggcgggggaaacaagttcccctgccaacaccacagaccaccccgattcccctctcccgctcctcctcaggaaggggtaggctaacacagaaaagagggggaaaacaagttccccagccaaccccaccacccgatcgctcccagtcgctccccccacctaccactagaaagaggcagactaaaccatggaaggcggcagaaaagggagaaatcacgccgctcgccttccccccggccaccaacagactcccgcggggtctgtgagcgagcggagaagccaaagggatgggtgggggtggagggtgctgagcccccgaaaccaaacaaagcgcggcctgagcgagagcccaggcgagaagggaagccgcggcttttcctgccggccgggcccggcccgggctgacactgcggcaccgggggacccgcctccgctcagcttgggtctcccacccccagggcgcgcaggccgcccccgcccgcccgcccgcccgcccgccccggcctcccttcccgcggtgcccgggaaggcgggcggttgggaggtagcgcggccttaccccgctcgccgacgttgttccgctcctgaggcagcggcggaggcggcggtggcggcggcggaggctgctgctgctgctgctgctgcggcggcggcggaggctgctgctggggcggctgctgctggggcggctgcggcggcggctgctgcgggggctgctgctgctgttgctgcaccgggcgcggccgcgacactcgcctgggtctccggttggcggctcggacggagttcatttgccgggctgaggtggcggcgttggcggagggacacacacacgcacacgcacagcgagcttcggggcaggagaaaggggtggggagagtgggagaggggggaggaaggagagggggcgaggggaaggggagacgctgagggcggagggggcgagcgggaccccgagtccggagaaaggcccgggtagacagacggagaccgagcgaggccggccgggagggcctgacgcacggggaaggccgaagccgccgggcggggcggccgcgagggacgaaggcagaaagacgggcagaccgagagaaagaaagaaagggcgtccgccgcttggggatcccgaggcgaagcgcggcggcggcggcggcggcggctgaagagacagatcccggtcccgccgactcgcgagcggcgtctccggcagcggggggagtgggcgggcgggtgaggaagggagaaaaagagagggagagaagggagggagggagcagggggcgcccggctcttttttttccctcttcctcccccccacaccccctgaaagagatttctgtgaggaatttttctctctttcttcggtctcttctctctcctcccccccttctctcctcggcgaaggggaaatgagtgtgaagggaggagatagggggaaaaagaggcgtcgtccttcctcctccttaaaggaacctttcctcctcctcctcgtcagccctgtcgccgctgcttctgctgctgctccgtggcaggaggagccattgacaccgccggagcctccactcgcccagtcggtccctccccgccgcggggctggccgggggcgcgggggagggccgcggggcggcggggggaggggtgggtgggcggggaaaggaggggcggggattccgtccaggcggccaatctaaggcgcccgtacaaccttccggccaatggggcctccgctcttatcgcgaagtcccttcaacgccctgtttcctctctcgggtttcctccctcccccgcctaggagggggaaagaggaaagggggagtgtggcggggcgggtgataatggggaggtatcagggcaaataatagagcagggggtgggcgaagagagcgccagtgcgtagcgacgattctgggagaggaggtgctcggaggaaagggcgggggttgctgatgtaatggggagaagtgattaatccttcggttcgccgtttcagcttcccccctaccccaaccttcacccgatttttttgagctgaaaaaaaagtggaacgagggagccaatctttggtaactcgggttttctgtggtaggtgggttcaaaatctgagctgtagggagcgctagagatttcgtgccctttagccaagctgagggtatttgcaaaccctgaagatttccgtctccgagctttgggcttggtaagcgaagtttggagtcggtgcctaatcgtatatcatctaaaccttgaaaaggctttgacctttggccaatttgatttgttctttgaagaagtgtatacaatgtgtgggaaaataatatgtgagaggagagaagtaaatgtgttgatgttgtgattgtttatgtgatttaatttttaattttttttttttaggtcccacaaactgcaaggaaaagaaaaaccctcaacaggaattacctttatacctgatgcccccaacataatctctctccaagggaaacgtgtttttattgccttgcggctgaaaatgtattctcgattctcccccttctctcttttgttgtgcattttttggatgtggtaaaactggcagtttatctgattatctggttttcagaactttgggcgatgtctctgagtgtcatcagttgctctctaggtttgacatagataattaagcaactacaaagcgtgataaagcttttgagagggaggaaaatgtattttggaaggagggagagacgcaaagaggcgagcctgtgtgttgagtcccagacttggtgtgtgactacaggcaaagtacttcacctttctagatgtcagccccgcccccctcacctcccaagtttaaataagaacttattttagactacatgatcctgttttcaa

SEQ ID NO: 2993 - DNA, 4001 bp, Homo sapiens
atgcccaggatatctttaagcaaaacatgaaacttaggttacaaaataatacacacagtacggtttgtttttaatgaaaaaaagtgtttatatacacatgcatttaaaaaattgaaaaagcctgtgcaacacaatgagacccctgtctctaccaaaaaaaaaattaaaaattaactgagcatagtggcacatgcctgtggttccagctaatcgagaggcagaggttgaggctacactaagctgtgatcaagccattacactctagtctgggtaaaagagcgacagggcagacaccgtggctcatgcctgtaatcccagcacttttggagactgaggtgggcagatcatccgagattgggagttcaagacctgcctgaccaacatggagaaaccccatctctactaaaaatacaaacttagatgggcatggtggcgcatacctgtaatcccagctactcgggaggctgaggcaagataatcacttcagcccaggaggtggaggttgcggtgagctgagattgtgccatcgcactccagcctgggcaacaagagcgaaactccgtttcaaaaaaaaaaggtgggggggaggggggagacaagaccctatctcgaattttttttttttttcttttcaaaagaaccaacacaaaagaacagttaagagctacctctgggaatgaaagaacagggaaaacaaaataactgactttcccccttaaattctatgtcccgtgccagtggcttatacctgtaatcccagcactttgtgaggctgaggtgggaggatcgcttaaggtgaagagttcaagaccaacctaggagacaaaacaagaccctgtctctacaaaacactttgtggggccaggcatggtggctcatgcttgtaatcccagtactttgtgaggctgaggtgggcgaactgctggagcccaggagttcaaggccattctgggcaacatggtgaaatctcgtctttacaaaaaatacaaaaattagccgggcatggtggcacacgcctgtagtcccagctacttgggggactgaggcaggaggatcacttgagcctgggaggcagaggctgcaatgagccgagattgtgctattgcattccagcctgaatgactgagattctgtctcaaaaaaacccattagcgggcttggagggacacacctgtagtcctagctactggcgcagaggtgaggcagaatgatctcttgagcctagcagttcgaggctgcagagagtagtgactgtgccactgtgttcctgctgggtgagagagtgaaaccttgtctgaaaaaaaaaatccctaaaaaatgaaagatatatatatatgtatgtattctttaattcacttaaggatttctagggtgccaggcactcatgatctacaccgctcacttcgcacttacacatttcttctgagagagtattccatgctcccatctaccccttgtaaccataaacagatcagtaggtccaacaactcattaaaatgaaaaatgactagaatgatgatacaattttggaaccagaacaggtaacattatcattactgactgggaatctggagacttgggctctaaatccaaacatcactctgaacaaacctcaagaattgggacagtggttccttctatttcaaacattctataataccattcctgactaatttaccatctccaagataattttaaagtatctaaactaagctgacaccaaaaaagaaaggatgtaatcttctttagtggaccattttagaatttaccagatgttctttatgtcagtctaataatttaaattcattttctttagctatcttctgagtatataataggaaaaaaatagctgagcaacctttttcttttaaaaattactttcaaccactctgaaaggttaacttacttttaggcttgttcttctttggaataacacttaaaatttcctgttagacagtttttcagccattgcaatgttttacaaatcttattgctatgatacagtatcatgtgtttatacacacccaagcacccaaaccacacacacttcagaacctcaactgtagcccctatctgctatatttggttctagctagacagttcaaagagtctgctcattttttttctgtccacacagattaaaacacatctgcttttttaaaaacaggttattcaaagtaatttgatttgttcttggttgagtacttaatcgcacccagtttttaatcatctatgaacatatttaatatgctcaataatgtaaattaggtaattatatgaacacaccttggactagagaagatgaaggaaaacagaaacattcattcactaagtgtctatgtgcaaatggctagcagtacttttttttataagttagcagtatttttttataagttacagtttccataacataactttctaaaatctcccccaactgacataacaccaatatgactgcttcatgaaaaaacaaaagctttgtttaaatccggttatgttgcttttcttccttcttcagctactaaaagccactgtttcagagaaatacattaaataaatctgtgattggctcttcatagaaccatgtagactattccctagaatctatacttactgatttttccttaaccacatcagtagcttccaattaaaaaacaaaaagcaacaaaatttagttgatctctttaatgaaggttttctagtgtgctttctcaggaaaacacttgttttctcttggtttaggtttataagaagcctgtaagatggtccgacaacttatcaagtgagtgtgagatgagtcaattaaaaatctaagaactaaattcatgtttcaaagtcctacatttttaaaaaaatggttattacttattcccaaacacattcttcttagaaatcctcttagaaagtgagagggtttttttttttttaaccaataatgatgaaattatttcccttagcaatctgtttcaacacctaataaattgacagtgactaatttcttcacaggtaaactcaagttttacgaaaagaaaatattccccacataaaattattaaacagacatgagtccataccactagggtaccttcagaaaaaatagccacctgttgtgatcaacattaaattcctcttttctaattatccagtacatttgcatactaaatttttcatcttccatcattcaacaggcttgtgagcaaaacatttgtacgtatttactaccataatcaaattatctgacgcaaaaagaattttatgctacagtcgcaaacttatcctggaaagaaagaatcactggttcagagtcccaaatatcaaattcctgggctcaagcaatcctactgcctcagtctcctgagtagctaggactacaggtacatgccaccaggcctggctaatttttattatttatttatttatttatttatttcagagacagggtctcagtatgttggtaggctggtcttgcactcttggtcttaaaggatcctctcacctcatccttccaaaatgctaggactgcaggcatgagccatggtgagtggactaattttaattctgaactgacttcctgattatcagtcatcctcatttactagaaataatatagtcaattatcatcctaaagttgctgtgaataaaaatatagatgtctataaattaataagcacttaaagcacacttccaacattaaaaatatgtaacatttaagcttttattcaaatttaaaatgccctacatggggactgtatcatcaatcaagtagtatgagttcacgacacaatcagaattataaaattattggcagggcacggtggctcacacctgtaatcccagcactcaggaggccgaggtgggtggaccacctgaggtcaggagtttgagaccatcctggccaacatgacaaaaccccatctctactaaaaatacaaaaagtcagctggacatggtggcaagcgcctataaccccaactacttgggaggctgaggcaggagacttc

SEQ ID NO: 2994 - DNA, 4001 bp, Homo sapiens
tagataaaaatagaaaatcatgtaagattagaacagattatatttttgaccactcatgttaggaggtgaagaaatgttaggatcataaatcttaaagccagccaggctcggtggctcaagtctataatcctagcaatttgggaggccgaggcagctggatcacctgaggtcaggagttggagaccactctggccaaaatggcgaaaccccgtctctattaaaaatacaaaaattagctgggtgtggtggcgcacgcctgtaatcccagttactcggggggctgaggcaggagaatcgcttgaacccaggagatgcggaggttgcagtgagctgagatcgcgccactgcactccagcctgggcaacagagggagactccctctcgataaataaacaaacaaatcttaaaacaaatggaaaaatcaataatccgtttaaaaaatgtacaaggccgggcgcggtggctcacgcctgtaatcccagcactttgggaggccgaggcaggcggatcacgagatcaagagatcgagaccatcctggccaacatggtgaaacgaggtcgcagtgagccgagatcgcgccactgcactccagcctggcgacagagcgagactccgtctcaaaaaaaaaaaaaaaaaaaaaaaacaacaccaaaaaaaaagtacagaaaaggatacctttcagtatttcatacatcactaaatgtgcaaaaccccctaagaacagtttaattaaaaatttgagtctgaccctgggcccactgcctatgaattagccctgctccgcaaggagcagtactgttttaaaaaaaattttttttggacaggctgattttacatttgtaatatttctaaatcttaaattaaaaaatatatattaacatttatattttaaaagatgctttcaaaaatataaaaaaattaactcattacctattttgtttaagggctcctggaaaaactgagggaatgatcaatatgcacaccaaaacaaatatatacaaacttctaaatttcattttataggaatagtatctattgaaagggcagggtgcatgaataactcagtgacaggcgtaaactcagccaggattagaaacgtcttcccaatggaggccccgctcaagttgagaatttcatggacacagtaaatcatccaaaagcccaccttcaataaccaaagtaggcataaaaataggccgatggttactttggagataatataatcctcggtcttattgttgtggagcagatgtcattatgggtggggctgaagcgcagagcagctgaaacatttttataccaccacccgcacactttcaatgggatagaagggactccaaaaggtaagagctcccaatcgtcagttgctactagaaataactaagttttgatgtggccgtggcacgcgtaaaggccacaaagagatttataaaattctccatgattaattcctatcctggaaaagaggcaatctccttttcccctccctagccggctcctccttgggacacttggctgagtcgttctttccctccttctcacgctgaggtgaggccgcacgcaagccggagacgcccgttttcctcttcgcgcggaggaaactctacgggtaagaagccggggtggcgggaaaggagcacgcggcaccgcggggaggcagagaaggcttgccagggactagccgggctcggggagagcagggacacgcgggccgtcggaccgaggaggccgaggtgacgaggaaaatctcccggcgcggagccgggactgggcgcttccggcgggctacggttgctcttggcctagcacagcctgcgtcccgggccccaaccgggccaggtagggagttaggagagagggtaaaccgcggctcgcacttgcctgagaccgggtgaccagtaactggtaatagtctttgctaggcggcgggccttgtcctacagtttcaaagagagtctccggcagccacgacgccatcttgggacgccaccgccgtcgctaagacaaccaggaaggggcggggcttggttggggtcaaggggccaaaaccctagtttaaattgaaccacgcttatgagctggcagaaggatttctaacttggggcgatcgtcccctcttccaagggtcttagggaaccctgatccgtgaaatttccagctccaggtcccgggtgacccgagggggaattagttcctgctaccacggaggggagggggtgaccccggcggagggataccaagtagatctccacagtccccttcctggtccctcgaagggatcgggcggagatcggaggctgctgagagagtcgagccgggaggcgtgggagggaggggcgatgtgatgggccgccagtaggcagcggtgccggtcccgcggacgagcccgtaaccggagcccgaggacaaagtagttccccgagggtgtcagagcaggcggggagggaggcggcacgggcggaggcgcacgccgggcgcggtgctgcggctcagctgataattgaaggaacccggagccgccgccgccgcgccgctggggggggtggggggagctagtggaagttactgccgcgccaccgagtccggaccggagactttggggcctaactaggtaattggggcgcagctctgggcggcgggggcaagccttgggggagggggccagctgaggggttgggggggcggggggaggagctggaacagaaagtcccaggaagcccggttgtgtcatcgccgcgattcggcccccgcttggcctgctcccggcgccggcggcggcggggccgcggaaggaccgggccgggggtggacgggagagacgctcgagggcggccgcggccggagggaccggggcctggcgggaggtaggggtcgctgggtccctcctccggcttcccgcaatgaggagggcccttcacagaaccggggtaaggcttgcgggtgttggggagctcggcggggaccaaggggggccggaagtgggctttggagcttggagggtgtctgggaagagagaaagtggggggccggaagtgcaggtggggggtgtgaagacggcaagggttccccggaaatgggacgaggggcccggaaatcgggaaaggggaggctccggggccgtggacggcccggaaatggaaactaggaagcagctccagtgacaacagttgtgggaagcgagggtcagagaagggagaggccagagagactttagaccgcagtaaggggtttcctgcccagggggacggcgagggacggttgagggagggcgagcccggagacggggtctgcgcggggcagttttttaagccgtgggaagttgaggctgagggaggatgatgacgaggggggcatgcagggaggcctaaagaagccgagaaacttgactgagaggaatagagtatccttttaaatagatcagaatggaaattggtggtaggtgggtttaactaggacttgggggagggaggtgggccaattgtcaccccaatcgtattagcattcagagcgagtcaggcgattaatttatttatatgtggattacataaaacctattatttacaacgtttgtccatcagttcagcccctctccttccttctccatagtgagtgggtttctagtacaggaacaagttagaggggagttcgaataacgaaggtagtaaaacctcaaatcctgtcttcctcggcgtctctcccttcctcagaataagaaatccttcatttcctagacggaaaaatgcggaaaaacataaaaacacatgtaaatcggggggaaatcacactttgaactcctggtgggggacaggagggaattggttaccttacgtggtgaggagataacggaaggggcagcttccaaacccttaagacaaatgttgtgtttttttgataatgctgttttactttgggggaggtttagcctaagcatcgagtctggtggtgggcatagtttaattgcttctttagttaattgggggagggaatgtgtttgtgtgta

SEQ ID NO: 2995 - DNA, 4001 bp, Homo sapiens
tgctccttggcttacaatggggatacatccccctcatcccattgtaagttgaaaatatcatcagtcaaaaatgcatttaatgcacttaacctactgaacatcagtgcttagcctggcttgccttaaatgtgctcagagcacttatattagcctacagttggacaaagtcactcaacacaaagtctattttataaaaaaaagtgttgatctcatgtaatttgttgaatactgtactgaaaaaaacagtatggttgtacatactgtttttcattttcatacagtacagtttctactgactgcatgatgcttttgtagcatcggaaaatcaaaaaattgtgtcaaaccattgtaagtcaggggccatctgtagttcataatcctacatttaaagaccagagaaatgaagaagattgagacagatagaaggaaatcccaagagtgtcccggaagccaagtgaagaaggcatgtcagggatcagctatgtcaaatgccaccaatgggccaagtaagacgatggctaggccttagcaacaggaaggtcgctggtgacatggggaccctggtagaggtggaaacccgatcagcctgggttcaagagagaaagtgaggaaagaaattggagacaagaagtataaacaaatacaaggagttttctgtaaggaggagagaaaaggggcagtagcttaaggggaagggggttatggcagatgggagaaatgacatgtctgtatgcttttagaaatatgcagaaacaaaaaatcgggtgatggaaaaggagaggggagagttgagctatatctttggctaggcaaaagagaagaggatctggtgccaaaatgcaggggttggcttgtctaggacagagaacgagaaaggcagacttcacaaagaggcacagggtcacactgccatgtcctcacagtaccacatatcatcatgacactcttggccccacatgcatgctcctggccacggatcctctattacaaagccatggccacatacagacacactcaggcacgcccacggtggtggtggtggcacagtgacccgcacaggcacaaccactcacagggccccgagggtctactcactgctgcttgcggctcagctcctgttccttgtgcaccaggtcctgcttgagtgaggccagcagctctacgctcacgtccacctggcgggagagctcagacgcgcgctcctccagctcctccttctcgcgcccgagcctcgcactctcctgccgcgcagtctccagttcggccgccttgcgctccagctcggcctgcagccggcccacctggcccgcgatcttctgctccacctcctcgctcagccgctccagccgccggtccacctccagcttctccagcgcgcggatcttgaggcgcgccaggccctcttcgtaggccacatcagcgggtgagggggacgcgggcgaagcggaggcaggcccggggcaagggccggggccggggccaggcggcggcgtcgagcacgccgaggacgccacggacttgcgggcgaacagctcccccagcgggatctcgatctcgcgcagcgcatagcgcgctgctgcggcgggcacaaggcccggctcggccaactcctcacagggcaggctagcgggcaccaggtcgccggggaagtgggcgaggggagcgtggtgatggtggtggtgcagcaggtgcggcgccgcgggcgacggcccggccgcctgctccttgccctggaaggaagtgctctcgaagacctctcgccgggcgccgggcacggccagcagggcggcgggctcgggagccagcgggaaccccgaggcagcggcggcggcggccgcggcggcggcggcgccgtcgcagatgctgttggtcttggagaggatgtagagcgtctcgtaggtgtggctgtactccaggtgcgcgcgcagcgacgacaggctccggaagcgcttgtgctccccgcagcgggggcagcggtacggcaggtccagcgaggccatggccccgccgcccccgcggcacgcgggctccaccgcggccgccccgccggtcagccgggcgcgctcatgggggaccgcgggcgaggccccctgcggggtcaggaaggctcagggcgcccgcggcctggggcgaggaggctggaagagacgcgatgagtcttaggaagagggtatcgctgctcccaccctggctcccagcccggagccctcatcccccagccatgaggaaatcagcattgaggggcaaggggagacctcccagaggaggctggcctgctctggcacctgtgcgagggcctgtatgtgtgcaagagacagcgagagaatgagataatctgtttttaaaggggcaggcgcgtaatcacttttatttataatggttccaacctggaaacgacccaagtgcccatcaatggtagaacggttaaactgtagcatattcatgatggaatctacccagcaataagaaaagaaactattggtacacagtgacatggatgagtccatccaatattatgttgcatgaaagaagccagaccaaagagtgcatgctgtagaattccagagagatggagttcaagaacagacacaattgatgatgaagtcagcatagaggtccccagctgggggctacatggactaggaaggggcaggaggcagctttatgtgatgcggagaatgttctctatctgctttgagtggtggttatacagttgtgtacatatttaaacaatcatcaagctgtatacttaaaatgagtgtaaaaatccttggaaagaacatgcatgcttattttcattttttgcagactgcacccccacacaggctggaactattggtaccatgttgcagtgaccaagacatcactctacctaatgacatcgcatgtgtcgctgtttgttctgtcccgacttctgcaccacatcctcctatccctactactccaggcccttaggtctttttctcagacctagaaaaggtgaggtaggcttccagtaagtgtccctgccctgcctttaccccaagggctttattatccatcctccccacaccccttttggcacaaggtccctccatccccccaccaattctggcatcccaaccctcctcactgtcaactcctgctgcccctccatctctggcttcttgtcactcttctcctaccttgtggggtctccatcccattcctcactgccatcctcttcctaactgcctgcaatagggcttccactgccctgtgatcaaggtcacagaccacctgctgatcagacaagccagttgtcatcaagggtcttcacctacttggtcccatggccgatactgttgacccctccatcttcacagctgccatgagctttcctgtctggattttcccctgggttctgcaacttcctgttcttgctgccttcctaaacgtcctcattccctgaggtctgcctctggagccctccatctctattctccccctaggaaggcagtcagcttccctcacacaggtttacttgcacctgtaagctctacttctccatcctgacctgccgcatagttgtgttgccttctggcatttccacaggatgtatgggtggatgtctgttccttttgccagcccagcatccagtcctcctcctggtaacagcaccctgctttgaccatagggaaccatccttccccactttctcagtccacatggtcttggggatatgacatagacctggcaaatcagtcgtggggtaaacatagagcaccaaagttgagccagtgagccccaggactgttctggaatgactgagggaaagcattgtctttgggatcaggtttctaagctgatggagaaggccagagctgctggtgccatcctttctccttttgggaggagacacctgggaatgaagccaacccaaagaagcaaaacttagatggagaaacacattcctcacagacactgtttgagagcctggcctgttcagttacacaagccaatcaattctgcactcccccccc

SEQ ID NO: 2996 - DNA, 4001 bp, Homo sapiens
atttaagaactctttcttgactttagcttctcaatctgtaaaatgggccaatgctgccgctctcctgaaagttcttgcaaggattaacagtgatagtgggtaaaatatctagtcttgctacatctgaattgcacatgggaggcacccaacatgttagtttcactctcacccaggctggagtgcagatgtgtcataatagctcactgcagcctcaaactccagcctcaagcgattctcttgactcagcgtaccccgcccctctttaaaaaaaaaaaaaagaaaaaaaaaaaaacagaaaaccaaaaactgttttacggagaaatggttcttgctatgttgtccaggctggtcttgaactcttgtcctcaagcaatccttctgcctcagcctcccagagtgctgggatgacaggtatgagccaccatacccggtacttttgtacctttgaaaatgtatatgagtcaatcctattaaactcctgaatacttgttgtacatgggaactgatgcctcatcattaatttgcaatttgtgacttaatcataaacttgctggacttctagttgtttatataagaattttatctacttgtatcttataggtaggtaggtgcttacatttgacacaactactatctgaaatggacaagaagatgagatctggattatgaaacaaagtctcaaatattcaactcagtcataagagtagtgttttagaaatggccccttgaagctatcctacatgcataattacaagctaaggataatagtcactgaagacatcaagcaacagtgagtgacaactgtaaacaatgtttagaactcagctaggtacagtatgtgactctttgaagcccagatttaaagctcagtttcagctaatttacctaaggtgaatggtgtaggcttcccaaatcagttgaaagcatgactgggtacatcaccatccttgagttacttttgtatataaagacagcttgtattcacttaaaatcagtttattccattttgcacttccttttataacgggggttggttgtgcaagaggagaggtttgaggtaaatacttcttttaactcagctgaacacaaatctcttttctagacgagctactcagctatgttttcggacttgccaagaccacggtggctcccattcatgatccagattagctgtggtggctggaactgcagtctgtgttcaacagaggtcttcttcttgagggttaggagaagtaagaaagcaaacgtaaaaacgggtgagtcaagagcaagtttttgccatgcaccttggcccctcccaccaccaatacaaaccaaagccaaaccacaacgttcttgaaaagaatctcacattaggaaaacgttacagtgcatttaaacgttacagtgtgtttatccacttctcccaggatcttactgggagaataaaatgcgtccccttgtggaattcctgtaacgggaatgaaggcttttgaatttcacagcaggggatacctttgcgagtttctaaaatcccactaggaatctttcttctacgtccaggttcgcctggatgcctggaaacgacccctcttctgccctttctcctttatgaactgagctttcctgaattctctctcaagtgaagtaaaagctcgtccccctttcaactatcattcggagggatagatcggcggcagcgcagtcggaggggcggggagccccactccgtccaaatcccgcgggtcagggctaatcaccccacgtcccgtctgagccaccctccttgtgtcccgcgcgggttgcagctgctggaacccaagaacacagggcactgacaagtgacaacaaccgtcagcgttgactgtcactgcggctccaggccgcggagggaaggctgagcttgcgtccaggccgcgtccccgggagcgtagacacctaagccaacgggaacggaagacccttctacctactaggccgcggtagcttctcctcccgcgatttaaatccaccggaattcgaatccttccccatagctcttcgcatcccgcccacctgagtcccgccctgctcagaactcgcgcaggcgccgagaggggcgcgcagtgcctttggggattggtagttttttccagggcgtctccgctcgggaaaggaagtgaagaaagccaccaggactacaaggcccggcgtcctccaagatgggagggaggtgaaaagggtgttggggaataagccggggtttttaaacagtagttttgaggcggcgagactggggaatccccggttgcgtcattagtaggcgtggaggggcgggactcgtgaagctgcgctggggccgggctctgagaggaccggcgcagccgcggggagcctttgaggccctccctcggtgttttttcccagggcgtgggcttgccccgcgcgtgtctgtggagggcggaaacagcggaggggccagtctcctggcgaaggggcctaatccttgcccgccatgtccgggggcttcgagctgcagccgcgggacggcggtccccgggtggccctggcgcccggggagacggtgatcggccgcgggccgctgctgggagtaagtgtgggcgggggcttagcggaccccgagagccgtggagttccgcgccggctcctgaagaccggccctagtcctggccggtttccccaccgcactggtccgccggtccggattttagaagtttggggccgcacgtttttcagttacctttaagccaattcacaaacatttctttatgttgcttttaaaacactgactgtattaccattattatcttatccagggattggcaaactagtgcctgggggccaaatccagcctatgtttgtatggccccatgaactaagaatgattcttaaattctgaaatgtaaaatgtaaacaaaaaatctactaatttttcagggggaatagttgctccaagggttgagggtattgcggcttgtcttgtaaagcctaaaatatttacagtagtgtctggtcctttacagaaaagtttgccaaactgtgatattacgtcttctaggctaatttcttttaacctttggtctcctttgcagagctgtgtggaccttatttatttatattatttattatttccagtaaaatgagtagctaacccttcataagtaatgtgtatagcgttcgtgtcattggtctaaggagacattacctataccaacatctttaactgtctcaagaccgtatcagttagctatttttattatcctcattgttcagatgagaaaattgagccatacatacattatttaaagtccatacataagcttttggacacataatgccacaaagctaaatattctctaccttctttgggagaggtttaggaataagaacatttgcatattgcattctggaattctatagatctcttaagtacatctagttttctattttgttctttaacattcaacatttcttgtttggtgctcactgtgtagaacattttgcagattctagcactgtggggcatacaaagatgaatggaacatgggtccctaccctttaggagttttctcttgggaccggggagacacctgtgtcagtgagctaacaccaaggagtaaggagtgtgtactgttgtcctggttaacttccagagtctaaatggaaccattggtacttgccttaggtcccttctgggagcagggaaaggagtggtagtttaagattgtattatggaagctggtcctaaaggggtgtgtgtgtgtgtgtgtgtgtgtgtgtgtgttgtgtgttgtgtgttgtgtacatgcacatgtgcatgtggtaaggttattgaggaagtagatattcaattgctgttcatttttttactggacaagtgattatttaaatatttaacatcatttctatttttttcatcgtttgttggcctatacaaacactggaaggaactgtctggaggctttatttttcttttaaattcgtaggtttgaaacttaagagtatgtgcttaatctagtaat

SEQ ID NO: 2997 - DNA, 4001 bp, Homo sapiens
gaatattgctgtgttcaacaagcatagtttcacagaacaacagcataaaataaagaaattccattcattactcatatgtcctgtaggaactactgtgtcctcttttctcttgggcccggttttctccctgctgacggtccctgtaaaacctatttgcctgtatccaccgtcctgtatctccacctacatactttcacctttttttctcttttctctacacttctctctctctctctctttctctctttctttctttctgacagactcttgctttttcgcccaggccagagtgcagtggcgctatcttggctcattgcaacctccgtctcccgggttcacgccattctcctgacagcctcccaagtagctgggactacaaatacccaccatggtgcctagctaattttttttttttgtatttttagtagagacggggtttcaccgtgttagccaggatggtctctatctcctgacctcgtgatccgcccacctcggcctcccaaagcgctgggattacaggtgtgagccaccatgcccagcctctttcttttttttttttttttgaaggcacctcatctcgatctgttgaccagactggagtgctgtggtacgatctccgctcactgcaacctccgcctcccaggttcaagcgattctcctgcctcagcctcccaagtagctgggattacaggcacctgccaccatgcctggctaatttttatatttttaataaagatagggtttcaccgtgttggccaggctggtcttgaactcctgacctccagtgatctgcctgcctcagcctcccaaagtgctgggattacaggtgtgagccaccgtgccccgccctttcacccttttttcttttacttctttccttttagctgccagatctttgatatctaaatatacctaacatctctcattttctctcacaaattctttctcccctttctttcccttccttcttgggattcttttctcttacctaaaaaaaaaaaaaaaatggagataataaaacttgcttcatttacctctggaattgctgtgaggagcagacatcattgtacatatgaaaaggctttgtaggctgggcgcggtggctcacgcctgtaatcccagcactctgggaggccgaggcaggtgggtcccctgaggtcaggagttcaagaccagcctgaccaatatggtgaaaccccgtctctattaaaatgacaaaaatcagctgggtgtggtggcatgtgcctgtagtcccagctacttcggagggtgaggcaggagaattgcttgaacctgggaggcagaggttgcagtgagccgagatcacaccactgcactgtagcctgggtgacagagtgacagtctgtctcaaaaaaaataaaaaataaaaaataataataatgccttgtcaattgtaaagctcatgcaaatgaaactaatatgatcaagcagttattactaaaagttgtactaagggctatacacatattatctttttaaactcccgcatcaatctgaggaagcagggactttctctttaaaccttagtttatggcacagctccaggtcatggaagaaggtccagaagcactagtcctctcttttttccatagccattccctagcaaaagtgggaggcagagaagtcataatcaaatgatagcaataagttttgagagagctggacaacgtctacttcactttgtgttacacagggcatcttttatgtagtggggtgccatacacctcttttttcactgaatccatgttgcctctgggggcttctctctcccatgtggacccagggaggctctcacctctgaagtcgatggacatgcagggcctgggtagtggggctagtggtgggtcaatcttggccgactgcaccacaagccgcagcatctcggagacctactttcttccctccttccctacgcagcgccacagcttcctttttggagctcctcagtccaagacttttcccagcgatcctggggtgagtggagccccacttcctgtctgttgctaagcaacagacaggctgtcacaaaggtgggcggttcttggttctggagaggaattaatgggaaagagaagggggaggaggaacagggtataggtgactgggcctgtagaaacaaaaccacctggctgctttcacccccttttcttattgcccaggctggagtgcaatggtgcgatctcagctcaccgcaacctccacctccctggttcaagcgattctcctgcctcagcctcccgagtagctgagattacaggcatgcgccaccacgcccggctaattttgtatttttagtagagatggggtttctccatgttggtcaggctggtctcgaactcccgacctcaggtgatctgcccacctcggcctcccaaagtgttgggattacaggcgtgagccaccaagtctggccttaaaaaatttttttttgcccaccccacacctgccctccttgccgtccttttgatttcaaggtcagacataaggttgatgttttctccttgtacaagcaagttgtctggagccaatcattgccaaagtcacacaatgtagatgagaaaataagaaaacagtgaagtgacctgagaaaagggataggaaaatcaaggactatttctgtgaggtctcagggaaagttcttcctaacgtggaaacctttttactaagaaaaacctaagtttagatacgagaccctctttgacaaaaggaaattagcttttgaattaatgagctcatatggaaggtcaaagaagacaatgcggttttgaagtggctgtctttatggctgtctgagcctctgtgcattaagatggagctggggcacctattcttattgtccacagcaaggctttttaggctttagggttgaacatcgtataaattacatcttatccaatagttagaatgaaaactaatgaatatttaaatgctgggattggtggctcatgcctgtaatcccagcactttgggaggccaaggtggacggatcacttgaggccagaagttcgggaacagcctggccaacatagcaaaaccccatctctactaaaaatacaaaaattagctgggcgtggtggcacgtgccagcaatcccagctacttgggaggctgaggcaggggaatcgcttgaacctgggaggtggaggtcacagtgagccaagattgcaccactgcactccaaccttggcaacacagcgagactctgtctcaaaaaaaaaaaaaaaaaggccgggcgtggtggcttacgcctgtagcctgtaatcccagatctttgggaggttaaggcggccggatcacgagatcaggagatcaagatcatcttggccaacatggtgaaaccccgtccctactaaaatacaaaaaattagccgggcatggtattgcgcgcctgtagtcccagctactccggagctgaggcaggggaatcgcttgaacctgggaggcggaggttgcagtgagccgagatcacgccactgcacacaagcctggccacagagcaagactgtctcaaaaaaaaaaaaaaaaaaaaaaaaaacaatgtttaagaacaatctattagttaatgaaacaactacttagcagtaagcgtaccacgcagtctaagagatgaatggattcaaagactgaaacgctgggtcagtgatcagggtgctgattgctttctagtgcagcagattaaaaaaaaaagtgcttcttggaagtttttcttgaaatctaaacacaacacagtgcttttcgctttgtgaatggcttttcaaagtaagcgtgacacaaaagaccctgtaagtgaaaagctgacagatttgactgtattaaataaaaaattcctatgtagaaattatgccttaaagctagaagacaaatatcaaagcagggaaaacattttcaatatacttaatgtccaacagtttatttaataaatgtttatagagcaagctcttaataagaaaaggatgactatcccaaaggaaaacaaaggc

SEQ ID NO: 2998 - DNA, 4001 bp, Homo sapiens
gatggggactgtggggagacgctgcttgaagagccagccgtcaaaagggtaatttagcgactacccgtggagcgctggtggtgaacctgggaatcaattgcaatcgtctggcagagttggccagcagagatcagccggcgtgagtcagcgccggagggtgaagcaggtggcagtagccagggtctagtgattgggaagcccgctgtgtttggggagtaattcccccggttccattgccggctggtgctgcggccttgagctcctactaccagcagggaaaggacgctaagtgtcccagcccctgccccaaagcctggaaaaccatacacagcagcaaaagggcctggggctgggatcctctccatctgccttggcctgcaactcttttcctggtgctcaggagatgcaggagccaaaaaccaagtgactgtcttcccaaggcctccgcacaaccaggccaggactccgggcttcagtgtgaaccctgggtccacactgctcccacctactgtccgcctgtgccctgaccccaaccaacctcgcctccgccgcccagcgcgccggccatctcacctttctgaaccgcggggctcagcggcccccagctcgggttcttcccgtccttgaagagaccgtctccgacgggatctgcaagcagcagaagaaaagaatcaggagaaccccgggcggaagttgtgggcttgacaaaagggccccgggccaaggcttaaggggggtgctgtggtccccaggcgcgaggctgggggcccgggccacccggctcctcctcccggagcctggtccaggcgcgctgcgcggagcccctccatagagcccaagtcaggaaacgcgtccaggaaaaaggaaatccgctttccgaaggggccggctggagccttataaagccgagcggggaactgcgccagccgagctggagcgcgaagagaagaggagggtgcctggagggccggcctgaagctcgtagcaggaaggtgaggagccgtgagagcgcaggggagacgcccgcggaccacagccttctggtacggctcggccacagagtactccaccacgccagagacccgtgcttcccctctcaggctccttcgggtccctgagtcccggctcttggcccccaggctcccaatctgctcatttcaactcctctagaccctgcactgaaacccagagctctctatctgcctttaggtctccccagtgccctacattacaatcggccctccatgcaacccgaatctccggacacttctccttcccctggaccccagcactctcttcccatgcctgagcctagacttcccgccccaggttccggtgccaccagcctccggctggtccctggtacctggcaggtacatgttgatcagcaggggctgggaggcgccgctctgtctcatcgccgccggggactgggcggtgggagatgggggggacggggaaggggggcgaggcaggctttgcgctcggtggcaccgatccccgcccgaagcgaccgcgggtgacaaggaggagaagacggcgccgggtccggcagggcctggcgggagggggcagcccgggcgtggcgggggttgcgggggggtcctggagaaacgcttccagctaaggggccgcttggaaccctccggcccccgcgcggcccggggccgcaatttccgttttaattaaagcgctgccgcctcggcccccaggaccccgcccccgcccctcttatcgtcccatcgcaataaagtctccaacgcgccgcgccacagccaagcgcacccggcagccccccgcgccccgcagccggggagacgcgcgggggatgggcccgggccatgtgccctgatgggagcctagagcgcgtgtcttttccgcctccctgactctctgcaaacagtgatggggctggtgtacccggccccacctcggaccccagcagccacagccccctccctagagcccttcttccagtcggctcccgctccactcgccgctcactctcctccccctccctccctctatccccacccgggttcccgtctccaggctgcgttatctgcatcttcacttttaaatttccgcttccctccctctcgcctgtcgctgcgcgcccggccctgcagccgttgctccctttatctctgcccgcatccccgctccctcctcctcttctcccactctctgctcttccctagagacccgaaccccttccccgtctccttcttgctttggcccgtttcctgcctttctggggcccccaagcctcaggcctggtgctgggccatctctcctggcaacttatgatgggtggccccctcttctgtcctccccgcccccttctaggtctctctttacctcctaggcttttctctccgactctcatctcccctccagccttctctctccctctcatccttctccctcccctccttttctcattcattcagtccccataaattagtagtggcttggactgctgaaggcctctaaagatgttgagaatctgtcctggctttccctgatgggttcctgagccccctgctacttccctgtacaactattctgctcccatccttccccatcccctgtcctcccagtctgccacccaccctcaccactactcccattctggctatccctgaacgaggctggagaggtggaggggttaagacagggttgtgcactgtacaaggctggaatccactccaagaaaaggattcctatttctaactcatgcaaagatgttgatgtggttcccaagtggcctggagtctctctgggtacctatggggcttcgtggctctggagaggcaggctaaggaggatgctggctgaagatgaggctccagcccagaagcccaccttctgcagccttgcagtatggaacgggtactgtcaaaactggcattctcaaagtcctctctcactgcttgagcccaggggtggaggaggcctgggaatgggcaggtctcctgctaagtgcctggtcctgggatgcctgattgaggatggctggaaactcctacttctggggttctacagggcccatgttcaccctcatttgctgcaacttctggagtgttcatctttgctcgtggagggtgcaaaggagccagggagaagagtgggaggcagagtgtggagggaaaaagagggatcccagggcctgggaggatcctagtgggacagggatgaagccttcaggatgtggacctggaatctggtgggagcaaagactagaggttggaatgttccctgtggaccaaactcagggctccacagaaggtgagggccttgaagttggggtcaagatcccaatccctctccttctcattcctctttctgcttcccccacccactatggacagaaaacaaggagcaggaggtaagaacagaaaatagccaggggcaggaggtaagagctgggaaagctgggaggcatcaaaattcgcccacttaatgctctcagtgggaggctaaggtgtaaaggagagggtcctagtgaggtctacccaaatatcccagctgtgagctgggcaaggatcaacagtataggctttatccctcagtcttacccagaagtcatttgctgagggggtggagcaccaggaaatgtgtgcatggggggcagtcatctccacccacctgagtcttgatcttctccatcccctcctgctgcaagtacagctagggaagccaacaggagagtccttggcagtttccccttcatccccttcctaccctgctgagcgctggtcccatgtggttctgcagatggccagcctgcccagaatgaatggaggaccagaaggtccagagtcacacttctagttcctgaagccatcttgctgattcttcccagcaaccacagatacccctgtagggagagcagctcagtcaagggcagattccagatctccctttgctcattgcctgctccccaaagcaagcagtggggaagtggcctgctgggctctgaagccagtttgcctggg

SEQ ID NO: 2999 - DNA, 4001 bp, Homo sapiens
gtactgaggaaccaataaaaggagatggtctccaaacacaggtgggcctgcaccactgctcagccatgtttacaggccccactcccaaggctgtctttacaagcttcctaccttattcctgataaatctgtttgtttcacaaaggaaaggagacaatcaggctggaaactcctttccgtgcccgtgactcctgtcctgtctctcaaaaattcttccctaacctctaagagtctctccatcccatcaatgctctgaaaatccattccttcccatgtcctcatttttgagacaaagtctcgctctgacacccaggctggagtgcagttgtgcgatgatggctcactgcaaccttcgcctccaggactcaagcaatcctgccatctcagcctccgggcagctgggtccgtgggaccacgggcatgcgccaccggacttcactaatttttttttaatttttttgtaaagaccagatttcacgatattgcccagtctggtctcgaactgctggaagcaagccatcctcccaccacagcctctcaaagtgctgggatcacaggtgtgagccaccgcgcccaatcttattccactcattttaccttcagcctctccggaggctcctctccccctatatacacaacatgctcaagtccctttactctcaccattcctatttaccatcttttgggggtaaaaccatggtacctaattacaactcttacttaaccaaattataattgcggctcaggtggtttaaaaagtgccctcaggaactctgcgcctcacctctcccagctgtgataaaaccccgtgaacctcctatcattgctcttaggtgattctgtaattattaatattacttgtgtatgccttggtctccccaccagaccatgcgatcgttaccatcagtaagcagggcccttcgttttcgtctctgtggcggctcgcactctaccagggctcccgggtgggtcccacagattcctgtgccctaaatgctgcctcgcacgttggtacttatgcacaggcaatatactccacctagaacgttagacttttttccacctgccaggcacactcccactcatcagtcagatctcgtttgcacatttctttataaagtcgttccttactctccccaagacacacgcttttaagtctctcacatttggtacatataaccattgcagcgctaattacatccatacatgtatttgtttacaaatctatctcccatcctacgttgtgtcctaagtgggagggacagtgcccagtcgttttggtgttccctgtgcgaagcagcgcctggcactcagcaggtgcttaataaatgcgacttgagtgaatgaatggcgacacacgtgccccaggaggtgccccaggaggtgccgtctctaactatgggctctgcatgggcgattcccttctaatacaaacgagggtttggtttgcaggaaggagggcgggaggtaccgaggcggaggttttcagggctcgtggcggcggggggcaggggatttaaattgctgggcgagccgaggccgacggccggaggaaggaggcgagagggcggggactcccgcgtccgggcggaaggagggcgcagggaggagctgcggccgtagggctgccggtcgggcgaggggtaggggaggctcccgcccactcccggccggggccccgcactcactcgtccccctgcaggaggctgcgctccgtgatgggccgcacggccgtcctcgggggctcggcgcccggatccgaggggcggaagcacaggctcagcttctcctccaagctgcaggccggggccgggaaaccgtcggcgcccccacccgcctcggcccccgcctccgccccaggctcggggctcgcgttacagttctcctggtccaggaggctccgggccggctcctggaactcatagaaatcctgccagtccccgtccgccgccatcgccgcccggagcagtcgcgcgccccgcccaggccggcccagcccgcccagcccggccccgccccggcccgaagccccgcccccgcccgctaccgtgctgacagatcccaggctgtcccaaccctgggtctccggtggcctgagtcttcctggagttgaacgcggtgctactagaaagccaagaccttaactgccttgagtcacttcctatattctctatcatttaggaataacttccctgttagcttcccttattagcaacttggcctaaatgtggctaaaataaaggacttctttaaacttacgacctaatatcagattacgccccgaaagtcgttttccccaaggtaacctgctcctttcctaacttgccaaccagaataacagccagagtcaatgggaaatgtttaggtggtaccgaagttcattcctcaaatattttacctctcacgtgcaaagcactggctagatcctgcagaacatacaaagataattatgccagttaacatttgcaaagcacttagagcaatgcctaatagtagataccctatgtgtatgttataactaatacatgggtgccccatacacagggcttacaatgtcggagtgataagagtaacaagaaattgtttagacctcataaaaactaagtgtgattgggcggttcagttttgcaagatgaaaagagttatggagatggatggtggtgatggttccacgacagtgttaatgtgctgaatgccactgatctatacacttacagatggttaagatagtaattttatgtttattttactacaatacaaaaaaattggagtaggccaggcgaggtggctcacatctataatcccagcactttggcaggcccaggtggacggatcgcttgaggtcaggagttcaagaccaacctggccaacatggtaaaaccccgtctctactaaaaatacaaaatctagctgtcaggcctctgagcccaagccaagccatcgcatcccgtgacttgcacatatacacccagatggcctgaagtaactgaagatccacaaaagaagtaaaaatagccttaaggatgacattccaccattgtgatttgttcctgccccaccctaactgatcaatgtactttgtaatctcccccacccttaagaagtttctttgtaattctccccacccttgagaatgtactttgtgagatccacccctgcccgcaaaacattgctcttaacttcaccgcctgacccaaaacctgtaagaactaatgataatccatctcccttcgctgactctcttttcggactcagcccgcctgcatccaggtgaaataaacagccgtgttgctcacacaaagcctgtttggtggtctcttcacacggacgcacatgaaatttggtgccgtgactcggatcgggggacctcccttgggagatcaatccccctgtcctcctgctctttgctccatgagaaagatccacctacgacctcaggtcctcagaccgaccagcccaaaaaacatctcaccaatttcaaatccagtaagcggcctctttttactgtcttctccagcttccctcactatccctcaacctctttctcctttcaatcttggcgccgcacttcaatctctcccttctcttaatttcagttcctttcattttctggtagagacaagggagacacgttttatccgtggacccaaaactccggcgccggtcacgggctgggaaggcagccttcccttggtgtttaatcattgcagggacgcctctgattattcacccacgtttcaaaggtgtcagaccacgcagggacgcctgccttggtccttcacccttagcggcaagtcccgcttttctgaggaaggggcgagtaccccaaccccttctctccttgtctctaccccttctgtgatttttctggggcaggggcaagaacccctcaaccccttctccttcacccttagcggcaagtcccgcttttctaggtggcaagaacccccaatcccttatttccacaccccaatctcttatctctgtgccccaatcccttat

SEQ ID NO: 3000 - DNA, 4001 bp, Homo sapiens
tgcatcataaggcctcatagaaatattcaaatgttaaaaaaaataaataaatattcaaatgttcctcccgtggtgcgtttagtggttagaactcaggttctccagttaagctgcctggggtcagatctcagggctaccatttacagcccgggaaaccctgagttaaagttactttgatctctgttttcagtgtctttacctgtaaaaatgaggctatcaaatatgtatacactgtctatgatgtccaggcttcttaacaaccctaacaaaaagacaacatcattgtccctgtttcccagtggagaaaaccgagacactacgagattaagtgacttggcccaggctgcacaggttgagggacccggatgtaaatttaggcagcctacatgcagtccccggcatcccctagcctactgcatctgcctgtggctatttgtgagacggtgagctaaaatgagacagaacctatgtgcccagaacagtttctggtctgtagtaagcccatcattagccttcatcgacatgttatggtgtaaacgcattttaaaccatggcaggctaataaacaccgtggaaacacaattctgtgtattaactgatgatcttctaaactggggggtgatctaaatccagtaacacttgacaaaattttatataaatgcacaatgaaatgttctttgagtttggttttattaaagtttaattgatagactaggaattcctgtacttctaagacttgatgcaaatggtttttgtttttttgttttttgtttttttttgtctaaaacatcttcaggatagtgcaaaacctcttttctttaatatattattataaaacactcattagtagagtcagcaccaaaaatgtgagatgtattgggagttgtgttttgaagacagttctcctgattctaaacccaaattgtgatttattaccttccaaaatatgtggaagggagtgcgggccttaagttcagtgatgtctaagtacactgctgcttgcaagccagctacacatttcagctaaccggattagcctacttccagttaaaacccgactgaggatatgaaaataaatatgactgattcatttaaaatcagaaaaacactcaatattttcttccctctatttctggtatgctaagatatcacacgagtgcgacttaagaaaaacttagaatcttttcatttaaaataagccatttttgttttaaccgaatggttcagttattaaatgtctacctgagtcaaggagcgaggtcacactgcaaactccacttatttctactaaagggaaatggcccggactcccccgcgcagaccaccgtgccaggacagcccgctcgggagtcgggcctggaagcaggcggacagcgtcacctccccgcagccgccggctgggacccgcggccagcctttacccaggctcgcccggtccctgcccgcatggcggtgccccacctggtgaggacgcgggctgcagtcctccctctggggatgagtcggtgggctcctctgagctccagcgcccccagggtctagacccctcccattgctccgctcccctctccccgtggtctccccacccccaacccccagggttcggctctcctctcccgggtctaccccacagctcaactcctttctcccggcttctccccgcacggttcgggtcccctctcccagtggtcttcccggacccacagctctgctctcctctcaccagtctccccaactccggctctgctcccctctccttgggtctcgcaccggattcggcccccacttccgagccctggtggctaagcccctcggcctccctccggggcgcagggggttggaggtactcacggcaccgcagcgggccggggactcccggacggggctggagggcgcgggcggctggtggctgcggctccgctgccggccgagtggagcgctgcgcagctcccgccctcgagaaaccccgccgtgtcatttgaccatataaggagatgcacgcctcggctcgctggcaccgggcgtggggcgcggggggcgggcgcccccaggcctcgcggttgccgtgcccccgccccgggctgcggcggtcccggcccgtaccctttgtttgccagggctcctttcttcgtgccctccgggtcttgggagcacagtagttatcgggagcgtcgcctccggcgtgggctctcgggcgcgagtttcggacgaggcctgggcgcggtggcaggggtctgcccacgccgggatctctgcctggtcccaggagcgggagactggagaagccccaggacgtgccgggggaggcggagggaggagggggtcacttctcaggaggcatgtgcctgggatatatttgcaaggtggacgtttttccttcttaccctgcagatgcttctttacgaaatgaacaccacagatgaccataaagaatccttcgttccactacggaggggactaaaggaaggtcctatccccacctctccctctcggggccagaagactagttagacatcttggattcccctccagggcgggaaaaccaaagtgagctgggagcgtgcctcccacattccaagcccgggccctctgcgtgacgctgacgctgggtagggacagatggcactgttcagcattgtcgcagggagagcacaggttgagcccatccctgggagagggtgcgtcgtgatggaaacatttgctcctgagcaggtaaccggtccacttgcagaaaccggtggacgatgagtaggtggaccacaaaggcgtcctcggcactttgggggcaggtgtattatttttaacattcggggcagctcataggaatacatcctccagagaaggcgggaagaactccgtgattgctttcttttaattgatactctccgtctggtaggcctcatgggtctccatcatggaatcacagaacttgagaataaaggggcttcatcaccttagcttccactcggtgagcactagctctacctggtatctcatttgatccacactcctttaaggtaaagatttttaccagatttacggtgaggaaagttcagctcagatttgctccaggccacgtgaacggtaactgtgccagctgagatttgaactgggatgtggtagatggcaaagccatgtaagtatattacgggatcagaaatgcctctcatccctcagtcactcaggtgactccagaggactgagacttgccataagcccagccagaactagatgtgcggaatacagccctcccccgaccccaccccactgtgtccctgaaacaggacgctttcctgaagaacctgagttaaggccaccctacctgaatttccactaagtgtcaagacaggctagtattttgaaattcagagcaaagtttgtgtagaaaaggctcccagcccctgacagctacctagatgtgttgttgatatcgttacaaattaggaaatggtctcctagttctcaaatggtgagtcttaagcttcagtttgtaaaaacaagccctaaaatgatgaaacattaattctgcatttatcttctttctgattccttttgtcttatattttaattttttttttttttttagctttctgacttacgggtgtaatccatttagctttgcttttttactgatagagttatttagttctgttatttttcttctaataactgctttagctgtgtcacataggttcagctatgttgtgttttattattaagaaattctgcaatttaattttgtgtttaatttttgacctaatgggtagcagaacattttaaatgaccctgtggtcattcgatagggtcagtaaaatccggactctggaaacaaacatacccagtttctacaacaacgatgcacaaagaaaaacaagagagatggagacagaaccaagagattaaaaaaagacttagccaactgccatgtatggatcttattggattcttttttttttttttttttggatcttattggattctaatcaaagaataaactagta

SEQ ID NO: 3001 - DNA, 4001 bp, Homo sapiens
taagctgcctggggtcagatctcagggctaccatttacagcccgggaaaccctgagttaaagttactttgatctctgttttcagtgtctttacctgtaaaaatgaggctatcaaatatgtatacactgtctatgatgtccaggcttcttaacaaccctaacaaaaagacaacatcattgtccctgtttcccagtggagaaaaccgagacactacgagattaagtgacttggcccaggctgcacaggttgagggacccggatgtaaatttaggcagcctacatgcagtccccggcatcccctagcctactgcatctgcctgtggctatttgtgagacggtgagctaaaatgagacagaacctatgtgcccagaacagtttctggtctgtagtaagcccatcattagccttcatcgacatgttatggtgtaaacgcattttaaaccatggcaggctaataaacaccgtggaaacacaattctgtgtattaactgatgatcttctaaactggggggtgatctaaatccagtaacacttgacaaaattttatataaatgcacaatgaaatgttctttgagtttggttttattaaagtttaattgatagactaggaattcctgtacttctaagacttgatgcaaatggtttttgtttttttgttttttgtttttttttgtctaaaacatcttcaggatagtgcaaaacctcttttctttaatatattattataaaacactcattagtagagtcagcaccaaaaatgtgagatgtattgggagttgtgttttgaagacagttctcctgattctaaacccaaattgtgatttattaccttccaaaatatgtggaagggagtgcgggccttaagttcagtgatgtctaagtacactgctgcttgcaagccagctacacatttcagctaaccggattagcctacttccagttaaaacccgactgaggatatgaaaataaatatgactgattcatttaaaatcagaaaaacactcaatattttcttccctctatttctggtatgctaagatatcacacgagtgcgacttaagaaaaacttagaatcttttcatttaaaataagccatttttgttttaaccgaatggttcagttattaaatgtctacctgagtcaaggagcgaggtcacactgcaaactccacttatttctactaaagggaaatggcccggactcccccgcgcagaccaccgtgccaggacagcccgctcgggagtcgggcctggaagcaggcggacagcgtcacctccccgcagccgccggctgggacccgcggccagcctttacccaggctcgcccggtccctgcccgcatggcggtgccccacctggtgaggacgcgggctgcagtcctccctctggggatgagtcggtgggctcctctgagctccagcgcccccagggtctagacccctcccattgctccgctcccctctccccgtggtctccccacccccaacccccagggttcggctctcctctcccgggtctaccccacagctcaactcctttctcccggcttctccccgcacggttcgggtcccctctcccagtggtcttcccggacccacagctctgctctcctctcaccagtctccccaactccggctctgctcccctctccttgggtctcgcaccggattcggcccccacttccgagccctggtggctaagcccctcggcctccctccggggcgcagggggttggaggtactcacggcaccgcagcgggccggggactcccggacggggctggagggcgcgggcggctggtggctgcggctccgctgccggccgagtggagcgctgcgcagctcccgccctcgagaaaccccgccgtgtcatttgaccatataaggagatgcacgcctcggctcgctggcaccgggcgtggggcgcggggggcgggcgcccccaggcctcgcggttgccgtgcccccgccccgggctgcggcggtcccggcccgtaccctttgtttgccagggctcctttcttcgtgccctccgggtcttgggagcacagtagttatcgggagcgtcgcctccggcgtgggctctcgggcgcgagtttcggacgaggcctgggcgcggtggcaggggtctgcccacgccgggatctctgcctggtcccaggagcgggagactggagaagccccaggacgtgccgggggaggcggagggaggagggggtcacttctcaggaggcatgtgcctgggatatatttgcaaggtggacgtttttccttcttaccctgcagatgcttctttacgaaatgaacaccacagatgaccataaagaatccttcgttccactacggaggggactaaaggaaggtcctatccccacctctccctctcggggccagaagactagttagacatcttggattcccctccagggcgggaaaaccaaagtgagctgggagcgtgcctcccacattccaagcccgggccctctgcgtgacgctgacgctgggtagggacagatggcactgttcagcattgtcgcagggagagcacaggttgagcccatccctgggagagggtgcgtcgtgatggaaacatttgctcctgagcaggtaaccggtccacttgcagaaaccggtggacgatgagtaggtggaccacaaaggcgtcctcggcactttgggggcaggtgtattatttttaacattcggggcagctcataggaatacatcctccagagaaggcgggaagaactccgtgattgctttcttttaattgatactctccgtctggtaggcctcatgggtctccatcatggaatcacagaacttgagaataaaggggcttcatcaccttagcttccactcggtgagcactagctctacctggtatctcatttgatccacactcctttaaggtaaagatttttaccagatttacggtgaggaaagttcagctcagatttgctccaggccacgtgaacggtaactgtgccagctgagatttgaactgggatgtggtagatggcaaagccatgtaagtatattacgggatcagaaatgcctctcatccctcagtcactcaggtgactccagaggactgagacttgccataagcccagccagaactagatgtgcggaatacagccctcccccgaccccaccccactgtgtccctgaaacaggacgctttcctgaagaacctgagttaaggccaccctacctgaatttccactaagtgtcaagacaggctagtattttgaaattcagagcaaagtttgtgtagaaaaggctcccagcccctgacagctacctagatgtgttgttgatatcgttacaaattaggaaatggtctcctagttctcaaatggtgagtcttaagcttcagtttgtaaaaacaagccctaaaatgatgaaacattaattctgcatttatcttctttctgattccttttgtcttatattttaattttttttttttttttagctttctgacttacgggtgtaatccatttagctttgcttttttactgatagagttatttagttctgttatttttcttctaataactgctttagctgtgtcacataggttcagctatgttgtgttttattattaagaaattctgcaatttaattttgtgtttaatttttgacctaatgggtagcagaacattttaaatgaccctgtggtcattcgatagggtcagtaaaatccggactctggaaacaaacatacccagtttctacaacaacgatgcacaaagaaaaacaagagagatggagacagaaccaagagattaaaaaaagacttagccaactgccatgtatggatcttattggattcttttttttttttttttttggatcttattggattctaatcaaagaataaactagtagaaaatcaatttttatgagacaaccttggaaaatatgacactgacaggatattttctagtattaatgaacaatttatgttaggggtgataatgtgattacacacac

SEQ ID NO: 3002 - DNA, 4001 bp, Homo sapiens
atatatgattttccattttcttctttttgctggtctgtattttttatagtaaacagattatttgtagagtgaaaaagatataaacaatcaatataattttacctctttctttggtggggagagaatgaattagaatcagtctctgggccatatcttgtaaatatgaaacatttcagagatcggtagaaagagtgcaggtccctgtgctttaggtcatgggaatgcagtgagaggcatggcttggcctggccttggggatctgaaatcaatggagaactctggaagccctgaatagaacaatgaaacctaaaagtacgaaacctgctgaaaggcaagatggtgggtgagcagtcagggaaccccgtattggaaaatatgcaacttttcatggaagttatgcattaaaatattttttaatataagaaaatgcctccaaagtgtaatcatttgagtggattagtcacctactcagttaaatacaaaaacttgtgtaaggggtcgggtggatctcaacacataatagaccttattccagcccatcctggataccccaaaaccctgacttggtcattacacattctatgtatgtactgatacacattctatgtatgtaccgaacactcacatgtaccccataaatatgtaaaatattatgtatcgataaaattttgaaagcctagcaataaaataaaattcaaataatattcccaagaaacaaataaaacaactatagtaaacttacatatagcaaatatgagctacaatagcattaatctgtaaggcaggtgtttattaacactatctttggacgtcagaataatttagaaaaataaactggactgacaactttatttttctttttagattagacttgataaagtgtcttacatggagtctggctagaggatgtttatatatatgatgtctattatcatatatatggcatcctatcaatattgagattattacacaattggccagggcattactcaggactgtgcattttggagtttgccctgctctggaaattgtaaaatattcatgcatttcctttttaaagcatgcaatagctctctgggctttcaaaccatcagctgcgaagagtcatgttgcataaacacactttcccagagtaatcagactcatcagtaatttgtcttttcatcccaggctttccggaaattctgtcagggagaaaaagttcaagtgcactgtggttttctccctttccaatgtttattttataacatttcttcttttgctttccccttaaaaaatgttttccgttgttcaaaacagattcccactgaaagggggcagaggttcaattttatttaaatctctcctcattcccaatgagcaggggttctctatcttcaagctgacaccccctgtagctctgggcagggtggcttctgttcttgggctctgccgttggtgggagccagctgccagcaacacctgcatctctgctggggtcagcgagctcccagtgcctgagagcttcctcccagggctggacactccctctgcatgcaacaagatgcctacagagctgctgcagagacaggctgggaaggatggcaagggtgagagaagggcacaggggaaccagtggcccttacctgtggttttagggttctgtcttctgtcctccagcccgatgagcagggacagctgctgtgcaggcggactgcctggttggatggccccaaccttctgtgcagctgccagccagctgcgctgcccttgtcagtggcgctataaataaggcacgtctggacattggccaggcctaggagataagaacccagcccctggctcccacgtgccttttaaggtctccagattaaagaagcctcagctcccagatgggaaggggctgccatgtcctcgtttgtcctgcctgcttcaaggacacacgaggcctcatattttccaggaatccaaagggtggctaaactgggaaggccaccagcaccagaaagggacctcactttgtcatacaagaggcagagcctccaacaggctgctcagctccacctctgtgcaccccccagattaggtaactggcatggaggcccaggagtgaaaggacacttcccccaggctacacagcacctctgtgagctgggaaatgtggatttctagtgctgcctttggaacgagctctctagcttacaagggcatttgcttgggtgagaggatgttgggaagatcgaacaatcggcttaataaatgccaggcatttgtgaagccgtggagtggaatacattcgcagaaagttctctccctccctatcctccctgctcatgcatgattataagggtttcttgagccatacactgttttctctatagaattaaaacagtgaaatcttcccagagcatttttaaagccatatgctgggagaggaagagaaactgatttgggggaccaacagctcctgattcttccttaatgtcttacttacgagtatgctgaaaaggcactcacccatggcgagggccaacttcttctgaggactatttggcgacagctgtctgcattaccacaacaattctaagcctgcagatttatcccgaggaaagaatagtggatgtgggcagagatacagctgcaaggacatttctcgaagctctttttatcttggaattaggaaaagttggaaacaacctaaatggctatcaaaagggggctgattaaatgagaaatagtatataaaaaagcagaacagaccaatcacagtggcttatgcctgtaatcccagcattttgagaggctgaggcaggaggatcacttgagccctggagttcaaggctgcagtgagttatgaacgtgtcactgcactccagcctgggcaacaaagcaaggctctgtctctaaaaataaaatcaaaaataaagcaaagcaaaacacgctgcaacctttagaaatgtcaaaggagaatatttaatgatataggaacaatacatataattatagattgataataaaaagcaggtcatggcccacgcctgtaatcctagcactttgggaggccaaggggcgggtgaggggggggcagatcacatgagttcaggagttcgagaccagcctgaccaacatggtgaaaccctgtttctattaaaaatacaaaaaaattagccaggtgtggtagtgggcacctgtaatcccagctacttgggaggctgaggcagcagaatcgcttgaatccaggaggcagaggttgtggtgagccaagatcgcgccattgcactccagcctgggcaacaacagtggtcacccttgagggaaaaaggcatatgtataacatgaagttactacacacaggtaagcacccccctcccacacacacacatacatcctgaaaggatgtgccacaaatgtggaaggtgttgatggctggaggaacggatatagctcattttattttcttctttgtcttatatgcaatctctaaattatttacaataatattgtattcttttataagaaaattaacttcatctaaaatcttagtttccgagactcagaagacagctttctgtgtttctgcactaatgaatctcagtttattttaaggttacagaattccttggggtttccccactctttggaaaaacctatgtaaggcccagaagctctttttcatgccaattccaatgatctgatgtagctggacctgtcaaatcctctaagtgtccctgtcaaggcaaaggcaaggcaagaaaagagaaagaaaagaaaaaaaaacactaagagaaaaagaaggaaacagaaaataaacaatataatatatgtaatcataatgtataattttatcacacaggtcacttttatctgacctaacatgccccaatttatgctccaatcaggacattagaaaggcacttaatgggccttttatttaaaggaggtgcatgttctgatgattattttgttttttaaaaattgtttttaacttaagtaatgacctcctgatctgactgtgtgatata

SEQ ID NO: 3003 - DNA, 4001 bp, Homo sapiens
gagaatacaacaaccactcagtgtataaaaagaatttaataatcaaagaactacaaactaaaacagaaattagataccattttttatgtatcaaggtggtaacatttttgttttatcatacccaggataagggatagcttgaaaaagagaacagtcctagacctgtaagaagggataaaaattagtaaacctatctagaaagcaattgggtaacttgtatcaaaagccattccattgtatatgccttaagtctcagtaatttcacttgtagcattttattctaaggaaattatcagacacgcacatagagttacaccgataggtaccggtaaaaagctacaaacagcaaacatgcctaacaataagagactgaatacattatggtccatttttggacagactatgcagtcaaaaactattctttgaaagaatacttaagaatataagaaaatgcttttgataatgttaagtggaaaaaattacacaaatatgtactgaatattttgtaaaaattatatatatatatatatgaatacacaaaactagaaaaagactgggtggatatacacaaaaatgttcacagtagttatatctgtgttgtgtctcttaacttcttcactcatttctgtcttttccaagtgtgttaaccttatcattataaagaataataaagcttattcgtgttttagtggataaaaccaggactgattctctggagaagacaattccttcctggtgggaaggaccacttaaactattagatcataatctctttgtagggccaccgaatcagatcacagggttctgtccatcaagagtctagtactggtaaaagaggagacttaaagaagtctcctactctcctgtcgtcctttctgcgcttgccctctccctgcaaagctcctacttgattcactgggacatttctgaaaggcctaggaacagccccgggcggtacttctctccccagtcccagtcctgaacgtgcgctctgctccctcttctacccctcacccttctctctcctggattcgcctctgctgcaaccaaacccgtagactgcaaacgctaggaaggagaccatgtctcccaagtttggggctgagtttcgttagatagtaaaatctaccagcaggtgccgctccaaccacggcccacaggacccttcccgtttgcgagttgctgcggctcgactgggaaacactcactttatcttgacagagttgagtgggagtcttgggtgcacactgggacgtcgtgtttcgttactttaaaaaagaaaagtcacttccgtcaggcccccctttctcctcaccctcgtgtgtgcttcgaggccgagatgcagagagcaagaaaaaggagcgaaggggatccctgcgcgtcccaagcacccaccagcgcctacggtgtgagatgaaggcgcaccccctgggcgcgaagcttttaaagcacctgcccagggagacatttttgaagttgtcagggcccctcctctgtcccctcccagacccgggtcctgcacaaatcctggagggttagcgggcgaggcggccaccgcagcggccgccaacgagcagctgcacggaggtgcagaagaaggaggccactgccattctcctgacaagctgggggcgtgggaggcctcgggagctcgaagtcgcctcgagcgggggtgggcggtgagcggacccccgggtgttgaccaggtgtttggtggtagagcagggaaggggggaacggacgtcgaccctagggatccctcacccgctcacgctccttggcgttggccacacgccgccgctccagcaccaactggaggttttcagtggacgagtagccgcccgagggcagccgcttgagccggcagacagcggccagctggggcagcggcccgaactgctcccgcaacacgtcctccagcacctcggcttgcggggtgcccaggagcgcgggcggcgcggcgcggggatctaggacgccgggcgcggggtccatggcagggccgaggccgctgaggccgggctttcacctgcgcacccggggccgcacgaggcccgggcgggggcggggcgggggcgggagctggaccacctgcaaccattccccggctgcgtattccaatcccggcctcctctctggaggctgcgtccaggcatcgcgttgaataagccgcacaggtgtgactcgggagcgctggagcgcagccccggctgcacacctggaaccgccgggagcgtggtagtggtgtttttctcaatccacatgccacggttccagtcccccaaattcccatttaatcaatctgtcttggggcctgagcttctggctatgtgtatacagaaaaatgtgatggatatccacaaaacttttttaagaattcgttttgaaataaaagttgcggggaaaatggcaagaagagtttctaagagctcctgtacccccttcgccacgctctctacttgctaagttttcacgtttgctccgttgccctctttctcgctgtgaatattctcattttcattattctttttccattctatttgaactattttcttttttcgcgagtggggggatacatcgctttattcattttcccccttttccacacagacctttattgtcaacacagccaaacacagttgttacttcagaaaatgtgctggaaaatagcgatcccaaacttgtttaatagtagagtacaatttagtactctagaaataattaactacatcttctgttttgagtagattactcatgagagtttgtttctctggaggttatcaatataactggaacattctgatcttgcacctgaaaatcagacatgtttctggaagccctctgtaaaatcattccttccaagcatagaaatacatttttttttctttggtctgagaaaatattttttctacgcttttgtttcaggttcaggggtatatgtgcaggtttgttaagtgggtaaattgtgtgttgctgaggtttggtgtacgaatgatcccgtggcgtaagtagtgagcctagtacccaataggtatccttccaacccacgcccccctcttacttccccctcaagcagaccccagtgtctattgtttccatctttgtgtccctgtgtattcaatgtttagctcacacttataaagtgagaacaggcaatgtttggttttctgtttctgtgttagttcccttacaataatgacgtctagctgcatccattgatctattctttttttaaagtttttaagttgcagacatgctgtcatatcacctctaaatactccagtgggtattccccctaaacaaggcctctcttccacataaccgcaacacaaccactcaaactaggaagtaagcattggtactgtgctaccatacaatccatggaccccatcaaagtaccaccagctgtctcaacaatgtctttttctcttctggttggaatccaatccaggagtacaagttttattctgttgtcatatttctactctccttcattctggaccatttcctccatcttgtcctgtcttcatgcccttgacagtttaaaagagtaggggcctttcattctgtagtatgtccctcgacctggggttgtccactatttgctcatgtccagaccccagccatgccttcatggaggggctccatataaatgatgctgggctcttctcagtgcatcacatcaggaagtacatgaggttgatctgccccaccactggtgatgttaaccttaatcgcctggtcaaggtggtggtgtcaggttttttcaccataaattgataaatattttgtgggccaggcacggtggctcatgcctgtaatcccagcactttgggaggctgaggcgggcggatcacgaggtcaggagattgagaccatcctggctaacatggtgaaaccctgtctctattaaaaaatattaaaaaattagacgggcgcggtggcgggtgcctgtagtcccagctactcaggaggctgaggcaggagaatggtgtgaaccc

SEQ ID NO: 3004 - DNA, 4001 bp, Homo sapiens
taacatctttttgttgttgttgttccctctgtcttaattgaatattacaaagtgtacacagggcactgccacaagagctattgaaaatcccctctcactccatttaactgactttttttttttgtaaagaaaggaaagagcgatttcaaacgaagtcaatttcagtgcctgattatttaattctgtcacaagttaaaagtaaaaagcgctgacaggcagacgagtgaatggaaagggggaagaaaaacctatccctactctttaaaagacatcaaggactttggacaatcaaaatataatttttattttcatgtaaaagacacctcttcacttacccgccccccccaaaaaaaaaccacactcagaagaactgattactccacaaagtgcaaacatcaagagcagatagtcaaactgcattaatagattgagaaaaataaaattttcatccagtcctgttcctgtgtgtgtacatatatatagatacactttcattagttagtaatctttcccaacactcctgccctctcccctttgcccagcctccctccttcaaaaaaaaaaaaaaaaaaaacccacactgagtttaactaatttacatactatttgacttcagcagttatatatatatagtgcattactagtaacgtgcaacttctggatgacagctaaaaccgataaaagtggattcaagtaatatattaatcaaaactgcaatatacaaacaagtgatagcaaaagaaaaaaaagcatggtgacattaaacatatattttttaaaaaaaggaattctatatcatgagcaactgcttgccaggcagtcttcaatggttttatcatgctatttcatttgtctttcctatttagatgcaaaggaagtaaattccaaaactgacataccataaacactggtgctactgatcatttcttgctggcagcacaaaaagctgaattggatttctcacaagcaggaattccaaaggttgcttttcattaaagccacttttcctctcagctatcaaatgtcactgccttgaaacgtgggccctttcgtcaggtattcatttaacctacatgcatataattaagggggaaagcaacatcaacaaaaaggggatctcagatcacaggagaagaaagaaaggaaaaaaagcacatgaccaggaatgcaagtccatgtcaatttcactcactcccattgaaactaacaagagctccggggaggacggtaataggatcagtggattgtatataccattaaattatacatctttctctcccgttccttgccaacaatacgcccaccacgctgtaccccctcctagatgatgtgcttacatttttctgcaaccgatcttctgacattttctcgttcccccagccacgagattgtaatttaacctcaactttttgtgtgtgtgcaagattcttatttacacttcttatttacttagaagttagttcccgaagaaagtctagccccaccctatggctccgctttcttatttttttatttttgaagtaaaaagatagtaataagtaagcccaatatagcgaaaagcgagattcttgcaatcgcgaactcttaatcccatactattgttacaatgattaagcagcaaaaatatgcattataatgtttcagggctactttgaacagagaaattagacagcaggttggcgtacagaatagaaacgagtggaaattgaatttaatgtttacggcacaactgaagatctcttttaattacaggtcttggatgtatttatattctttaaaaataaaacaaaaacaaatttaaacagatggtagaaaactacgaagctcctcttacctgaacgcgcggagagagaacccgataggttagcgtagcatcgatccgatgtgtttgctgatgaatggaagctagggttaagtgaaggtgcctatgatttgaaatcattccaagtttttgaagggaagacggactgcagcctctgccatgttggaatttcaaacccaaaacagctgcttggaaggagccagcatgccagaggctgggcgcaggcgcagagcgccgcagagccaaattcaaatcactttcacactaagagccaaagatcagttttcaaaggagagagggagaaagagacggaggctgccgtgagggagagaagacgggaggcagtggcgagaggcgggcagtggagagagacgggcagcgggaggaccaggagggagagggagaggcgcacggagcccgcggagctggagggggagaaagggaggcgggaggcgagccggcgagcgagctagagacgcgccagagattcatgggcagggagggctcaatggccgcgccgcgccggccggccggccgctcgggtcatgttacacggccggggccgcggcggccgcccagcctcgccgatgcgctcacgcggcccggagggggccccgaggtcatgattacgcgcgcggggactcgcagctctccctgcacgcactctctggcggcccagcctggggaaaggggagcagcgccgtagggggaagggggctttctttcccacgcgtgaccagccggcccctgcgctccccggcctgcgttggagggcccgggacagagccgcgctgctccccggcccgcgggctcttccctgccggttcccggccctctcgacagctgcggcccgtccgcccttccccaccccctctgcgcacgggacgggatctggtctcgagagcctggacctcaccggcaccctccccggggcccccagcaccagccagaaaacgacttgatctgcttagaagaggcaacttcggggagaaaattcgcgttcgcccagttcccctcccccgcctccctgtgaataaataaaatcctaagtgtctaggtgtgcggtcccctctcgcgctccctggctcccctccctacctcccccaggcggctcgggctggagaaagcagcgcccggggggccctggtgtcggcggctggtgcgcaggcatagacgttaggcttctgccttcccaacccccctctatggagtaatctggggacccaggagtgggaagagagtaggggctttgtggtgctgggagccgaggaagaatgaaatgtgcagttgagtgtgttgctcgcatcccagggagcaatgcagtgctgattgtctgttgctgagatagccttttgttcggaacataaggtttaagaaacacacacacgttttctggggtctcttgttagatgtaaatgtgcggcatccagacgcttactatgcagtgtaagctcagttggtttactaatcaccccgccccacccgcaaacaatcaggatcatttgaatgggaacctcattcagacttctaggctgagagtattgccttcaacctatttcattctagactagccaaccatccaactgagataataaagcaaacaataacatttgatcatgatgtctacgagataatgtgcccggcaaagttctttaggaattgtaatgagaaagagagtgaattgggtcataatttctcttcgttttcattaaatatgactttaatagataaatggtgagtttatactttggcctggtagacatccagtcttctatatttcaacgaagctaagaatgaaagaggcaaattatatattccaccaggagcccatcaagctgaaaatgttacctttgaaggttggaaccgaaaatgcacttgctgaggactgaccctcctcataagggtgttcacatttcccccagcttctctgttgtagatttgatagcctaaattgcagctctccagatgctgaaatgcagctctttaaaaatgccaaatatatactttgaaattaattccattcaccttttatgatgttcttacctttgaatggatgcctttagctaacacactgagaaataaaaattatttcagttaaatctaggcagatgacagaatttaaaagacaaaaaaagagtgattcgagatcctaagaaatatttctaagcaatgagatttc

SEQ ID NO: 3005 - DNA, 4001 bp, Homo sapiens
gtaagagtttgccagaggaagtgaaaaaacaccatctgggaagagggaacaacatgtaacatgttcaaaggccctcagtccagcaatagcgggaaccctgtctgtttcaactgtgtcaccttagggcctagcacacacgttcaataaatatttgctgaacgagtggtgtgtttgacaacttgcaggcagcttgggaaagctggaggaaaaagttagtggtgggcttaggacaggtggtgagagatgaagctctagtgtggaagatgagaatagaccatagcaccaaaggcccctcctgggggagagggaagaatcattaaaacatcttctgcctgagggaggggcatagtcaaacatgcattttttttcttttttttttttgagatagagtcttgctctgtcacccaggctggagtgcaatggcacaatctcagctcactgcaacctctggctcccagggtcaagtgattctcctgccccagcctcccgagtagctgggattacaggtgcgtaccaccatgcccagctaatttttgtatttttagtagagacggggtttcaacatgttggtcaggctggtctcgaactcctgaccttgtgatccgcccgcctcagcctcccaaagtgctgggattacaggcgtgagccactgcattttaagaagagtcttcaggctatgatatagaaagggagtgaatatgagattggggacgagattgaaagcagggaggagagactgaagatggggagattagctcaggggctgctgagggatgaaaaggcctcagggagatgctttctgggacccagcagcaatgtttcctgcgtgggcaaagaagcctgtactccaggggatatctgaagtagtggctgggattggacaaggaagatggcctggagccaagaagttatccaatttcctggggaggggagctgttcatattaataatatctgatatgaagtttgcccatcaaaccctgcagacaatgggggctttggtattaattaaatttcaagaaataaagaaatggctattccttgcacacccagacccagtaatacaaggacttgggaaagtgagacacggaagggggataaagaggatcacttaggagagaaggtgggaagcgagagttctgttttggacttgctgaccagggagcaccctgggacgtccagggagaggttcggccgtaggtcgcagggctgggcttagaagcttcaatgtggaggccatgggagtggacagggtggccagggagtctgaaagcggcggcaggataaagcgagatccggaagcgggcaagggagcgcttcccccttccccagcctgggtctgtccccacagccgctcacagcccggcccgcagggaagcgaccgaggggaggcccggcgggggacgcgctaggaggaggtccccgagcagcgggtatccgagagcaggtcctgctttccagagctcgccgagtagggcagggaaagcgaagccgaaacccaggctggggtatcagcagcagcggataaccgaacgactgcagccgcgacaggagaagcccggggcggtggcgggccgcagacccccgcctccgggccgcagacccccgcctccgagctgccgcctacattcccctaggtgagcgcggaagaggatggcggaggatggtctcctagacccccaagaatcccgtccggcgtctccgcctgccttccccatccagccccccgacccttcagcaccctccacgccacctccgaatcagacccccgccctccgggctccgccccgggacccctcccctcccctggctccggagggagcccggtaccgtctccgggggagatggtctcgatctccacgcccatagcggtcccacaggccccgcctctggggggtccctgctgctgcccgaccccggctcggctccggccccagccccgccgtcgctccggctcgcctcctcgccgccactgcagagccggaggaggtgcggctggagtcgggacctgcgcggggaggggccactggcaagggggcggcggggcggagccgcgcggaaaggtggggtcggccggggcggggcccgggggaagggaccccgcccggctgttagcgagcctggccccgcctgacgacattaacccactgaccagggagcgtggtaagcacaaccacatcctccatccatccattcattcgcgcatccgtccaatagacatttatttagcatctaatctgtagtaagctctgggaagtcaacccagtcctacagacttgtggggggtggggggcagaaggggcaaaggccggcgattaaaccatcattttatttttatttttattttagacagaggatcttgctctgtcgcccaggctggagtccagtggcgcgatcatagctcacagcaacctcgaactcttaggctcaagcgatccttcttcctcagcctccacccaagtagctgggactagaggcgcgagcaaccacgcccagctaatcttttattttttatttttattttttgtagaaacggggtctcgctgtgttgctatctaatgaaaccatcactttaattagatgcgctcagtgccgtgcagttcagagcgttgcggaagcacagaagaggttcctaccctcgctaggcgtcctggatctgtaggagcagagctgggggagggagggaggacaccagtaattgctgactctcccccatacccctaaacccctgttctccatctcgtgtagttctgctcgacgcacatttattgggtactcaattttcaaggcaaagaaatgcgccctggggataccaatagaattaagacaggttggctgtcttccaggtactaagtctgagagggacggggacacacagttactgcatggagtgattagtgctgtggaatgaatgaatgaatatgtaaatgaattctactttgagttcctcctccaccaaaaaatacattcaggaatctagaaaaatattttttggaggaggtaatatttgtttaaagggtaattgggacttttaaaattttttccccctcattattacctgcattgttccaaaaattgatgtgaggccaagtatatcaatttttggaacaatggctcacacctgtaatctcaacactgtaggagaccgaggcaggaggattgcttgagcctagaagttcaagaccagcctgggtaacatagcgagatcccgtctctctctctctccttttttttttttttttttttgagacagaatcttcactctgtcgccaggatggagtgcagtggcacaatctcggctcactgcaacctccgcctcccaggttcaagcgattctcgtgcctcagtctcccaagtagctgggattacaggcgtgagacaccagcgttcggctaatttttaaatttttagtagagacagggtttcaccatgttggccaggctggtctcgaactcccgacctcaggttatccgcccgcctcagcctcccaaagtgctgggattacaggcatgccatctttatttttaaaaaaagaaaagaaaagaaaaagaaaaacataaaaactgatgtgaagatatgattctcctgagtggcactggaagataggcatggggagaaaagcctggcaaactggtccagaatgagccccaagggtgttcttcctccatttcctcatccccactctcccggatgcttaggtcccagatgaggttgtctgcatccctgaaggtgttctggctgtgttgttaaagaaagatgattgtcgactgtactgtgagggtcaggacctggaattcctcataggtctgaagaagcctaagggacgcactaaatccataggctgcggccagagcaggcacgcttagggtcggggtagaacagggatttgtagctgggacaggcccatgcagcggcttcagctcaatgcacagtattttgtgtacagataagaacattttcctgagagattttatcagattttaaagaaggttaaaaagccgtg

SEQ ID NO: 3006 - DNA, 4001 bp, Homo sapiens
ttagcataatgtcctcaaggctgatacatgttggtgcatgtctcagaattttcttcctttttaaggctgaataatattccatttcattttttttttttttttttttgtagagcagggtcttgctgttgctcaggctggtcctggcctcaagtgattctaccaccttggcctcccaaagtgttgggattacaggcatgagccactgtgcctggcttccatatatgcatgtattcattttgtttatccatttctctatgtatggacatgtggcttgcttccatctcttgtctattgtacatggctgctatgagcatggctgtacaaatatttctttgagactgtgctttcaattctttcagacctatatacccagaaatctattaatcattttttaaatataactaaaacaagaaattaaaattaaacatcttaccatagccttcctttccgtatgcaaatgaagggggtataactacttttcgcttttctccagggcacatatctgtcatagcaatgtctaggccttttatgacttgcccaacaccaagaacaaaccatttggggtggccttcattttgtgtccggctataacaaaaagcaatacttaagtaaactgatttcaagaaatcaaacttgaaaatacagctgggcatttaaaattggagtcctctctaaccatcattcccatataatcactctttctaaaacccttaatggggtgtttgactcaaacttccctataatcaccagaaagaagtatgatttgcccaaagttaatcattaacagccatctcattttttaaaattgttatctttacaaaaactattcaacagttaactttttaatgggtctccagcccctaactaggtgcatggcttgtacaaagaactcatttaactccctgggtttgttgtaaaaaaatgatagggcagttttagcctcaaaaagtcattttaatagtaatttaaaatggtatattttcttattaaattctaatgatataatttattaaattcttattaaattataaaattgtataaattcttattaaatttctctattttattctaaatggatggaactgtttttcccagtcctatctttacagggtaaagaaaagattctccctctgagtaataagccatcaattaaatcagagtaggcaccaggtggaatgagggagcagggcccaccagaagtcaccagggaagtaactgtttttcttgatagaaagtggccacaacctataaaaatcgtgcttctgaaggccagaattaaatctctttattccatgtattcctccgtaaagactcaatacttctggcaagggaaaaatgtgaacatccttataggcagaaccttgatttaattctggaggtcccaagggtaatggtggtggttgatgtgtgtgtggatgtatcgtatttttgataatttattgccacaacattttcaatactttaaataaaaatattcagtttattagagaaacactgccatataatgtgattttttttaatgaataaagggctcaacttttaccgttaaaaaataaaaccccaaccaaccaaccaatgaggcttccgcttggtggaggcaggcaagattttgtgcaactggacgcacgggcagctcgcagcatttcctacctgcagtagaatttcgagccgtctttagccaggtagccgtcataatgggcatttagtaggtctcccttcttgcttgtcttagagcagttttctggacgatgcaaaacttctattttcacttcttcggtgctctcctctttcttttgtctctgagcagtaaaaaggccccacagataaaagaaaacaatgaatctgaataagaaatgcatggtttttggcatcggctccagcagaacactgctctccctcccgcgtgtcactcgcgccccgtggatgtcccgcggccgagttccgacgcgtggcaggcgttgtcctgcgtcacaaagggccggggcggggccatagatgcggccccgccctctcatggccccaacccctccgcctcccgcagcgggctcagcgcggttaacgctgtttctaggccctcgggctggctgtcctcagtctttaagatcgcaacgcacactcgctccgcttcttctcgctaaacccgcgtattttacagcaggtttcctcagggttcggtgacaacattcgcattttctaaaatgaaactggcataagacgaaataaacagcctgggatgtcgtagagtcagggaatatggttgtcatttctggaagcaaaaggcttctaagacccctagggaacgagcagatagatactggggggagggagaggcatgctggaaaaggagcgtaaaaaataggctggcggtggctttctgggtgcttcggaggtgtccttgaagcgcattctcaggtcggaatcttgcattcagaggttccaggctgagtcgcacaacctgaaggccagcccgatgcaacgaaactgcggtaccgcaactcctctgcctggctgcaggcgtttccgagagccgacctccacaattcagcatcctccgctggcttgcatttcttttccccgccactcggggccgcccttgattcgagggcctctggtagtgcggggaatgttcttttgacttttttgtaccatcccatgggatacgtaattgtccacatcagtcaagaaaacttgagtattgggcatgttgtcccaatctcacagctaatacgcagcagggatttggtcaaatctgtgtgacaacaccacttcaccaccaattttagtatgaaaacctttaaaatacacagaaagttgaattctacagtaaactctcctacacccaccatctggatcctgtcattgaactatattatatttattacatatccatccatcactctatccatccatcaattcgccttgtttccaagtgaatacccaaagactacccaaaccagaaaaccagcaaaggccttctgcattcgcctggattaagttctgggagtagaggtgctattctacctcggtgatgcgaagaaaagccgcagcactgagcctgattgatgtgctttgcttaaagtttgcaaaattccataaacctgaaaattactgtcgattatgcaagatgacaattgcgtccaagcaggagtttcaaaaatcataaaagctagggggaagtccccatttctagactaaaattccgaagtcgagttccatgttttatattctaaataaaattgtggctatccaaggttatcggcgtgatgacagttccttgggggccctcgccattccttgtcagaggaccccgtctgctgcacattgccttcctaggagataatttcagaccccttgaatatgaggaaaatacgaagcaaacagaaataggaaggcttttatgtatttttgaagaaaaaacaggattttatgtaaaataaaaacaggatttcatgaagaaacaggatattatgtatttctgaagaaaacccaggaaaacccgagagaactaagtgcccgcgggatgagtgtgcgggcagctcctccttaggtaggcaccggggctgcgcgcgcagcggagctcgaaggtcttgtcccccgggggcggtcagcctgggccttggcggccaaggggaaacttgggagcctcgggactgttggccaccggcccgtgggaggagtaaaggcggccctggctggcaggccgagggtgtgacgcgccggcccgccctcctcgcgcagcctccggctaggcggcgaggccgcaggccgcgcccgctccttcagccccgccgccggggaggggtttcccgggacgatccggcccctttcatccaggaagtgaaatcgacgtcggggtcaatgaaaacaaacggggagcccagggggaaggaaggcaggcgaggaagaggcagcgccggggcgccggagggagcagccgggctgcggaagcgcgagcaggaggccggtcgcgggcgcatttttgccgttgtcgcggccgccgc

SEQ ID NO: 3007 - DNA, 4001 bp, Homo sapiens
cttgagagttatgcctaggccgtttcatttcagtgtcccatcttgcacaacggtgggagcagctgtgggagatcacaggagatgcaaagcaacacaagcaacctcatctgtctccccgacggccacaccagagtttccaggtggcgggagagagagctcagttctcccaaagagcacacagctaacctgccatccagaacatcacttcccataccaaaccattcctttttcaaggcctgaaggcaggcaatttgaacgtcctgtagctgagcacacctcagaaaaccgatttttgatctagaactcgagtcctctgccaaagttctaagttttcatgaaaacaaaagaagaaaagaaaacccgcaggcaggcacaatcgttggctgcccggatcacgagtttcccttgctgcctagtcttgtggagtttagaggtaaccaactaggaaaagagaagtgtccaagtgtcaggagtaggaatgagcccaatctcgcctgtgtgtgtccctcccaacatcccttagaagaggctgggacactaaaactggtagtctgggggaccaacagcagtccagatcctggctggggcaagccgccacaccctctgcagctcacagcacaagcctcggctgggaggggcccagacactgtcccagcaggaaagggagaaagaggggagttttcagagtcctggatttgaggagctggaaagctgggagaagcggaatgcaggagggagcgggggacctggctgggcgtgcaagaggaggggaggggtcgcccgtgcagtcaggacagctcgcaacacgtccccgcaaaactccacatttttgtggtttaagatttaagtctagagggaacgcgctgaggttctccccggcctgggtttcagatgcccctgctcctcgccaagggccggggcgccgcactgctgtgggtctccgctttccctttcggggaagctccccttggccaagccgcgacgtgagccctccaagttcgcctccgctcaccgcccggcgcggcgcccgcggccggccacatgcgccccatctgccggggacttcgcaggtcccgggctggccgcccgagggatggtccgcaggggctcagggtgttttgttttgttttgttttgttttgttttttttaaaaaaaaagcctaagcggctcgccacctcctcctcccagcccgcgccaccttctcttcacgcccacgccgcacctcccgggcacacgcgccgtgaggtgcctctccagccagacaatgggttcgaggctggttgggcagccggccctgagcccccatccccatcccgggaccccgagagactgagcgcgggggactgccaggggggtgaagaggagtgctggggggccacaaaggggaaagcgggagcctccccctcgggaatggaggctcgctcccggcacggggtgaaggggaggggcgggggtcagctgcgccgcccggcccggggccccgggtccccgcgcccgaccgccgccgcgcacttaccagcacgatggcaaatcgctcctccagttcacctggctctggcatcggcagcttcaaaggcacgttgtgcgccctgaaatcggtctgctgcgaatccatgctccctgcgttgcccatgtcggcggcgcgccggggccgggggctgctccgggcccctagcgtgcgcgtcggaaatcagaacagctcccggcggtcggctgccgcccgcaggcgcgacctgcccggctccccgccctccgccgcgcccaggcgggtgtgcggcgcgcaccgctccctagcagcgctccaagccgagccgccccccggcctccctcatgctctccgccgccccagcgcggccccggcctcttttcctcgggaggggtagttggggcgctgggcgcctatgtgcatggtgctccgctggcacaccgccccctgccagagatcgcggcccccggcgcgtggtccctcctactcggccttctgccgggcccgcggccgccgctgacacttccagccctagccggccacggctgcgcctgcctggctagcacctggagcagacaaatgcagctccgcgctcccctacacaatgccacctctcgcccggcgcccggcccccgcccccggcccggctccgcccactcgccccgcggactgccgggacgcgtagtttctctccaaagtgtccgcgcgcagaaaccacgcctgctctagagcgccaggccgggttgggaccatttgcagcaaaggcgatccgtagtctctggagatagcatattgtcacttttgaccctcctcaccccaacagtggaatacttacatcgtgtatatcatgttgacacttggtaggcgggtctgaccatgacggaatcgaatcaatgaatgaaggaatgcatgccttctgattaaaattcagaaaatcgttgctgtttttaaaagatctagttcagtaaggaacttcgaaagcactggcaaagttctgtttcataaacgggggggtgggtccatgggtgcttgtttatcgttctttcttccatatatatgttctttggtgtgattgaaatgttttataaacagatgtataatttatgggtatatatagtcagaccctaggagctaggtaaggattcaattcaatttaaaaaaaaaacctgtcaaacacctattatgtatgggatattgtgttccttggtgggagaaaaaagagatttgccctgcgctggaatacttgccaatctagtgaaggaaaaaatgtacacacccatatttcatgtgagatggatataatgatagagtgttctgggagactttgggatgatctttggctgcagctctcttattccttcacagcagtcttgagcaaggtgtcttacagaaaagattggacctgactctgtcctctggggtgtatttcagactataactacccgttctgaaacctcggaaatagaaatagccttataagagactttagccaactgctcatgtgaatgttaagggcatacatctggttgacttgtggctgaacttctgcagttagtcctttcttagtttaaagcagtgtttcttaatcctagatgtgtatcagattcgcttgggaagctttttgttaaaactacacacaccttgggctctgcgtattatcagaatctccctaagctgagagccgaagcctgggccggtgtattttcaacaagctccccaggtgattttgatatgcaggtaaggttgttatccttttagtaaatagcaagtgtttctggacaaggtagtacaccaagattcaatcaaggacatttcattcatctttataaacttcaagatactttaaacatagtagacgcccaagaactatttgtggaattgacaagtgactttttccaaaagcatatgacacaaatacacacaaatacatcatgtatgttctattaaaccacttctagtctttaaagaatggagacagtataaataaattcaacttaaaattctgaataactgtaacctgtatttctaaagcagtgttgtatcaaagttaatagcaaatgtgttactgatctgagagaaaagcagggcggtttagatacacacacactccaaactaatgaaaatgagagagaaagaaagcagttcggaccaggtgaaacatttctgacccacaaatgtatttatttccttgtaatctctagacatatactttggatctgattgactcacaaaatcagcccacccagagggttgcccatctggataaaaaaggctggaattcttttctgcagttgagaaagcctttttgattacatttatgtctccctgcggctatatttctgccagtaaccaagacctttttctccccttacgtcttatcacatctagtctctctcataagctcacacttcgagggaagccaaggaaaaagtgtgcaaatctatgaaccaaaagaactttcctgccatttcaatgtttggaatctctaatatttggttgttatttgtgattatt

SEQ ID NO: 3008 - DNA, 4001 bp, Homo sapiens
tccagcctggtgacagagcaagactctgtctcaaaaacaaaacaaaacaaaaacaaacaaacaattcgaagatccccacctcccacaaggccttgacagttgttaatcctatgatttccattttcccctgatcagtgcttctctgacagagttgctataatttatgagaaaaatatcattggtcctaaaggaatgagaactttgaagtggctaatggttttgtgttaactgccgctgacaaatcattttacgatgtaagtccccaaagtgttttctggctcataaactaacagtttaagatttgagactgctttctaataaattaaaattttataagcaattttttttgtcggaggacacacaaaatctttcatttttctcatcaaaaactttgggagagtaaagcaaaaagaagactctaggaactaatttgggaaagattcgtttctttgttttaaaggtaaaagcatgtgaaaagcaaatataagcagtttttaaacttaagaggaaatgacaggtaattctattagaaaaatggtgtatgtatttttacttactaatgcaaagtttaacaattaccacttcatgtattaaaagatactaactatggggcttgttgtcacttaccttcaggtttactctcgcagttaaaacctcggcttcctccataacaagtacaaaccaacgcattgcctaggtaggtccgctcccactgttgatttatctgatagtgttttccattgtcataacaaccggctgcaaataattgaaggaaaacgttacatttgcatttctccttttcccaaaattatggaattttcttcatgtgaatattgacgtacatatttttttccttttaactttgctaaaagttatatacaatgatgtcatttccatctggccaggggtctacataaaaaagttggaaacattttggaaggcagacaattgaagtcacatttttaaaacatgcaaggaacttaaatattcttttggagtaatagtcaaaaaggacaactttaagcagctttctcaaagcaaaaggagggtgtgtctttgaaaaacggaaagaattccaacctctgttcttggtgaagtatcctgagcggccctaaagaggtctgaaccaattacatctcttccaagttagttagaaacaagacagctatttcaataccccctttccacccccatgttgaaaatatttgaccaattatttaacagaaggaaataagtagcagtaaggaccacactaatcccagacggaaaatttatagacatgcatcatttttctctttaaaggcaagttttggttaattcctagaaggacaatctgaacgtgcagaatttattagaacacgggaaagtcgcagagtcctcgtcctccaatgcacggtcttatcatcccaggccctcagaaccagcgtgctcaaaactcggtccttttgtgtgcacagctggtttctctcagtaaagcgcgcacacactcgcacacacgcgcgcgcacaaaacttcagccccaactttggtcggctttagggtcccatccctgaggcagcctgtttcagcccgcggtcagtactcacgcttgctttgactgacagccaccggggactggggctgaaccatttgctgagcctgcctcttgctcttcgaggctcccgtggagggcaccgctgtccccaggcactggacggccagcagcagcagcccgggccccggacccctaagcatgttgagacggtgggggagagacgcccgcaccgggaggcaagttgccaccaagtttgcttcccttcgcaacctgcgggaaaaatcccttctaatgcctcccgggggttgtcgcctccaagaaggtgggggccagagggtggggaaggggacgggtggagggacagaagggatgcagaggaccagagaagttgtggctgcaggtcccctcttcccgctcgcgcctggggttccctctcctccccctgtgcagcacagccggcgcgggcgtccgagcgccgggagccggggcttatatgggacggtcccctcccgcccctctggaggcccggggcgcgggggaggagagacccgccgggctgtccccgccccgccccaccccacccgcccgcccgcccgccggccgccgcagccgaccgcgcgccgattggcccgggctccgggtgacgtcacgggggactgtgggttcgcagcgaacaaaagagatgctgatggcccgccaggactggggcaagacaactttttttcggtttcctttgcggtcatcaaactttttaggggatgggggaagggatgggaagcggctgggaggaaagggagtggctggacttgtgtgaagcgaaggggttgcaagacgctcccccttcccttttcttttttattgggggtggtggtagtgtttgaggacattgcgtcacctctcttcggggtggagggggggaatctctgcttataggagtgtattttgtgaggaagaaaacccataaaatatccacgaccttgcagctgttaagaatccagacttttcagtcccagggcggggctgcctttccccccatcccgctccctttctttggactaaagggtactgactcgggactcccttattttgtcttcacagctccctgttcggacttcttcccttctcagcgctgtgcctgtctggctctgagaaagggccagcgggcgaacggggagcaaaggggaacagagacctttaatgagcttctactaagtaccgggagttccgcggggcgctttgcagatcccggggaagttcagagaatgaagttttcttttgcaaggacaaagtaacagtttacttttttacacatgcaggaaagccttcctttcctggggatgggacgcccgtttccactgaaagtgaaatcactgtgaacaacctgaaaattggaaagttggaccagctgtggggagagaaaggtcttcgtgtcctttcccacgttcaccgtgccagttacacacaaagcagagatttttttgcttgaatcattaaaagccgggtgggtggggggcaccctatgtactgtcttgccctccttcggcccctttctcacatttatttgccattttctttttgctgacaagttccattacagaatgccccctccatcccccgccgccagattttttatatttcaattgttatttactccaagagtgtggaaagttctcctttaagattcccccgccttgaactctaaactcagagtggaaagggaatctgaaaagtctctcatttagcaacacatcacatcagtcctttttgtcagataaacacaggcacaattgcttttaaagatcttcagaaggaggagtccaccacttccacagtagatccagagagacccgaactgaatgctttgccttctccttgtgttaggagttcagaggttccatttgctttaaaacacaagaagctactaataaaatatatttatttcggcaaggtacctattttctccaaaagtttcaccttcagtaattgccacaggagtaattagaactctgtgttctataaaatgcctgacacattaaagacacaaaattagcatttgtttttattcatgcaaggatttaaaaccaaaccaaaacaaagcaaaacacccagcaaatatcagtttcctacaaatagtgtaaaaaaacctcttgaggaatctttgtgacccacactccaaattgaaagagtgccatggatttccccaaatttagaatcctgtctgggttagaggatttttttggaatttctcatcacttgacaaaacagttttctcttttcaaatataaaagagctccttgtaaaatgcttggtaaatttctgggaagccgagtgtttcttccagagggaaggatacctggaaatccggatgtaagcaagataaacctgtagctaaagctttcttaaaattcattgattctgggggaaggaaataagtgattagaaaagtatttggtcaaccaaaaccatg

SEQ ID NO: 3009 - DNA, 4001 bp, Homo sapiens
ccttggcctcccaaagtgctgggattacaggcgtgagccactgtatctctcacttctttttctcctgacaacctttgccacctcacacctttactgagtccctggtcccctgtctagctgcttactcaccagcccacatgagcaacaccaccacaatgatgaccacttccccagtctgcagtggccgctctccatccagaccttccactgtgatgtcacctgagaagggagaaggcagaaggcagactccaggttactggggtccatactgcagacatgcaggatggagatgctggggattagaaagggtggacccatcataatgttgcccttggagtgtagggtagcccctccctgggaggaagccgttggtggacaggtggttagcgaccaaaaagcgggatggctgcaggttaattactcactcatgcaggctgcagctgatgtgaagttgggtaacaggaagcttaaaaggccttcccccaaacaactcaataccagcctgtctatacccaatccccttcccacctgcttttctttcctttcctggcagtacaatgaattaaatcatcctattcaactcagctagtctgttgcttgtcttggggaagtaagtaagaggctgcaagccaggtaagcagccagagaatccaatagcacagatcctcacctgggcttgaactgtttgaaggtagccggtcagaacccttgagagttcggaagtgcacccggggccctgggggactctctccccgaaggccgatgctcctgacctgcactgtgtagtcactgtcttcagccaggccccagagggcacaggcccgggtggtggtgttcacctcccgaatcacacgctgcccggggccattctgccgctgcagggagatgaggggagaggaggacagcctcaccccagtgccaggccacaaggctcaaccagagactcttcaacatccaagcactccgggggagtagcgtgaaaagggcagcctgagccaggatacgccagcttccagatcccccccacttaagtgaagaaatgtgccgaaatccaaggacacaggttgggggagcagaagggtgattcatacttgctgggaaatggagtagccaatgacgatgttgccttctgggacgtcccaggacacagtggccgagttggctctgaggtgagtgaccgtcacattcacaggagagggaggccggtctgcgggagccagggtgtttaacaggtttcacccattgactagctgtggttgaccctcagccccgttcccctttacttacctgctcgcacgaagcccaggtcacagctgaccagcaggaggaccgtggggcttagatatggggaaaggggcaccagcgaagccatgtccccacggagtccgctggggggggaactgtggcatccgcttggcatccgcttgacatccaggcggggctcctggagatggcaggagttgtggggggtcaaggactgcccagaacgcacggaggtcggggggcagcagctctcctgggctccccacagctcacaacagccctattttctctacgccctcccgcccccgcattgcccgggcggccccagagtgcggtccgccctgcccacacccacctccgccggtcctcgcggttggtcaggcctcggggggctgctcggtgcccagagggcggcccatcgcccgactcggtggcgctgcccctaccccatcccggcgcgggcccggcgacgcgggcagcgcggggccgagctgcgggcggagcgggcgcgggtctgcggagcccccagggctcgagcgggccacggagtctgtccgggagcagggggcgttgcccggacgctggcctgggtccccggtgcgggaggcagtgcggcggcctccgcccgcccctgcagcgggatgtgaccgtcccggagagccagccgccgccttctgcagcgctggccccgctcgctccgccgcagcccggccgggacgcgcgggcccgccccgcccagccggggttctcgccgccgtcattcccctcccgccccctcactcccgtcctctcggggctcctcccacgaccctcccaatggcgcctccggagcccccatcccttatcccttctctctcccagctgaagcggacgagtcggcgggggcgtggggggtgagacgcgggtgctagggtctccggcacctgggagatccccttcctccccgcgtggaagagccaagttgggaagaggaattccacctccagtgcccgaggggctaacaggagaggggagagagtgagggagataataattgctttaacaatcccttacttgtagactgcgtcagcttttaagtctcttttccattcataatctcatttaattccgttcgctttctcattcattctttcatttattcaccaaatatttattgagcatctcctatgtgtctggcattatattaaaacctggagatacagtgattgttaagagtgttgggcttctcgggagaatcaaagcgcaaagacctatggcttttttaaaaaaattattattcctttcttttctttttttgtttttctaaagctctaccacttacggtgtggttttggagaaactggtttatctgtgcttcaggtttcccacctgtaaagcaaagcgtgtgaaatctcacagggttgttgtgaggctcaaatgagacgggaaagatctttataaatctcacaacactatgtgactggatgatggagattaatttgcaccaatctgttagttacttctttgttcaataacatgtaagcccttacattatatcatgctttggttgagcttgaaatctgaattgagaacctgggtgtgagtcccaatttgtccagctgtgtgatcttaagcaaccaactaaactactctgagcctgtttcatcatctgaaaaatgagggtgtcaatattgaccaacatcttagtgttggtgtatccaatgagatactgtctgtgaaaagtgtgttgttcagtgtaaataaatgttggctaacattgtatttagggcagattctttggtttctaattctcaatgcagtatttctgtttctgtgggatttttcccgctgtaatatccagtacagtgtgtgcacacttggggctcagaagcttctactgccttcctttctgagaggagaggataaaatgggaccagtgggactgactgtgtgtgctgagcatgtgatcaagccatgggccaggtcctctgacttgtgctgacttggtgaccctgatctctggcctcggaggacacttgcccagggattctcactgccgtgggtgttgtcctgcactcccaggctccaggtcctctgtagaagagggcattgtcccggtagggcaagagtcccgagcctcaggtcttcctcttcaggggccaaagcagaggctggcgagtcagggtgcttgcaaagaggaagcccaggagtttccctggggttaccagagggctgggggcctagtgaccaggaaagggtggtgctctgagagcccagggtgcttgggttaatcatcactggggctcagataaggccctgccaactggaagcagagtcattgtgaccagaggggtttgtgtggctgaagaggcaggaggaacagtgtatccacagcgtgggaccatgccaggcacaaaacggtttcaacatgtcattgagaccccggagcctggcaagtgggaggtgagaccccttcttcatgttggctttctgtgctgattcctagaattatttttcatccagtcttccctccccgctggtttctgctcacctcttcttccttcctgatgttctttccctaatatgcccagagcaccaagtgcaggctgagtttctggtgtggtatgtgtgtgcgtgtgtgtaagtccaaactctgtgcctgctgccactcccacctccagctcagcaggcatgaatgaggctttggcttcctgctccatccttgtcccctcttccttctagttgtctgggtacgaggc

SEQ ID NO: 3010 - DNA, 4001 bp, Homo sapiens
aggccaaggccaccgccttatggagcatgagcatcccttgctgcagccaactatgctagactccacagatgctgaccacggtgggcttcatgttgtattgggcctgcgttaacccagctctctctcgagacagagcgggtgggggagctgcagcagagggcagacacgccatcagcacccccccgccaacagcaccttcctggtatttataaacacagagatcacacgcacaatccctccagtgcaaaccagtccggctgctttagaaacaagttgttttctgcttccagaaccacccaggagcctgcgtgatgtctcttcccccacccgaccccctcttccctctgccggtctccttgctccaggtacccccagaccctcaaggtgctccttcgttcctggggggcagtgcagcctcctgtccgtgatccttacagaagacgggtcggcgggggggcaggcaggcaggcagggggcacacaggcggcatgagccaaccaaggctggcttcttccttcctgaccttcgcacctgattcccagagcggcagccctcgccctcgctccagattacttgaaggagtccaaccatgtttctgggtccccaacccctttcagaaaggagttatgactgatggagaacggggaggagagagagagggctttcctgaaggaatagggtcccaggatgtcgagaggtgccagtgggtgcaaagattttcttgtctgtccaccacccagagagaagacgcggggcaggggtgggggggggggggcagacactggggagggggagtagttcttggaaggaggtaacaggctcctggtagggggcctacaattccaggagtctatctgggtaaaatataacgtgagaggaaaagggcatgttgtctcttcaagcccactctccaatcccctagtttaaaagggggtgggggggaaggggaggacgaaaatccagaacttacaacggtggcccgtaggtattttctcgccaagaaaaagaaaagaaagcaaaagaggcagtggcggcgagaagagggcaggggtccgcccgcgccgccaggtgcaccggggcccgcacctacctgctggccgccgccgccgctggagtaggactcggcgtgcgcaggagagccgctgctgccccgggacgaggtgtcaaagttcccgggataatcctggtacatgatccgcggtgggggccggagaggaaacagggtgtttttcttcccccgccctcgccgcggccgcgcaccggctgctgcgcgctcgttcgtccgccggccgcgccgcgggctctgggcttcgctcctgggtttctcccccaccgcggagggcgaggacagggaggcggcgacacctcaggaacagcgtcccccgagcgtcccttacagcacttctttccggctctgcgagcgccgcgggaccagttgtccacccgatccctccctctaaaaagtcggcgcgtctctcggtccctcccctgcgcgcgccctcccgcccccgcgcgcagccggagctcagcggggacccacggcccaatcaaaaattggaaattaaaaaaaagattaggagcccagcgagcctggcctgccagccctggggacccccgatttcagacagggccaaaaaggcggaaagaaaagctgtccgctgggagaaacttctgtttcttccttttagaaaaggagccggagaataaacttcccgtggccgactcgccgcccgagtttcggggcggctcggatacttgactaggagaaggcggcgtgcgcccgtcccgcggccccgagcgcgccagggggacagcggctcgtggggctcaagtagagctggcgctgagagggacgcggccccgctccccgctccggcgcccagacccgcaccccttccccggagcccgctcccggacgggcccgcctcgcccggccgcgcctctccctctctctctctctctctctccctctttctgtccccgccgagcgccgctcgttcgctcgctcgctggttcgctcggagccctagcgctctgcccgagatgagtcactacaatggcacgagttcaactcacactctttattctccagccctgtaccatgtggattcactcacgtcaaccccagactccaccttgcagggaggagcgcacgaggaggcggggggaggaggccgcggaggaggaagaggcgcgggaggggaggaggcgggcgcagctctcccctcccagccccggctcccggccgcgctgacgccaaccgcgcaccccgcgcgaggaagccaggcggtggcacgggcgggagcgggcgccacgcacggttcggaggcgccgaggcagccccggccctccccagtcccccgctcaccccccgggcccagcgcccttggtctgttccattggcgcacgttgccaaagatggtcatttgcgttagaggacgcgagtgcgggtttcctcgctttcgggtgacgtggagggagagggattccctcgcccgctcccgagtgcgctgcggcctctcccccgccctgggaaggggctcggggcggggccccgagagcggccgcgcgggtctcgcctccggattttagaaaataatcacagccctgacggcgagacgggcggttcggtgcggcgccaccgggaggccgggagccgggcgcgcagagccgctcgcagggagggcgcggctgcgcgcggtcgtaggcgccctccgcggcgccgccgagtgcagcgggcgccccgggcgcgcagggtgcccgcgccgccctgcggccgggtgttggcggggcacggcgccgggcggggctggcctgcctatttttccctccgtggcggtctgcctaccggttccctttttgttttttgtttttcatgttttcggtcctacagttaattcgttaggagtagccttgaagatgaaattaaccagtcaagacattccggccgccctatacgccgggcaattaggacgcatctaataagagtaatcgggcgtttataagcaaactccagactgttacgaattaaaaaaaaaaaaaaaaagccagcgagagggtgtgccccaacgttgtcgtcttcagctgttttggagcgaagttcagggcgcgggttgccggacatttgggtcctcctccctcgctgggcggggctgggaggggcgcggcgcagggtacagagcacagaccttagagcaggaacgcccggctacgctatttacgagctgtgagatcttggacgaattccttaacctctctgggcctcagtttcctcctataaagtgaaggagtttggagacatgaccttaggcccttctctgctctggagctccaatccttccgctgagatgatggtgtgtgtgaatggagaagtactgtagcggaagtcagggaacttaggttttggtccagggtctgtgttagcctcagtttacccaattcttaagtagcgccagccatctgtaccccacagggtccttatgaggacccaatgttaagaggtgttgagagtccattgctgacaactcgctgtgcaccgtcacacaacttctgtcctcagtttccttatctgcaaagtgggggtgttggtagcagagaaaaatagagccgggaacgcgaagctttcctggggctctatataaagcgctggcatttccgggacggctggcggcatctggccgccccaagggccccaagatacggtaatcccaaacaatactcggggtcattgtttacagctataaaacacattctgtcctgaacgctatccccaaggacgcgcgcgcgtgcgcgacgaggcgaggccagccagactcctcgcacctccgctgctgcccgctggacagagtccccaactccgcaggcccaggagaggggtgtggggcaggcggacgcgcgcgccggccgtgggtgctttgcttttttcttccccctccccatccctgcgtcctggcttgcctgggtgtttacgcgcctctcccagcaggactgagtaaatgcag

SEQ ID NO: 3011 - DNA, 4001 bp, Homo sapiens
aaagatggcacgtcagacacacagataagaaatcaatgttctgaaattaatatcctacttacattaaacatccctatcaggaagacacagagagtagaagcattttgcactagacttaggaataacacttccagttccaaggaagtgaagaagggggaacatgtttggcatcggaggctgtgtttttgtttgcttgcttgtttttcttctaatgccagaacaaaataccccactcacgttcatagtaccccaggaaatgtgcaaatccggaaagccacagaagccacagccgaaggcaagaaaagatgacttgacgccctgcgaaggttacgttcaggtggtttttagaggaacgtaatccagctgtttctttctaaccattttgcagggaacagaagttcgtgtttgctctccagcaggattcagatgcacacgcccagtatgggccgcgcaaggtggagtgagcagctgcggatcgctccccactcccacctggctctaggagggccctgcggacttggccagggaactgggcgtgggcgatactaaaaaaactggtgaggtcccctctccgcccaaaggggcagccagcgatgtcagcctagagccctctgccaccgcctgataccgcagcagcgccgacgcggccgacaggtgcccgcccagcaccgcgcccttggtgggagcgcagccgttggcgcagtcctcctcctgatgctgctgctgttgctgcaaaattgtccgacaggcttgacggtcgctggagcagggggcagtagctccacgcggtcggggacaaactctgcgcagcccctgtacccgctcccctgaccccttgcatgatactctcaatgctgaaagagatgcatccgcctcccggtggcgacgccagacccttgccctcctcccaaggctgaggaccaagtgagggctgcagcacgggaagggtgccgggggtcgccaggtccgcgccttctgctttcttcggtgccccggcataggcgggggccgagagcagtaggtagcgaggaggatgcgggtgcagcagagcgtaagggcgtctcccgggggcggtgttggggtaggcccccgggactggctgcggcagggcaggggccccaagcagagggcctgggcgggggttgtgcagggcggcgtgtgcagcaggtagagggaaggggtggggcaggtgggctcccggggtcagttggtggcgcttgaaacgcttcctacgccggagaaagctgccattgtcgaacatgtcctgggaggcggggtccaggctccagtaggtgcccttgcctgggtggcccggctcgcgggggatcttgacgaagcagtcgttcagcgagaggttgtggcggatgctgttctgccaggcggggaacttgcggcggtagtaggggaagcggccactaatgaaggcgcagatgccgctgagcgtgaggcgcttgtgcgggctttgcaggatggccatggtgatgagcgcgatgtacgagtaggggggctttgccggctgccgggcatcttcagaggccgccgcagaccttggcggtgccctgaactcggtgccaaactctgaggggtcgctcgggccgccgccctcgatgtgctctcggggaagcgcaaccccgccccaccgggccacctgcagccccggctggagcgactgctctaggaacttctggctcgcctcctcctcctcgtcttccacctcgtcttcatcttcctcctctcccaggacatcgattttaccgtcttccccatcggagtcccggaggctgcgctgcggtgtggagcgagggcgctcagctcttggcaggttcatggcggagcaggtgcttcagtcgcaggggatgtggcggccgatcacctggcccggggcgggctgagctggaagcctgggatgaatgttgcaagaagcaggaacgctagtggttaccctttgggatgttttcctctgcttgtttctactcctttgcaacaacgtccggcaaagatgcctttgccttttataaaagcttcttcaagaccatgtgtggtggactcccccctttataacccttcttcccctacctcggagcggtgccacttcctcctaacgtagtccagggatgatggtcttctgggcaaacaccgtccggagaaaagcccagccccctcctcctcgcacccacctgccaccaaggaagatgctctactcatccggtgcagccagacaagtaggcaagcctttgcacgggttctgttaaggcgcatttaaacccgcgcaaataaaagcgaggtaggaaagtaggatactcaacattctacgaccatctcgacatgcagccttccctcctggagaaaagaaatggtggggcaggaggctgaaatgtacacggttgtttgtaaaggaatgtgtaaccgtaaaagtatgtttttgtgtttcacagctggtaatcacccattttcattggtagagtctgtccttacccagaatggtgagctgaattatatttaaggttctgacaatattcccaggcttcaggggggtgttgctttgctccttctaccttccttcccacctccccaagatgctctcccctgactcaaattttcagaaaaggttcaaatgtcccagcactaaattgtgtaagtttattcagggaaggcaggagagctcacacggagtcctctgtccccttgtagcaatggttctccaatttctttgaatatttaaccacagaaatacattttatatcacaatcttacacatacagacataatacataactaagatggctttcacgaaacaatatacttacactatagtgatcactgatatttccttttaaaaaaaaatggccataaccaactaaattgatttcacacataccagtatgggcccagtttgaaaaatcctgttcttacaaagtggccccacatacaagaaatgcacccactctataagggcttctctctctccctttcctccttcctttcttcatcctttataaccaattcatttttagagacagggtctatgttgcacaggctggctttgaattcctgggctcaagtgatcctcccgcctcagcctcctgagtaggtgggactacaggcgtgccactatgcctggctctggctcttcattctttttttcctttttttttttttttttttttttgagacgttgtcgctctgtcgcccaggctggagtgcagtgacacaatctcggaccactgcaagctccgcctcccgggttcacgccattctcccgcctcagcctcccgagtagctgggaccacaggcgcccgccactacgcccggctaatttttttgtatttttagtagagacggggtttcaccgtgttagccaggatggtctcgatgtcctgacctcatgatccgcttgcctcagcctcccaaagtgctgggattacaggcgtgagccaccgcgcccggcctcttcattctttcagaaatgtcaacattaagtgcttttactgtaataaaacttgggacttcaatgaggcaagaaggggctgcagtgttgcctttaaatcagtgggtcctcattcactgtctgcactggggaggggcaatatgacagcacaactgttcatctcactcgctccacatccttagaagtaacacgatttttagattggcttcatgaaaattagctcagagactaaagtagcactacagaggaataaaaaaaatatttgttatataaataaggatcttattaaaatactaagtaagatactatgccacggtatatattcataatttaaaacccacctacttgggaaaactttgaggtgccatctaataaaaatgcagcatgaaagaatattatgcccttgatagtcacatagtgtctataattatgacaacgaatgttcagtgagaaatcaaacgccaactgcaagggcaaaatataataaaaaatagcttaaagtagctagtgccttcaggataaaatctggaaaagagctttcttgctgatcttt

SEQ ID NO: 3012 - DNA, 4001 bp, Homo sapiens
ttcaataatatctccacctatctggatatgtatattgtgccacgttggtaccaacttttttgataaaaaactagccatagacccctgaccttttagagtgaagtctagagcagtttacacgacaatttacatgataatcttgggtggtacagaagccaaatccagaggatgcatcttctagaactgcataccctgcccaatacagtagccactagccacgcattattattgggcacttgaaatatggctagtcaaattgagatgtagtgtaaaatacacaagggattttgaagacttagtaccgagaaaataacaaagaatctcattagtaattttaatatttgttatatgttgaaacaatattttggattatttagtttgtatcgtatttccattggagagtgctggtctacagtgacttcagggatgagctcattctgagctccagaatagtcacataatttacacaaaatcctggatctctgtaatgtgcaactaaaatggtttcatctcttttctctttttcctatcacaatcccctttcctttccttgttctgggttccttctgaaaacctcaagtaggattctctgtttctctcttcttgttaatcatttctccacctctacctctcagagaaggttaacactcactccactgtaacacagacctcctcactccaggagcaattgggcttagaccagaacgcagcaaatatgggatattcatttctaaatttctaactagttaaggtacccaaactgcaatttgcagaacctctctgcttaaagttctcccatcccagacccccgtctcatgatgcccgtgccactatctctagaggtaggcatcgtacttgctctattcaggacacagcgaacctctctggaacccgatgaggaggaagtgcacctagggacagccgggctggaccccagttctcccaccgcgtcttctgcgaaacgtgatggaaatcccagctcacacggatccctttataaccatcccttatctgagagctcccttgtaagtagaccctcccttcaaaaggcctaaggaacaccacccaggggtagccttctgttctgggatacagatttttttcgtttctctaattggcccgcctctgcgaatgtggatgtaaaggtcaagctcctttctcactgagtcttccttccgaagatctcctgctccttccctttgtcctctgggttgggtggttattcctccatccgctcccacccgcagcctggacaagaagactcctggcagatcttccagccgcacaccgacccctgcgccggcccttgcgacccgcgtccgccctccccggctgggaagcacctgccagcggccctcacctgggtcgtcctcgtcgcggggcaccttcttgaagcagtcgttgagcgacaggttgtggcggatggagttctgccagccggccttgctgcgctggtagaaggggaagctatcggcgacgaactggtagatgtggctgagagtgagtttgcgctcgggcgcgctctgaatggccatggcgatgagcgccgaatacgagtagggcggccgcaccatcttcatcaggtcctcgcggctggccatggacagccagcccagctccccgggccccgcgggcgcggcgggcgaggcgggcgcggcgggcgcgggctgcgcgaagggccgctgagagcagccgaaggtgccggcggcaggcggtggctgcagaaagggcccggccgcggccccggggggcggcggcggcggcggagcgcccaggtacgcggcggcggctgcggcggcggcggagggcgggcctcccacgccgggcccgttgagccacaggtaggggttggcggcggcggccggcggcgcggcgtagtcggccagcccgtaaggcgccctggctgccgggggggcgcccggggcggcggcggtggcggcgggcgggggcaggccgggctgcgaatacactccgaagttgtcgccgcagtagagggccatgtcggcggccgtgggcggctgcggcgcggccgcggcgaggggcgagcggggctggtctcgccgctcgggcgagagcatccctttgggggccaaccctgcggctccgccttcacccgcgctgggcgcccggtgctccgggccggggtcgggcgggtgctagcggagcgcctgctagccggcctcttataaccgagcccggcgcggctcctcctgggccggcccggagcggggcggtggccgcgggcctgggctctccacgcccccgccacgccccacctgcccgcgcgcccaaacccggagcccgcccgccccgcccctaccgcccctctgcccgggcccgggagcgtctgggaggccggcgcctccaggtttcgggcaaaaagcagcaccccattcctagcccacgtttcttaacatcataataagtaaagccacgaatattaaagagaagataacccgaacagtacgaatgatttctaaaaagttaacttggggtggccgctcgggccacctgcctagtcatccttttggcttttctacctctttcctcctaaccttttgtgatcgagtcgcggaattcacgtccagtctcaaccgatcggcttccagtcgaaaataatcgatgtgatttacaacgctttggggtatacggtagaggttattaacaggcccgcttggcgtgtccccttctcctcggggattctgtgattggaggaacggaaatcagtgttgagtttttctaaccaaactgtaggttcgctcacattcgggaagcatttattcgttttctgtgcggtttgtacgggctttcgttgtgatttgttatcttcaaaaacataaaggtgaatgttttcaaagacatttaaataagtaccttcggaattagcattttaaacccgaaagtttcaaagttttaagtaatttaaactgtgcaagaagcgctcatttacaaaaacagcctcatctaacgggcaggtctatgacttgccctctacttttgctaagttttttaatgcgtctccctgcctgggaaacaaataaaacctgtaaaatactgtggcgacctcacgttccacgtaatcatcctcgattggctggaaacaacaatatgaaaattgtttattttactattaaaagtattcctaaatgtgttcttaatacgtgacaggtctgaggttttcatttaaccgagagggagagggcaaacgtttttttctatttgccaattgccgactggcagttcagaatatttaatcattcggaaacttcccttctcctccaaggcatttattttcatgatgaaattagttatgtattttggaggatttttttttcttctggtgtgtcacctcttgaaaatgaaatccaaaaatatttaatcagcaaatttggatacctaaaatgcaaattacacttcacatgtcactatttagtcgtcttttctgggaccagaaataaattattgtcaacactttaaagcactgtttctattcagtctcctggcaaatgctgtagaaaagaatagtgtttgtcttaattgtcttattttggttcaaggatctaaaatgttttcataatttagataagcccagtgttgtttgtttttttcttcctaaatggcctaaaatgaaatgaatttttttttaaataaggatgacaactatgaaaggaaattggaaattggaaaacttttttttttttttgagacgaagtcttgctctgttgtccagggtgcaatggcgcgatctcgggctcaccgcaacttccacctacggagttcaagcgattctcctgcctcagcctcctgagtagctgggattacaggcgcccgccaccacacccagctaatttttgtatttttagtagagatggggtttcaccatgttggccaggctgatctggaactcctgacctccgatgatccacccgcctcggtttctcaaagtgctgggattacaggcgtgagccacggcacccagcttggaaaacattttaaaataa

SEQ ID NO: 3013 - DNA, 4001 bp, Homo sapiens
ttatatattctaaaaattatatttcattctcttaaaatctgttcatgttaacgttcatattaacttcacatttttcaaaaaaagctttacaaagcacacatatacacaaatcaaatcactacttcatccctaaaaaagtattttcactggtaattttatttacgtatgtttagatcacaatttttatgtaaaaagaaaaaaatagatttttctaaaactatcaaaaagaaatccagataatgcaattacttctgattgcattagaatctctcattaatggttttgaaattcaagtaatattttttcccaaagttggcaaactccataatgcactactctattattccccatcactctatgatggtacctaataatgctgaggttttaaagatggatcaacaaaacagcagagaacggcaaaaaacgtcggtatacaccttaggagaactgcaaggtaacagaggtaagtcttaagattcggatggaacaggtacaggcatgaatggttcagcttctcccaccaagataaatgtacatgcgaggcgacagcacagttacaaagcccctggctaccagagaaacctcagcccctagtgccgctagcgcactctattacactcagccggccacgtggctgtcacaatcagaaaaaagataggagaaacaacttcaactaacctgtaaatacttaactgccctcctcccctcacctcggagttggggtaggagaaagaaagtctgtggtcatttctttgcacgctaaaactcttttttcccagtagggagaaaatgaagttcagagactgctgtaaaaagactttaaagcagaaatccagtgcaagaacactgcgagagtgtgggtcgtcagcgaagcagacaccccaactcccgagagatgcagtggaaaaagaggcattttgcaaaggtgcaaaagggggtggagttaagtagtggaggatggagcacggagcacatgggctgctttccgctaactaccaccgtcctgccgggttccacacaggctgctgctgcagtggggcaaacttgaaaggctgaaggcctcttccaccgcagacctctcaccttgccaggaaagaggactaaaaggcaaaggtaaccacggccccaaaggaggcggcgaacaggaagtgtccatattgcagcgctgaaacagtagctcccaagacagccaccctctgaggccccctcgaggcggtggaggggcgagagggtgccggggtcgctcccacacacacccgggacccgcctctgcccaccacaacgcccggccgcccccggcacctccccgtgcactacttggcggggcccagccagtcccaactggggccggacgaggactccgagcccgacatgtctcgctccacttcaagccagaggagggggcgttgcaaaggctccgaggtgcttggggtacttccctaacagcagattccagccccgagccgagccctgagggtccttggggccccctccacgccttcccggagagacgacacccctcgccgcggtttccgccgcgcgacagcccctcccgggcggtcattacctctcaggaaaaactcctaactcctcacaagccacactcccctcagttcgacatcccccggagcccacacaccacccgatacgcgcgccggggacacccccgcgccggcgcaaattcctcactggacaaaaatgtccgggcgcgtcacgggacagccgcctccgcgccccacgcctggcgcgggtcgctcgcgctgcctccgcgcccgggagctgcgccgcgggctggggcggggagcgccgaccctggaggggaccgctccgcccgggactcaccgtcagctcggccgggaggcgagggaccggccggggaagacacaatatggcagagcaccgcagctgttccctgcagcttccagcagtcgcctccgggaagacgcggcaaccagcaggcagcagcagctgcagtggcggccccggcagcaccacatccccctcccgctcgcttcctccccctccctccccttccccgctgccatggcaacgcggcgccaaggcgattagccccacccctccctccagtcccgcctcccgcgaccccgaggaagggggctcggccggcccctcccggttcccgcccacctcctaccgaagggaggggcctgggttccggctggctgcctggcacggcggctggggtgggggtgaaatgcagggtccggaagggcggggctcacacggaaagcagggtggaggcgctgtaggccggtgcgggtttagggctgagcagggcaggggaaagcgggaaaatgcaaaggcctcgcatgtccgaggaaggacctataggagtgcggcggaggcgcggcgcggccgctgagtggtcgaggaggcgcgggggcggggctaggctgccgcagggcagtacggccctcggtgcctgtgcccgggctgaggagaccttcctcgacaccccacgttatgtgggtttccgcaagaccttccgccattgcctgggctttgaaagcgctttaggaacggtaaagcattgctgtaacttaaagtagtgttactctggcttgactgaaatgttctgtggaaacaagtcactgtgtttgcagtagggaaaaaaagacttacggatcaaatccaaaatttaatgtgcataggatttacagaagctaaggacttcacatccattgtcatatccataataataacatagctttgccacacgaaatacaggagagctcatttaaacctgaatttcagaaaaatggagattttttttaaaaatataagaatatcccgtttgggttatacttcctgtttgttttggttcgttttactaaatctgagaaccctatctaactcatggaaactttacagatacggaaacggaggcttagaagtggaaactttacagatatggaaactgagacttagaaaaatgacccgtcaaaggtatgagaagtggcagcactaaggctctagtttgctacgaatatgatcctgataattaaatctctgagtttctctatcaatatcttcaaaaactagagtagtgatacctatctcacaaaggtgttgagtagactaaaagaaaaggtatacgaagcccggatactgactgagcatgttcactgtgtgtccaggctctgagtagaaggtgagctgtgtgtgaaacaagctacctgctgacaataaaacaagtcaggctgtggggctgatagctgcagaagaattatgggcatcagaatatatttttaaaatataaacatttgatcccgtcattccacagatggaacgctgcatttatataacttgtttagtcatctaccagtttcatttgtctttcttgcactgtcctggagggcctcacagctacattcggaggccacaaggcaaatgtacagtgtgcttcaattggaacaggagttgctgtgacttctcccttcggagcaatcactgttgcccactcatatggacatactgaaggaaattcttggaacgagggtgtagtagagagggagcaggggaaagaacgaagggaagattgaaagaagatggagccacaaaggagccatagcctcctcacacctcagtcttgttttatctctgccagccattgttgtggtggctactaacataatatatgttaatcttcttacaaattattttactaatatcttacttgatatattgaactttaattatctttctcctcattgctcttactccatctatgtatttatttattatttttattttttatttttttgagacagagtctcgctctgtcgcccaggctggagtgcggtggcgcaatctcggctcactgcaacctccgccacccgggttcaagtgattctcatgccccagcgtccggagtagctgggattacagcgtgcgccaacatgcccagctaatttttgtaattttagtagagataggatttcactgtattggcaaggctggtctcaaactcctgtgctcag

SEQ ID NO: 3014 - DNA, 4001 bp, Homo sapiens
atgcgcctagactgcgcaagttgaaagaggaaggaaagttgatgcccaagaaataaacagatggaggcaaccaagtcaacacatctaagaacagagttgttggggggtgggggatgtggtatgaaagaggaccactcatgaaaaaaaattgccttctttataaaatatatgaagggtaaaatttgaggttgggttagttggtagaagtaatactgagttagaattaaatggaccataatgaagtaggtttagttggggtcttaaagttacaaatgtcataattagactaaacactagtgagaaaacaacttgtgattgactccattaaatttagagctgcaataaagttttatggtagggaaagactgaaatgactgtggttggtgcacacacggaaaaggagcatgaaataaggtattaaagacaatttttttttcaaaacatgagagtggaataaggggtgagatttaaaataacattacgtgagtgtatgataacacgccttaaatataactcctttcatctgtatgccacttataaaatgacttgaaggcatgtgggcatgtgaaaagagctcagtaatttcagtctgccagctctatggcaagccacagaagctaattaacagtgcatagcaatgtttcacaattgtttcattctggaatggaagaacaatttatctcattgaaaggagggggaaatttaaggtgaaggtaattgctcaaactggatcttgagcaaacacatacccctaacatctgtcggttagagtaaggttattgaaattatcttggcatttttaattagaagaaaatggggcttcagttttctgtttcctccacacaatcttaacaagcatctaagacactaaagatacagaaacctgatgactgagattgcctgagaatcagcaaagaaaacccaatgattataaacacattttaaaagaaaaagagcatcactttacaaaatgtggctacttgcacatgtaaggagttgaagtgaaggattcctgtggagtagaagtgtgatgggtttggaatgcatggattgttttagaaagatcgcctattggaacacagtgccagagtgcatcagtttggaaggtgataaggtgagggtttttttgtttttgtttttgaaaaaagaagaaagaagaagaagggtctttgatagaggagcagttatgggagagattaagtgatccgaagagaaaaaaattagagagtaaaggctagtaacaaggactccaagaattgaggaggctgtagggtaagggaagggtgggccgtgtcaaaactcaccagctccgtccgcagtaacgatggcctcgggagagatgcacacgcccctgtcgtacactggcagctcctcgcaggccaggttctccggccacgagtggcggtacttgatgagtatgggctcacagccctgccgggcccgctcgcacacagacttacagggcttgatgggctcgtgctggaagtcaatggtgcagatgggcgcgtacatggcacagaggaagaagagcagatcggggctgcagtgggtgcccagcagaccttcgaactgctcgatggccaggatggcgttggcctgagtgctgtggtgcaggtggttgggcatcttagtcatgttccagggcagggacttgcacagggggatgcggacgggctcacaggctgcagcccgagccccgggcacccggagcaggcagagagcagccagggcaagcagcccggcccgcagcagcagcatccctcccgggctgccgcagaccatgatcccggcaggatggggcagggtgcagccgcgcagtggacgccaaaaggcccgctccgccgtctccgcctcccccgctgcaagtggacacaaggatctgggagcttctcctcccccggcaatcaccgcttccttggatcaaattcccccaatggggtcccacgagctttaccgagctccagccaccgcccctgccgcccaggctgctctttcccaacgtctaagccttcggaagcagcaacatctatttattcctctccctctggcagaagcatcagacttcgcagatcagtcagataagagggacacgagaggaggcgaggaagacataaaaacaaaagtagaattcagctgagagctagttggagctctggggtgtctcctcccctagatcacgcacacaaaaagatgctaaagaaagcattaaattccccaaagtgaggaggacagaggggttggggggaaggagggaggaaaagctcctaatgggagagaagggtgcagtaagagtttacaagtcctgtgtgggctaagagctgcggccgccgctgcggctgcgaccctggctggcaggagggacgctcaggaggagccccgcagggacgtctgtgcctctgcccgggcggctctgcactttcctacctcccgcctgagagggagctccgcccctggggcagtctctgccctccagtgccggctgctcttcccgagaatggagtgggcgcccggggaagagaaggcctgggagtcgcaggcggtggggtgcgaagccgtgcgagtgcgagaccccaagacagcgccgagtcgagcgcgccctcacactagggaacccgtctttggccccagaaacgagcccctagcccctcactgaagagcccaccccaattccctacggaaaagtccccctagttccccacttgggaacccacccgagaccctccttcctggaggtatttcctttaagcaaactacagcttttcctctgcaatcactggctctgcagaaagtcagacctggtggggggaaaggcttaagcaatgtcactttgtccaagtagcggaaaacacagacccctgcgagcaacggtggagccatatcaacccagagctagtgactacagaggtctccattttcaataactgcgggggaggaggtggggggaggattgcctttaaaaaaaaaaaaaaagagagagagaaacaaagaaatgctgttcatgactacaaataggccaccagaagcaaggaaaaggggttttttccttctattcccgccccccccacctagtggaattagaactcttgagctttgctccttaagggttaacgtggaaactaacagctctaatacacttggactttttttttctgattttgctcacggataacatggcagatattatttgttattctcagcaacaattctgcccgacacttaaaaaaaaagtgtaggaaaacgacatcacgcaggtaataatgatgattataacaacaatcaaaacctttccatccagatgagttcaatctggaggagaaaatggaaaacagatcccctcctggtctgcttcttccactaatgagctccctcttccccccacccccgccccactctaccctttcagcttatattgtaaatggaatgacctgcagaggccttcacactatgccctctcaatgggaaatcactgagcaaaaggattgccgaatgtcagaaaacacagccttcattgagaggagaaggaaacaaaacctgaaacaaaacaggaagtcacctttgctctgcatcactgaaatatttctctgcttcaatttagccatctctcaccgtccataacaagcagagaaatatgtccccacttcagagcacatagtgagatgctcattttcattccctagagtgacttgacagcacttataaaatgtcaatgctaacttgagttatggaattttatatctaaaatgatcataaacagcagtttgtgactgctgtaaatttttttggaaggaagtttgttccacttatggtggcgggggcggggaacaccagatggtagacagggagtcagttagtatacaaactttgcctggtctacaattatctagtgtcatgtaagagaacaaattcaaaaattgtacaaacgaatttaaaatgatttatcaagtaaaatttagaggaaaaacaactttaaaagacagtcaacattagaacattttgggact

SEQ ID NO: 3015 - DNA, 4001 bp, Homo sapiens
atcttttctcttttttggcctatgttttctctgcagaatgaaaaaagaaaatctctcttctgataaggagatttcagaaagcagacaggctagtgtgaaatcaccctaaaattaaaacttgtttgggtctgtttgttttatcaactggatgacactgcttgacccacatggaaacattggaaaaagtggagtaggtccaggagaggtggaaattagggtgtaggggtcatctatatcttttagtgttcacaacaattcaaccaagcaggttgtactaaaatggcttcagaaatgaggaacttgaggctcagaaggggttaagtaatcactgaaagtcacttaggaccaaatgacttataggagctcaggtacattggccttctcctgtgcttatatttacctaataaatcagactgtctttgtgcatgggcacattcttcagcataatcaggagtagctgtctaatctgagacagtgtagccaaaacacagagctggccagttattttccctgcctctgcagctgcctctggataaggactgaagacttgagatgttaaggggaaatgtggcaaacagaatcaatcaggtctgcaaggctgcaactcattgtccctgagtgaaaatctgaaatgcaacaccaacatgtttcagtgtcaatatggcaattggtgaactaaagagatgaccaccttcttcaattaaatgcaaatcatccacagctttaagtgacaaaggttgaaacaggcttctgtttaaaatccttgcaataaaaacacagagagtatctaaaatccctgagtcccaacttgccagttctcaggggaagcagtaactgaacaattacttcaggcttccctcactgttgctctaatggagtcagtcacagtgggttgggaaaacaaaacaaaacaaaacaaaacagtagactgtgagtcaaaaggcccgatttctacttttggctccatctcaactcatcacgagagtttggaaaatcctctttactcttcagacaccagattcctaatttgcaaaagaaagagagagtaggatggtgtctaaattcttggccaactctaggagtctacttcctgttaaaatagttaagtaaatttctaacttattaatcacatttttttccagttgtgtaaaagattatcctgtatttctccctctctctgtgtctttcctatctttctttctttcttcacaccttttctcttctctaccacctcctttttacacccaaaagcagaatctcagttcaggaattatttgctgctgccttcaaaacgacaaagactatggccttttagattcagtgtcctcgggagacataccttgtgtattctgcttagatcaaagctgcctttctgcctccaattctgggtctcctaagtttctactttgccttcattttccttttctggttccactaaagagagtatgaaacccaagagcaaatgcattgaaaagacaaaacttttccctttgcctttggattccggttctctgacactgccgttctctgacaaatgctgatacaaactctcatctaagattcttggaaagccacaggcaggagggttgggctggggagttagttgttttattcaggacttcggtcaaggggcagaaatatttcagtctaacagatatcagcctaatgtaaaaataataatagtacgcaatgcacaaatgccagccatgcagttgttccccctccctctgatactcacagttcaatggcattcctcgggaggtcagaaggaatctctgtcaccttgctctcttggcagagaaaaaccctgttagagcagtgacagatccgatgatgacatcctgagcccaagctcaggaatgccagcaaagagaccaggagcagggccataattatgcatccatccacctgatttcttcctgcatttgcagagaaaaacctccacagatctcagaagctccacacagtgcccttatgagaagagatctgacttgagaactggtagggtcatgtgacccaccaagggatgctttttttttttttttttgttacttccaggcaagataagctactctgttttccttcaagattgggtttcttacaccctgacctaaggcacacagcaaatagaaccattaggcatgtctggaatagtttgcattatttcattgcaaaagtctccttgctgttcaccattctcttctcaacagagtgacatgattgactttctccaaaaaagacacaacccacaatatgacacatcactaagaggggtactaataagtgaagggctgggaccttcagtcttcagcatcaatttcttcaaccagcccacctgagagaaaaccagcccttctgggttgcattcaatgatcctctttttttgctgtaattatgccaaaaatggcactattcagaaacaggcaggtgggttagcaaaccttaggcagatttccgtaggtgggaggtacttctgatagggttatctgtagcgataattgactgaactgagtgatctaagaaatgtgctatgtttccagtggggatttagtaaatgccagcacatccaccccctcgtgcatatcctgcctgccttctcgcatttccaggctctgaagattgcccttgccttttggcaattggcataaatgaatttatttaatctacgcttttaacttacttttaaaagttccctgaggtgacagcccagcacttttgttggcattcccctcctcgatggtgagggatctgaggaacgtttggcaacacttttagaaaagtggctttctactttcaattgtagaatctatgaagattaaaaggcagaatattctctaagatcctgcccacaacttattacctgctaaaattagtttcaatactatctttagataattagttgcataaaattgagcttcatgaaaatgttaaaaatacctacttatcccacccctccttccctctcccctgccttaccaaggaaaaccatgtaaagaatgattaaattattaagaaaaaaacagaagcaagtgatttggggggcaaagttgatccctagattttttctgggagcaactggtttattctaattctggaattggcagacaaaggcagtatctatatggacttcatatttttaacaaattggctaacatgaatggttaaattagtttgttcaacaactgatccaaggaattatagtctttcagatgtagaaggaagttaattcaatcaaccaactaatgcttaagtttaagtattcatattaatttaaacggattttctcatctgtacttgaataactccagtgacaagaaactcactaccaattaaaccttttacccaattcctctgccccataagtccccttctagcttttggagagctctgtaattagtcttagtataataagcagaaatctttttaaaattgagatttttattttaaatgctatgtcgtattcacaacttataggtaacataaatgtaatttattaagcataataatgcaacaaacaattgcgggctggagaataaaggacatagccagtcctgttgcatctacttagttgattttcctttattaccttcttgtgttcctatgcccaaggtgaccattaatctgaattttgtggttattatttcatttgttttgtaaaattaatcttgtcacaaaatgtatctccaaggaatatattatttaatttcttgcgtgtttttacatttttacaaagtctatcagtcttttagtagtattttgctgcttactattttacactaactagacattttaaagaaataaccatgttgttatgtgtacctgcagtttattaattttgtacctgttaggtatacctgtagtttattaatattatactactgtatgatattccattgcataaatataccataatttatgttttcattctcctgtaatttttaaaatcctgaggttgtgaaaatattattttatatcttctctaaaattttttagttttgctc

SEQ ID NO: 3016 - DNA, 4001 bp, Homo sapiens
tttctaagccacccagtctatggtacattgttataacagcctgaactgtataagacattaagcaagtatcaaataccaaggggttctatttatttctgatgacatcatagacattagaagggtaagtgggccacttagaattctttcttgtagaactttttgcaaaactgataaaagcaaccagtcaacaagaatgtactaaacctccttcagcattgactacttagtcaaaggctggggaggtttgggggtaggtgtggtgttaaggactaaaaacatgaaaaggcttaagggaagtacacactataatccagtatgattaactatggtttgtgtaagtgagatcacacaaatcaagggcaacgtgaactctaagcaaaaataagctaacgggggggctatcacagttcagagaatcttgatagctcagattcatagactggggagaagaagacaaggtatgccaggtttgggggcaaagttgacaaaatactgaagtattagcatggtatttatgggtaggtgtgaaagactcaacttgaagaagctgagcctctctggttggagacaatgctggatggaaaggctggggcaaattatggagtctcttcctcattgaggcagggctttctttcattaaagtaaggttaaagtactaaacatattaactcattttaagtcccactgtttcagttcttttttttttctttatgtgtaaaatagaattcaactcaaaacaaaataatgtttcccgtgaagagagtttggtccaagatactgtcagttaaaatcgtaacatatcattaaatggcagctatcactaataacctttcagcttctaaacatgtttctaagtacatcaaatcttactatataagtatatatgaagttttattataaggaatattaatatggtaccgtgaattgttaattaaggactaagaatctaaactttctggaatatgattatgtccaaaccattaagatgaaagtgcttcatatgcattctaaacaataccttcggtcagatgtgggattttctttttcctgtaaatgttgatgcaaattcctttaatgaattttgtatgatgcagcctttgagttaaacagcaagtagtaaagggtaaaggaaagaaagacgataaaaacttgttcaccttttcaccgaaattcgtagtatagaatacagcattgcttcctgggatcacaggcagcttgaccccgagaggtaggtccagtagctgagccggtccaacccctgcaaagtgggttttgtgcacgccctgtcagacacaattggagagttttgtctttccttttaggcagtattagtttagtttagaccaatctacttccattgcaaccaaagactccgaagaattatacaatcagggttcggggcatcctgaagtcctcccgttttccctggtcaccagctctcctggcgtcccgcgcctgccagttgcggccggtacagtccgagccaccgccaccgcccccgggcgccgcaagagggcagcctcctgacgggggacagttgggagcctcgcgacccgtgtgtggcgatccctgccccgctccccagcaggcctgcggccgccagagggcgacgccgcccagcttgcggccactcacgtctctgcactgctgggtgtccgcggccaggacgctggcgaccgtcttggtgacggcgactttggcaggcttggagcaggcgccgaggtacagctccatggccggcacagccccctcagccccttcctcacccgccccgctctccttctctagcaccccgttgtccctctgtccggacctgaccaggaatggccagagcccaacgacctcagccccgccccccgcgttccaggcttccaatggtagcggccccagaagggcggtggcctcctgaggggcggctcgcgccagcgcgtagagcgcccgcagagctgggaaaatcggtccgagaggcctgatctgagaggaccacagttgaaacttcatctttctctgaaaccatcacgccttagccaatcctaacgaaaacgtataagctttgttggtgggtaactggttaatttcccctggcttccaaggagccctgttccgttcaataaaaattcccgagtgattgtttttgcccattctacatcttcccccatatagaccacaccccatccccaggctcccacagcttcttcccacaccaggtccacaaggcagacgcgttggcttcctaaggggctcattgccttcctcctgcctcttctgtcccctaggtttccttctcctttctagcgccctttaccactctcccactgcctcctctctgctcctgcagcttgatcctatttccctctttctcctcaaccatccagccgaaatttataaagtgcttgacgcttctgggccagtcattgagctaagcactgggcaggacacagccgtgagtaaaatatggcccctgactgtaagaagctaactagactgggagtattctgagggcagagacagtatgtgtctaacccacctgttgtttagacttaacttcatactttctttggtccactgctgttctcttttatttctggcccgactagtaataacagttaccatttcttcagaatctactaacttccatatactgtgccaaacacccttttaaacatttatttattttagtagccttatcaataattactctttatttttcaaagattgaggaagactgacaattgctgttaaatggtggctcctgaggctgttttcttaatcagtgcactctgctctctttgttgtaattccacacatgtgcttaggactcttaaatttgaaatctaagcttgggatatagtctattgccagcttccatatggatatcccacaattgtcttaaattcaatctactcaaatctcaacacacaactttcaccaaaacaggaaaaaaaaacaaaggcttcttcctgcatttcctatctcagtgacaataccaaagtctacccaagccagaaactaaggaatgcttctagatacttctttttccccttatctcccatgtttagttggtccccaagtcccactaattttatcactaaaattaatttgcccgattctatctactcctactttactctcccggttaagccgctaatcattttttgtttgtttgtttgtttgcaccattgccacagccttataacatctccctgccaccatctaccccaaaaatccatcttgtatcaatttgatctttgatggcaaactgaccatttctcttcctcactttaaactcccaactgccctcagcgcaaagtgtgtaatggcctctgttacttggtctctgtatcagtttcttattgccagcaaatcaccacaaacttagtggcttaaattaccacaaatatattaccttacagtgatggaggttagtaatccaaagagaatctcactgggcagaaaccagtgtattggaagtgctgtgttctttctggaagctctagatcacaacctatgttcttgccctttccagcttctagaagttgcctcttcctcacacgttaaatctggcaatgtaacatcttcaaacctctctctgactcagacctctgctccttctcttctacaattaaagaatcattgtgattacattgggcccatctaggttatccatgctaatttatctatcttaagatcagctgattagcaaccttaattccattagcaatcttaattcctctttgctatgaaatattcacatactcagtcttgaaaatgaggacatagacatctttggggtactattatactacctctcacagccctgtttttgtccatctctgagacataactcccctgtaccacctctcagaattgaacctcaaatgacaccaaactgtttgtggttagttctctacatggggcctgcttattcatgcgtgattctgcatctttgtttatgctgtcccctctgcctgacagcccctttcaattcactgcttggctaa

SEQ ID NO: 3017 - DNA, 4001 bp, Homo sapiens
cgtcttggtgccgccctgcttgatgacgctgcggatgcggaagagcgacacgaagcccgccagcaggaagagcgtgcccaccagcaggtagagcaccagcgggcccagcacgaagccgcgcagcgagttcaggttctggttgcccacgtagcagatgccggccactgggtccccgtccacggagctcagcgccagtgccgtgatggacttgacgctggggatgagccacgcagccaggtggaagtactgcgcgtagcccgcgatggcctcgttgccccacttcatgccggcggccaggaaccaggtgagcgacaggatgacccaccagatggagctggccatgccgaagaagtagaccaggaggaagacgatggtgcacagtgcagggcccgtggtctcgtagtggatgtggttgtgctcgcggctgcaggccacgctggcatggcccacgaccagacgcaccaggaagcccagcgacacgcacaggtagcaggctgacaggaagatgatggggcgctcaggatagcggaagcgttccatgtcgatgaggaaggtggccactgtggtggacgtggagatgaagcacagcaccgaccacaggcctatccagaaggtggcgaacgtgcgctcgtcggcactgaaggacggctggtagcagggtaccgcgcagttgggcacctggcccgtccgcaccttgttgtagagcgggtgtgactccttcagaatgggcacgaagggctcgcgacacttgcacacgaacgggcccccagcggggcattcgccccccgaggccggcgcccctggcgggcctggaagggtgggcttggctgggaaaggcctggggggcgccgtggtggcctcgctgcggttgtaatccatgcagaggacctcggcgtcgcggcccagcaccgggaggcggtcgcagctcatgcgctcgggccaggcgaagccgtactggcgcatcagcggcgagcagccggccttggcgcgctcgcacaccgagcggcagggcggcagcggcttgtggtagtcgggcagacagatgggcgtgtacatagagcataggaagaagcgcaggtccggcgagcattggatctccaccagcggccagaactggtgcacctccaggcccgcctcgtcctgcgtgtcgtggttgaactggttgggcatgtgcgtcaggttgtagccgatgccgcggcacatgggcaccgtgatttcctggcacaccggggccttggacgcggcggccgcccggcccaccagctgcgctaggagcagcagcaacagcgagggcggcgcggatgggtcaggccgagccatcgccccctccctcccctcgcctccagcagcccgcgagggacgcacacaggcagaggaatccgggccggggcttctccctccggcgtctcgtgtgtggcgccggggctggcaacctgttggttgctttttcctttaaagaaaaccgtccaaagataaactgcttcgggaaggcgctgcctccgctggcagcgctccgctcctcgccggatagggctggggagagacggttagggctcggattccagggaaaggactctttaaaaaagaagggggagaagaaagattgcaaccactccctgttggagaggcgtcaacagttcggtccccgcgagctgtctccaaatctcttaagttaacccctttcctttcctccccgctccgcctcctgtaaccaaactaccgactcccccaccctctctttccaagctgggcccttcaggcagtgcccggagaccagaaccctcagcttcccggaaaagggcacaggaaacgggagaagaacagggagaaagggaaggttctcacctccacggatcccgccgagaagagcagacagtccccagccagcctgggtcctccgtccctgggtcactccgctgagaagcgcgactcagagccgggctggcgcccggaaagtttagcgacaggctgggtacccgtggcagcggcacatggcagcaggtgggggcgactcagagtggggggcgcccccagaacaggggcggcgcaggccggtcactcgccctctcctcctcgggagccccccgcatgatccagacggagccgggcaggggcaggccgtgcgttctccccggggccgggagccggacggagggcgagcgcgcctggcagcacctgggcgggaggaaggcgggaggcgggggccgtgggaccccgccgcctcacagcaccgcgagcagccggcgctggccaggccgggactgcatggtgagcgccggccgccgcgtcccgcccgccgctcgcctcctcccctgcagggggctccgcgctccagtggactcctgggggcggtggcgacgctctcgggacgtgccctgctcggctcctcccccgcgctctcgcaccctttcgcccacctctggcgagcacggaaccgcgcgcggcggcgaccacagcggactcacggccgcaggctggctgccctctcccgccccgcccgggtcacctgcttctaatgcccgccgggaagccccgccccggctccgccccctcaggcccgggcgcggttggtgggccgcctcgccaagctctccgcgcgtccccgcccactgccccgcgggctcggcctttcccccggcgccctctggccccgccaggagcgggcagccaaggagcgctgaccaatcgcgggcctggaggagatgggggcggggcgaatgctaatcatgccgctctgggcacccgggcgggaagcccttgccagaagtccctccggagttctctgcccgcgccctgggtgcaggactcgctcctgtaacttcctggcttatgcacctttgctcccagggcccctgccctttctgcctgcagctaagcgtccttacagagttcagtgcttctttgaaagaactgctcaaggaatcactcttaggcgtggctgtctcccttccgagctgtcttggaactgtgtgaaagaagagaggatacttactgagccctttactgtgtgcccaacaaagtgttaatcggttacatcctttttttttttttttttttttgagacgagttgttctgtctcccaggctggagtgcagtggcgcgatctcggctcactgcaacctctgtctcccgggttcaagcgattatcctgcctcagcctcctgcgtagctgggattactggcgcccgccaccacgcccagctaatttttgtatttttggtagagacgggctttcaccatgtaaggctgttctcgaactcctgacaccgtgatctgcccgcctcggcctcccaaaatgctgggattacaggtgtgagccaccgcgcccggcccgtttacatcttaagacaagatctcactccttacaacaattctgaggcaggtacttcctacaggtgaagaaaccgagactgagacttggccaaggcaaccgagctaatcatagttcccccaagaaagggcgacctcggcaagcaagttcacctccgtattccgatcacctggcacatagtagccgcccaaatggcaaccctgggattcgaacccaggtagttggtcagcggcactcaccatcgtagccgcccctccccccatactatcgcagcctccctggcttcgacctttacttttgcatctcttaacaaaatcttgttgtgacaagaaaatggatttctttctgcctttagaagacccagaaagatgtgagtcctttattggtcgaggtttataatcccaggcagttccgaagtcgcccgcagagagaagcgataccgacccagggttctgtgctgggcagggcgccggcctccccgtgcccttccgtccccggctgcctgctgctaagccgcgcacttgcgcgccgcggggggtcggagggcgcaccgatggcggggacacggcggcgctcttcagttgcgcaattatgctacaagttttaaatgtcctaaaaatgcctcttttctatgtgttgtaattagattggaagactgaggtatttagca

SEQ ID NO: 3018 - DNA, 4001 bp, Homo sapiens
ctgaaatcttttcatccaaaccgctttccacccaggtcttcttttccaaatcacccctcgccccaaatctgcaaagaacttctcacttccaggtcacttctcagtagagggggagaaagttacagaaacaggcccccacccagcagttcttttccctaccgtgcctctcctcttgcaagagggctggggtgggaaaggtggggaggggccggggctcataccgcagtctcccccttgctgctgtggctaagtctgtggtagaagcggcgccacgactgcagggtcttgcccgaccagatccagaagccagtggtgatgccgacgatcatggtcatcaggtacttgatcatgaagacggtgaagtcggggctcatgggcgggaagtggccgggcgggcagggcacggcatagctcttgcacgtctgcaggagccaggtgcgctcccagtgctcgcggaaggcctgctcgtagaagtagcaggccaggacgatggtggcgggcactgtgtagagcacgctgaagacgccgatgcgcaccatgagcttctccagcttctcggtcttggtgccgtcgtgtttcatgatggtgcggatacggaagagggacacgaagccggccagcaagaaggacgtgcctatgaagaggtagacgaacagaggcgccagcacgaagccccgcagcgcgtccacactggagaggccaacgtagcacaccccgctcagcaggtccccgtctacctggcccatggccaggatagtgatggtcttgacggcgggcacggcccacgcggccaggtggaagtactgcgagttggcctcgatggcctcgtggccccacttcatgccggccgccaggaaccaagtgagagacagaatgacccaccagatggagctggccatgccgaagaagtagagcaccatgaagaggatggtgcagccctccttcttggtgccctgcgccaccgtgcggtagccatcgtccgagaagcgctccacgcacacggcgcggtcctctagaaggaagccggccacgtgcgccacggccaccatgaagtagcagcccgacaggaagatgatgggccgctctgggtagctgaagcgccgcatgtccaccaggtaggtgagaacggtaaagagcgtcgaggcgcagcacagcacggaccacacgcccacccagaggcgggcgaagcgcctctcctcctccttaaagtacatcaggccgttggcacggcccggttcgcacggggcgccacaatcgcgctcacccaggaagcggtagcccaggtacgggggcaccttgagctgacgggggcatgagaaggggaaggcgggacgccccctgccatctgaggcccccgggggcagcgcggtgaagggcaggtccggcaggtagggcgcggtagggtaggcagtggggccgccgcctgggcccccggagccgtccgacgtgttctggcccacgcagatctcgcccgcaccgtgcaccgggaagttctcgcagcgcagccgctcgggccactggaagccgaacttgttcatgagcgcctcgcagccctggcgggcgcgctcgcacagagaacgacacggcgggatggcctgatcgagcacggtgcacacgggcgcatacatggagcataagaaaaagcggagttcgggagaacactgcaccttcaccagcgggtagaactggtgcacctcgaggcccgcgtcctcttggttcgtgtggcccagcaggttgggcaggatggtctggttgtaggcgatgtccgtgcacagcgggatggagatgggctggcagaagccgtggtccggcacggagatgcccttctctccgtggtacggctgcgccccggcgcccgcggacagtgcgcccagcagcgccagcaccagggcacagaggcccagggacgaaagcggagcggccgcgccggggtcccgcatcgccggccgcgagtgcagcggtgctctcagcctgaggagtgcgacgaggcggttgggagaggcttggatgcggggaggcgccgccgcgcccgacgcatgagagtcctcacggcgccggggccgggccgtgggcggcgtggagcaaagggcgctgccgcctgggtgcccgcgccgcgaaggcgccgcagacgccgccgccctgcactcgcagggccgccgggggcccaaaactcgtcagcctgggttgggggcgccgaggagggccgcctcgctctccccgcggggacgtaacggtgcggctccctccgccgcgaggagcaacaagcggctccggcacccttcaaagtttgcccaagactctggacccccggcgcaccgcagcgcgcacgccccccgcgcctggtccggtccccgctaggagaacccctgccgccgccgctcgctcgccccggccgccgcctccgcggtgctgccccgcctcctggcctcgaggctccgctcgtcgccgcctccttcgcctcctcctccacaccccgctccttcttcagccccaaaagctcggccccaagtttcagccaaacggccggctcttgctgagtccgatctcggccccggagtcgggagcacggcgagttctttttggaaacccagtcacactgcgtccgaaaccgcgaggcgctcgtgcccgcggcctggccccggcccctccagcccctcgcagccccagcagcgagtcctggcgcccgccgccgccgccgccgccgccgcccgccgggagtgagcgccgactaacgcctcggagtcgcgctggtcgccagaagaagcgtcgggctcgcggggttccgggccggcccgccccctcccgtcccctcccgtcccctcccctcccctcccctccccccccattcacaaaccactccgggggcggccccaggccccggcggcccaatggcggcctttgttttttcggtggccgccttcggattgggcggaagtcggaaggggcgggcgcgggagtggcggaggcggtgtccgcggcgctctgggcggattcctgaggggaggggcgggggactgggagggaaaagttcggaaaaacttttaccctgaattcgctcagggacgaaaacgcgcagaaagggaatttgcttcaaagatttgttcctcttcctggtgcactcagatgcgcattcctgagcaggggcgccttcgccagcggcgtttgaggggagcgaggaccgcgcagcgccccttcggggagagacgtgaccaggagtcgcgttaggactgcaaaggctggctctggcggggctttcgggtcgccgggtcctcaatgtggggtttgggacgggacgagaagggggtgcgccttgcggatcgcctctttccccccggacccaaagagtccacgcgaggccacagtcccctctcccctcccccgagttataaaaaggaggaggggccgcctccgaggagaaacccgagtcgggcggagggggccgagtgacggcgggaggaaggacccctcggaggaagggcccgaagcagggagagcggggaacccgggctcaggccaccccgcccgcgcgcacggcctggagtctggggaactggggtgactctagcgaggttttaaggaaacgaagacggcgttggggagactggttctagaagtaacctgagaccgagcgcccaggaacactctgtacgacgcgccgggcgtctcagtggccccgtgtgccttggttctgcggcgtgtgccctttcgggatcccatcttcgttgcagaagcaaccatttgatcctccatttagaatctgcgtaggaatgttttaatgcgtcttagaaaccaggctaattaaagagttttcaaaacacaaagcggggttatcctcgttctcgggtagcgttttctgattggcaaacgttcttttgttctcggttaaatcttcgtcttgagccaggcgctgggcgctcgcgcgcgctctctggttactcctgcgggggtcataagtcaccagggggcctctcccctctctccgggctgccaggaatatcagg

SEQ ID NO: 3019 - DNA, 4001 bp, Homo sapiens
gtacaatataacacattcttataaattaaaatgtaatttttaaatatatgtttcaaaaaactttttaaaacagtcttagaatcaactatcacaataaagattttatactcatacagaatcttacctagaataaaaaagaagtggcccaagaagcctacttgtgtacagagaaaaaatatgttttaaagagattgttctagggttagaaatagtctttactggctatagtaacattgagaagtccttacctttcttacagaagacttgtctactcctccctcattcgtgagatactcggaagacctatagtaactttgaaagttgcttagcagcagattaaccaacatttctaagatcttagtctagttccttgagaatttgttctagttaactgtttcttgttttagtatcaagtcattatattcttctgaaaagtaaacaccaaatatttaatcactgggggagttttctcccaatctaccctttcataaataacaaaatggaatttgagtattttttttgctttgcttcctcattagtaattttgattgttatgaagttttagcatcctcactcatgagattttctttactaccctatataatatcagttcctagatgataaccctgtgtaatgattctctattggaagatcttcagtaactggagcctgctgtaatagcttacctggacctgtttcacatgtagtagggaactgttcaaggcatggacttgagtgatttgggtaaatctgagtttcttggacccaccagtaaggtcgatgaccaaataatatcctgtatttaaagaattataaacatgcatatatatttaaatacacagctattatttaattggagattagcaattctttcctataaaaaatgactcaagcgcagggttaattgtgaaagttcatgattaagagactttgaaaaaacttaggtcttggtctctcacacattattaaaggtggtagccatttggtattttggcaccctggtttcccatgaacatgggggcttttttcccttgcagggaatgtcttatgggtgctttggatacttagactggaaatatcaaaatttgtccctagaattatcaatttgttcattatcacgctgctcatgtaagtaattcttaatcacagaatatgtgttacaggggtttgggaattacttataagtcattaaagtacacatttctggcctggcgtggtggctcacacctgtaatcccagcactttaggaagccgaagtcggtggatcacctgaggtcgggagttagagaccagcctgaccaacatagagaaaccctgtctctactaaaaatacaaaattagctgggtgtggtggcacatgcctgtaatcccagctactcgggaggctgaggtgagagaattgcttgaacctgggaggcagaggttgcagtgagccgagatcacgccattgcactccatcctgggcaacaagggcaaaactctgtctcaaaaaaaaaaaaaaaacaaaaacatatatatacatttctgtgccttttaaaagttctacttatgaatctggtgtttcaagttacctggtatttttgaaagattttccaagtaaaacgatatacatctgaaatgtgatcattatgccgaagtcacaaatttaaggataaatcttaggaaaaaatgaaataaaacagaaatcttaccatttaaatataagatttaaccaatccccaatgactgctacccatatcatcttggttccaactgtctgattaaattgaaaacaaagtggaaaataaatgaaaaagatattcctggggtctccaacattggacataaaatttagaaaagtgtagtaagctcggtagtccttctgcaaatgctgaattatgagcactccattcctgtgaaggaaatccatcttgaaaaagaggcaattctaaacatagagcaattggagctgaagtgctctgattcccaccgtttttatactgtgcctttgtggcatgtcgagccattactgcaacatgtgatgctgaccatctgtggagagggcacaccagccctcctctgctgaatagctcatctatttatgattttaattggtggcaaagagtgaagtacatgctgatctgtggcaattcgagggggaaatttggatagaaacacaatgaatttcttatgcaacctcccttttgtgcgaacagttggatcatgtttgcttgaaattttttgtacagttcatttcctccaaggtcagacattagcaatttctatgtttggtgaaaagactttgcaaataattattgcatgtcaaatagcccataaagccctgcattttaatttaagataggctgtggctctctattttattgggtctttgaggaaaatggttgaataaatatctgggtatgaaaaatatatgatatgacagattatgttctgatcactgatttaaaataagaatagttcaattttctttatccaagagaatgatagaatatatatggaacagggaaagaaatgtgttgttttttgactataagacaagaaagcagaaatgaaagtcatttggataatagaaatgtgttaggatcaaattgtatcttttattaactagagaatacagttgagaggaatagggaatgattcatgtgacaaagataggaatagacatcaaagggcttttgaccaatcaggaaaatggtttgttgagaacagagtgttaaacagaagtggaaagcaccaaacaaatgctaagaatgaacagaagggtagcgcaaagaggctgtggatctaagtcataggtccataatctacggctgtggactatgactagactatagaccaggactctggtcctggactatagactacgactggaccctggactatggaccagggtagactgagaatgaacagaagggtagcacaaagaggctatggatctaagtcagagagatgttgggtttagagagctggattgtgtctaggattagtgggaaagcaacaaagcctcacaaggtggccagggatggatctaggtaaccttacttgttattttgtcattcagatttttgtctttgcttaccatggcctaagtaaagacaaaagacttcactagagtccttcacaggctataactatcactttgaacttctcttcgagttttgtgtcccatcatttaacagcaccattgttactgggcttcagtgtctattggtaccttacctggaagaaatgcattgactgaccattaacatcttttggggtgctttttaaattgccataactgtgttccacctgagatcagttatatttctggtaatggaatttgggcattggtattattaaaatacttctcaagtggttccaatgtggtataaggggcttagaatcattgcactaaggcaattcatataaggaattatccttgactaattagagtctatgcttctggcttttctttgttttgcatattcaggttctgtaatttccataatctctttaatgagccatgaggaagagcataacttccctttattctttttctaaaaagtgtttgatctacgtaattcataatactcattttcttcagaaatgtcttatccttaaatcaggatgtgaatgatatcaaatacattttgtcttccacttaaaaattaaacttcctgctcttcagcacctcagagtctgtgattagcctttcatctatggtagttaatttagaaagattttctctcgagaactacctggttctgtagactgtgggataattaagtgaagcaaaagcatcttgatttctttcaccctttaacagcatctgctaatctgcttattcctcgtagttcatcatttttagtcttttcatatcttagcttctatgcatccatcggtgatgccttctctgaccagcatcctcaccactcctctgacaatactttctctcacacactcttttctcctagggggttgtttgagtctgctagggctgctataacaaaataccagac

SEQ ID NO: 3020 - DNA, 4001 bp, Homo sapiens
attggggcgggacctacttgtggggcgcaggttagtggtattggggtccgctcccgcgttcgaggaggttgcggacgaagatggggtcgaagacgccatcagctcggtcgtcccggggcctctactgtccagagtcctcgactggtccggcgcagaaacaggctgcaaagagaagcgagagctgtgcggggaggacttccggggtcctgcacaccggagggactgagcagccgggggcacggaggctccccttgaagatccggctctggagagacaagagggaggaaaggcagcgagcctgcctggtaggggtgcgcaggggtgggggcagcggaggagacgtgcgcgctagctccggtactggggcgcagggagcgtagccctgggccgctctcgagtctggcggtgcatcggcgcgacctggagtgaagcgccgagacgaggcggggtcggggtcggggtgggggtccaaggccagtacaagacgcaagggtgtgggggactaggctaggagcacaggggagcgctcagtgagcgattttccagccgagccgctacaagccccattgggcactcagcagccggcgtgtgggccagcggggggagggcgcacggggcgggcatgtctggttcggtgtctggttcccgttgttgtgtctggctaattccctggaaagaaagaggctaactgctccggggactagggactttggtgagacaaggtgagagggggaaaaaggcccatatctttacgttctccctcggacttggccagagaagaaccacagtcaccttgcactccagacagccagaaagcagcgagtcggaatgttgcttgcctccctcttatcccagccggtttttagccatcgctaagcctagggcgaggtttcggtccggtttcagcgtttctcctctacctagccccctgaggaccccagatttctcgcggtacagatccagagagggtggggtaagtaagcatggggaacgtcaccggggaaacgaacttgcgcgcagcgcgcaggaggcggcggacaaagatcttgcgcggcgcccctgctcgactctcggcgctggcgcgatggcgcccgaaggccccgggacagagagattgcgggctaatctgggtagatcgaggaccccacagagaagggcccaccggccatcgcctccacaccctccctccgacctcactcctagccccgcgcgcgcagtcgcacagcaactcgggcagcgggtcgactacggcccctggaaaagtaacaggttaccgttcctagtagcgccttcggctgctgctgcccaggcgccctttggagggacaggcgctcgcagcatggaagctcaagggaaaatcgctcttgccccacttcaactagagcctcagcctccgtgcttccccggggcgtgaatccggagggcagggataagaagagtgacgagggaggcgggggggggggggtccctgcgcagcgcacccgtggagagcagggactagggcgggcaggaagcactcatttcgggaggttgggtggccggcgctgggatggggttggttgagaagccgcgggaggagaggacctggctgaaaagccacggttgggcgctgggaagtccaggtggtcgctagcttacccacctcggctctgcgacagcgagccgggcactcccgcctttcctctgcacagcgcccagcgatccgctcggctcggccctgacaggcgtaatctgcccggcgtcacctccagctgcttcctcgttctcgctagttccctctcgcacgcgagcgccaggagaagagagagattcggagaggcggctgcacggctccggggtaggcgggggcagagtggggaggcggggaccggatcggcggggaaatcacgaggccgttgctcgcgggggcagctagtcggcggagcggcggggctcctctgcaggtgcctgaccgcctctggagctttatagggcgattataaatccagctcacggttttgcgcccggaaggaaaaaaaaaaggtcttatgagtaatccagaacgtactcaacacgctttttttttttcctttggaaataggcaggctgtcgggtgagaggagggaaaagataattcctacgaagaattctgcctttctgagcgtttcttcttccctcccctcctttcccctctcccatttcccctccccctcccatatattgtaggagacgagcggcggttttgcctcagtgcttttccccggggttcccccagatctgtgaccctgcgacgcttccttgagcgaaagcgcgctttgggtcgtgtcctcgttggctctctacggagctgggattgttgtaaccgcaaaggaggcagaaatgaggggagacctcttagaccatggaggaattacagtttcctcatccagccctgggccccatcaaagtaccacacctggccacagctacccagtgccaccggcagagaaaaggaccccgcgtcccttttgctatgcgctcgctcctcgctttggcccccttggtgatgggaaaagaaggcctcctgattaatcacgtttgaaggttgatgacacgcacgagcgccgctgcacgcgcatggggcacccgagcacagaggtgcccggaaggggcggaccagccccccttgccctggcccgctcccccttcgatttcacgcgctttaaggattctccctttgcaatatttaggcgtagttaaaagaaccgctgcgttgggagaagcccctcgccgtaaaaatgcgttgaaagagaaattcccaccagagggcgccaagagcccagagacggagaggccctgcgctcccgggtctctccgccagcgcccgagcggagcccacacctggagctgctggccagacggttacgcgccggcttgcctcttcatgccttccctcaccgccctgtcactagtttaagttctcccctttcttctcccccagtttttttctttagggcaaaaatgttgatgtctgtgcgtgtctgggtgacaccgtgtaggcagtgattcctttactggtatttaccgtggtcctccccctctccccaggtggtgcagcacgcaggggttatttatgcgcacgtctggggcctcactggttcagcggaggcccgtccgttttctttgaatgccttatcgcctttcaccacaacacaatggaaacacacacaaaaatattataaattaccgagagttccataagggagatcgaagggtccgccctgggcagacatggcctgatcagcaagagggatctcgctgtggggtttgaaataatcgcgttgcctttggtactaaagaaactactgttttgtcgccttgtctccacctgacgatgaaatccccggcactttttaaggacacaaaaaacatcctaaacggcggggcgcgcggtgactgcagccccgggcactgaggcttggggctggacaggctgggggtgtctgctccacgtaggaaacgtccccccaaaccactcaaccggcagctgctctgcgctgcttgaagtgggcggcatacaaccaggtgaagctcggaattccatccaccggccctcctagagccttccctaaacgagacgctcgcaccaatcagggagccaggtgccagtgctaaatcattcaagacgcacggggcaggagacaggaaggaggaggcaacacatctcccggtgcccctcgttcttcattgtccagcatagacgcccgctcgcctcaaccttttcccaaaacccgtgattccctggaaaggaagattcgtttacttcacctgtggcacgagattgagacatttccaaccacttcctcctttgaccccagagttcaaaacacccctaacgttttagccaatgaaataatctcgttggagaaggaatctcctgcaaggctaggtaacgcaagctgaagctgagtccgtccagcttcgaggacatccctctctttctcctttatggtgagtaggggaggaatgaagacttttgtccg

SEQ ID NO: 3021 - DNA, 4001 bp, Homo sapiens
gcctttgcttcgagccgtcctgcctctccagaccgaaccaatgttcgtcctgcatatgcggactgatgtctcatgtctccctacaatgtataaagccagactgtgccctgaccaccttgggcacacgtcatcaggacctcctgaggctgggtcatgggtgcacgtcctcacccttggcaaagtaagctttctaaattaaccgagacctgtctcagattttgggggttcacaccggcatggtgacccccatgggctctgtaccacatcttctctgatcatgagtcccctcctccccaaagatacctggccacaccccagggaggcaacacccccaagtgccatagctcagagttttgtgcctgaatcatcaccagcaaaacaaaagatcagcaagcatccaagtgagcactttgcccggcggcctggatttcccgtggccggtggtcaagactaggcctcactagcgcaggcaaagtctctcctctgttctgggcagctccttgaatcacccaggtgggtgccagtggcaccacacactaccgtcccctttgtccccagggctgttgatttgttccacccacaggccaagcaagctgacacaagcgaggtgagcctcccacacttgcccaaccccaggaaaataaatgcgaggctcaggaaggctgctgtccagggctgtggggaagtgactcggggcttccctcctgcaggccgtgctcaatgaagcctgggacacccggagccaaagctccctggccttagtgtgggacgtgcagcctgcatgggctgctgcagtgagcccatcctgccaggcagtgagaccagcagctgaggagcctgtgccctgggctccccgagggccttcggctgcaatgcctcccatgtctcacccacagagtctcagctggggtcaggcacacccgccctggccgacctcggggggccccagggcagccaggggggccctagcttggccaccagctaatcaagtgagcctgattccccagcccctgggcctcttcttcacaatatggtcacaatgtccacaggagggggcatctaggatggtccaggccaggcagccggccccacacctctcagccctgtgacggggtgtcctcagccagtgtcctggcagctggtcttaagtcaccccttaaaggaaggtaactgaattcatggcggcacacgccccggggaggcagggacctgccagcgcagggacggcttcaaactgccctggaatcaccccaaacaggatggcgagcaggagaaggaaaacgcaaggcatccttagccacacccaccacccctccaaacctaactgggaagaaatccacctcccctctgtttacagaagggagacagcacagcagagcccagcctccccgtcaccacccagagccccgggagcatcctgaagcgcacgcatgaccaacgctccagcaagcgcctggcactcccaccaacacggcccagccatgggcctgagccgcagaccgaggctgggaggtcccaagcccagcaggtctcaccctccccagccgtcacgcggacactcgagcgtctccacgccacagtgttggggggcagctttctcactgggccccacatcccagaacccccaaacacccagaagcagcaccaggcctgggcaggaggggccccctacttccgaaacgaagccaagacaggtgaattcagggaagcctgagtaggaacagcctccaaatccaagtcacttccttcgaaagacaaacaaaacccactcctgtccgtctctcagaatagccacagatgaagcgctttgtccacctggggggtccaactgccccccttacctctgcaagccgcccagcatggacatcatcttggcctctggcctccagcgaggggacagtcgaggcttgagctcccccgaggtcccaccgcctcggcccctgccggctctgggctccccagggtgcaggcacaggcagggtgcggctgtggggcaggtgaactggaatccccagaagctcacctgcctcctgggacgggagccacgccctctccccgcacctccatcggagggcttggttttaactgttctgttctcgggaagaactggctgagggagtctggggagccctcgatgggcccctgtgttccccaggccctgggaggacctgcctggggcctacccctgctcccctgccccaccctcagtgtccatccccccggggggcttggagggagctgtccccacaagggacgggcttggtgggctccaacagcacagcgacggcttctggactcagaactcaggacctgacgcagacgagagggcagagggccctgtggccactgcaaggatgagcgaggaaagctcagcccaattcccagcttcctccccctcctcgtcctcctcttcttcctccccctcctcctcctcctgagcctgcttcacaccaaaagaaaatctgactttttaaaatcttgggctggacaataagtttgaaacaggacatggaggtggaaaataaatataaatatttgtttagattttactgcaagaaagttcatttctcttttcaggaaatagatattaattccgagacaagcagccagggaaatgctgcaacattgtgaccaggcgctacagtgaatccacaggaaaacgcaaatgctcctcagagctacgggccacgcgccatgagtcaccaccaccctcgccacatcccaccagcgctggtgcccaccatgccctccgacgccaagctctccacacggctggtcaccttcccacaacccctccctgtcggtgccagctgagcctggattccgggactggccccagcccaaggcagcctccctgccctagccagtgcctggctcggatgggtgcaggccccatagccatggaggcagaaacaaggctgggctgaggggctcagaggaggggccgagcacacatggacctccctggcatcagagaccctgggctgggcggctgctggcgaaaggcccagagacccccagcctcccttccccatttacctccacctgcagcccaggggcctggcatctccgcccccgcctaggcatcaccctcccagctgctctgtagacctccagagcccgagtctgtgggaggggccagcagagcagctcccggtgctaacggcaggtgggagggatgccggggccttgctggcacggctgggcagctctccaccggcgtgccctgcatcctccgcattccactatccagagacatccgtgtgggtgttcactccaccattaaggagcctccctgctgcttcctccacccaccctgcccagggcaccacaggctcagcctaggaacaaagaagatggcgcctcatgggtccttaccccagaatcaccttggccgagccatgtgttacaaacggtggggccggtggagagcaacctgccagggacacacgcctgagggtcacggccaggcacctccctacacacgcctgagggtcacgaccagatgcctccctcccaggtcaaagtccccagctctccagatcccaagtgacttatggggcctgagcaagaagtgtgggcctgggcagggggtcctcagccaccagccaccttcaccccctgctggggcagacaagggcagtgcagtgtggtgtggagcggtggtcccagccccaggctgggaaagggacggaggcccggcggccagagggaggaggctgcctgttgccagtggggccctgctgggagccccagggagtcagggtgtctgcccggccccagctccccgctaagaatcagccgctctggcagcctgcctggtccacggtgactcaggaacaccaatcaaatgcacacgttgtttgtcagagcagatgcccacgcccccatggcagagccctaacccctggggtgcggacggggctggctggaggcccctcagctgcttcgagtaagggacaggtccacatgcccaggaacccgcctccatcggcattggc

SEQ ID NO: 3022 - DNA, 4001 bp, Homo sapiens
ggtcttaatttctttatggtcagctgttacacagaaaggcagagggaaaggttagagtatatttttatttttttgagatggggtctcactctgtcgcccaggctggagtgcagtggcgcaatctcggctcactgcaacttccgcctcccagattcaagtgattctcctgcctcagcctcccaagtagctgggattacaggtgcccgccagcagcctggccaacatggtgaaaccccatctctaccaaaaacacaaaaaaattagccgggcatggtggtgttcaacagaaagctgagttttgtttttttccctgaggaattgaaatttgctctctgttttttaagatagagtttcgctctgccacccacgctggagtgcagtggcgcaatcttggctcactgcaacctccgcctcctgggttcaagctattctcctgcctcagcctcctgactagctgggattacaggcacgtgccaccatgctcagctaatttttttgtatttttagtagagacagggtttcaccatgctggccaggctggtctggccaacatgtaaccatgagccaagttacatatcttacgtatcggaagaaccaaacagacagaatgacacaccaaaaggaaaacctcaaacctcctctccagcagaatttgtctacgccccaaccactgagcagagagtattaactctcagtttccctttgccagctttatttcacacctcattttctgtctagttacaccatggtgctaagagagcatgatgtacattttcctttgctgcaatcaagctgcaattgtcattctttatttatgcaattactgagttaaagtctatctccccagccaaaccgcaagagtggggaccttgtctgtcctgtttaatgaggtcatcggattaatagagttgtcaaatgtattaattaatgcctgatcctaattgcccatggattctgggataaaagtccatcctagttggtaggagacctgatctctgagaagacactgagttggtcttctctattttgttcctaaatggttattgggtagctggtgtactaggcaaccactgagcttagtggagcatttctgagacaaccaggcctcaaagagaatctgatcaaggaagaaggaagtagaagaggcaagtatttgaatttccttcttcagaagggaagaagtgggagccacaccccctcttgcctgctctttcctctccagccttctccaggtatcaggcagttcaaagattaggcagttcaaagatcgctccaggatcgctgaagtgtatcataccatcagctgaccttttacgttaactggggcaaagcctgaacggataaccagaggccaactgccatagtttatttattacagtttttcccaaatgctggatggccacacggccctctatgatgcatgcgcttgcaagtcagacggtcccaagctaggcgactttcccccttggtccctcgcattgcaagtggcccgctagatccgggaggtatgtagcgtgggcctggggcctgctcgcagcccagggcacagttcaacccaccttccaactcggcgaagccaagcaccacgtccgaggctctcccctgcctgtctttgacctctagggctgtgatcgtgcagccccaggagatgatgtccactctcaagaggtctgactgcagctggaacttctccactgtccctcctcccgagggcagctctccaaacacggccctggtcaccgaagccatagggaaagtttggcgtgtgcagccactgcccgctcttcaaactccagcgctcgctaagctagaggcgacccaagtttacaggagaaggggcgtgactcggctcagactcctccctttccctgcctggatttagggagtgaccgttcctgcaaaaaatagcccctggggcctttctaaatcaatcatttgcctgagggtaacaagaggggcaaactttgcagccacacttgtactttttttccttggctcgtcctggttgcattgcatgttgggaatggtagtttttgggaggtgaaattgcattttggggcttgtagtctttctaaactcgaatcctgggttgacggggttctacccccatctccccacacctcaacatgtaatgagctggtcattaatgtcggtggctatcagacgaagaatgggaaaatacagatagcagacttacagtgagaccgatcttgggaaaaaattagattttaactctttgatacagggggtaagaagtacagcagtagttggccggctcggtggctcacgcctgtaatcccagcactttgggagaccgaggcaggcggatcacgaggtcaggagattgagaccttcctggctaacacggtgaaaccccgcctctactaaaaatacaaaaaaaaaaaaaaaaaaaaaaaaaaaaaaaaattagctgggagtggtggtgggggcctgtagtcccagctactcgggaggctgaggcaggagaatggcgtgaacccgtgaggcggagcttgcagtgagccgagatcacgccactgcactccagcctgagtgacagagcgagactccgtctcaaaacaacaacaacaacaacaacaaagtacagtagtagcttagaaatgaggtaaatcatctcaggcttctctgcacacagacttactgaagattcactctttttgtcccacggatgaagtcctggacatggttctgttagagccactgcccagaaggctctcctgacggccaaagctgtgccagcctcgaggagcttggaccagacagggtcaggtagatggattaggccctcggtgtgcggaggtgattagagacagcctcagacttattttacttcaagggactggaaagggacctctggtgtcttctggctcctgaagtccacagttcctttaagaagggattcagggaacaagtattgattgaggtccttgtaaatgccaggtactgaacctttgttatctccttttctacaagtaggatggagtcttcaggtatgtacagttggagaggaaagacactaaggttattaaataattgtcttgcttgattgtgtctcagaatttgctgaggacatttaaaatgcatattcccagtccccacctctggaatttctaattctggaagtctagggtgaaactcaggaatctgcatttttcatgttcccaagttattcttctgcagattatctgggaccagatttagagaaatattgctctaaggcttgatgagtaatctgaatttttttccccaaaaaaataggctctgatggcagaaggattaagataaagctattaagggccttaatgagataacatacaggcacctatgtacttccttgctaagtctggcaactttagaggagtactgagcctaggaagtgggaggatgctgggagcctaaagacaagttttactcaagccatctgcataatcatctatcttttcttgatactgctcttggcttggttcctgggtacttcagagggtatccaactagactggggtgagtgcagaaatgaaatgcatctttgattaggaaattatgagaattgggattatgtgcctggaatcagatgctaataaaacataataactatctctcagcttcttctgtctgtaatttaaggtatatttagcattcttgccataaagcctcaattctccatcatgaagcagaagaattctgatagcaaaggaaaaataaaaaagcttgcaacaggcttcagtgaagctcaacgtataataataaaaagacccaaacaagtcaaattatagactgcatcacactcatacaataaccgacaggcactcctatgtgctgcttcatcagaaattctcataaactctcagtttcatcagccacttaactttgtggtgattcacacgcaagccctttggcaatgctgtgttagcaaggatgtcttagaaaagtgagcaggaagaccacttttttttttctcaacctccagttctcagtgttct

SEQ ID NO: 3023 - DNA, 4001 bp, Homo sapiens
tttacaatttaagtacaaggaaaagttatttttgccttgcattgttaaatttcacattttgagatttaagacttaaggagcattaaggacataaatcagcaaaactgtacctttgtgttactggcagaaaaggctatcaaagttttgctgaatcagattattacattttttgtatgtgaccaacctagatggtttccttcaacaaatgacagagtgatcattccaaactgatgtaatccatcaaaaacacttttctacattcagccaagcagcaactcaactgattctgacaaagaagctcagaaggctgattaattctggggttttaactaaagatcagcaaatcattccccatgttcatttgtcaaaaacatggacttataatgttcccctctcagaataactgaagtataaaggcataaaaaatgcatgtaaactacctaaatgggtctagcatcagtcacttgcaaatttttttaaattatttgtattagtcaaaatctaaaatgcaagttccattttaaaagacaaggaagcgattcagaagattcagaatttctctaaatgaacaagagtatttctgtaatctaaagcaaactcaacatgtctaaagtaatctttgatttgcaatctaaagcaaactcaacatgtctaaagtactctttgaacaaaaattaaattttggaaatgctcttctgtttccctaaatttcatgtaacctgatagtgttaatgagattctgtttattaaatattttgttcaataaatatctcaaaaatatgtataacattaaaagcagatcatattcattaaataaatgtaaatctcaacttgataatttagattcacttttccaaaaggtacaaacatgtcatgatacttcaattgaagcttgctttttgtcatatttatgcagaaaacttttgccaaacagagaatatgttagttcaatgagaataaaactaattttgagtactcttacatattttagaagtattgaattttctaggaatacattagaaatatatttatagatcttgaagttaacaaaaaagaaagcatagagaaaactggaataacttcacagaaaacaaatctctatggctttacttgataaataaccattcatacaaattattatgtttacattcatatttagtctttgaaactggtccctcaagaggaaaatactgaaataaagtaattttacagtatacttgaaattatctttttcacttaacatacagccagcaatctggtaaatctgcataccgccatgtgttttgttttaaaaattggttgttttatttcaactgttttggaagtctttagcggtgtcattcatgcacagttcgtttgctaaaatcgccacctgtctcactttagtggtttttccgttttatgttatgtgcttggtctttaaaggcttttggcttctagcagcctagatttaaaattctgcccagtttgaacgttcactcaactgttcttttcatacagtcacagaacaccagaatttattaggttgaacggtatcttagaggttagctaactcttcttatttcttccaagaagacgcctaagaccaagaaaggtaaagtaacttccccatggttaaacatgcattaatagtgctgccaaaatgctcttctaactcactaaggcaaaactcttctgattctgaagtttctcattttgtcaaggcaccacttttctcatctctataaagacagtatttgcttcataagcacttacccctcaatgcaggcagcagagatctctccttcttgtcatcacatttgttacattcactgaagtacagcagtaagaagacatcaacaagaacccacatcagcgaagtggctagaaccaccttgcagtagacaaatctcctcatgtctttccttgatttctagttaacacacagattgaagacaaatgctactgtgataaatccaagccacacaggtgaactccaagatgaaagcaggatacattccactgcattaaaacaaagaagaaaatttcattaattgtacacatagatttttggataaagaacatataacatgaaatgtatgacttatttaatgttctcaaatatatcagtactcaagccttcgaatccaaaattaaaagcctaaataaatgaaagttgctagcaagctagttggctaacattttaatacctaatactagatctgccactactctgccaggcccttgacaaactacttgattcctttaagttgtattgtaatgaacttaaagtcatatcatgatattctttatagctccaggttgtcaaatagtgcaattctgactttactctaattcagtacttctgactagccaataattctgaaatagaaatcatcctgggatacaatatattatagtggctaaaatctggccttcatagacagacacgtctgggtctgtacacctcctaagaatagaagactttctaagccacagttttctcatctgtataatgtggatagaaatgccaaagctaaacctcatttgttatgaggattatgtagaatcatatttataaagcatcttgcagaacagataattaataaaacataaaacagagctgggcacggcggctcacgcctgtaatcccaacactttgagagatcgaggcaggcggatcacctgaggtcaggagtttgagaccagtctggccaacatggtaaaaccacgtctctactaaaaatacaaaaattagccaggcatggtggcacgtgcctgtaatcccagctactcaggaggctgaggcaggagaatcacttgaacctggtaggtggaggttgcagtaagctgagatcacacaattgcactccagtctgggtgacaagagcaaaactctgtctcaaaaaaaaaaaatacatacatacgtaaaaataaaataaaataaatacataaaacagaaaaaattgttctcatattcttaagtagagcaattgcaagacacgatcaataattacacagcctctaaaatcccagctgatctgcagagaaagtatctacaataaatgtgtgtttagaatagatagcacgcatccaatttatcaggggaaaaatatattaacataaatgatttaaaataatcagagcaagaatttaaaggctataacaaagatatgtacataattattaagagacatttttcaaggtaagtgtagaatgaataccttacacttatttgttttatttatactacattgagcattttatttatactactacatttgtttaactacctggttaaccaacttttatctataaagtaagtaaatcagacaaaacatattctgatatcatttgttacattttaaataatatcgagtaaaatgtaagcttattgatgtgaataagataagtgatgaagttttgacagagctaattggggtgaacagtattaaatacaaagacacttgaaatatttcataaacgtttgtctcaaaaacatcaaagtataatttgatgagcacaagctctttaaattaacagcagctgacagcaccataaagcaacagaaattctgttgcctgttataaccaacctaaactagcaacaaattcaaaattcacataaagcgccagttacaaaataattattgtaacagattttattttagtaattacaaaaaaattacatttacatttattcagaatgtgtatatatatatataatggagagatatatgtaaatccaaagaatacatgacatttggggttttttttcttagaaaaaagtaacatgttattatctactttgtttcatttccactttaattttctataaaaatgatagctaaatattggaaatcagcctctaaacctgataataaaggaatgattatcccatatttatttcctgttaccgtgtacattcttttctaaatttgagatatgaaacaattcaagctatcaaatgttctgtcttcagtcttaagatagggtagatcctttcactttattgtagaaaat

SEQ ID NO: 3024 - DNA, 4001 bp, Homo sapiens
acgcaaacgagacagagagagagagacagggagacagcgagagagagagacacagaaaaagagagagagagaaagagagagagacggactgagactctgaggaaaggcagctttcacataaagctgaaaatattcaaggataccagaaatttcaagggggctttggcagccaagtgcctttagccttgcgaataaaacctctatgttgttatgttgtttcagggaaggctgaccacgatctctccaaggaaaccgctttcctaagcaatgaatgcatggtagtttaaggcaggcatacctcagtccccaaagctcctctcctctgctagcaacacctttgcctgaagaaagctcccaccctttcgaggttagtttccctgaaccccaaagcatctatgtttgcctgctcactgtccgttcttctgcagctggctataaaggttggggaggcagactctcctcctggaaattcaactaaccatagtcaaagaatcgggtatgcgggaggggcttgcgcagctttcgctgtccagagtagcagcctcagtgcgctcaggttcgcagcagcgcagcgccctcggacccggcaaggggagcctgctgcggtgccctccactctaaccccttgcgcccctccttcaggtccacgacagcctggacaagggcaggctgtctcctccgcgtccccactgaccccgcaggaaaatctctgcacctggagatacccattagatgcgccagggcttgctcccctaaccaaggcgcttcgggatcgcggggctggtgttcgggaagacggggcagagagatgacagagggagacagagataagctgcgagaagcagacacagaaagagaacaaatgttgcaaaacggagagacaaaaggaaagacagattaacagggacacagatatcccaagaaagaaagagggaaacagaataagagaaaaaaacagatacatggccggagagtgtggactgaggggaccaaggctcagaaagagaaacagaggcagagacacacacggcgagaatgagaggcaagaggactctgaaaaagcgaggcaaagggggcactatacgaaggcaaccgtcgaggaagacacccaagacccagggagcgcctggtgtcgggtcgagtagaaacgcccgcaacgcagccggggctgcctgcagctggtgcgagaaagttgtctgggcttggaggccgagccacccccgcggaggaacgtcaccagaacgcagagggggccagagccgctcccccccccccccccgccaccaacaactcaccggggtagccagaaaagcagagcagaaggtgggcggcggcagaaagttccgcgccacgcggtcctcccgcaacacctgcagccccgcaagcgagcgcactcggagctcccgggaggccgcgtcgccaggtccgcccgcgcccctgcctttgccctgggaccggcccggggcgctcggctccgcgccccggcactcgccgcgggactttgcggcacctagccccggcactctggcagcccagagggagctcgtcccagacaatcaagaggaaaagaggggaagcgagaaagagacggagacctgctatcctggccaacgatcccgcgaagagggaacggcggtccacacacgggattcagcctcagatcaagcccagcaggcgccggccggccgcgccgagtgcggggctcgccgagtccgcgctcacctggaacccgcgccggcccgcgagcgccgcgcgcagccccggctcccgcccgcgcctctctcttcacacttgcccgcgagcagagggagccggctccagcctcggccagccccagagaggggccttcatagcgcagcggcgggctgaagggctcctcgagcgcggccagagcggacgctgaggccgaggaggcgcccagagcgagcgagggctgctagcacgttgtcacctcagcagagccgccgccgcctggtcacttctccccggcccccgcccccctcccaccccagcccgccgcctcccggtccctcctcctcgcgtggtccctcctcctctcgtagccccagcctggaggcctctcactgggctagtatcatttacgtaaccagcacccccagccctcctccctccctgctcccgctcctccccgggctggggcggtgcgcaccgagcgcgctccagctgcttctggagctggcgcttctgcgatgtgcgcaagtcccgcgatacttggcaggcacggcccccaagagcaaccctggggtcagctcctctcgccggagggcgcctcgcgacccctggccgctttggggccccacaacgccaaagccggcctgcgtgcaccgcgttcgcccaatgcaccagggagcctcttagaggggagctggaggatcagagactgccctcggggaaagcgccggcaaccccacccttgccgtcggctctccagccgagagatgctgcggggtacttgacgcttcggcgccctccgcagaaaggacggaggttggcctcttgttggttacagtatctacaccctggcaggatcctagtgttctggttggcggtgactactgccaccgaacgcactgtaagagtactggaaacacagagcgcttccttgtggctctcaaatttttatgaagaggtaaagaaaaaagtggggctttgaattcctttctcaggcaagtaggtatgatattaaacacacacccactccgaagtacctggacgtatgaatgtctcagttaatgtgttgtaccaatacccccatggtactgagtttaaatacatgtaaagattttagaacagtgcctggcacaaggcagaaacctaagacgcagacattattagcgtctcaaagacttgggacctgtcccccactgccatgggagaggaacttttctaggaaattgggattgccgagttcaagtgcctgcttggcaatttattcactgtggctcttggctagttttggcccttcgggtgtcagttgtcttgtttgtaataagggctgacaggggtccttgcttctcacagtgtcacttcacacatcttataggatgtttttggcagaattgggggaggatataacgactacataaaaatattaaacagccacgtttgacaaacatatgatactattaatcataatctagtatgtcaatgccattcttgattatactcatgaaaggcaatttccagagatattatctttatatcttttcgtgagtcaagtatcatttaaatttctatgttaataactgtattaatgtctcctcctacattgtccatcctgccctaccgtcaattatggagcatttaccagagatgcttctgtgcatgtgtgagtacacagggtcccactcataacactctggaatgtctctctactgctctctctagtgaattccagtcctaacatcaggtcactcacctctacatggcatactgagaaaaactgtggaccaggtaaaagattggggttctgatgctgatacagctacttactagtcctatgtttttcaaagacaaataagcccccattcttacatgtttcatctcttaaaaaaaggcgcaattccattttgcagtctttgtgataatatttaacttaggcagaatcataaacttggtaaaatttatttgggtaattggatatttacgtagtcccaaagtatcaccctagaaagtattggcttttggtgcataacacaccattccaaaacttattagccccaaccaataaacatctgtaatttctcaaagctctgtgggttgtcaggttggtttctgccctggctagctcagtttggtttagagatctaggatggcttcactcacttgtctggtgtggcatacttattagtcttgagggtgtgggactcagctgcaatgttttgtcttttgtttaatctagcccatcatccttcaataggctagcagtagtcgtagttgcagggctccaaaaagcaacaagggagtgcaagctccaatgt

SEQ ID NO: 3025 - DNA, 4001 bp, Homo sapiens
tggaggctggagttcaaaccagtagaacgacttaaggtacgtgacttaaagaccctgaacctgttttcctgatctatgaaacaagcatattaccacccaactcctacaactacttatgaggaaggcacctactatgcacctggcacacagtaggccctctgtactgtacttaactggtgagacgccacctcccgcccacatcttcctgtttttcagtctcccatttccgaccataagctcctccaaggcttttgcccagacccctagacgactgttctggacccagtttataaagactgcctggctggccaggaaatcccccagaggcctccttccgtgtccccgggccaaatctgtgaagagaaaacggaaggctaccatgtcacgaaaaactatgatcaaataaattattatgccttttctcctattgatctgccttttgtcaactgattttcagtgaaccttcggagagccatggggaagttttccctttccccctacagggctctgaatctgaaggtaagagtgagcctatagggggaaccttctggctccctcacaggaactgactgagcaggagttggaaaagccacttggattcccatttcctcaactccccgccaataccaaggcgtctgtttttacaggctctttcgtggtgttctgggcacattcaacttccaatgcagctgagagggtcgggaacagttagagaacaggggtggcagccgcccgggaggctgcaaggcgctcgcccgcaacgcacaggcgcgcgcggcgcacccggcctccggcctccccaggtcgggcctggcagctgcgggaaggaggtcagcgcagccgccacacttcgcccgggcgctggcccgacccgaccgccggcgactctctggcagcgcccggagaccgccagcccctgggccgcccgtccgcagagccccctccgccccgggaccctcgcgcgcagctcaagttgggagccccgctccgcaggcgagcgcgcgcccaccacccacacccactgccactcatgcacaccgcgggtccggagatgcccccgagcgttttaaaatccagaaacatcacatggtagccacatccggcggctgttacctgctcgcagcacccagaccctcgccctggtttcccgggagcccgcaaacccggcacgcgggctgcgcgccctcccgcaagccaccgctcagcgccagcgcgccggcaagccgcctaccttaggggtctgcacttcaggtcccgtcggcacctccaacttcctcttggttacccagaagaacagcagcaccgtgatccagagcaccccgaagactggcagaaccagccgacgagtcaggcgccgcatggtcccctttgccgcttcctctccgcggcgctacgtcccgggggcaccccccggcggtcagggttggcggggcaggagtcctggcgagcgcctcgctctggggagctctagacccaggatccggttggaggggcggcaggatcctgcaaggcgcccttcccgcttcgaagagaagcgagcctgggtggggggtgcagggcgacccgaaacgtggcagggaaggaccgagggcagccaagctggacgcccgctccagcgggagaagcgcggtggctgccgagatgttccccacgccgccaccgcggctgccgccgccgccgccgccgccttgcccgctgccgccgatagggaaactgactcgagcagcgagagggaggaatccgaggctgtgccaagcaccccgggaggagcacgagggcggagggagtgagcggggagggcgggcccgacagacaggccgactcggagcgagcccaggtgggagtgagcggggctctgagagggggcgctaccgccgcccgccgaccgaaacgctcggtgctgttgcggggccgccagcgccaagccctgggcgcagctcccagaccatcgtgggttggggcaaggcggggcggggcgggagcggtgcactcgggatgcccgccacccccagctgccagctgggacccaagggccggccctcgccaggcggcgctgtgcctgggaggactttcccgctcatcgcgggggctgcacgtggcgctgaagccggggtcccacccccaatgtgctcgtcctaccacagccaaggctgggattccagggcgccggcagggctgctgccccaaacccgcggttcacttgcctggctactgagggccaaggccgcggtcagccaactccccagggtgtttctatgcctgcctgcaggtgcctggtaactttttctgcttaacggaaggaaagctgagctggtctaattttaactttaaagatatcctttaaaaaattaaggcgcaattatctcccataaaggttttctctccctgtaagcatcagggctttgtgcttgcaagaaaagaggtccaaagttggaacaaccacttgggattcttggaaagtgaccctgggcaggaggatactgggtgcagagggtgatctttcaaaagccccttttcccaagggcctttgggaattgtatccccctcccacttgcagattaaaaccgcttggatctagaagcaaagcaaattctaactccaattcccatgtaggctcaagtaggctggaatcacggccagatcactgaccagagagtactgacctagctgtcacactcactgtgtgagtcttgggtaagtcatttaccttctcccagtcttcgattcctcatctgtaaaatggagggaaaatacctcctctgacaagcaaatgagtagtggtgaaagctgaatgcaaggtgctggtgttatctgaccactcaaagtggggaaaccttgctctgtctggggagcagaggcagcgggaaccatgccatttttgttggagggttgcttgcttcatcgagtttcttggggaggtgagaacgatgcacccactgtggcagccaccattctccctgcccctctctccccataaagctcagtgtagggcaagctcccatacctccgcacaggtgagacagctgtaaatcagggctctggaattccttcttcaataagatgtctccccaaagacatgtactgagaaatggaggcgtctactcaaagcctcctgtttttggtaccttatctttcagccacagggaagtcctgcctcaacctcagagagttcttgactggactgtagataagatgtttggggttgggaaccgcagttgaaattaaacagcccagaaaaggtgagcactgttgccagccctttcaagatctacctgcgctcttagaccatcacacagaaccccagggttgatctagcatttgcctttatcagaactctgaacactgaaaggtgggagtaggctccccagccaatgctttgtcccagcaaaggcccaggtagatgatcatcatgggaggggtagggggagcagcaagagaactcacctctgcagcatcccaagcaccttggacctctttcaggagcctcacccgggacctgcagtttcgggcctgcaaagcgttctgctgcaggctctgcaggggacccccaggcaagctgctgagctgctgttggctccaggcagaagctgcagcacaggagtccattgctcagcgctttgtaatgccgcttctgagtaacagatggcagacagttacacaagaacaccgccaagcttttgagatggtgcagcaccaccacgctgctcaccacactgctgagatgctgaggtgcctcattctgactgtttggcatatggggaaactgaggccctggggtgaaggcagctccgtgcagggactgcaatgtctcagagagtgggaatttccttccaggaatgattttcttctcaaatcattattttgtcctctactcaagtgaggaagatttcctgggcctatggaagctgtcaagggaatccagttttgctaggtgtcattagctgatccatccagagatcatatcagatatcagtttgggttgtcaaaccagtaaatatcat

SEQ ID NO: 3026 - DNA, 4001 bp, Homo sapiens
ggtttatatgtaggagttgaattgcagggtcatagatgtacacatatgtttagctttagtagacactgccaagaagtttaccaaaatatacactcaattttaggagaaaagctaaaatctggagcagaaatcataatttcagttttaagacaggcagggagaattatagagagttgatctgagcaaacgattagaaaaccatcagggcttccaagtggagagggaaaatatcagggtcatctaggtttacatttcttttcattcttattccacacatagtttttaaaaatgcagtgtcctttaacattgccatgctcgggggaaaaggacaagagtaaaaaagtcatgtttctgcttgggatcttagagcagagtaccaactttattgtttaggccatgtcacaaaaacaccaccatgggcccaggagcttactggaactgcagacaaaatatccaggaagacatcagcagcctcctgatcttacgctttcctaagtttaaccacatatgtgggcagagcctacataactcaaacccaacctccaaatcctccacaaagagtctggtccctgtactgggtagaaccagcaggccaccaacgagacagaactgaggagttgtccatcagttttcaaggctaaccagcaagacatggcagggtgcccccacattagaggcatggccaggacaccccggcattagagatgcaggcagggcaccctctacattaaggtgacgttggatatcttctaaagtcacttcctggagtcatttccccaggcacttgcttgcatttcaaataggatgtgttaggttctttcaaatgacatttttcctcttggaaggaaattgcttcctatagtttaaggaccacattcatcaagaaagggactcaaacagtttgtgtcttaactccacaaccctgctgatttctaacttggagcagcctaggaatgaacagcacagcctcctgtcctgccagcaaaccctgcaggcccaggagggaggtagtagcagggcagcgtgggctcctggctaggccagagtcagaacctgatgtggggtacttgtggggagggggaagggcggagagcctctctccacttcttgcaccaccgagtctgccgttacagtcccagctctttccactccagaaagcagtggtcccgtggactggccctgactggcccaagcatgggttaaacttggcctttcctagaagaaaacccaaagtcctccagaccctctggtggccttccagagacaagctctgtatttcccttaatcccttttccagttcccttctgtaagttaaaaaataaaattgaaaaaaaaaaaaaacacacaaagcaatgctggtgtttcagcagagggagggcatcttttctcagcaagtgcactagctttttgtccatatgaaaacaaacatataacatacacatatatatttcatcttccctggcaaaggaatctcacctgaagttgagcgtggctctaacagaaacagcatatgcgtgacagtcaaaagagcgagttgaagcccacttgctgattaggctagcttgcccaagtccctaccctgctatcacctcagattcatcacagttcagaaaacgagaataataataacactcacctcacaaagtcgcagtaaggatcaaatgaggcaactgtggatataaatgctttgtaaactgtaaaacatcacaccaagtggtggggaaaaaagctacctcttatcttcttttcctgattcaccctttaattagtaaagtctttcagctagctcctcttctgataaagaccacctgcccaccataaggacattagtcaattcagcacccagctggcagccatcaattggccatctattaatagccaattatctgggtgccttaattaatccacagaccacgtggcctgatctccctgagatcctaggaaacaataagcctgaaatacaggcaccagctaatttttcagtggccatcaaggaatctggcatctattatgcctgcatgttgcagctgcgagagatgggcacataaatattgattggaccagtctctatggctgggaggtggggggtgggagggacatcaatgattactgttctctgaggaataagagaagctacataaatcttcagcccagacaactaaggaagaaaatccttatttccaaaccatagtgcaaacagagaaaagagacagttaacctctttggagagagctcgtcaagagagagtggccctactagttctatagatgtttcaggctctctccttgcctagcatgcatgcagatcgggttgcaagagcaggatcattaggaagaagacagccggggtggttgttctcttcatctgggcattcaaatcccagggcagagacatgtgagtgtgccctgctctcctgcatttccttgaaagatctctgtagtgcttacagttaagaagacaagtgacataaggagaatttaattattttttaagtgcctcatcttgtctccaggaaatggcacgcagaaaaggctttgtacttgaaaccagcattgtccaggatgcaggggatcagatggctctgtattcccagcgataagggctcctgctgatagaaaggccagagtggcaacctccttccttcaggaaagaactagctttgtgtccagagcggtgctctcagaggtggctgctcctgaccttggggcctgcagggaagtgttgggcttctacagagcagagggcagagggccagccaccactggagccctggtcccaggaccctggggctgtatagccaggctggcttttcaggggacagaagaagaatgtgaaggggaggatggagcatggacagaacatcaggaggaaagaggatgccctaggtggcacacacctcccacaccacagagatgtcccctcctctatccctctgtcagcctctagctctcattaggccctgggatggcagcagccactgccaaatgcaaagactgtcacctcagaaggtcacatcaggccatttattctgaaaaaccaaaataccagagccagcacattgcaggagctcctgcagaattccccagggtacctctgtgtgtgtgtgtgtgtgtgtgtgtgtgtgtgtgtgtgtgtgtgtgtgtgcgcgcgcacctgtgtgtgtgcctgtgtgtgtatatgtgtgtgttcatgttcttcggtatcccaaaggggttctttcttaatcagctcaacatctgaggactgagactgatttattttttggttaatctagcatttctggtaaaataattaaaagtaatagacacagagtatctgtagtataattatttatagccataaggtctcacttcacagttattcataactaacctgaaaagactcagactgctggtaagcaagtgggggtcagacagttctagagtgagctgctcccatttcacagtcaaggagactgagccaggaagagaggaatctcagtcacccctggcactgccagtggccacactggctgccatgtctatcaggaaactcggggagtaaaacacacttgatcttgacatgatgggagctagagaaggtgggactctctctatctcctgccgcttgtgtgcagcatgagtctctgaggaccctgtgaggaaaaaggctcacacccagcccaggataaatacaggcaagtggcaggggcctgcagccagtggtagagggcacgggcatgtccagactcacttccccaaacagatggtgagtctacgattctaggtctctggggtggaatattcaaaagccatggcagggttcacagactcccccaggagaggagctggggatctggccctgctttctaattcagattattttccaaaaaatgcattggggactttgggatgctatagaagagtgacaaaactgcaaacattagaaatgaaacaagggctcaagcaatgaaggtcttcaaaaactggttcctgggtgtctgacaatgaataagaccactt

SEQ ID NO: 3027 - DNA, 4001 bp, Homo sapiens
atttctcactagaggttaagaggaaagacagtctggtaacatctgcctagtaagtaatgaagactaatattcaaaattcagggaacaactcctatatctcatatttaaacagtatttagcacatttgtttctctgtatggagacaagattaagaggtcaggtgagatccttttaagaaatgtagaaaagtggtgattgaattaataattacatcatgttatgctgtggttggcttttagatttccatctaatcttaaaaagaagaagaaaaataaccccactacatgttgcatcaggcattttaagtaaaacgtgcaatttaaaaaatatttttaaaatgtgtggagatagaacaaaacaatggaattgttattattatcagaaacttctacgtaaaaatgttggttaaagcaatatataaagattgattctcggtacaaattgcttggaaagtttaacatgtgcactagatttcagatattaaaagttaaattaaaaaaaagaatctaatggcagcgtgtgactttaacctcatggattttagccacaaacgcaaagaaaaatatatacaataaaagaagcaacagattttcccacaagcagagattttctaattaaaatgctgtcactttaatattttttagctatagaatttgactgtaaatgtcttcattatgtagtgtaacttctatagcaagttatgttaacgttttcaagaatcggaaatattggtaactcgatggggttcttaaaacagaaatagtttctttgatgagttggaaagagaaggaaataaaagtctaaggtaagcgccagtttcaccctcaattcttaggcttcagaaaagcctaattaggcagggaaaggaatctgggcctggcacacccaagcttagacgtggcaggatcctgaaacaatgtttttttgaacctttgagtcatatgccacaggcaaaccatagccgcgatatgcaggtccttaagtcaacaggtcctctaacgagatggtgagtggttggtgcgtggcagttggatttcttcccgccacggaagaaaagaactcttctccattgatcaggaaagtgggcccaactctggcctggagagcgcacccggaaaagtgcagagtcgaaacagagagagaggggtgtccgcgtcccggccacagagccctttccaaaccactcggaaaccatttaaatggctcggcggccgcggtttgcagcctagaactgtttggggtccccggctaggaaagttgcctggcaaagccatgtctttcgctgtcgcgggatgtcctctcgggcagagaggctggaggagacaggcaacctgctagccggagtggaagcgcgcccgcctcccgccgggccctccctctcagggtccccacgctgcgaccctcccaagggcaagtccggggccaccaggtctttggtctccgtccagctcctcaggggccgccccatagggactggcgggggcaccgtgggcgagagggtgtgaccgggctcccccccgaggcgccacctgccccttggcccagggcgcccctttcgggatctctccaggggcaaccgacacactgctctcgagaccgtctccaaccggccacctggaccgtagccctgtccccaacacgtgaacccctgcggccgtcctcccgcctgctctaacgcagcccaggggtaccgcgtctccctccgcctgccgccggcttacctggcgggtgggcagggcagggtggcgggaagcggcggccgggcaggcgctggacgtgggctaggcgccaggtgcaggtggcggcggctgcgactccggttgctgtcgccacagttgcggctcagtagagctcctcctccgccgccgcctcctgccttcccgctgggcctcccgcgttgcctggagaggcagaaccgaggctcggcttccacttggagtctcccaggtgagctccagcctgcgacgtcggcaggggcgaggccccacttccgcgcctgcgcgccagcctcccgccccgccccagccctacctgagcgctccaggtgagaaccttggatcgcgcgcgcagggtgggggcgccgtccgggccaagcctggctgtcgcgcggcttctctctgagtggtcggcgaggctgctgctccgcgcaagttgtggctcccggcccatctacattggaggaatcctgcactgacctggtggcagtgatcaccttgtagccagaacacagtctgctgggtccttggggaaccagaagttctagatttcccccacacggttcctcccttcctcctcggttcgccaaaatgaaggggtgcgctgcctccgaggaccacttcgggagggcagcaactgctggctcatgtggtttcttcgggcagggttcagcagcttctgtcaccagttaggtttcgtgagcttccttcccgtgtagtcttgatttcatcacttgactcacttcagcgcagctagtggtttccgtttctgtacgcgggcgctctggtaggggcgcctcacgtccaaaggaggagtcttcttccaaagaagagcctttggtatttggcagagcctcgccaatttggggcgcacctccccttcctgggatgctctcagaaggcaaaccaattcccagaagagagggaaaaacagccacaacagagagaacctttgctgtccctgtttggaaagagattgggatttcctggagagggcttgcttctactgcaggtttgtttaaaagctcaacatctattctggaagagaacaacgcagactccaggaagatggtgggttttgctgtttttaagacaaaaaaaaattgttaaacagtatttgttccatttatgacacaactttctgtttcagccttccttctgctgctgcaacaaacattgacacacccaaaaccaggacttaaaatggcctttatacctttctatgaactcatttctttggccctatcccaaagatatctagggatataaatagaaaactagctaaaaactttttggtgtcgtgtttaatcacatggtggtaggttttactatgaagtttagttgtggccttcctcctacattttgacatgctcttatggtgcttattcactgttttattagtgctatgcgtgacctaaaaataaggtttaaaatacagtttagtatagtatcaacaagtgtatctttagtatttgactactctaagacattggttttagcatccatagtgctattttatactaggacatctatgagttagggtttaagactttagtaaactaggtagttctttgcttgttttacatgtcatggttattttgcgagcaccaaggaacctccatgtatttgcaacattttaatatcagtacctacaagcaattgccaagctccctttccctccaaaaacaaacaaacaaaaaaatagttcaggagatacttgtgtgtattgatatactaacttggcagtgtttttccttaggtccaggtccagaactgaaaatactaactactgaaattctcttctccttctccttcttcttcgttgtgccactttgtcgtttacccctaaccagaggttaatgttagtctttggaaaatttgtaaggtatcctaaatgtataaccaagaaacctgtacccttttgcacgcaccacccatctctgaatgaagagccaaagattgtcagagttttgatgtcccaccaggcgaagagcaacacttttcactgacaatcaggacagagcagatggatatagaataacaatctggaatccaaggactgagatgcattgacagcaagactagtaacgtcaaataacaactgaaaagagaagctagggtagacctattaaaagagagagccagcaaacaggaccaaaatgctggatgaggagtctaaaaagaacagaagaaacaaaaaagatcaggagttactaaaatttgactgtcagttttacaatggagacagacaatttaaagaaggaagcagtttttctgagtgtggca

SEQ ID NO: 3028 - DNA, 4001 bp, Homo sapiens
tattatgaactgagttcatctaatcattttaataggttttcaacagagggaagaaaattgaacatgagctaatggtagggaccaaagtctcagagaacaagaactctgcaactgctaataagagaatttttgtctctgtagctggtgaaatatttgaatgatatccaatgattaatgtttctttaattctctaggtgaccaaaaatcacacagaattatctagcaataaatcctctttacataacagccaaagcacttggggttgaggaaagagaagagaaataggtcttacccagcaggtctggtgtcttcaatggctctatccactgggatcaaatcgctaaggtagacattgaagtttccttctttccatcttctttctgcctccttctcctttccatgggggacaactacaggacgcccaaactgccctggagctttggggtcccttggagaaagtgtcacatcaattcttaacacctggtgcgttccactgtcttcaggtaaaagggcttttatatgactctggttgtattctgtagagggggctttggcagttatgttgatttttgctggctctagccctccagttaaagcatggttagtttgggacagtggcactctatgtggagcaagtgaagaggaagacatctcacttctattcctggaaatgtgtttactttggcttttacccaatactttaggaaatattgttttggttttagaattagagacctctttggggtctgccttttgctcttcctctttggttataatcacaagatggctttcagagaaattgagtttcttcccatgagcccctctagctccatcatcctttgacaaacttcccaaaggtgtctcattaatagattgcttccttaagcgatttgaattgacagtgaacttaggaaaaggaagactcgtattggctttgtgtttatttgcattgacttctttgctctgagtcttagttttgtttaaggccatggcttccccagacttcggcactgctgtgctggcagggtgtgccctctcgtttgctactgcctgtgatcgctgctttggtctatcagtactaagactgatggtcacattcaagtccctttcagctgctagttttgatgtgtcactgctgggactatgactcttccggggctcctgttttaaactgacacgtcccatgtgtactgatattttgactacctgagttccttttgctgctatgaatgaggtctttggagccccctgagctgtcgtttgctttggtgtcccctggtgagaggaggcttcaggtttggtgcctctcccgtctgtcttctgcttgttaggagtcacagggagggtctgcagatgtgcaggatgccacaacggcacaaccttgccccttcccagggcattctgcatttttctttccctctgggtttggtccaagtccacctcaaccttgagcacactctcctcagtttttctaacattctctttgccccatgcccctttcccatgtccccttaggggaggtttcatctcttttatgctgctgtaaaaaatttttccttggtctggctgaactctgaatcctatccgctccctcctcacaatgtcttccttgatgacccgagtgttgatctcactgaatgagaggcggagagctgccatgtcaaagaggagccagatgacagaagctacaaagataaatgccaagactcgcccacttcctcggaaaaactttcggatcctgttcatggtacaaagctttccctagcagcctgccctcccttagcctgcttaccttgagtggagaggaagctgaagtagcagcagcagcagcagcagcagcagagttgccagaaagtgaccccctcccctgaacacagcaggaagcagcagtccaaggggaaagctcagttcctaccgcttgtcagtctctgcctgcgtggcatttcatagcagagcatctgtgcctgcttggctggccctggctaagttctgataaacactggccttaggtcactccaggagcagttgattccagccaccgaacagttcaacatatcacttgtcttgtctccgggagcccatgtccaccttcctacaagcccaagaaaaggtgggggccagattgagactgccgtttctctcctccccgttctccgtctgcacgctgtaactcaacaccacttctcataaggaaaacatttcatgccattacccagaaaacttcattcagctctcaccttctgtgttatgtgagagcatgtgtgtttaaacggcaattaaagaggaaaaaaagctatctaacttggagggcatgtgttcctggtttgtgaccccacctaccctactcctgctcattaaccctgttgtagccaggtgccaatgctctgcctgaggaatttatcactgaagttaacatttcagctttaagacataacagcttaaagaaggggcctggtatatcctcacttccagagatgtatatgtttaattatttagatcattcattcaaggggtttcaatgtatttctttgtaagccaactatttttttttcactaatccatctgtttttattattacatttgattacaaataaacttaatttgtcatactgctataaaagtttctaaacactttgttatggtctgaatgtttatgtccacccaaaattcatatgttgaaacctaatcataaatgtgatagtattaggaggtagggcttttgaaggtgatttcattataaggatagagccctcatgaatgggatcagcacccttaaaaaagaggccctattgccttgccattccacaaagtgaagacataatgagaaggtgccatctatgaaccaggaaatgggccttcaccagtcaacgaatctgctggtgccttgatttctgacttctcagtctctagaactgtgagaaataagtttctgttgtttatgagtcacttagtctatgttattcttctatagtagcctgaacagattaagatacacttactctcagtttcagtacttatctcgtcttaaaccagcaagcaacagtttcaggaccacaccaggacttggaccagattttgagtgatgctggttgactggtagggtagcagttccgccacaggcttttcattagaaccacttgaaacaagatccccaaaactctggtcaattgatgagagaggaggtggagatgacatttgggctgatattgtattaaatatatatatatatatatatatatatatatatatatatatatatttttttttttttttttttttttacaaagcttcccaggtctttcaaatgtgcagctaaagttgagaaacactggtctagaaaaaaagtctcaattttttgtttgtttgtttttggtttttgaacattgcctatgagacatttaattttaggtgtctacttgactgggctaaggaacacccagagaaccagtaaagcattatttttaggtatatctgtgagggtgtttccagaagagattggcatttgactcagtgcactgagtggggaggagatgccctcacccaatgtgggcaggcaccactaattggttgagggcccagatagaaaaaaaggcagaggaaaggtggattctgtctctgttagtgagctgggacatctttcttcttctgcctttggactagaactttagattctctggctttggcctctggggcttgtaccagtctgcccccacaacctccacatccctcactaggttctcaggcttttgacctcagactgagagtgatgttattggcttccctggttctcaggcctttggactcagaatgtgccatgttactggctttcctggttctccagcttgcaggtggcctggactgaggtttctcagtctccataaccacatgagccaattcctgtaataaactgcaactcacttatctacctctatgaatcctattggttctgtttctctgaaaaatcctggccaatacagtctacaacttgtgtgacattcctt

SEQ ID NO: 3029 - DNA, 4001 bp, Homo sapiens
tgtgtgtgtgtgtgtggcagggtggcgggcggttcaagacgcacaggaagggcctggcccccactatgtgtgtgttgggggtgttgtctaagctttcccctgtacctcctcacctccgggggcccaagaagctctcctccaactctgctccctcctctgagagctgtcctgggtcctagccccatcttcacagccacatgggcacacagcagtaatcatggctcatgaccaccaacagctgaaccacaatagcccacagtgacagatgcttgtcacccaaacaacataactcagtctccggccaaggggcccctcccaaatgcacaggcacacagggacctacccttcaagccatacaattctgaccagacattcacaccctgatggtgacccagccatagccacacactgtcacacacaacagacagctgggccatcacaccagttgttcattcactcacccattcattcaatccataatctttattgggcaaggatgcctggtctcaaggagcccacagccaggtctaaagacaataaactgactgaccattataatggggtgcacagtaggagacaagccagagttggcatgaggtggccggggagcccaaaggaggccctacgcagaccgaggagctcagaaaagctgcccagaaaggggagatgccaaaaaggatgtgtgggaagtggccagaagaccccagggcagcgacctccattcacaggcagacacagtaccacactctgaccactcggccgcgagccagagaactagacgctggcctgcccgacggcggggcgccgatgctcccccatgagcctgctcccgggacagctgacgcccactgtgcccactcctggccgccacggaggaggggctgccgggccccacggggagacgaggagcctgcggccgcgggccccattagcattcatggaagcgagtgtgccaacgcgggccaaacccctattcttctcacacacaaaacccccggcctggctgccagccccggctaccgcccatcccccaaccaagcagcacccccctccccccaaacggtcccctcgctccatgcagcctccgggcgtaccctctcgggcccccatgcgtggttccatcagccgagcggctgggggccccaggtcctattaagaagtgggacaagattcgggggagggccgggagtttgggggtcacgccgggcagcagacccggctcccgccggcctctcccgaaggtggcctgcccgccccaggaccgaggctgctcctagggaagagaaaggaggtgcaagaagggtccccagaggggcggagcaggactaggggtggcggtaaggggaagacagagtccgggtcccagggatgagggaagacagaggtgagaggccagggacaaagggaccaagggggcgcggccggggcggggggcccaggggcagcgggggaaaggggggcaaccgacggggcgggagcaggggctcggcccctttccggactccagctgggcgggaaaactctgtcccgggccctgtccccggtgtctgtgcctgtgcttgtccgcggggcccaggaggcggacctggcgggtgggccccgcgtctcccgggaggcgcgccaggaaccgctcggggcccacgccggggagctgggagggtgcgggtgccgcaccctcctcacgatccctctggcccctggctggagagcccaccatttccccgcggaccccggtccccatctccagcgaccccggtacctggcccaaggcaggcgagcgtgggcaggcggcagcggctgacgatgaggtcgagcgggaaggcgcccatgctccagcgcaggccggccagcccggccgccagcttctccatggcatgggcgccccggggccgccgtcccggggccccgacggtcagtcccgcgcggcccaggctctcgcgcccgccgccacctcccggggccgccgcggcgctcgccgcctggcagccccgccgggccgcgggcgtcacgtggccggcctccccgcagggcgccgaccccggccccgcccccgggccccgccccctcctcccggaccccggccccctcctcccggacccccgccccctgctctgtccgccccgacccggactcgccgccggacccacccccggacctccgcccccagccctgtccgccctgccccgccccggccccctctcctcggaccccgtccccgcgcccccttctgggaccccgggtccccagccccgcgctccgtccgcccgcccctgcccccgctccccggcccccacccgccgctgccgccaagccccgcctcccctcccgccagcttccccgcgcccaggtgacggcgggtgatggaggaccccagggcgggcgcctggagggacaacgaagtcccgagcggcatctgcggagtcggcgcggggtcggcctcctccttctggctgggtgtgtccgggccccgccgctccccctcgtgctggcctcccggaggccgcgcccacccgcgccctgtcctgctccgccgcccaaagctcgggttctgaattctgctcttccaggaccttcatcacctccggctccgtggagctgggcgaggcagcctccttaaccccattttactgatgagcaaactgaggggcagaggtcaggtggcagccaggacttcaacctaggttggacttcaacccagatttgactccaaccctactgcccaagagcaccctacagcgccccaccatagagcaccttccacgttcccagcgcccccttagccgatagccctgtgtcatgtaaaccggcgctccaacccttccacagcacgcggtgtggactgcgtccattctgcagatgaggaggccgaggttcgagggcgtaaccggtgctgcggtctcctctcggatcattacaagaaccgccttcctcccccaccgccaccatcccttctctcttttccttctctttttttgagactgggtctcactctatcacccagcctggagtgcagtggcgcgatctcggctcactgcaacccccacctcccgggctcaagcgatcctcccacctcagcctgcggagtagctgggatgacaggcacctgccaccactcctggctaatttttttgtatttttagtagagacggcgtttcaccatgttggccaggctggtcttgaactcctgacctcaagcgatcctcccgactcggcctcccaaagtgctggacttacaggcgtaagccaccgcgcccagccttcgttcccttcttttaatttgcgtttccttttctgctgtcctcacctcttccttccaagccccctggactccagctcggggcctccctttgggacccccttcccagaagcttagatggcctcggcctcggcctcgccctctctgtgtctgcggcgccctctgcaggtaattgggggatgatgcgggcctggctgatctcgcggagccagcgggccttagtccctaggctgctccctcacgggagtgtagtggcacgatctcggctcactgcaacctccgccccgcaggttcaagcaattctcctgcctcagcttcctgagtagctggaattacatatgtagctgggattacagacaagcaccaccatgcccggctaatttttcacctggctaatttttgtatttttagtagagacagggtttcgccatgttggccaggctggtctcgaactccgaactcaagtgatccacccgcctcgatccatcagtcctcagcctcggtacccccggaagaaccccaccaaatacaaacaaaaccctctcttctgaggtgactgacacctggcatcttatggctcgaaccccatgagaaatggcagccgacaagatgaacaccacttctcagcgagaagagacgttttagatcagtggttcaatcctcaactgctgcagaggaaaaaactgagactccaagagcagaaatgctttgctctaaggtcacacggcaagaaagaggcagcgct

SEQ ID NO: 3030 - DNA, 4001 bp, Homo sapiens
atgcagtgaggctagcggctgcctgcccagagaaacccaactgcaaatagccccaaacatgtggacacagctggcctctgatcaactatcagtgtggtaccgggatgctggctccttgctctgtcccagcctgacctctgacttgccgtgacaagttcctttccctctctgggcctctgggtcctcatctgagggggtagggacagatgatcatgggccctacctggatctggcatcctgtgcatcgccctgggctgctgatccgcatggaggtggcactgggccaaccagggcctggcccagcccttgaaggccctgggagaaccactctgaccccagctctgttcccacaccctgccctggtccaatatccaatcctactctcccagaggctctgacctgaacccagcaaagccacctccctgagagtaggccttcccaacctgcagtctggggctgcgtgctttgccaagctcagcacatgcccctaggagacacagactttacggaagtgattgccagtctgtgaagctgacatccctgtgtaagctctctcacctcactggccagacacctgttatatgcatacccacatgagcacaaaacaagctctgagccgccctggcatctgatggatggcctcttctcaagctttatacagtaggaagagagccatgaataggtgagggaacaagtcgagagaagacaaggtgactctttagcctctgggtgttttttttgagacagggtcttgctgtcgcccaggctggagtacagtggcatgatcacaactcactgcagcttcaaccttctgggctcaagggatcctcctgcctcagcctctcaagtacctgggaccacaggcatgtgccaccatgcctggctaattttttatttttattagagatgacgtctcatgatgttgcccaggctggtctcaaactcctgggctcgagcaatcctcctgctatggcctcccaaagtgctgggattacaggtgtgagccaccgcgctgggccttctttagcttctgaagcccctgtggtagttgcttctgtcacagttcattcatttaattattgcacagatattgatggagcactcactatgtgtcagacactatggtaggccacacagagggtacaaatctgtgtaaaatacagtctgcccttaaagaaatccagatataatgggtgagacgatgagtacccaatggtggcaggatgtgataagtgctacaacagacttgtgacaaaagagttacaagacggctaggtaggcaaaacctgcctggcggaatctgagaggatcactgagctgcaccttaagaatcaaagggaattcacagaatgggcattccctgtggaagaaacactgtaaacacagacacagagacacaaaagcagaccacctgccccagatggtgcgtgcctgcagggaaggacttagggagagggaggacaggaggggatgcagacagcaactgggatttgaaaggctctgaatgccttgctaaagcagtaaagctttattctgtacaacatgagacccactggagtgtttcgagcaaagaaataccatgatccaggttcagctctattaaaataaccgggagaccagtcaggtaaacaaaccagtaaggggttctggagaagagctagggaatagcagaaacagaccaagagatactgggaagggagacccagcaggcttgggtgacagaagaagggggaggtggggaaggaagggactcaggatgatgtactcaggccaccagcctggtcagaaatggagatggcaggccaggcacggtggctcacgcttgtaacccagcactttgggaggccaaagtgggcagatcacttgaggtcagcagtttgagaccagcctggccaacatggtgaaaccccatctctactaaaaatacaaaaaactctctgggtgtggtggcacacacctgtagtcccagctacttgggaggctgaggcaggggaatcgcttgaacctggaaggcagaggttgcagtgagctgagatcacaccactgctctccagcctgggcaacagagcgagactctgtctcaaaaaagaaaagaaaagaaaaggagatggcagagctgttaaccaaaactgggaacccagaagaaacatgttgtggggccaaggcagatcctggagaggccaagaaaggggccttcaggtggtgctcctagggtgggtgccaccagtgaaatagactggccagtgaaatagactgaaggtcaccagcccacaggtggcagcctcggctgtgaggcaagtgagatggctcagggaagaggaagagcagggggcttgaccctttggggatgttcatcccagaaaaatgcccacactgtgctcctagcatgaacacacacacaattgtgtgttcagtgctgggggttcctggagacccctaaacccagcgagagacccagatgaagacacccatggtgcagggttagaggagcagaggtcagggcctgaagcatcatcacggagcagggagagaaatgagagcccagaacaaggggaaatgactaggagaacgctggcgggggagcccccaggcctgccctccccgccctgggaccctcctgggaagaggcctctgaagtgccacagccctagagggcaacagaggaaaaatgtggaggggggcaggcaagaagcaggggtctaggacttgggaagcaggaactgcaggcactgagtagcctcctcccctcactcccgcctcctcccccaagtccacacacaacccccacccccgcccctgccccaaccacaagtagccaggcagggagcaatgcccactgccccctgtggggcgacttggagccaagtcagggctggagctgggggaggatgtggcaggaaagatcgatgtaaccatggcatccagcaccatccccctccgcggcagcctgaagcccagcgccggtcattactgcgggaggaaggaagggagccctccagggagtgatgctctggaccctggaagccttttcctccccgccagcccaggggcggcttcctctcctgcctccccctgtatggaacctgaggtcccccacggctctaaggacctgctccatcctgacctgcccctcctccttgtccttgccctcagagcacatggctgcctcgctcctcccttccagccccaagcacctgagggctgtggcaggggattgctgaccacccttctccatgcctgccccacagcacacactcagtaaagaacgtgggtaaaagctcaggctttggagtgcgacaaatctggctgaatcccaccctgccactagccagctgtgtgaccttgggcaaattatttaatctctctgggcttcggatttcccgtctgtaaaatggaaacatcctagttgggccagaggcgcatctgccaaatgctgagcaggaaacaaggccaacactggggaagtggcaccatgctcagggaagacgcctggcccctcccgcagggccaggggcgggggctgggacgggggacagtacggggccaggccaggtctccctgactcccggagcagagcgccgcagcctggagaccgagtcaccccgcagtgccttcagccccacccggcgcgagtcgccgtcctcctccctccacggccttcccctcggctctctccgcggtccgcagccggccacccccgcccgcccgagcgccattattaattcattaggagaaatcagcgtggagcccagccgtgcactcagcgcctcctcgttaacccgccggccttcgccctcctaggggcctctgcctccgcctccgcctcctcctcccctcccccgtgcgggcggacagaagcagccccgcgaaaagatggggctggggccgcgccccccaagaccaccacccctccaagaccaccaccgtacacaggcacgcaggggcgccagagagatgggaggaagagctaggagcccccggacccacggttccctgggaga

SEQ ID NO: 3031 - DNA, 4001 bp, Homo sapiens
gggctcccctgtcttggaattggcattgcctgccttcacccgtttccacttggcccgtcggttctggaaccagattttcacctgcacctcgctgagtttgagggcgtgggcgatctgcgagcgctcggtcaaggagaggtactttttgcagtggaactccttctctagctccagcagctgctcgctggtgaaggcagtccgccgccgccggttcttgcccgtagacgtggtgctgcccgcggcgccgctgctcggcggggtctcctccagcgcgtggcccgggtcttcctccttgtgagctgcctggccagtcagattgtcatccgagctgtagtccacatcgctctccagcgagaagctctcctccttgcccttcgggtcgtcttccacctttgactcgtctttcccttgccctcggacagccccgactgaaagcaaaaccaaacggcattttattacatttcgcacactggccttcctttctccttcccaccgtcatttggacattccgcgccccccgccccccaccctttagcggattgtctttctatgacattaacacattgtgatttcctggcctttgaggggtagaggaggggtggggggagcgtgagaaagctcaaaggagaggaggcagtacaggcgacggccctttgcccagaaccatcactcaaagggccgccatgcctcccccgcaccctcccagcctcggcagcgtcaggagaagtagcaggaggcgcgaggcccaagagattgcccgctttgtccctggggtggggactggttgaggactgatggggggattcacgattcatcctccccccaccgccaccatgaaaatgtagtgaacctcaattgcttcctaaccggagtggaggcgtagggacgtgcagatcccagaccatcttttttgagacagacaacgttggtcaaagggatgttttgtggccttataagttcccaccagacacccccaacacaaacacacaggcacagcctcccagcagtccgtttctcccagacaagtagcaagaccagcgaaggggtttaaaaagtctgggcgcccctgggcacacgcacggctgagacgcgcagcccaacccgtctcccctagaggctgcaacctacccggaaccccaggtcaccgcggagcggcagaggcggcctcggccaaacgcatcgtcagatagatatgtggcccagggcagcagctggtcgccgggcgctaaacgccccccctcccgagaccccgcttgttgggtggctctgaatgtcccccggaggcccagcggcacagccgggcctcatcctccagctcctcccgcgggggtcgagcgggggcgcggcctcgcccccttggtctcccgcgggaacccggcgctggcccgcccccgcctcctcccgccccctcgtcccggctgcgcgcgccgccgactcaccgagcgaagcctgcaccgtctcggccgcggagaaggcgagcagcgagccctctttggccaggaagcctttgccgtcctccgcgtcagcctgcagcgcctccgccttgtcgaagttaccgccgccgggcagcggctgcggcgcgaacttgcgggccgctgccgcctcctggtgctggggcgacgcggagaagccgccggggagcgtggccatgagcgtagaggtgagcgccatgccctgcgccaggctggagcagaagcctgtgggcaggctggggatctggtggtgagggtgtgcgggcggcagcgctggctgcagcgcggcctggggcagcgcgggcggcggcggcggcggcggcggcagcactaccggccggtagggcatgaacatggggtagccggtgtagacgaaatggccggggctgggctgcggcgggctgccgatcagcgagtctatgctgaaggcggtgctactccccagcgggcgctgcatcatcatcagcgacggcgggaacgctgcgctcatagacgcgctcggtagaggccagcgagaggcgaaaagtccccgcgccgcgccgccgccgggaagcccgccggacgccgggagcaccgccgggagcgccgggcaggggccgagcgggacccggagagcagacgcctccgcccctcagtcctgggcccgctgcatgccgggcgggtgcagggggtgtgcggggtgaggccgtgcgccccggagtggagagggcgcccgggccccgagggctcgccggagcccccgtccgccgcttgcccgtcggagcccgcgcgcttcgcgggtttggccctcggccccggtaagctgccgtccgtccgtccgtcccgccgtccgtcgcctcccgcgggccgctggggagcgcgcgaagccggcgtacttatctccggcgggcgcagccagcacctttaaatcgcgctcctctttctcattcacattttgcctgccgcctggcccggctcgcctcacgtggggctgggcgcctctggccattggctgagcggggcgggggtggggcgaaagcggggccccgccctttccacccaagctggcctcgagcgggctgcgggcgccaccgtcggagcgcgcgggccggggagccggagcctgcatgcctagcccgtgccgcgcaaacttgagacgggcggatggcacctccaaggctcggaccttggggccctgcagccttgtcgaggccacctcgaagggtagcctccggggcccgcacccccacggctgggccgggggcgctttatttcttttactgtatttgccatggaaccaacctgcctgcggctcactccagcgctgggtgctccggctgcgcctggggtccgggcgagggtcctggagttgggggcagggtcctgcccctccggagccacccccggggcgaaggctgggagctggcagcgcctgcccgccgccagaaacccgccgggttgctcgctgtaggtccgcgcaccgggtggggcggggaggctgctgcttcccccatcccgggctgggccctcccgtgagcgatcccgtctctcatttttcatgacattcttaatcatcgcacctatttacacactttgccagcgcgcaccaaaataacaaccacgataattatgataataaagagagtcctttatctgctccatcctcggggaggaaggggggagttgctgtgcctccagattgtataacgtgagattatcctgatgaaagctttatgatgtttgctcaaataaaagctgcgttttgtaaataggcgctaattaagcacgttgcgaacgcaaggagtgctcaccctggcgccgccgcccggtttccagcgcgaggactcgagggcgcgcggttcctctttgctaactgcaggatggagccgatcccctcaggatgtttcccctgttctcgacaacggtaaagacccccaaatttgaaagtaagggaattttggggtggagggaaactagggacgtacttatcccctcttccattttcaaacaaaaaactttcagctcttgtcttccctttaaaaatggaatcacttcttgacaacggcagaccgtgcagagcgcaccagcgcgagcggggcttcctcgagtctccaaggcccgggcttcaacttcccgggtctagacgtcagccctgaaccgccaacagcaccgggttggggagaaggaaagaagggcattgttagttcggtcattaaaaatcagctcacgccgaggagctagtggttggggagttggcccgtgttggacgtgtgttatgtatcacttacaagcacatttaattgggagataaagataaatcgatctttatgaatttatcgacccgattctttgaagctcttttttcgcgttcttcctctttctctcgctctagccccaaggccccccgggggacgtcttaatcccagatcagctcctctgccaggagtcccgccggagacccactgcccacccagcagacctggaggaaagaggggagggtgtgtccttggcgccccgggacgctgggaaaactcgctggtccgccgccag

SEQ ID NO: 3032 - DNA, 4001 bp, Homo sapiens
acaattagtaaaaaaaagaaaataatacaatttttataaacaattcttaaaagaagaaagtaaaaatctattggaaatgcatctcctacagagataaatcatgcacttaattagataaaagtatactatcaaaacaattaggtctagcagctgacattttatattttgttaaaagaatataagaaacattaataaggcatgggtttcctttaacaggatttataaacgtctcaactatcttattaatattctcctactaaagaaatcatgtaagttttatcccaaaattttatccaatgtatcttaaaatatttcaattacattttttaaaatcagtgcctctaatctatatattgcttcagctattgagggtacttctctttccggcgattaataatgagcatgacaacagctgaaaagagttgtttattttaaattcatggaaaaggggatttaaatattcaaaacacatacagacgttctctttattgtgtcgtggaactctccatcaaattcaagcactctgacaaaagtgggtaaggaagcaccaaattatttgaatgaaaatgtattactcttgccacctcactctaccatacatatatgaattcagagcataccaagaggagtaaatatacaaacttctaacagatagcttcaaccaaatgaaaatacgtatacgctagggacgtttttaaagacccacaggtttatgctatcttgattaatcttcgaaggggctttactttccttaggtaccttaaacttccttcctaaatttaaggactgaggaggcataggcattacaaagtggacggtgccagaggggattgaggcaagtcttaaggaaagcaaatcaattttaggaacaagtatgtgtggaagttgaggacctggaaattcatatcctaaaacaacaacaacaaccacaaccacaaccaccaccaccaccaccaccaccaccaccaccaccaccaccatgaactccaaggggtaggagtaactcttttgaagaccacaaccatagcccaaagtcaagtcctatattaaaatcagtaaaacacaatttctctttttaggtaaaaaacaaatagaaaatatattatattctacccacaccgcaatggatcaaactactgttaactctgttaacacagcgtgtagatcactgacatcgatactaaaggtttgggctcctttctgaaaagaaggggctagccaccaggactctacgattataacttgcaactcccaaaggtgatgcaggataaaagttataacaaagagtaacttccccccgcctgggggcgagcgggggagtctagaacagattgcccttcgtataacagtaaagattaggagttatttaccgtacaccttaatttattcataaggaacttaaagaacaagaagtggtcaggaaattcaaaaagaggatctctagcaacactgagtggggggcgggggagggaagtaccacaaacgattactggaacaagaagagggtggcttgttcctccattccaggaaataaatttccaaacacacattactccctcggctccaccaggacgctcctcgagggtcctcaacgaccagaaaacctgcggctccaagtcagcccaggatcaatgctcgcccaggccctggcccccaacagccccggaatccggcgccgccgagtaccaggcgcggacgcagggagcaggagccaagggcggacccgcacgttggcaccgcccccgggggcgccacaccccgcgaggaagagggacacgaccaagcggctgggactcacccctcctccgtatcccgggtaggccatgacgagcgggacgagcggagcgagcgtcaccctcgagtcgcgtccgcagtgctgggagaaaaagcacaggcgcaggtgcaaggaggcgcagctgcaggtgaggctgaaaggcgcactaaccgcacagttcactcctccgaacccgcccccttccgcaggccagccccgccctgcacggttccgattggctgagtcccacactttggagccaactcagctgcagtccgccccttcccgcagcctagccccacccatctctgccctgattggctacaccccatcgggagccctccagtccctgctcgactcttactggctccctcaggttctcgcgcgctctccttctaaatcccgaagaagccttggctgctgcaacggaattcccactctctgtggaaaggtcttctacaagccttcaactcctcaagttacttttctttctagaaaccccaaaccggcaagtctgtgacttattttaaccagccctccacgcttttgagctggacttcaaagacccatctgtgaatttcaaaattttgcagttacatttacttttgtgtagtgttgatgtcacatcaaaactttgcaaccaggaccacacctgtggtccaggaggagtgcttctgcgccaaaacccacttgaggccacattggacgaacaggttattgattctgtttggtagataaatggtgacctgaattgtggcatgttggcaaataaacaggatatctagttaaagttgatttccaaataaacttttttagtgtaagtatgtcccaaatattgcacaggacgtgaacatacactaaaaacttatttgctgtttatacactgataatatagacggtgtcctgtatataatctgactcagcctttgggcaaactcttgttaaatgttcaattactttggcttattaagtaatagcaatggacaagtctgatttatctctggaactcaaatgaattttgtagctctgactttaaaaggacaaggcagctgtagctttggcttatgaacaaatgaaaaaaccaaatgatattattttgagttatctctgaagaacaagagaagggctaacatgtttcttaaaaataaggctatcaaaaaaatgttaactattcacaaaggaaatcagccttgcagagctgagtatctgttgttcagctatgctacagaagaggatgttggaccttgtgaaacaattctcagaggaaacagcagagagaaaggaagattgccgatgtcctagctactcttgggaaagtgtctgtaagttccttcaatgctgtaagaaatacttaagccactaaggttaaattattggcataaataaatagaggggaagggtaaaacctacgtggcaaaagggaaaaatgcatggcttatgaaggtatcaaatgataaagcgctagaaagaacaaaccattgcaaaattttattccaacggattaactacatattcaaagaactgcttaggaaggattgagtgtttacatttacaatgttagtctgattctgtggtcaaaatttttgtgcatcttgttttcatcaaaatagccttattgatgcagctgcatttgtgcagttgggagttaaggccccatgggtttcttgcctttctgcacatttaattgcaaagatagtatttcctgccagggcaaagtttgggtacgtttgctagcagccttcttaggactttcctaagcttggagttcttccagttgcataacaaacacagtgcatgtacaacacccatctggcagctcctcttcgccttgtgggacttcagaacgaggggaatctatggaagtatgaagctcatggtgcctgttgtgctttgagtaataaagttatttgtctcagactcaggaatctcacacattctgccaacttccatgaaactgtggcactctacttgtttgcttataactagggtaaaatatcagatccttcatagttcctgccaatatatctcttaacttagagaaagggctaccaaagaaagttcctaccatgaagatgcagaggaggactttgaacaacacagcatctctctctctaaaactagtgtttcaaattttaaatattctagtataaaaattcaaataaggccatagagttttttttaaataacagtaatgttaatttgcctccatgagtcaagttaatactgt

SEQ ID NO: 3033 - DNA, 4001 bp, Homo sapiens
acccaatacctgtacaccttgatttagctttctgtattagcatcatctgtttcttggcaaacttgatgaggtcttctttgggcaatgtttccagctgaaagatgtggtcatgttaccaacttgttataactcatgtttctagtataccacaaaaaagaaacaatgtctgctagaaaacaaaaacattctacagaataaatctttatgccaaccgcatactttgttccacattttttttttgagacagagtctcgctctattgcccaggccggagtgcatgacacgatcttggctcacttgtaacctctgcctcccaagttcaagcaattctcctgtctcagcctcccaaatagctgggatcataggcgcccgctaccacgtccggctaatttttgtatttttagtagagacggggtttcaccatgttggccaggctggtctcaaactcctgaccgcaggtgatctgcccgcctcggcctcccaaagtgttgggattacaggcgtgacccaccgcgcccggccacattttttaaaatcagcaaatgcaacgtcaattctgtaattgctatgcaactactaaaaattagttatgcaactactatgaaacgtaaaaaccaggccatatcctcttatagctaatgttacaggttgacattgctagcttttgatttaattgtaaaatcagtaggttggagctaatgctacttaaaattccttggagctgtaaaattatttcattctattcaaggctgcaagtctttggtcacaagaaaatttacgcataattacagcagcaagatgaaccgggtaacattcaggctttaattaaaaaattgagctttaccacttgagaaaattgcttaagcctgtggtctcaggtttctcatctgtaaaaggagggtaacaacagtacctatctcatggttatcatgaagcttaaacgaaggaactgagtggttaggcaagcgccagaaatttagcatgcacacaataaaccttagcaataaaccactatcatttagaatgattgaatgttaaacattgtacagggccataaaactggactaattaaactctttggcaatgtagaaactggagcccacagatcagaatcccttgattcctaccctatgtcactgctccttccactacaccactatataaaccttcttagactgctttatgttcgaaaaatagcaggatctcccagcagtgctaaccaggagcaggaagcaaacaaaaagtctttctatatcggggtgggcgggggagaaacaggaaatgggcgattgcgcacactaaaattgagatcccttggagcaaggctattaaaaaaaaaaaaatcagcgccccccccttccccatgccaaagttttccaattcatcacccttccactcttcaggaagcccgctattcaagtattctcttcaccttagatttcccggtcccaggggtagctggtgaagccaccccatcttgaacaagatcctgcaaaacaaaatcaaacccaggtgtcagaagaactcttttcctaattccacacggaacgcgtagaacccttacagggaaaaaccttctatggaatcaagtggtggaaagcctcgtgagacagagaatgagggcggacggaggcggtcgctgtggcaattcgtacacaaacgggctctacggggcaggtaacccccagggatagagtttacgaaagatggggaggcgacagcagcgcgggcttcgggacaccaagagggagactaccgcgccctcccatcgggcccactcccacatcccaaatcgcggcgcggaaggcttgatgggaggcagtgggcccgacctgagttacctccatctccgccagcccgccgccggcccgcaaccagccgccgccaccgctgcacttctgtttgcgccagcctctgacgtaggctctactgcaggtcaaaggtcgcgctctccgggcggcccgccccccacgtctccatagctacagctcggcagcacttccgcttccgtgtctgcgtccgggagaaggttccccgtacggcgctaagggcggagtccgtctagacgttctacctggggctcgacccctgggcctgcaggtcacggagtaggtgtgggtcccgccactgccggttattggcatgggaaggcgggccgattaccccttggggcctcgggcctcggtttccacgtctgtaaaatcttgtgagagtgaggaacattggattgcaggacaggtctctcagtcctccaaaggtgtccgctagcctgcgagtgcctgcgggacccacagctggttccggggggctccttaggcatttgtggccagcatggtgcccgggagctccgtgactcacaggtcagggatgcggtagagggcttccctgaggaggcatttcttgactctggaggctgtgaggaggtccctggacagctctgccctgcagccgcccggtactgatggtgatgtggtggaggcaagatagtcggccagggaactgggcagccgtgggaggagactctgtagagtagggggcccgaggccaccctttcccgaagggcacgccagagaatctgtggtcgaatcccagagctgctgctgtgtcctgattggcggtccagtgctctgagagcctttctgttaactgctgaagtggtttgctgcgctttcaccttcccattaatgttttccatacactcccataactaaggtaacctgaagataacctagtttcctgtagtttaaatggtcaaaaggttgaagaggcagcacacagtatgtatcgagtaaatggtagctgattattactaggtaaaagaagtgttataaacgagaaagaacagctattgtggacatctactctttgtctttgacagtgtgtatcacctatggtgtttgtaggattggttcaggggtggtgtgtgacctaagatgtacagtctccacgtacagtaacacacgtgtgtgtgtacacgtgtgtgtgtacacgtgtgtgtgtgcacgtgtgtgtgtgcacgtgtgcgcgcacgtgtgtgtgcacgtgtgtgtacacacatatatgcacacacatgtatacacacacacacacacaatccccaagtatacattgttattaatggtccagattaatgccattcaaagtagttccccaagttaagagcaacttacggtagactcctatttcaattaataacttgaaaaaatcacttgcaataaaatagcaggttaactagatactacacacattccaatcctgtaaaagtttctcagagaaacactgttagatatagttacattccaggagtttggctacatcaatagctacagaagagttgatgttctcacagtagaactctctttttctcatacttgaaataaaaaagaacctttcttttcttcctttgatctttcttccctcgccagccctccattgcacttggctgggtaacagggtccatgagttgcagctacaggtagggcagcgtctcctgggaatccccagggagatgagggtcagcacacccctaagctccaggtcatcagcggcctcctcacacagctcgagctcacccccatctgccttcctggttgtcattggacaggaattttattttctgagatgatggaggcaggtataatgttcttgaccatcggataccttctgttgttgttcctcttaaggaagaaatcatttatttcttccttcactagttatagtaagtgctgaaatcttctaaatatatttatcatctttcatactttaaagaatgaatatttatgaattgattgtgagtactctgagatcttctgatattcataaacctataggaaagatctgctttatatttcacattctctggactgcagataagttcacattttaaagatgtatattaccttaatgagcagaactatgacctgtttaacgaatatgtttctttccaattgtaaaagtaacacaggttcattgtagaacacctggaaaatataggaaaattc

SEQ ID NO: 3034 - DNA, 4001 bp, Homo sapiens
gttcaagtgattctctgcctcagcctcctgagtagctgggattacaggcacccaccaccatgcctggctaatttttgtatttttagtagagatggggtttcaccatgttggccaggctgggctcgaactcctgatctcttgatacacctgcctcggcctcctaaagtgctgggattacaggtgtgagccactgtgcccggcccgcaactaacttttaagaagggttagtttattacttgttgagctgtgttatattaaagcacaacaccctcaatgatctaaaaatgctattaagtactcgtcttaatcatgtatctgtcagaggctgtattttcttcaaatacttcaaccaaaacaaaatagcacaagagattaaaagcagaaacacctatgacaattcatctgtcttctattaatattttgccagacattaaagagatctgtaaattgaaaacaatgctactcttccttttttggggtaatacttttcacaaaaatcttacttatccttacatgtaatagattttttgtaagtgaattaataaattttatttttagtgtgataaatattgataggtataacctactgaaacaaaagctctttggaatccttaatcatttctaagagtctaaaagaggtccaattcccaaagagtttgagaaccactattctagaaggcaagagaaaaggaactcctgacttcaactttcatctacaaagtttaaccagaaaacaaatataaaaggtcatgaaaactttagacaaatagaaggtcacaagaaagaccaagaaatcacgaagatcataaacctggaggacattatgttacatgaaataagacaggcacagagagacaaacaccacatgatctcacatatgtaatctaaaaaagtggaaatcagaaatcacagaagcagagagtcgagtagtggttagaagggactgagtgaggttgagggtagttgggaagatactggtcaaagggcacacattttaattagacaagaggaattctattctacaacacggtgactaaaattaataacaatgcattgcatacttgaaaattagtaagagtagatagtaagtgttctcaccacaaaaaaaagtaagtacctaaggtaaagcaaatgttaattagctccatttagtcactgtagacacatttcaaacatcatgttgtacactataagtatatacattttttacttctcaataaattaataaaaatcactttaatgacaataaaaaataataggaagattttagctctcaagactaaccaaaaaccgtattcctcattaagctacaattccaactcagagcagcacattttatttaaacaactttatgctgccttacacctgtatttaagaactcaaaggtacttcaaaatgacgacactatatctaacaccattactggtaccatctacagtgtcatgaatctctatcatgcttctttgtgttgtatatattactattagtttttgcaaataactggtgaaaaaagaaaataaacaaaggggaatgtcccaaaacctagattcctgtactactctggctaaatgttttcaagaaagataagttggtcaagtgtctaaaaggtacatataacttctgcccacttaatagtattataaattattgaactttgttgtgacagtttaggttcttcataaactttgataactgtgttagttataactgatggagtcaactgatggtgaaaacgaagagcctcccaactgtacacgattgttttatttcccccaaggagtccaaaaggcagatgcagatagcgggcaagtgctcgagctattttctcgctcactaccttctggataagtctttctggataagactcagcatggcttgtggtcggcagcaagttatagaacccccagagaaggatccagagaccccgcggccccttcccgccctgtgccgtcacctccccgcttccccgcgtctccctggacacctgagccttcgtccgcgcggggagccgctttggtggcacgccgggagctcgcccagacccggccccggccacgagggccccgaacccggtggggcagtcccgccacctgcgcgcggcctcctccagagggcggctcttcctccgcagaacccgggaccggaagttccctcggcgccccaggctcagcaggcgactcctcggcgccatcgctgtcgctggaatcagccgcgcgctgccgaaaagtccttttcggcctgtgagccatggccgaggcccgagcgcccggcgccctagaacccgctgaaccgcaagccgcagcttcagtgcccgccccctagggcgcgctcccgccgcgcctggccgccgagtgcgcgcgcccgtcccgcctgccttctgctcaccgctactctgtctgcgcctgcgtgctttggctccctggatctggtaggccgagttctgttctggggcctgagtttgcaaagcattccctttgccaggttaggttgcgtggactgacaccttagagattttcacggcctatccggtctgagtcccacggagagcagaactcacgtgctgtccttgtgcaaaccccatccagaaatcaagcgttatgctttccgtcctggactggagccagatccgttgtcttttactttctggagagagtgccccctccaaccaagatttaaaacaaacgaaaccccagcagtgtgaggctcggggtaggaggagatgcctttgagaacaaaaccataaagtctgtacataaacaatgcatacagactagcaaaaatcaaatgacttcccccaggcagcagggcttcaagagagcctggttaaatgttttcacccttaaagaaactatctaaaaacaaaaagctattgtctgacgcaaatttgttctatattcatcaagctctgtctactactgtatctgtatggtagaaatactatataatgttgagctactgcacacctgttatcaactccatgtttagtggcgtcatattgagaggtgacagcgggccagctggagttccgggtgggcatgggcttggcgggcctgcactcggagcagccggccggccctgccagccccgggcagtgagggacttggcacccgggccagcggctacagagggtgtactgggtcccctagcagtgccggcccaccggcgctgtgctcgatttctcgccgggccttagctgccttcccgcggtgcagggctcgggacctgcagcccgccatgcctgagcctcccatccactccatgggctcctgtgctgcccgagcatccccgacgagcaccaccccctgctccacggcgcccagtcccatcgaccacccaagggctgaggagtacgagcgcacggcgccggactggcaggcagctccacctgcagccccggtgcgggatccactaggtgaagccagttgggctcctgagtctggtggggacatagagagtctttatgtctagctcagggattgtaaatacaccaatcagcactctgtatctggctcaaggtttgtaaacacaccaatcagcaccctgtgtttagctcaaggtttatgagtgcaccaatcgacactctgtatctagctgctctggtggggccttggagaacctttatgtctagctcagggattgtaaaaacaccaatcggcactctgtatctagctcaaggtttgtaaacccaccaatcagcaccctgtgtttagctcaaggtttgtgagtgcaccaatagacattctatctagctgctctggtgaggccttggagaacctgtgtgtggaaactctgtatctaactaatctgatggggatgtggagaacttttgtatctagctcagggattgtaaacgcaccaatcacggccctgtcaaaacaggccgctgggctctaccaatcagcaggatgtgggtggggccagataagagaataaaagcaggctgccccagccagcagtggcaacccgctccggtccccttccacagtgtggaagctttgttc

SEQ ID NO: 3035 - DNA, 4001 bp, Homo sapiens
cagaaacacctatgacaattcatctgtcttctattaatattttgccagacattaaagagatctgtaaattgaaaacaatgctactcttccttttttggggtaatacttttcacaaaaatcttacttatccttacatgtaatagattttttgtaagtgaattaataaattttatttttagtgtgataaatattgataggtataacctactgaaacaaaagctctttggaatccttaatcatttctaagagtctaaaagaggtccaattcccaaagagtttgagaaccactattctagaaggcaagagaaaaggaactcctgacttcaactttcatctacaaagtttaaccagaaaacaaatataaaaggtcatgaaaactttagacaaatagaaggtcacaagaaagaccaagaaatcacgaagatcataaacctggaggacattatgttacatgaaataagacaggcacagagagacaaacaccacatgatctcacatatgtaatctaaaaaagtggaaatcagaaatcacagaagcagagagtcgagtagtggttagaagggactgagtgaggttgagggtagttgggaagatactggtcaaagggcacacattttaattagacaagaggaattctattctacaacacggtgactaaaattaataacaatgcattgcatacttgaaaattagtaagagtagatagtaagtgttctcaccacaaaaaaaagtaagtacctaaggtaaagcaaatgttaattagctccatttagtcactgtagacacatttcaaacatcatgttgtacactataagtatatacattttttacttctcaataaattaataaaaatcactttaatgacaataaaaaataataggaagattttagctctcaagactaaccaaaaaccgtattcctcattaagctacaattccaactcagagcagcacattttatttaaacaactttatgctgccttacacctgtatttaagaactcaaaggtacttcaaaatgacgacactatatctaacaccattactggtaccatctacagtgtcatgaatctctatcatgcttctttgtgttgtatatattactattagtttttgcaaataactggtgaaaaaagaaaataaacaaaggggaatgtcccaaaacctagattcctgtactactctggctaaatgttttcaagaaagataagttggtcaagtgtctaaaaggtacatataacttctgcccacttaatagtattataaattattgaactttgttgtgacagtttaggttcttcataaactttgataactgtgttagttataactgatggagtcaactgatggtgaaaacgaagagcctcccaactgtacacgattgttttatttcccccaaggagtccaaaaggcagatgcagatagcgggcaagtgctcgagctattttctcgctcactaccttctggataagtctttctggataagactcagcatggcttgtggtcggcagcaagttatagaacccccagagaaggatccagagaccccgcggccccttcccgccctgtgccgtcacctccccgcttccccgcgtctccctggacacctgagccttcgtccgcgcggggagccgctttggtggcacgccgggagctcgcccagacccggccccggccacgagggccccgaacccggtggggcagtcccgccacctgcgcgcggcctcctccagagggcggctcttcctccgcagaacccgggaccggaagttccctcggcgccccaggctcagcaggcgactcctcggcgccatcgctgtcgctggaatcagccgcgcgctgccgaaaagtccttttcggcctgtgagccatggccgaggcccgagcgcccggcgccctagaacccgctgaaccgcaagccgcagcttcagtgcccgccccctagggcgcgctcccgccgcgcctggccgccgagtgcgcgcgcccgtcccgcctgccttctgctcaccgctactctgtctgcgcctgcgtgctttggctccctggatctggtaggccgagttctgttctggggcctgagtttgcaaagcattccctttgccaggttaggttgcgtggactgacaccttagagattttcacggcctatccggtctgagtcccacggagagcagaactcacgtgctgtccttgtgcaaaccccatccagaaatcaagcgttatgctttccgtcctggactggagccagatccgttgtcttttactttctggagagagtgccccctccaaccaagatttaaaacaaacgaaaccccagcagtgtgaggctcggggtaggaggagatgcctttgagaacaaaaccataaagtctgtacataaacaatgcatacagactagcaaaaatcaaatgacttcccccaggcagcagggcttcaagagagcctggttaaatgttttcacccttaaagaaactatctaaaaacaaaaagctattgtctgacgcaaatttgttctatattcatcaagctctgtctactactgtatctgtatggtagaaatactatataatgttgagctactgcacacctgttatcaactccatgtttagtggcgtcatattgagaggtgacagcgggccagctggagttccgggtgggcatgggcttggcgggcctgcactcggagcagccggccggccctgccagccccgggcagtgagggacttggcacccgggccagcggctacagagggtgtactgggtcccctagcagtgccggcccaccggcgctgtgctcgatttctcgccgggccttagctgccttcccgcggtgcagggctcgggacctgcagcccgccatgcctgagcctcccatccactccatgggctcctgtgctgcccgagcatccccgacgagcaccaccccctgctccacggcgcccagtcccatcgaccacccaagggctgaggagtacgagcgcacggcgccggactggcaggcagctccacctgcagccccggtgcgggatccactaggtgaagccagttgggctcctgagtctggtggggacatagagagtctttatgtctagctcagggattgtaaatacaccaatcagcactctgtatctggctcaaggtttgtaaacacaccaatcagcaccctgtgtttagctcaaggtttatgagtgcaccaatcgacactctgtatctagctgctctggtggggccttggagaacctttatgtctagctcagggattgtaaaaacaccaatcggcactctgtatctagctcaaggtttgtaaacccaccaatcagcaccctgtgtttagctcaaggtttgtgagtgcaccaatagacattctatctagctgctctggtgaggccttggagaacctgtgtgtggaaactctgtatctaactaatctgatggggatgtggagaacttttgtatctagctcagggattgtaaacgcaccaatcacggccctgtcaaaacaggccgctgggctctaccaatcagcaggatgtgggtggggccagataagagaataaaagcaggctgccccagccagcagtggcaacccgctccggtccccttccacagtgtggaagctttgttctttcgctctttgcaataaatcttgctactgctgactctttgggtccacgtggcttttatgagctgtaacactcaccgtgaagatctgcagcttcattcctgagcccagcgagaccacaaacccaccagaaggaagaaactccaaacacatctgaacatcagaaggggcagaccccagacgcgccaccttaagagctgtaacgctcaccgcgagggtccgcagcttcattcttgaaatcagtgagaccaagaacccaccaattccggacacaatattggcaccttgaaatcagccataaagggactacttataccatataaattggaagaccttagaagtccaggtgtttctcccagatatccagtcattaaacatttac

SEQ ID NO: 3036 - DNA, 4001 bp, Homo sapiens
ggcactaaaacatagacactgtaatacctgcagcagtaacttttttctttgaaatattaagttttttgtacattgaatggatgattagacaaaggaacataataggaatgatatattcacctttcttcattcatcaacatcaaattaccaatttgacattttgctatgcttcagtttaaccggttggcagactttggaaaccttgccatatatttaggtagtatctactgattataactctcaattgttatatccgtgcttgcaggaatatttaaatattaaagtaagcacttcttttaaaaattataccactgttgaaaagtttcttgtaaaagcttttagtctttcacaagactgaaaaaaaaattcattccacccaaagtcctaagcgttttgcaatatctcctattatgttccattgaggaggatttagagcaggaggtatcctgccacttcaggagctgatggaagaaagaacaaccataaaccacataaagaagtgagcgttccgtatctaataatattaccaacaataaatgacttcttctgaagaaagaactggctttaaaaatctcacttatttgtttgtgaaagtctatcgaattgtgaaaaaaaaaagaatagagttaattgtttgaatacaattgctgagaaagtagagatttatgttattttagtattaaaatcttattcaataagaaaataatttccagttaatttcccccctctttaggtagtctaaagagagcctgcagttttgtaagaactacaaatttccactaaaatttaaaggaaagtatggtaacaataataagtaggaagtcttacagaaagattaaccttagacctaaaaaagaagacattatgttctatccccaaatgtgttggcattgtagtccatataaatcctttttcaaactggttagctcattttatgtaataggtcttcagtatgtatggaaaaatacaccacttaatcatttactccatcaaagatctttgtaaatttgttttttgtctctaggagcctaatctaaaaagacaaattaaaattttattgcagagggtagctattttagattttattactatttatcctcaatacatagtaaatagttattaatgtatggcttcactcagatgcatccaaagaaaaccccccaaatagatgacacttgttctctgcaccaagtacgctatgttttatttacaaagagttgctttaatggactttgattttttgatagatgtctgaaatttgaatatttgaaagatgttatttaatttgctcttttggaaaaccagagattttaattggtaaaaagcaatttctgttataggctccctaatggacacatttctgcttactttaaaagacgccttctgttcaaagtagtatacagatctatcaagtccaagaaaaatatttattcttcaaaatgttaccaattattttaaaatacaactctcataacagttaagtattataacaagtgcattgatttgaatctttgttttttttctgttttatatttttgcatataattatttttccaactcgctttgcggcttcgctatattaaagtacacgtaaatgcatttgatataaccttttccatctcagttcctctctgtgtactattagtaataaagtctaagatgaaagaacaacattttaatttataatattttgatcccttaaaaatacttcactgtccgccaaacaggatttacaattttataatcatcttaccttctggtagtgtgctgtagaacagagcaggtgaagagagagcaagccctctttgggaacttttgatgtgctctgtgtcctaagctctgtacttctgcaccaaggcgcactgcttttatatactctccagctctgtttagcctcacagatattacgctgacaatataaatttctcatctgtaaataatgagtttttgttacaaatgacttccctctcccactcactttgctcatctgcattctatgcttatattgggtgagagaccttagagacctggaaactttttatgcactcttgtatcttttttttttttttttggttgggaatggagagagcagcttggaaatccaccttctactttcaatcacgcatgaaaatcacttaagttctctaaagtgaattttgacgttgaagacaaaagaccttgaaattacgtagcccatggccatccctgttttgtgcatgtcctcatttgaggttcttacaagtctttggtttgctacctagccatgatgaatttacctgaatataacaatcacttcagtcattcatttatctaaataatgatcattcattcaacacatatgtattaaaaatcctctcttcctcacaacgtggagtttatttatgttatgtttgtggaaaatttaaggatattgattaaacccctatgtgttctgttttaataaatggaattcaggcagaaaggatggagcaaaatgaagattaaacatccaagatagctgatgctaacaggaaattatctggtatttttttccttctaatatatatttaaaatctaattttactgataagagagtggggtactaagttacaaaagaatgagatatgaggaaaactgttgagatgagatgcatattttcacgtttcctgagttttgtgactggacacacaggctttaatgatctgtgacatttagcagaaatgattctggtcactgtagagaaatagaaaaatggtaaataatctggaaagacagcataagaagtagtgttggcataatttgattttagttttgctgttattgaccagctgtgtgaccttggtcaagtcacgcattctctttgtgtctctgcctccttatttgtaaaatgagaggggttggtaaatgtcttttctaaaataaaaattttattccatattgcaaactcatcacaacatttcctaactagattccaatattctaatataaccaaccgcatgatgtcactgatgacttgtatggaggtaaatcattgaggcaactggagaaatattccaaatgaacttaactgttcaatttgtgcatgagaccaacgtttgaatgtagagctacttgaaggccacagagatcactttcaagtcagactggaagacatcattgaggggtttttgtgctggtgattattgggtgctagaaagccttgctttgcaaagtgtggtctaaggaccagcatcatctgggagcttgctagaaatgcagaatctcgtgcctatcagaatctgtattttaacaaaatcctaaggaaatctgtgttcatattaaaatttgagaagcacagctgcataaaatatctgcctcactttatctcctcattggtactgctggtgtcttgatctgagacctgcttcttggcactctaccagcagagggggtgaaagagcagagaaaggtgtcaagccttaggtcggtctagagagtaatacttataaatacggtaatagcttgaaagagtggattgatttaatgtatgattacattgtctttctctctggctacaatcttcacacaactattcgctatatttttaatcgttttggcagattcagttctacttttcccattgtctatttgtctatttgagcagatgtttctttctgtctctctgtctctgtctctctctttccttttcagactctacttgtttgtggagcagccctaagaaggaagatctgcagatcatatatataaaatcttcaacatagcactggcctttcagtaattatcctctcccaatatttaactaccaaacatttttctttccctccactctacttgcttccattattctagaagtgactatcccaagttgtttcagaaaatttcctgtgactttatctccagcccactgacactgattcttggggctcccagtaccataagggtaagcattctcaggatgtataagcaataagaaccccactgcattgtgtgctgctctcctctctaggaggggcaagtcaggc

SEQ ID NO: 3037 - DNA, 4001 bp, Homo sapiens
tatttaggtcaaacaaaatattcataggctaacttggcttacctgtcaccacctgcaatgaggtaggtgtaaagaggtttctgtcccagacctttcatcagctgattaaaggacacctgtcaagcagggagaggatgtaaagaggtaatgacagagaagaaacaattatcttggattttcaactcctagagggcagagactatataatgattctcttagaccagtgcttaacccagtcctacatggaatctcgcacttaaagctgctacttggagatgattagtcggtggtgcatgggatgtagagacattggcaacatactggcgggactcagatgggctcagaagaaatgggacttcatggtgacatctagcttttggaagagagaaagagccaggcttggagtccaggtctagtgagggggccacctgggagcttagttatgatgatctttatggtcctgagggtcacctccagaagtggagggggaagaaaactggagaccagggtgctcaccgacatgaggaatgccatccggccagaggtgccccctccactcagcacaaccagccccccatctggctcctgaagaaggaaagaggcatatattaccagggcctggctcaggttgggagaagaatattcttttctttgtcagtaatgcaagaggaattggaaagactccttatccctcctctcatcacaaaattgaacaaatacatgcaatgtagtgtagcaaaaagaacattggattagagaaaccagtttgactcccatgtcttgctccactacttgttcaaatccttacttctcccagaaagaactgaaagcagctttgtcatctaaataaaagtaaataataaaagcagcattatccagcaattattagctcagtgtatttgagcaagctacagtgattatcctttctaaatctttgttttttcatctgaggaaaacaaacagaagtcatatcaacttcacaggcttttgtgagggtaataggtgtgaaagtagattgtcaattataaagtattaagcagagaagttatcattattatttattaataagatgaaaataaggatccaaaagggaggatctccaaaagggagaaaggagaatgagatctatcaaagtgagaaatagagacagtaaaaagagaaagagggaaacagaaaagtttaggcagggaacagaaggaaggttagtaccttcagcacttcctgaactttcccagccacctgtaccatggtggtcagaatggattcgctgtagagtctctgtagggaatatgcaggaatgagaagccaagaaaaggaggacgatgaatgggggagggggtctcagggtttccgatattaggagccatggtgagggagagcagaggtggggttggggttggcatgtttatttccagggtccaggtcttgggtcttggttacctggtatgtggacagggcttgcccctcctcctggaagatctcagcatcacattgccctagcagtcgaacaatgttctcagcatctgctttgtctagatcctgggtcagtgggtttgacttctccgtgattggcacagctgcctcgtacccagacaactagaaggaagaggggacaaggatggagcaggaagccaaagcctcattcatgcctgctgagctggaggtgggagtggcagcaggcacagagtttggacttacacacacgcacacacataccacaccagaaactcagcctgcacttggtgctctgggcatattagggaaagaacatcaggaaggaagaagaggtgagcagaaaccagcggggagggaagactggatgaaaaataattctaggaatcagcacagaaagccaacatgaagaaggggtctcacctcccacttgccaggctccggggtctcaatgacatgttgaaaccgttttgtgcctggcatggtcccacgctgtggatacactgttcctcctgcctcttcagccacacaaacccctctggtcacaatgactctgcttccagttggcagggccttatctgagccccagtgatgattaacccaagcaccctgggctctcagagcaccaccctttcctggtcactaggcccccagccctctggtaaccccagggaaactcctgggcttcctctttgcaagcaccctgactcgccagcctctgctttggcccctgaagaggaagacctgaggctcgggactcttgccctaccgggacaatgccctcttctacagaggacctggagcctgggagtgcaggacaacacccacggcagtgagaatccctgggcaagtgtcctccgaggccagagatcagggtcaccaagtcagcacaagtcagaggacctggcccatggcttgatcacatgctcagcacacacagtcagtcccactggtcccattttatcctctcctctcagaaaggaaggcagtagaagcttctgagccccaagtgtgcacacactgtactggatattacagcgggaaaaatcccacagaaacagaaatactgcattgagaattagaaaccaaagaatctgccctaaatacaatgttagccaacatttatttacactgaacaacacacttttcacagacagtatctcattggatacaccaacactaagatgttggtcaatattgacaccctcatttttcagatgatgaaacaggctcagagtagtttagttggttgcttaagatcacacagctggacaaattgggactcacacccaggttctcaattcagatttcaagctcaaccaaagcatgatataatgtaagggcttacatgttattgaacaaagaagtaactaacagattggtgcaaattaatctccatcatccagtcacatagtgttgtgagatttataaagatctttcccgtctcatttgagcctcacaacaaccctgtgagatttcacacgctttgctttacaggtgggaaacctgaagcacagataaaccagtttctccaaaaccacaccgtaagtggtagagctttagaaaaacaaaaaaagaaaagaaaggaataataatttttttaaaaaagccataggtctttgcgctttgattctcccgagaagcccaacactcttaacaatcactgtatctccaggttttaatataatgccagacacataggagatgctcaataaatatttggtgaataaatgaaagaatgaatgagaaagcgaacggaattaaatgagattatgaatggaaaagagacttaaaagctgacgcagtctacaagtaagggattgttaaagcaattattatctccctcactctctcccctctcctgttagcccctcgggcactggaggtggaattcctcttcccaacttggctcttccacgcggggaggaaggggatctcccaggtgccggagaccctagcacccgcgtctcaccccccacgcccccgccgactcgtccgcttcagctgggagagagaagggataagggatgggggctccggaggcgccattgggagggtcgtgggaggagccccgagaggacgggagtgagggggcgggaggggaatgacggcggcgagaaccccggctgggcggggcgggcccgcgcgtcccggccgggctgcggcggagcgagcggggccagcgctgcagaaggcggcggctggctctccgggacggtcacatcccgctgcaggggcgggcggaggccgccgcactgcctcccgcaccggggacccaggccagcgtccgggcaacgccccctgctcccggacagactccgtggcccgctcgagccctgggggctccgcagacccgcgcccgctccgcccgcagctcggccccgcgctgcccgcgtcgccgggcccgcgccgggatggggtaggggcagcgccaccgagtcgggcgatgggccgccctctgggcaccgagcagccccccgaggcctgaccaaccgcgaggaccggcggaggtgggtgtgggcagggcggaccgcactctggggccgccc

SEQ ID NO: 3038 - DNA, 4001 bp, Homo sapiens
cctgaggtatgctgactgtcagtggctcccaagcagggctgcctcagccccacccgctcacttcccagccctattcgcctttctttccctcctgccctccatgctgggtctctggctggatagaattaaggccgaaattacttgcatttccgcctgaaattaggtaaattttctctatctgtctgctttaatgatttcaatggagattaataaaatccagatgacatacagcagccacaccacagcctcacctacatcttacctttggaaggcccagggcagaacaaggtggggtgcttagtctaagagaggcctgcattcctgcagggtccccagcaggcctctcctccccacaccaccaggatccttgacctctggctctcccaggggcccagcaccagacacaggcacccatagctgcacatgtcacacacacacaaaccaccaccacccagaccaacctgctgagcagggcactcctcatacctggttatgccaccagcctctccagggccatttactttagtctgatacctgcctctgccctagttttccctgggcttcccccaatttgtgtggcccgcaggagactgggagctgcagaaattgctgcaaggaaggagccatcaccctcaccaccgtgcagtccctctcgccgtgactcccgggaacacagctcttgccctcctttcttctctgagggctccgaggccactccagaccattccccaagaagcgaatcttggcctccgcctgcctcctcgaggggaccagccggcctgcaaggccagggagacctgggagagggaccagtcagccctctgggactgggccccgggagctgccgcgactctcgccacagtccaggtgcagcgggctggagagtgttggcctcggcgaagtttctttctatcacctgagggtgggccgcatggggccgcggctccaaatgtaacggagctgcggcacggctccggggctggtctcagcccaggacctgacgggatgggcgggcacagaagaggcgtaagtaccttgggtcgcctggtctgtgaagccggtgatcgtgtccgcgcgaccatggcccgaggcggagacagcggctgccccggccggagccctcccggccaggctccggtaaagcgacatcatgaagtggtgcggcaccaccgagccgttcctgaagccggagcccgcggcgcggcgcgcggcgcgggcccggggaaccgcggcggccgggacagccgcggcgcccgcagcctgggcaagagtccgcccgccgccgccgccgccgccgccgccccctgggctccggaccggcccagcccccgccgctcgcagcacggcggccgcttccagcccgtcgcgggggcggcaggcgctcagcagccaaaggcacagcgcggcggcggcgctcaggtccatgggctccgtgggccgggcgggcgggcggcgcgggctccgtggctccgggaagtcccccggcgccttttgaacatagtgtttaataatgggggaagtgtgcgcggccagcccgcggccccccctcctggcccaccccacccccgcccaacgcccggagcagcgccccctgctgaaagctccggcggccgctatgcgccccccaccccggcctagagtggagaccagggccggagccgcctcctcccaccgcagcgctacgcccccaccctcgccaagcgactgccactggccccagcctcccgacacgcctccccgcggcagtgcgacaccccctccatccgcccaagaccaacgcgccctccgtggttccaggctcggggcaccgcgcgcacccgcccagcttcctccccactcccccgcagagaaacacccgccccctccctgccctggttcccaatgccgggaacggggcggcagagttggggccgcggaagggctcgccctccagaccgcttcgcgccgcggccgggtggccgcgcagagagaggccacaggatgctcccggcggcctcaaagtcgcgttccggatcgcgggtcggcggttccccactcagccacagaccccaaaggattgcagcgggcggccagagcaggggagggggccggtaggggaggaagggagggcgaggagctgaaagggcaggcctgtaagagacctttggacgcggaccgcccgtcgtaaaagcaaggtttgggcgcggaagttgcgcttcagcgggagccaagctctagaaagagctcgaaatgaggacggcagccccgggtgatgggggatctcgcgcgggagtgcgctaagagtttggctgtgcgtccaactggcgaccttccacccgccttctgggcgagggcagcggctaacgaaaaccagctaccggctgtgtgcgtgagcggccaggagccgggagagcggacggcgcagagccccgggatggcgcctccgagcttcttaccccgccgcggtgatggcgcgggtcccgaggtggatggaggggacgcccggcagcggcgaagccctggggcgcactcgcgcgggccgcagagcagtttgctccgcggctgggacaggttgcggaggccaagtctcaggggaacgcgcaggagaggggggttatcggctctgctccgccggcagcctggacatccccctagatcggaaactttcagctgatcgaaggcctgggccaaacgaactgccgaagaagggcaggcgggtccttttcctttaaaattgcattttctgcagaactcaaaatctagactgggtcggcacgtcgtgatcaccttgagcgggtgatcagcttcaaagcgaggtcgcccgccgaatccaaagccgcctaggtcccgacgcctgcctggctgcgctgcgctgggacccacagagaggcccggcccaggctccccagttcccctgctccactgcttcgtcccaaacgaactcctcagccattgccctctcggccaccgcggagacgcggcgcctgctcaccttggggcattgagccgcataacactcgagaatgtttgcgggtgggagagagaggcctagtgaggttcagtcctcgcagaccccaaggccgatctatgccaaggagaaaggcctgacattaccgggaagggcggacccctggaccagggtcagcgctgccggcgctgagggacttctcctagcaggagcctggggaatctgggatgatcgagctgggatagtccaccctgcttctaggactgggattggagagtcggtgacaaacaccgccgcccccactccgccagccccccggtctctccctgacgcggatgctgggtcctactgtgttacttggcttcctttccccctgcagccatgcgcccgcagtgtttgggtgttttacaaatcaactcggctaagatttgtgcaaacacgcggggagtcctgggtgacagcaagtcgcttgccttgtcttggcttcagtttacccggctgtgtagagcagagagcggaagggtcctagcacattcttggcacagccagtgacaaacgtttgttgattacatgacacccctgccacgttggggcttaggaatgagggatgcacccttgctgtcattgtgggagcaggccacttagcctcttggagaccgaatttcctaatctataaaatgagcggattctcacctcatcctgtgtgtggctggcataacaggctggcacagaggaggtgatgtagtcttgcccccaaccaccagtgtgttcccagtgccaggggtgatcatggcagagagagaagcagcttctacgcacctggaaggctttggaggacacacatggggtgggctaatgctgctggagccactgtccactcgctgtatgtgctccaactgagacttcacttctcccacctgtgcttcttggtctgtatggtgagggcacagtcatttatttatttatccgtccctctattcattccttctttatgtaaatactcattgccaggtagccttcggtgcattgtggattgagcaacgcacagggcgag

SEQ ID NO: 3039 - DNA, 4001 bp, Homo sapiens
accacgcccggctaattttttttgtattttcagtagagacggggtttcaccatgttagccaggatggtctcgatctcctgacctcgtgatccacccgcctcggcctcccaaagtgctgggattacaggcgtgagccaccatgcccggccttaaagtccttttcttttaagagatatagtgaagtatttataaacaaaattataggctggggacggtggctcaagcctatgatcctagcactttgggaggccaaggtgggcagatcacctgaggtcaggagtttgagaccagcctggccaacatagcgaaaccccgtctctactaaaaatacaaaaaattagtggggcatgttggcacatgtgtgtaaccccagctactggggaggctgaggcatgagaatcacttgaacctgggaggcagaagttgcagtgagccaagattgtaactgcaccactccagcctgggcaacagagtgagacttcatcccacccccgaaaaaaaaaaaaaaaaaaaaaaaaaaatatatatatatatatatatatatatatagtaagaataatttctatgcccaatttctatgaagttgcctggtctgataaggtaatccatagtcagaacagcatttagattcaaaggcagttaagttctcatatgtaggccgggtacagtgactcagcctgtaatgccagcactctgtgacgctaaggtgggcagatccttggagatcaggagtttgagaccaacctgggcaacatggcgaagccccgtctccacaaaaaatacaaaaattagccagacgtggtggcaaatgcctgtagtcccagctactcgggaggctaaggcaggagaatcgcttgaacctgcgaggtggaggttacaaagagccgagatctcgccactgcattccagcctgggtgacagtagaaccctgtctcaaacaaacaaaaaattcttatatgaaaatattaataattagcttttcatttatctgctttcttagtttgtctataacatacaggcagcacaaaggggtgtcaagatttcaggcaagtaggatgcatactcacttggcagagactgggtctgtagttaaaacccatcctttatactcattcttctcactggctgtcactcggacctctttgtaaatgtaatcttgccattctaaggggcctttcttcatccattcactcatgattgccacctggctaaatctgaaacaaccaccagtgctggttaatatatgttccacgtaagcaaatgtcttatccctaatctccatcctatcctagagacagagaacatctgtgatttgcctcaagttcgtaataagtaacttaatacaattaagtattaatgcatgtactgataggaactgatactatagttggggaaaagaacacgtgtaaaggctgcttgagaatttttatcaggaaaaggaaaatagttaatatgtacaattcggcctaaagcagaggggtcaccgatttgccgcgggtgcagtctgaggaaattcatctggcacaggtctattccgatccacaaccacattccaaatcgctttcactctggcctgcagatgatgctcaaacccttcaactctgcttttccttccatcgatcaaaggagttcaccccactcctcaactgaaccagaaaactctcctgatatccacccacgcgctctctggctctgtgtctccgctggatcccgccatcgagaggctcccccgatttatgacaactgccccttaaaatttgtttgaaggatgcacaaacgaagggccagcggctacagctctagagcttagatttctggtcctgtcctgcagccacacgatacctaacactgtactaaaaaccaaatggtacttaacgtttaaccctgacaaacgagaaaaataccagttaaaaaactcctcgcaactctgggtactcagcaaccatgctttgaggaaggatcgttgagcggagaccgcctgagaccagcatgctttgcgccgatcgtcacttccttcccccagaaacctctgttttgtagtcctacttggaggtctgagagtcgcgggacctagagtgcagggtgcggacagagtctaagattgttctgtaataataataataataatgaaccgccatgtcctctaaggctatccctctccattgccacgacggacagttcaaataatctttttttctttaaagaggaaaaagcggccgggcgcggtggctcacgcctgtaatcccagcactttgggataccgaggcgggtggatcaggagttcgaaaccggtcaggagttcgagaccagcctggccaacatggtgaaaccccgtctctactaaaaataccaaaaattagccgggcctagtggcgggcgcctgtaatcccagctactcaggaggctgagacaggagaatcgcttgaacccgggaggcggaggttgcagtgtgctgagatcgcaccattgcactccagcctaggcaacaagagcgaaactccgtctcaaaaaaattaaaaataaaaataaataaagaggaaaaagctcgtgccaggtcctcaatgatagtagacttggaaatgcactttcgccttagaatcaaagcacatgaaccctcagagtaaatcctaaagctctaggaatgtgaggtgaacgtgccgtggagaagagcgatagggttgctacaggaaaggggtcctgatccagaccccaggagagagttgttggatctcgcgcaagaaagaattcagagcgagtccgcagtgcaaagcaaaagcaagtttagtaagaaagtaaagtggtgaaagaacagctgctccatagacagagtaggatgttcccgaaagtaagaggaaagtgtccaccctagatacaatagtcctatgtatgaggagatgcgctctgctacaagggtttatgataaaggattaattttcttaattactatatttttcaagcatcaatactattatctttaaagcaaaattaggaatgcctttgttctccaggtattgcgatatctggacactcccaagtctgggtctgtttagtaaacttttttttttttttttttttttttgagacagagtctcacactgtcacccaggtggagtgcaaaggtgcgatcgaggctcactggaacctccacctgccggcttcaagcgattctcgtgcctcagcctccctagtggctaggattacaggcatgcaccaccacatctggctaatttttgtatttttagtagagacgggtttttgcaatgttggccagactggtctcaaactcctgacctcaagtgatccgcccgcctcggcttcccaaaatgctgggattacaggtgtgagccaccgcgcccggcggtaaacgttattaatgtcttcccttaaccgtaaacatctagaggctgggaatgcctaactttctgagaatgcagaccagcaagtcccagcctcattttcctagccctcactcaaaacggagtcactctggttccaacgcctctgacacggccaaggtatttcttgtttgcttggcttgtataggcaattaaaatgcctgctcctttgggatgtgccctcagtacaatcttgagaaaggtgcagaagctggaaagaaatgaaccaaaccgggttgaattttgtctagcagatcactctctataaacccctccagtggaaaagtgcaaaagacttgcttctgctacggatttctggtcacgcacttaactggcttctggcatgatccagaatcttttttaggactgaaaaacggtacaaggtggtaaacgctgaattcctggaaatgtaaaaaccaagggagatttacaaaaaccaaatgaaaacactattaaacaaaggtgtagaaaacatcaaaaatgtatcagctttttccttactccttgagatttaggttccatataatcttcaaagtatattttcttattgtcatcatttgaatctttcccatagcctttattcgttgcatgattggctgattatat

SEQ ID NO: 3040 - DNA, 4001 bp, Homo sapiens
gttctacaaaatgacaggtattaaaccagatgcattacaagattctaatatctgtaatctagtatttaatatttgaattgcatgaccaactggtagcatggaataaaaaaaaatcactctatttcagaaagtattgcttggtataatagaaagaacataaatttccatcttaaaggacttaagaatccacttccagttaaaacaaaaacaagtcctttgatgtaaccatatggtgcccataaatcaatttaagttcctaaaacttccttaaaagctaataagcttttattggttaattataaaactgaatgaggtgagaaaaacacagaaccttgttaatttcactaatgaatcaaatttaaagaacataaagaggtcaggggcttaactgatgcaaaaatacacactttattaaagcaagttttgcaatttagttcagctttaagaaaaacattagaaaatttacttcggaaaagcagaaaatgcttaaatttcccaatttccatttagatgagtatatattcatataaagactggtaaatggtgaaaactatttcaatgcaagattatattttaagggatttaccacataatctcagtaactaatgctgttctttaaaattattttttcaattttattttcatatgaatttagcctaaacgttgaggcatacttcacgtttatcaataaatacttattaaatgtctactatttaacaggaaagctttataggtgctggagatacaataatggaagatcaagccctgcatttaaagaccttagtagggtaagtgagactgcagataaaaagggcttaagaggtaagaaagcaagctatagttgtatttaggaaaaaaggtcccccacttaggaatcaaggaacggttcctgaagcaagtgacatgtaagtagggacctcccaaccgtgtttcccattggttacaacaaggccagatgttttggtctattttgactatgtcatatttttcgttgatccatggcaagggccacagtaggaatataatatatatgtgattacttttagaaataaaaagtgactttgatgtaaagaattccattaccggaggccagaatttcaacatcaatttatttggaggtggagtgaggtggcagtcaatgcattattttccccacacagaagagaagattttggagtatgaaaagtaggttacttgttaggtcagcatattcatgggaagggttgtgtaaagactgaagcgggagtgtggggttgagaagggcgctgaaacctaagccaaggaagttaagacttcattacttctgacgtttatttagggggtttacactctaggttaccgtgggggaaagactgattgtaaataactacaataccttaaagtaattactataacagaactatatccgaaatacaaggttaacacggaaaagggaacacccaactgtgcctatggggaccagggagggctctcccgggatggctttgagcgaggcgtgggaattatccccatcgcatgcccgggggaagcacagcgggacccagcagcttcggccaagcgcaagcggccggagaacgcgcagctttcccgaggcggggtgacgcagggccctcgcgagtggaaaacaggggccaagtcgcggcctggcggctcggttcggacttcctactttattcaaagggagtcattgaaggcgttttcggaggagcagcgaacaaagagctcgtccgtaagccagatggtcaaaggaatcagtgggaggacccgggcggcgccgtctctccacgtcccgcgggacttacccggacaacccttcctccttggctctggaagaagccccttcgtcatttaccagtttggcctgaatcctaactactgtgcctccaaatttctgaattttctcaaaaggaaaaaaaaaaaggaaagtcctctttctttacccaagcaaagactagctccccgggctcaaccgccaggcccaggagcaccaggaagcgtttcgaatccagcgccgggcccgcgcggccccgcctcttccgggaagtgactgacccctttcccccaatggggcccgctcggctttcccttgccggctcccagccggcctagcggacgcatgcgtagaccagctgccgggggcgctcaattatctttcccttttacttaggcaaatcactcacctcccccgagtccggtcactgcggagccgcccgtgcctaccagcttcccccacccgctaaggggcacttccggcctctcagactccggcggcgcgaaaccccgcaactgcgcaggcgcgggcggagcccgaagggagggagggcggggcgcaggcgcggttagtaccgcggtgggcgccggggctcccgggaatctaccttctcctgcggccggcacgcggttcccagggggccagcggcggtcagccgaggtcgagacgcccgcagggtggccttagcggccggtcgtaccacggcagccccgccgatcaggttcctttgggagacttcgacttgttggcggtagggtgaaggcgcgcgctgtcgctttcccttgctccggggttcatcctccgcccgctgcccccttggctggcgacccccagccacccgggagaggcagggtcagctgagctgcggcggtgttcatggtcgtccttgcgggcccgggcgggagatgtccgttcctcgggcgggtcgggcggccggcggcaccttcgcgcgctctccgaggcggcaccggtctcctgagccgcgggaaacctggcgtctgctccgggccgtcccctcccaggcggccgtcccctcccaggcggccgtccccagactctcccgggctgtggcgaataactgtaaagcggggagaggtctggggaaagctggggtagggagtggctcttagcatgagtctgatgatatctcgcaggcggcaactggtgtgtttaaagggtgtatgcaaagatcactgaaatcggatttgtcattaaagcccagttttacgaaaatgcaaattgtattacctagaaaaattaacatgtgttcaaaggtttactgatggcatttctctgccctcatttcttacagaaatgaaccggagaagaatcccaattgggaattgcggaaaacaggactctagggtagagaaaggttgtagaaccaatagggtttgaggtaatactgtgaaaattcttagagcaatcatttggtgtttgagccctcaagacagaagttttgtgagcgcttattactctgcatatgtcacgagtagtagattaaaagccagtgttttaaaggcaaacttctcagtaatatatattcaaaggaaaaaagaaaaacccaaatctcctgacttttatatggttgcagtgtgatcttttaacatgtacaatagtatatacagtggcatgcagtttgttccatgggtgtgtgggtagagagggaacatattagaacttctatttagatttatttcatttgatttctacgtgaaacatagggtattaattttatgttggaacatgtatttcaaatttcttttgcttaatgggtgcaagtacaaaacgtttggaggccactagtatattgcctaaaagcgtgtatttatatcacaaaaagccagaattgtgtgactctgagcaggttggtaccacctctttaagtttcagttcttcttatgcaagttggaagaaataatacagttatcagtgcatcctctgtatccgtggactcaatcaagggactgaaaatatttcagaggaaaaaaagtggatggttgcacagacttttttttgttcttgtcattattccctaaacagtacagtataacaactattcacatagcatttgcattgtgttaggttatataagtaatctagagataacttttaagtatgtggggaggttatatgcaaatatgacaccatttcatataagggacttgagcatctgtggattttggtatctgagtgagagagaggggctgtcattttggaaccaattctt

SEQ ID NO: 3041 - DNA, 4001 bp, Homo sapiens
cataaatcaatttaagttcctaaaacttccttaaaagctaataagcttttattggttaattataaaactgaatgaggtgagaaaaacacagaaccttgttaatttcactaatgaatcaaatttaaagaacataaagaggtcaggggcttaactgatgcaaaaatacacactttattaaagcaagttttgcaatttagttcagctttaagaaaaacattagaaaatttacttcggaaaagcagaaaatgcttaaatttcccaatttccatttagatgagtatatattcatataaagactggtaaatggtgaaaactatttcaatgcaagattatattttaagggatttaccacataatctcagtaactaatgctgttctttaaaattattttttcaattttattttcatatgaatttagcctaaacgttgaggcatacttcacgtttatcaataaatacttattaaatgtctactatttaacaggaaagctttataggtgctggagatacaataatggaagatcaagccctgcatttaaagaccttagtagggtaagtgagactgcagataaaaagggcttaagaggtaagaaagcaagctatagttgtatttaggaaaaaaggtcccccacttaggaatcaaggaacggttcctgaagcaagtgacatgtaagtagggacctcccaaccgtgtttcccattggttacaacaaggccagatgttttggtctattttgactatgtcatatttttcgttgatccatggcaagggccacagtaggaatataatatatatgtgattacttttagaaataaaaagtgactttgatgtaaagaattccattaccggaggccagaatttcaacatcaatttatttggaggtggagtgaggtggcagtcaatgcattattttccccacacagaagagaagattttggagtatgaaaagtaggttacttgttaggtcagcatattcatgggaagggttgtgtaaagactgaagcgggagtgtggggttgagaagggcgctgaaacctaagccaaggaagttaagacttcattacttctgacgtttatttagggggtttacactctaggttaccgtgggggaaagactgattgtaaataactacaataccttaaagtaattactataacagaactatatccgaaatacaaggttaacacggaaaagggaacacccaactgtgcctatggggaccagggagggctctcccgggatggctttgagcgaggcgtgggaattatccccatcgcatgcccgggggaagcacagcgggacccagcagcttcggccaagcgcaagcggccggagaacgcgcagctttcccgaggcggggtgacgcagggccctcgcgagtggaaaacaggggccaagtcgcggcctggcggctcggttcggacttcctactttattcaaagggagtcattgaaggcgttttcggaggagcagcgaacaaagagctcgtccgtaagccagatggtcaaaggaatcagtgggaggacccgggcggcgccgtctctccacgtcccgcgggacttacccggacaacccttcctccttggctctggaagaagccccttcgtcatttaccagtttggcctgaatcctaactactgtgcctccaaatttctgaattttctcaaaaggaaaaaaaaaaaggaaagtcctctttctttacccaagcaaagactagctccccgggctcaaccgccaggcccaggagcaccaggaagcgtttcgaatccagcgccgggcccgcgcggccccgcctcttccgggaagtgactgacccctttcccccaatggggcccgctcggctttcccttgccggctcccagccggcctagcggacgcatgcgtagaccagctgccgggggcgctcaattatctttcccttttacttaggcaaatcactcacctcccccgagtccggtcactgcggagccgcccgtgcctaccagcttcccccacccgctaaggggcacttccggcctctcagactccggcggcgcgaaaccccgcaactgcgcaggcgcgggcggagcccgaagggagggagggcggggcgcaggcgcggttagtaccgcggtgggcgccggggctcccgggaatctaccttctcctgcggccggcacgcggttcccagggggccagcggcggtcagccgaggtcgagacgcccgcagggtggccttagcggccggtcgtaccacggcagccccgccgatcaggttcctttgggagacttcgacttgttggcggtagggtgaaggcgcgcgctgtcgctttcccttgctccggggttcatcctccgcccgctgcccccttggctggcgacccccagccacccgggagaggcagggtcagctgagctgcggcggtgttcatggtcgtccttgcgggcccgggcgggagatgtccgttcctcgggcgggtcgggcggccggcggcaccttcgcgcgctctccgaggcggcaccggtctcctgagccgcgggaaacctggcgtctgctccgggccgtcccctcccaggcggccgtcccctcccaggcggccgtccccagactctcccgggctgtggcgaataactgtaaagcggggagaggtctggggaaagctggggtagggagtggctcttagcatgagtctgatgatatctcgcaggcggcaactggtgtgtttaaagggtgtatgcaaagatcactgaaatcggatttgtcattaaagcccagttttacgaaaatgcaaattgtattacctagaaaaattaacatgtgttcaaaggtttactgatggcatttctctgccctcatttcttacagaaatgaaccggagaagaatcccaattgggaattgcggaaaacaggactctagggtagagaaaggttgtagaaccaatagggtttgaggtaatactgtgaaaattcttagagcaatcatttggtgtttgagccctcaagacagaagttttgtgagcgcttattactctgcatatgtcacgagtagtagattaaaagccagtgttttaaaggcaaacttctcagtaatatatattcaaaggaaaaaagaaaaacccaaatctcctgacttttatatggttgcagtgtgatcttttaacatgtacaatagtatatacagtggcatgcagtttgttccatgggtgtgtgggtagagagggaacatattagaacttctatttagatttatttcatttgatttctacgtgaaacatagggtattaattttatgttggaacatgtatttcaaatttcttttgcttaatgggtgcaagtacaaaacgtttggaggccactagtatattgcctaaaagcgtgtatttatatcacaaaaagccagaattgtgtgactctgagcaggttggtaccacctctttaagtttcagttcttcttatgcaagttggaagaaataatacagttatcagtgcatcctctgtatccgtggactcaatcaagggactgaaaatatttcagaggaaaaaaagtggatggttgcacagacttttttttgttcttgtcattattccctaaacagtacagtataacaactattcacatagcatttgcattgtgttaggttatataagtaatctagagataacttttaagtatgtggggaggttatatgcaaatatgacaccatttcatataagggacttgagcatctgtggattttggtatctgagtgagagagaggggctgtcattttggaaccaattcttagggattgactgtacctagctgacaggattcttaaatatgtggacacagagaggaagagaaagttatgtagttatatatcgacatctgtctgcaatccgtataaaccagttagtattgagcctggcaaaaagtacacaagtcatgttaaaggtattacagtgaaaaacaagttttattccccaaaggtttattttactgagtgtattttactgaatctgtagaattttatgtaaaac

SEQ ID NO: 3042 - DNA, 4001 bp, Homo sapiens
gctcttttttacccaggctggattacaatggcgcgatcccggctcactgcaacctccacctcctgggttcaagcaattctcctgcctcagcctcccgagtagctgggattacaggcgcgtaccaccacgcccagctaattttgtatttttagtagacatggagtttcaccacgttggccaggctagtcttgaactcctgagctcaggtgatccacctgcctcggcctcccaaagtgctgagattataggcgggagccaccacgcccagcgctgatttatttatttatttatttttttttcagtaagtactttgactacgtttttttcttggaacatgatgaaatgacctgcaaccagaatgttgagtacttgatgaggcacacccctcatcattcaggaacagttaactaccaaatgaagcacactggagattgaccagtttgcaaattcactacttcacagctccaaactaaatgcaaaaccattctactaagtagacactgcaaaagtctgattctgaagtcagctctactctaataatttcagtaagctatttataggtgtttctgtttttatgtgggtttttttttaatctactctaaatttaaacctgctcctcattttcagaagctgaaatgagcataaagttaaatacaggaaatatatacactaacgagtacaatccacctcctgttcagttccttcgtgtaaaaggctgcaaataagaagtctcccagagagttttcaattctcttacaatggtacttccctttaaaaaaaaaaaaaaaaagtgtactttcttccagggataaagtcggttgtaaatttcaataagaaaggtaagaatacaattatttttactggcaatagccaaattaacaccaattttagaagatatcagtcatgtcagacacgattctcaaagtctctttcactaacacttaggtcataataaacgactctcaaaacatggaataaaagggcctaaccttaattttttaaggctctaggaaagatatttgctcaactttccatagctagtatttttaatggatgcacatgcaagggataaatgatatttttcatagttggtattctaaaggggtatacatccaaggtataactgatatttttcagagctggcatttttaatgggtgcacacgcaaatgataaattatgtataacctatcgccacagacatttgaaggcctcttccaccagaggatcaggtctaagcccatgaaccaagttattgattagcaatggtttctgttgagacaagggatggcaggaagtatcacgtttaatggcactaccgtggctctagctagggtctgttttctattgggcctccccagaaacaagtaaaatatttttttaaagatttttagaaaaatgcaaggtaagttcaagagacctcgcccgaggttccacaggtttcctcactcacctggtgggcccttttgaaggcaaccccctccacacctcaattccctcagctctctcctcctttttcaataaaggcgtttctctcccctttcggttccttctccgcgccaaggcgcccgctagcccccggcaaagggggcccgccttcctctcaggtgcctttctcccggccgccaccccctctcccgcccgtggatgccggcccccgcccccgcagccaccactgggcgccccttgcccatcacccagacttcgcaccctccacactcccgcttccgcccgtcgccttgggccttagcggcacccgcaccgcaccccagcgccacccggcaacacgccccccgctcccggcccccttaccacacatgatgccggagacacggcccgcgaggccaggggcgagtggctggcgggatcgggggtgcacacacgagcttcggtgggcaatctgcgggctcgggggccggggtggcgccgacacgactccctcggggatgcgacggccaaggcaacgacagccttctccgcctcccgggctccgccagcaaccgccgccgggccccgcccctcggcgcgcagcgcgccgccgcccgtaggctccattgaaccgctcacgcgccgctcacgcgcaagtcccgcctcccagcgctgccccgccccccgagcccacgcaggcgctggactgctggcggcggcgacgtggcagtggctcgtggccgcgtccgcctggagttcctggagacgcccgccccggggcgagccgcgggagggaccgagccgagagggagggagaaactcagcacctggcagggaatgacggaaagagaaggatggaattgttagcaaagcaatagcccgggtgcgtgccccgtgcagccccaggccccaggcgccagcactgcacgaagcgaggaaagaggaggaaaaaagcaggaagtatgaaaagggaatcctggggaacataaggctgaaaaaaattgcaaagaattaggttgaggtgggaggagagagataacaaaattcttgactgtaaagccccaaaggtcagcctctctggtaataagcaattcaattccttgtgtaatatgcttggcccctaaaagccctccgcatccgttgcctccataaccctcagtttattgtggaggggtagaggaggaatgtaaggctcaactatccgactatgagcctggacgtaagaaactgctggcccacctcctcccatgacccacctgagacggctaggaattccctagctttaacagccgcgcgtttgacttacgaacgattcattctatgaattaatgcgccatgtctgacaagagagacttgattagagagggatgatgtttctgagaatttattacctgggcatttgctttaaacagccttaaatggtatctttagtcaaatgtggagtaatcagaactctataatggctctagagtagagtagtatcaaaaacgtacatggcacacagaattcctggagtgctgactgctgttcatgtgtctggtcttagcctgctgactgctgttcatgtgtctggtcttagccgtccttccagccctatacactcccaacaggctcaacaggtagttcctcaactgggccaagattctcaaatcttttgcacactttggttactctgcatagaatccccaccacgtctctgtttagatgctacctcttcaggaaagccttttttatcccccctagacagacttggagacatgcattaacctcttactctttgagctactcactgtaaagaaatattctttgatattttatgattttctgtattttcccactgggctgtaagtttcttgaagctagaactagattttacatacccaacacttttagaccacagcacaaagtaaaagatcaaatttattttggaatgagtgaaaaaaagtcctattttcttagcggaattaaccttctatggctggttatatgattaagtgagcataaggctttcagttcttcttacggggaaaagtgccttttttcacttgcctcagagaagctgaaaaatgtcacatttaactaagcagagtatttctcacctaaaagcccttttgatatttcaatcccttaaacaggtccctggatcacccagagcaaagtttaaaaaaaaaaaaaacagtgagctttttggtaataatacatttcttaattcaagaaacaaaagactgtggatatacatctagcctcagaaccctcatctaaggctctggttagaactccgttgtattacctaaaagccaaggtatggttccaatgcttaagcaacatctttgtgcactggcagcaaacctgtcaatgccacaaagaaaatgtcagcagtactaccagagttctcatgctccaactatagtaatctatttaaccctttgctttcttcttctgcctgctactccaccacaatgactatcaatttgtcttatccatctccactcaacaaactattttggaagatatttatgaatcagttgagaagaagaaactagtgttacaggtcttttagaatttgtctaaatac

SEQ ID NO: 3043 - DNA, 4001 bp, Homo sapiens
aaaccccgtctctacttaaaatacaaaaaaattagccaggtgtggtggcgcatgcctgtaatcccagctactcgggaagctgaagcaggagaatcacttgaacctgggaggcggaggttgcagtgagccgagatcacaccattgcactccagcctgggcaacaagatcgaaactccgtctcaaaaaaagaaagaaagaaagaaagaaagtgctctgggagtgcttctcaaccttttctgcttcctggcacactccaaaaacagttgcatttcgtcaacaccctgggaataaacagaagaggctactcagatcaggaagccagcttgagataaagcagggtttctcaacttcaggactagtcacattttgggctggttaattatttattgaggggattatccaatgcactacaggacatttaggagcactccctgacctctatagagatgccagcagccacctattcttcctcccccaagttgtgacaactaaaaatgtctctaaacattgccaaatgtctcccagggagcaaaactccctccagttgagaactactgggctaaggggactaatatctctgcacatctgtaaaccattccaagcacaccatgctgcggcctcagttaagaagctcttgattagggagtcacagccaaaaggtatggtccctgtggccccctgctctgtttctctgagtcttctgggcaacttcatgccacaagcaaaatgggtcactgctgcctcgcctctacatatcatatagcatttctagctgggtacggtggctcacacctgtaatcccagcactttgggaggccgaggcaggcggatcacctgaggtcaggagtttgagaccagcctggccaacatggtgaaaccccgtctctactaaaaacacacatacaaaaaaaataaaaaattagccgggtgtggtggtgggcgcctgtaatcccagctactcgggagactgagggaggagaatcgctttaacccgggtggcggaggttacagtgagccgagatagcgccattgcactccagcttgggcaacaagagcgaaagtccgtctaaggaaaaaaaaaaaagcatttctggccaccaagtaaatcctaactgtaggagacaaagcaggtttaatcctaaacttcgcaaagacctcttcttttataccaatgtcttcagctctgaggaaaagggagctaagtctacttgcaaccaaaaaatagagattgtcattctccactctcaaccaaattgctcccacccataaactggactcaccaaaaagaaaacgaaagacagctaagcttgcagggtccgttggtcgattcagcagggtcaccagcctccgccaactggacaaatctgtccactcaaaacccaagagtttccctattcggctgtcctgcctgggccctgagatcagttcagccttgtctttctgtactttatctgcaatcaataaatggagaaaatatgtgtgcgggggtgggctccacctcaaatcaaagaaatcactgcaccaacagctcagagcttccgcccacccgggtcggctcaatgaggttgcctcaatgatctgactataggaaacatccctgcagtgcagccccctctccacgatcccctaatgtcccagaacccctcagactacagtcccctaaccgcagtgttcccgaatgtcatcatcattcagaagccgcaggctgcaaatgtctcacagcacgcccccttccccacagaggaccccccccccgcctcaccgggagacactgggcgtcctcccgcccccgcccctctgagaccagcgctcctaggaactctccgccggagggcggggtcctaagcctacctgagctgggcgaggtccgcgcggacccggcagacaccgccattgctctgcggaggaggcaggtgggtcacagctgccgcgtctgaacggaggccgccaggagaatttgcttccctaggctccgcctcccgacgcgtcagcggctgtgcggccggccgcaaagcgccagcactgtcgtaaatactacccacgaccggcggcgccggattccttgcttggcggcagggggcggaacaaggagccttggagcggggcaaaggtaccccttagtgccgttgatctccaggggcattgttagactcgcctgttatgccttccgagggggcctctgctttttaaacactgaaaagagtctgagttccccaacttccttgggtcctccccgaccccattagtcctctccgtccctgcgtccctgcggtgctctctggtgtgagggatcgggcgcaaagggcaaactttttgtcagagtgacgccgagttgaggacgcgcctggaaatgttgcctgggttttgagccattgcacgaccccttcactttcttttccaggacctgcaaagaaccgaggtttcaaagcagtaggggccgggcactgctctcgcttgtaatcccaacagtttggaaggccaatgcgggaggatcgataaagaaaaaaaaaaaaggcaacaacaaaaaaagaaaaaacactaaaaaaaaagttagctgtgtgtcgtggcgcgctcctgtggtttcagctactcgggaggctgaggtgggaggttcgcttgagcccagtagttcgaggctgcagggagctgtgatcgcaccactgcactccagcctgggggacacagtgagaccccgtctcaaaaaaaaaaaaaaaaaaaaacaagccgggtgcggcagcaagcctgtaatcccagcactttgagaggccaaggcgggcggatcacttgaagtcaggagttaaagaccagcctggccaacatggtgaaaccccgtctgtactaaaaatacaaaaataatccgggcatggtggcgtgcgcctgtaatcccagctactcgggaggctgaggcaggagaatcgcttgaacctaggaggcggaggttgcagtgagccaagatcgcgctactgcactccagcctgggcgacagagtgagactccgtctcaaaaaacaaaaaacgaaaaagaaagagaaagaaaagaaaaggcgggaagaaaagaaagaaagaaaattaaaagcagccagggaaacaggaacaacataactgaagaggggatacagagcaagggcagtgagtagagtgtggcccatcagggaaggttctcagaggtgagtctggagcagaattaaatacctaaatctctccactgggattagccagcaggaaaagaagaaggcatcccagagaagcggttctcaaacagttgggtcttgggaaccatttacagtgttagaaattatagaagaccctaaaagctttgtttatgtggattatatctttcaatatttgccgtattagaaatttttttggccgggcgcggtggctcacgcctgtaatcccagcactttgggaggacgaggcgagtggatcacgaggtcaggagatcgagaccatcctggctaacacggtgaaaccccgtctctactaaaaatacaaaaaattatccgggcgtggtggcaggcgcctgcagtcccagctactcgagaggctgaggcaggagaatggcgtgaacccaggaggtagagcttgcagtgagccgagatcgcaccactgccctccagcctgggcgacagagcaagacgccgtcctgaaaaaaaaaatttttttttttgaggccaggcgcggtggctcacgcctgtaattccagcactttgggaggccgaggcggttggatcacttaaggtcagcaatttgaaatcagcctcgccaacatggtaaaaccccgtctctactaaaaatacaaaaaaaatgagccgggtgtggtggcaggcgtctataatcccagctactcagaaggctgagacaggagaatcacttgtacccgggaggtggaggttgcagtgatccaagatcgaaccactgcactccagcctgggtgacagagtaagactctgtctcaaaaaaaaaaaaaaaaaaaaaaggccgggcacggtggctcacacc

SEQ ID NO: 3044 - DNA, 4001 bp, Homo sapiens
ctccatgcttttcccagtctactcctgaatcgctcctaagcttttgtctccgggtctttgctcttgctgctccctagcctagagcacttttaccccagtatagctaaagaaacagcaccttcacctctgttgggtttttcctccagtgttagcttctccatgaggccttctcagggcacttaaaattaacccctccccaaacccctattattctatctccctgactcatttttttctttcacatcgcttaccactacatcaagtattttacctatttatctgtctagaaatgaattccatacagacaggaattgtttggtctgttttgctcccagtacttaacagtgtagtaagtgctcaacagggtatctgtcaaataaatgaatgtatgaatgaataaacaaatgaatggaagcacatggttccttctccctcccaaacctcaagagtctcaaatgctgtcaggtaccaaaaagtcatgaagccctctcctttctggtgaagcactaccatcaccagtgtattccttgatgttaaatttcgaaagaaacatcatgtgacatttttccagttacgtgccacttttaaatacttttctagtgtcctcttctgttgtcaacatctgatgtaaaagccaagtacatattccagtttgagcacatcagaaactgctacaccaactagtaaaacacgtaaaaccatcaatgaataagagaaagtatttgtgttctaggcaaaatggacaaaataaggccaaagctacaaatattagaaggagcaaaattaatgtacagaaagaatgacagaatttttttttctaatctaggaagtcatttgattctaaaaaggacatactatataaagaaagaataccttccccaggcacaacattgggaatcaaaactgccttaattcaatgtatgtagctctagaaaggaagctgttcacagcttctagccccatactcaatttcttgcaagttaaactggaatacttacctttcttacagagagactacgtgtgtttaagtgctttgacttgcaggaaaacgaaaacaacaaaataaaaaacacagtactaaataattaactgcaaaacaacgttattgcttcccaaacacggtcatacgctccgcttctttcatgcccccattccctgttcgcttgatttatgtttcagtcgcaaaacaagtattcagagtgcttttggaaactgacacttaaggataatgcccatttcaacctgatgtgaacatttgggtccccaaggctgccatgggctctagtttcccagcctcggtcccaaggttccgatcatggtggctgcacctcgcctcaggcctggtccagacccagtactctcgccacggaaggagtctcctccgtccagatgctctgtggggaaggcaggagcgcacctcccagggaccaggtgtggacaggagagccggcaggagcagctgtctggccgcagcagctgttaccgggccaccccgagactgggcgggtgtctggcgcggagaagcaagcagaggaaggcgagccctccagctccgagcaagccggcctgacactgcccaccccacaaccctcctgccttgttcggctcccctcgcaatgccaagaggccctggcctaggggcttctcggctcctcgcggccgtgacgcgccagggccctcagcgcccctcgcccaggaggaggctccctccggccctgcacctgacctgtcccgtcgcctgacggcccaagccggccggagcggcctgtgggtgtccatgcggccgggccagctcgggcaggaggagcaggggcgcgaacgcggaccggagacacaggcggcccgggacgcggcggcggggccggggcgcggagcagagccgggcaggggagcgacacggaacggctggttacctgcggtccgggacagggagtctcagaaccccagtcagtcctcagcctcaacaacacaagatggccgacacgtcgccacgcacgtcacgtgaccgcgctcccgctccgccacgccccctgctccgcccccgccccttcccgcttccctccccactctccagtctcccacgacatccttcctttccgccaccacccgcccctctgcccagacacgcccctgcccgagacccggatgaaaggttggaagagggcggggccgtggcagtgcgcaggctcccgctgaccccttggcagcagccgggtacctgcccttgagttgagtggtgttggtgtccagggttgggcccggaccaggcaccgtgtgactcactgtcctgtacgcccagagctcttttgcagttcaaaagcctctgcatcacttgcgggctggttttccaaattagaacttttccacagcttttagtccggcatttttcttcgcagttgccatcctagagcgaatgggaaagccgcaaaagctgaaattcaaagcagtttctctacttgttaacagttctggtagaactgggaattcatttcagagtgttgtactgggacagctggaaaggacttgagagctctgattccttcctaggacatctggggctataacccttttacctagagatgaactattttggaattgacagataaaatacaagacacccagcaatatttggggcacacactgaaaaattgttcgttgtttttctgaaattcaaatttaattgggcgtcctgtgtttgctaaatctagcaactctatccttaggcatcccattcttgcctgtgtctccaacttcttccttcctacaggatccttcctgtcagctttaaagattacttgtgtctcccatcttaaaatggaatgttaaaaactccaattctcatgccgggcgcagtggctcacacctgtaatctcagcactttgggaggcggaggtgggcggatcacgaggtcaggagatcgagaccagaccatcctggctaacacggtgaaatcccgtctctactaaaaatacaaaaaaaaatgtagccgggcgtggtggcacgcacctgcagtcgcagctagtcgggaggctgaggcaggagaatcgcttgaactggggaggcagacgttgcagtgagccgatatcgcgccactgcactccagcctggcgacagagcaagactccgtctaaaacaaaaacaaaaacctccaattctcggccgggcagtggctcacgcctgtaatcccagcactttgggaggccgaggcggcggatcacctgaggttgggagtttgagaccagcctgaccaacatggagaaaccccgtctctactaaaaatacaaaattagccgagcgtggtggcgcatgcctgtaatcccagctacttgggtagctgaggcaggagaatcgcttgaacccgggatgctgagattgcggtgagccaagatcgcgccactgcacgccagcctgggcaacaagagtgaaaatccgtctcgaaaaaaacaaataaacaaacaaacaatcaaaaacaccaattctccctcctgcgaccctgttccctttcaaagccaagctgcaccaaagaattgtttatatgcactttctccatttccacacctggcatgcaatcatcaaccacaccgatgtggcttctgtcctttcctatctgcctattgcttgccctaagaacaccccatcctacaggttgataactggagtctttcagtcctcatcttgacttcgtgtttccctgtcttcaatatgattggcctcttcctactttctgaaacactttatttatttatttatttatttttgagacagtttcgctcttgttgcccaggctggagtgcaatggcgtgatctccgctcaccgcaacctccgcctcccaggttcaagcgattctcctgcctcaccctcccaagtaactgagattacaggcatatgccaccacgcccggctaattttgtatttttagtagagacggggtttctccatattgatcaggctggtcttgaactcccgacctcaggtgatccgcccacctcggcctcccaaa

SEQ ID NO: 3045 - DNA, 4001 bp, Homo sapiens
atggcttggttattcagcttaaatttgtactgtggcttatgttacacaggttgttgatgctcacctctcactcacttgtttctaattgttttataaggtttaaaattctctctttagagaaattcagaaaattcacctggcacatattttgacctcctaggtaacatatttgtaccagtattgaattttggtcagtgccccaatataagaaagttactgttttaaaataaagcaaactatcttattttccttggaaaaaaaaagaagttttacaataaatagcatagtataaatgaatactatggtttgagatggctataagtgctaaaaatcacatctgaaaatgatttcagttaattttcctatttaacatgggatgttttcttcctaatagaaataatctttttattaaaaaaaactttccaaagcaatggattagtaggcagtttggatgccaatgatgagaaagcaagtatagagtgtctcgctggcaagagtgatcagcagaggcgatgtcactagcagtgtcccaggatacttggtttaattatttatcacagggtccctgacattggttttcagagcacagagctttatgcagggtgcctcattctgggtacctagtctcatttcctttgcctgggacaaaatagttttgagaactgctctagagattcaaggtaacttttgaaaaaaaattaaatttttctcccaatagcttaaaaaggagttaaaaattagtctcctaaaaagtcagaggtagaagaaattttagagaacacctagtacaatgcaatcattttacagataaggtaactgagcttcaggggttaagtgagttggccaaacttatacctcttgttcacagcagaactaggagagaaatcaaatctaacctgtgtctggagctccctctgacccttttaaactttgctgctattaagaggacctagttctaggtagtcattttacatttgcagccccattataaagtagagtctgccgtaacgttttccagtgtgtagtatgttgaaacatgaaaatagtcatctgattctagcccctttgcatcgtgttgtgagaaacccggcactactagttactttggcagggtttctcggtccacctcctcctagactctcaggcttctgtctggaaccacaggagagatgctgtggtagcttcatgtttcagatgctttcttaaataaatggccatgctagagcccaaggcaaatctttctttcttggagacccattttactgtaacaaatgtgacaagaagtctatctcagccacttattttgataataagcttttcatctttcctgaacatgctcaggaattttggtaaataaaaggaggaattcaagaatgagggatgatcggcactttctagggcttaggaactgcttaccctgcatggagaccggaatcaggtgatgcggaaagtcattttgttaaaaataggtcagtgtgaggtgctcagacagctgtctaatctcagcacaattatccttctctatagagatgcttataaatgccatgattatataaatagaaaaaagattttttttcattatttcttcttctaaaaaaaagggatacatgtgcagaacgtgcaggtttgttacataggtatatgtgtgccatggtggtttgctgcccctattgacctgtcctctaagttccctcccctcactctccaccccccaacaggacctagtgtgtgttgttcccctctctgtgtccatgtgtttgaagagagaatttttttaaaacaaattttccatgatggggccataagaagcagacctcctaaatctcagaatattgacagtctccaatcatttggtggtaaattcaaaaggaaaaatctactcactgtgaacttcatcttgtcttcacgaaagcagtggacagaggagtaggcaagcatggacctgaatgagaagccttctcatatttgtacttaaccaggttgactcaaactaggtgttatcaggtggggtcaaagacttaccttcctcaatttctcctatctgtgccatgagccagtgtaccaggaaacctttcagaatatctgcatgcttagcaaggaactttcacatggagttgacctgactcatcacttgttgaagctgaaggtatcacaacaaactcaatatgatttatgataacttctcacccagtcaaagctgtgggcgtgagtattttacacgctaacattgctcagattcagaaaaagaataatccctaaaatcaaacaaaatcacagctgaaaagccacgtgtatactaggccttccagatagcagctcctataggaatgtaggaatggtttccacttcttaacttttatctgagcccatggcaatggttttgcttagactaaacatgttttgtgagcaactcccaccaaacctaccccttttctgcaatgttgagctcacttaatgatagcaccatatatctggtacagccctttcttctcagtctgacatctacttagttactgtcattttatctctgaaatgcctctcaactctgaccttgcccacagctcccctcacctggactttcacaacagtcatgcaattgatcactctggtcaccagtttcttatattccaatgcattttcttcattaaccctgaggttgtctttctgaagtgcatagatagacatgactctatcacgcttggaaatttcgctggcagcctacagaaaattcaaagtcattggaatggcatccagggtcctatgtaataagatttccaaaggcttcccgtctgccactttatgctatgtacctacattctagctccaccagcgttcccaccattcctggaaaagtcaagatgtgtatgtctccatgcctttgtacatgctgttgttttatcttggagggccacccgctagcctctcgcttggtagactcctgttcattgttcaaggctcagctcaaatatcactgcctccatcacatctcccccatctgatagatagaactttcctagtgtttgttttttccttctgggaactataaaagcaatatctttttatttgcttctagataatttagttttcagaagttacattaaaataataaaaaatattttcatcaaaagcagagagtagaaactatcaattgggcagacaagtaaaagctcaaaacaggtttggaggtgagttggttttaatttttttcctgctttttcctatacagtgaagctagtaaattaaatttgccaaggaggaaaactgtatttcattaactaccaatctataaattttccctttggaaacttcgtgcccacaattttcctcctgtgcatggattgaaaccataagatgggatcacatggttataaagcttgattcgctatcaacatctcttcaaaactgttggtaggagtggattagaacagctgcagtattactggatattttttaatgtgtccactgatttctttcaaactcactctttatccacagaaggtaataagcctggagtaaggggcagacatgtgtgaagaggccttcatctgctttaggaaacttcatgtcactgagaagtcaatgagtgggtagcatggtctctacgtttaaactcagccaccagtagtcatcttggtacacaggtgcagtgcccagcacacattttgcatgtcataccaaggacaagggcctgaagttctgcagtggacctgtgaaatgctggtctggaagatgttccatgacagacagacagacagatagatagatagatagatagatagatagatagatagatacatacatacatacatacatacatacatacacacgtatacacacatagatacacacacatacatagatacataggtagagttccgggtccaataatcccccctttagagactgacaattcacattcacacatcaaatgggctaagaaatttataggggaaaaatctctgtttcatccaggttcttctcatcttagttgactacagaac

SEQ ID NO: 3046 - DNA, 4001 bp, Homo sapiens
ccagacacagggtgctacaattgccacctaattcccaactctttctagcattataaccatgtagatagtaggagaaacccggggcagatgagcagtgaaggattcatttcactatggaaatactctggtatgattcacactagctttggataacagtggtcaaattgtgtcctctaaaaaaataattaattaattaattaattttaaaaaactttaatcccttaagactgagagggtaatacagatttaaaatgaatcatgggtgataaagacctgacaggttcctaagggaaactatgaaaatagaatgcttgggagcacaattaacttttgaggctgacatcaagtaaaacccccatattctcctatgccttagtgatactatcacacaagtgctgggcccacaggtcgtgagctgacattgaagcagttctgatattttgctgtagttctgtaagagtctgttccaacatgctaacccaggttttgtaccctctcttctgaacatcagtgaactgtactatcgctgaaaactacatcagtacatagttgactgcactgtcatttgaaaactgctgatgaaaggagtcttggggaagggggatatttttaagaactgtcagtgggactttcctacttccctttccatcccacccttaatatttctcttctggggactgggagtagagcatctaacaaagacctgtgtgctgatattcagccttccatagggatacatcttctcttaccacagaccagctccagcaacatatgatactcccgtatattctagttaatgagtctaaaatagtggtttgaacaagtagtcgaaggactaaaccactttaatggtatgattagagagagcttggggagtgtcctctgccccaaaatgatctcccttccaacactgtggttaatacaccatggttatataatacttttgtgcttcagggttaggtctcaatttggaaaatcaagacagccctgagagagggagctctttaagctgatagtctttaacactttagaaagaggtacttaacattttgctttctcccttagcagctgaatgagaataaaggacagagactaggggagcgaattccattctaggtcagaacatagcccactgtccatggggcactgcaatgtggaactacggaggctgggatcagatggaggggtggagtggccatagaaggaacgttttgtcctaagggagaatttagtcataatgagaggacattgaagacactctggctgcttaaatttgccatgattgcgcctgcaagtggggattcagatggataaattacattctaaatcccacatttacgggcttgggaaaatcacattcctctgcctctcagtctccttatctgtaaaacggggagaatactactcaactcatagggttgttgcaatgaatagatgaaattattcatgtgatatgcttagtctaaggcttagtatgcatttgagaaatgagaggtactattattactattactgatattatttttaaactacagcttctctcttagatagcaaatgtagttgttttaaatagcccaaattccctatgaagctcataataaaggattattattaaacatcctccaaatcaaaattatctagagatttctttgtatttttgaattttcttttaagtaaacatctcaaaacaggaaaaggacaaaaaaagtcagacttattcaacactatttctgccaaagatgtcattaattcaatcacagaagcttagaagcatgcacagtatctgtctaagactcccaaaatccatggcatattagatatgagcattgtctgcaagcagtcaccacaagagtatcaagaagcagaaacaaatactcacaagtattttcattttgcctgggagaggaaggtgctggagtaagtaaagctgccctgtgcagcttctatcctttatatgggcttgaagatgtggatatctctttttcaaatgatcactttggaaaagaccatgtctatatctctgacacaccctagcaaactcctttatcagaattgagatccaaccacatacctgatatcaatgaagttcattagtcagtaatgaaaattcaccacttggtcactctgtaaatattccctgctatttgtactatgctgcacttgacattttaatttccaccctttaaaaatattgcatgatgcttgttctatgcatacattttatagctctacaaggacaaacttctaacatctcctcctaaaggaagagtgcttccttaaggcctgagttgggccccaactcaatgtcttttcaccactgttctgctggctgaattcttccacagagggaacggatatgagacggggtgccaagacagtggctggggaggcctgcttggagaacaaacagcctaggactttcttcgttcttccctttagatttggtgtcaatttccagaaattaatgaggaacaagactcagaaagcattctccccaattaccaagtttaaccaaatttttacattaagcttcgcccaaaactgcacaaaactgtaagttagagacctctagttatcttgcagagtattaagaaattcttagattgaaaaaaaaaaaaaagagagagaaagagaataaagtttaatttgtgtaatttttttaacatgacaattagaaatggctagttagtgtcagggtataatcatgaactcaggaagggaaatttaaaaacaaaacaaacaacaacaacaacaaaaacaataaactgcggctgggcgcagtggctcatgcctgtaaccccggcaatttgggaggccaaggcgggcagatcacctgaggtcagaagtttgagaccagcctggacaacatggtgaaaccccgtctctactatggtgaaaccccgtctctactaaaagtacaaaaaaattagccaggcgtgatggtgctcgcctgtagtcccagctactcaggaggctgaggcaggagaattgcttgaacccgggaggcagaggttgcagtgagccaagatcatgccactgcactccagcctgggtgatagagcaagattccatctcaaaacaaaacaaaacaaaaaaccccagtaaattgcaaaattgtaaaatattgagaatcaccacagtaaacaaagagataacataaataatggccttgttctatagctgaaacaactttctaactttagcagctttaaacaaaaatggggttctcaaaaagtagacatctgggcaagttaagggttacctagttcactggaatctccctaccctggctgttcagtgggggtggatgtaaaacacgcagctttattaaatctttctcagatagtagctgcagaaaggattacagttttctaaggcacctgcaaattttctctcatatctggcttcagagactcaaaaaagcaaaccagcaatgcccatagacattagggctaatgaaagtatcacatgctatcctctaccatgtccccctcccgtcctcaggagttctggttctatagtctaataatgattgttgctagtgtttgtagagcactcaatatgtttcaacactttccaaacacttcggatatattgattcatctgattctcatatcaactctagaagttaccttctaacctgttccattttacaggtaggaaaaccaaggtgcagggaagttaagtaactctttgagatcacacagcttcgaaaggcagtgtttgggatctgagcccaatttaactccagagtccacactcttaattctgaaaatgatacagcctctccttgccttgctgagacaggagcattagcaaggaggcttctgcttccagaatgctccctaactgaaagatagacttggaaactgtcaggcccacccacaactcaggagtgaaaactaaaatgagaagtggtgcttgtaaacgttgttatgaatgaaattcctgtcttcactcccagctccccgccgagggagtgaaattgctgacctggaagg

SEQ ID NO: 3047 - DNA, 4001 bp, Homo sapiens
ggactttctctcatccgctggatctgatcccgctcaccgcacccggcaggctggttcaccgtctcatcttacctggggcagcagtagcgtcaggctgagcggcagcagcagggaacgaaggcaggacagcttcttgggagccatggcgtttacagcgctcctctagtctgagacggcggacagaccgtcacgtgtcggattcctgggagggaacctcagcgagcaagggggcggaaaccacctcaagttgccaggcgtttagcctggacttcctctccagcctgcagccacccccttactctactagtttgtaaaatttctacatcatgttaaagtgcagttcacgaaccagcttcatcgacatcacctgggaacttgttagaaatggagaatctggctgggcacgatggctcacgcctgtaatcccaacactttgggaggccgaggcgggtggatcacttgaggtcaggagttcaagaccagcttggccaacagggcaaaaccctgtctctactaaaaatacaaaaattagccgggcctggtggcacgcgcctgtattccaagctactccgagggtgggggtgggggtgggggtgggggtgggggtaggggctgaggcaggagaattgcttgaacccggaaggcggaggttgcagtgaaccgagatcctgccactgcactccagcctgggcaacagagcgagactctgtctcaaaaaacacaaacaaacaaacaaaagaaatgtaaaatctcagatcctacctcagacctatagaatcagaatttgtattttaacaagattcccaggtgatcctaggcaccttcaaaattgagaagcatggctttacttgactgggctccctgaggacagggagtgccctgttcatctcaaatcctcagcctctagcacagggccgggtatatagtaggttaaatctggatgaatcaatgtcataaccaaaaggctaaaacaggttcagaaccaggggaaaccattggaaaatcttcagggtgatccggggtgtggaagggaggaaccaggtcacaagaaggacctctttcctggagagtcctgtttcagcaaaacagccattccctcctggccattccaccttctttggaagtgcacccctctccagcttacccctgcctgcctccgcaacagatattaaggacaactgctttgtgccaaagctcgaaaatctgtgaatttccgttccttttgcctttacagtctcaagaatgggatgtgaagatcagggtaataataattacggtttattgacacgtactgaaggctatgtgtcagatattgtattaaacactgtacatctcatttaatcttcaactccatgaggtagataattatttccattttacagaggaggagaggaaaggacagaaacattaagtagcctgtccaaggtcacacaactacgttaacggagctgtcatttgaactagtcagtctggcctcacagttaagctacttaaccttatgtactattatacctattttacagctaccaaaagtaaggatccgagaggttaagtaacttgcccgaggttacacagctagcatgctattaacactcaatttagaaactggaagtctggttcacaagcctgagctcttaaccactgagactaggggtagtgggatacaggccagagcccagaaggttgtacgggatcaggagaccaggccaccagacccgcccctcactggatccccctccaggctgcagtgtagttggccgctttctgccccagagcgccagaggtatgaagcctcctacctccaacattgggagatggaggtcctgggggcctcgggccgagcccggctttgctcccctttggcgtaggtgcctgcgtcttgacccccaccgaaggccaagtagagaaccctcaccagggtcctgggacccgtccacccctacacctagctagcccggagcctctcagctccgcgtccccacatcctccggatgcccagcggttgctgagataccgcgggccgttacgccggcgcggactgatgatgtcagcactgcttccggtcggtggcgcttctctctggcccgagccaggtcagtccggcagtgcagatggcccatcccgggctctgggctcctagaccggggtgggccctgccaggagtgggcctgagcctcgcacgtcctctgaaactacgctatgctctgcttttgcggcgcgatgggcgtgggagcgggggctgcccaaagatgggctggggttggaggaagtggcccggtagccgctgtgtgtcctgaggccgtaaggcgcctgaccccacccctgaagctggcgacggagcagggcctgttttctctacactatagtgtaggttccagagacctgggcctgagctctccgcattggtacttcatgggtcgtctggattgtgccggacctgtgaccctgccgttgttttctttccagcatgatccgctgggcccccagcgcatctcctggaagagcccactcaccctggacgagctcttcggtagcctcagaccgtccttgaagaggatgactgagacattatgggccacgcgctgtgtgtctgctctcggggaactgtcatcattgacaataagcgctacctcttcatccagaaactgggggaggggtgagtgtttggaagtcagttaactagtcctcaagtttatgatcattgaaggacagcggtgtgcatatgcttggggcacaagggttttatccctatccctgtcctctctcacctgacagaacctagctacacagtatcaagaaggtggattctggagccaggcctgctaaatccacctcgtgtgaccttgataaaccatgtttttttcatcagcttaatggagatgattattatccctcactgatggagttgtgaggattaaatgagataatgtgtataaaatgtctcacccaatgcggggttgacaagtacttgataagtgttggctattatttatttagcatctgtcaagtgcagaggtctctattacgaccataggacctcaaagatttctatatctctgctcctgaggagctcacggtgtaatattcttcagatttctcttagagccacatcttgggaaggtttctgctaaatgggaaggacaccccactccccaccaggaaatttctctaggtccaagccatgtgggagatgaccatggccctttattgacccctttggcccacagtgggttcagctatgtggacctagtggaagggttacatgatggacacttctacgccctgaagcgaatcctgtgtcacgagcagcaggaccgggaggaggcccagcgagaagccgacatgcatcgcctcttcaatcaccccaacatccttcgcctcgtggcttactgtctgagggaacggggtgctaagcatgaggcctggctgctgctaccattcttcaaggtcagaaagactcctggttatggagggggttgcagcagagccacctactcaagggctgtgtgagcagtccagcatgttaggaagcagggaccatgtcctgggtttggccactttagattttgagtttgaggtgtgtatcatgaaagggctgataggctttgacatagggaagggatcaggcctaaggagcagaggctccaaaaacatctccaactgtagggaaacttgtgttgcagagaggtacgctgtggaatgagatagaaaggctgaaggacaaaggcaacttcctgaccgaggatcaaatcctttggctgctgctggggatctgcagaggccttgaggccattcatgccaagggttatgcccacaggtcagtgggaggaccctgtgtgcttgctggggcccagaggaagagcctcaccaggagacatgggaggtctctgttctcccaagaaacagcctgtatgattcttttgcttgctgggattccagccttcctgtccagagatgctcataggtcacttctacttctctacagagacttgaagcccacc

SEQ ID NO: 3048 - DNA, 4001 bp, Homo sapiens
cagagtgaacatgggggagaagagcaataatgtcgaggaggtgactggggccaattgtgtaggacctaccactttaaggaatttatggttcatattctgaatgagatgagaacctactagagaggtttaagcagagaaatgacaagatctgagatgtatctttaaacttatacttgaacaggatcacactggctactctactgagaacagattgtatgggggagagggcaaacaagggaaaccagttaggaagctataaaataagccagctgagagagatggtttggaccagggtgggggcaatgggggtgataaaaagcacttaaatttaatgtttgtcaagatacagctgataggattttctcttttttgagacaaagtctcttcaatctgtcacccaggctggagtgtagttgttcaatctcggctcactgcaacctctgacccccgggcccaagtgattctcctgcatcagcctcccaagtagctgggattacaggtgcccaccacctcgcccagccaattttttgtatttttagtagagatgggattttgccatgttggccaggtgggtctcaaactcctgacctcaggtcatgcacccgcctgggcctctgaaagtgctgggatcacaggcatgagccaccgcgcccagctgttttttttttttttaatcagtttcttccactatattataagctttacggcacaaggatgggggtctgtctggtcccccagtttctagcatcctgctgggcatgaaggaaacacttggtaaatgaatgatgacctccaatttgggaatggtctcttctgcttttggcacccaaatagcccattttacttacttgcttctgtgttaaatcctttgtctcaactcacctggatctgaggttcttagatgaatttcaggttttcgaagcaaccaggatgggagacccccctgagacaaacataaagagaacaaagaagcatgtaggttttgttttggggtgtggtggggaagctaggaagggaaggaaggaagggaaggaattgaatatagtgctggagatggccctagagtgtgggcagatgggagtagtctaggaactgcacaaggataactggttctatcccttctccagctaactcaccatctcccactctgcacagatgtaaggtcctggtctcagtatgaccaacaggttcgctagagctgcctcattcagaaaggcaatgaggtcccggctgccattaaagttatagaccccaggctgtggctcgtggtagttccagggcacataactgagaaaggaagaggttaataggaaccaaggtgaagagacgccagggaggcctaacggctcaggccttgcagggaatctccaggaagcggttggaaggaggtcctggcctgccctttcccacccttggcctaggagtcctggcagtcttcctgtcccgaccttctttataagggggcggtagaaaaagtagatcccatccctccgcggctcttgcgagcacttcttacaactgtatggcgttgaggccgctccatcgcatcttcaaaagccggtcggcccaaagcacccgcggtacccgaaagtagtgcaggctgccagacacatagcggaacggggccccgtctaggagaaaccggtcatgacccctatccactacgaacgaccgagtgtctgcctataaagagaaagagacgctgctcagcagacgcctggagggagcgtcgagggtcagcgcctgccaagagcggaagagatggaactagccctgcgggttgtttggttgttactttggactttctctcatccgctggatctgatcccgctcaccgcacccggcaggctggttcaccgtctcatcttacctggggcagcagtagcgtcaggctgagcggcagcagcagggaacgaaggcaggacagcttcttgggagccatggcgtttacagcgctcctctagtctgagacggcggacagaccgtcacgtgtcggattcctgggagggaacctcagcgagcaagggggcggaaaccacctcaagttgccaggcgtttagcctggacttcctctccagcctgcagccacccccttactctactagtttgtaaaatttctacatcatgttaaagtgcagttcacgaaccagcttcatcgacatcacctgggaacttgttagaaatggagaatctggctgggcacgatggctcacgcctgtaatcccaacactttgggaggccgaggcgggtggatcacttgaggtcaggagttcaagaccagcttggccaacagggcaaaaccctgtctctactaaaaatacaaaaattagccgggcctggtggcacgcgcctgtattccaagctactccgagggtgggggtgggggtgggggtgggggtgggggtaggggctgaggcaggagaattgcttgaacccggaaggcggaggttgcagtgaaccgagatcctgccactgcactccagcctgggcaacagagcgagactctgtctcaaaaaacacaaacaaacaaacaaaagaaatgtaaaatctcagatcctacctcagacctatagaatcagaatttgtattttaacaagattcccaggtgatcctaggcaccttcaaaattgagaagcatggctttacttgactgggctccctgaggacagggagtgccctgttcatctcaaatcctcagcctctagcacagggccgggtatatagtaggttaaatctggatgaatcaatgtcataaccaaaaggctaaaacaggttcagaaccaggggaaaccattggaaaatcttcagggtgatccggggtgtggaagggaggaaccaggtcacaagaaggacctctttcctggagagtcctgtttcagcaaaacagccattccctcctggccattccaccttctttggaagtgcacccctctccagcttacccctgcctgcctccgcaacagatattaaggacaactgctttgtgccaaagctcgaaaatctgtgaatttccgttccttttgcctttacagtctcaagaatgggatgtgaagatcagggtaataataattacggtttattgacacgtactgaaggctatgtgtcagatattgtattaaacactgtacatctcatttaatcttcaactccatgaggtagataattatttccattttacagaggaggagaggaaaggacagaaacattaagtagcctgtccaaggtcacacaactacgttaacggagctgtcatttgaactagtcagtctggcctcacagttaagctacttaaccttatgtactattatacctattttacagctaccaaaagtaaggatccgagaggttaagtaacttgcccgaggttacacagctagcatgctattaacactcaatttagaaactggaagtctggttcacaagcctgagctcttaaccactgagactaggggtagtgggatacaggccagagcccagaaggttgtacgggatcaggagaccaggccaccagacccgcccctcactggatccccctccaggctgcagtgtagttggccgctttctgccccagagcgccagaggtatgaagcctcctacctccaacattgggagatggaggtcctgggggcctcgggccgagcccggctttgctcccctttggcgtaggtgcctgcgtcttgacccccaccgaaggccaagtagagaaccctcaccagggtcctgggacccgtccacccctacacctagctagcccggagcctctcagctccgcgtccccacatcctccggatgcccagcggttgctgagataccgcgggccgttacgccggcgcggactgatgatgtcagcactgcttccggtcggtggcgcttctctctggcccgagccaggtcagtccggcagtgcagatggcccatcccgggctctgggctcctagaccggggtgggccctgccaggagtgggcctgagcctcgcacgtcctctgaaactacgctatgc

SEQ ID NO: 3049 - DNA, 4001 bp, Homo sapiens
cctgcggggtgggcaggaaagggtgtgctgcagtggggtggggttgggaggtgagggcctttgtggaggtgctgtactccaaactttgggcctcctgcctggcccctactcccgccacagattgagaatccctcaagcatctgttgctattgcaccaataatgagaactcagcctgacactagaggggctccccggcaattacattctaattactgtctaattactgcctaagtctgtcctctactaatgtgacacatcaggaaattgcaccatggtggttcatgatccactcatggcttggagaggcagggtgtggggcggagggatggggggatggttcccgctgaaaaccctggggcaggccagacatacacagaggccaggcttcctggagctcacaaggcctcagagcatgggcagaggggcagctttaggtgcccccacaggccaaggatggccctgacccaggggaaggaaaagaccatgtgtggccccaggaccagggccgctccaccagctcttccctccctgtgcgcttggctcctcccactccacctaagagctcttcctccacccccagctggcccctcctcacagagggagggcctagagagtccccgtccaaggggcacagggtggagaggcatcgtccagctcagaaggccacctccccaaggggcctgaaggttgacctcagatctccctttcctgacatgagccacacatcccaataatgacctcccacttagaaccgcaggaaaaataaaagtaaatacagtaacaaccccccgcaggccctcaggtccactcgtagaagcaccaactcctaagcccctccgagggtctttccatgttcctgggctccggccccagcgtggcctgtgaaccagcagccccagcatcatcttggcacccaacagaaatgcagaaactcagccagccctgccccaacttaattgaatcggggtctccaccaaaacaagcccccaacaactgtgtatacatcaaagtgtgaggggcgctgcccaagcgcccgccggaagaaaaggcgcattctcttccctgcctgctctctgagctgtgcctcagccctgagagcaacagggcctgactaaatgcactggaacaaaaagggaggaaaagaaatcgaagtctctccattcctccgagacagaaatagttctgtggcctccagatggactgtgcagacacagcggaggtctcgccttcccgccaaactttcccaacgggatgctggcacggatggcccagtagaaaccagagagtctttctctttggggcagtaaaatgagaggctgtggctcgtgtagtctcttttgttataattaagttggccaaaaattcacctaagatagtaaatcccgaacctgaccctctaattagagccagaaggcatcaggagacaattactttccaaaacagtccttggcgggcaagaggcaagaagttctctgggcacatttcaaatgtgccagctgcacgcaccccagggctgcctggcagcgaccatgcccctcctccctctctcccctcctccctctctcccctcccagtactcaggccccacccaccgctgtctgaggcagctcagccccctggacttggggtggccagacctcttagcaaactcacaggtgaccttcatggtgcctgggattcctgggagcagaggtgccttcctcttcgccctccataaacccagcatgcctccctgacgacatgggccaccactctaattaaatcctaacgggctaatgaaaaacacccctgctgccctccaagtgtgcgaaacagaaagtacctccttgggcagctaccgctgctgctgccgctgcagccaccaccaaaggagaggcctttttacccgggtcggggaagccagcggcctccaggatcccacttttggcttcttgcttctcggaggcagtggctgaggcagacgtctccatctcagccgctcatcgtcctgggtggcaatcctaaaagagaagacaaagacactcaccaacactgagcccaaacccagccgggaaacgccgacccagattcacaccgccgctcgctcctaaagcaaccaacttcattctaattctcttataattgggaaggagggtttaattaattttgagaattattagtcctgggattcgtctggtcttctgaacgacctcacggacaactgcaggccattctcatcatcttttacccagattttacaaaatctaagtaacaggttcctactgatatgagtggcgggtagcctctgatgagggaaataaagtcagaaacaatgacctctgtctgtgaatcatggggaaaataaaaacaaatatagtgacaatgacctagaggtcctcaaagaaaggccctcattttcaggtggcttccctgctcaccagaacctttcacttattcatctgcatgttcgctcactccttcacccattcattcaataaatgttcatcctttattgactcacacgcactcagtcaacatatttttaagcccctagtatgcatcaggcatcatgcctggtgcggaagatacaatatgtggagtttacattctccttgggggcaaacaaggggaaaataaatgtagatttaatctcagtgagtgggaggtggctcaggaaaagaaagcaggacagagagggttgcaggggcacagcggggcagcgctgccaggcctctctggggtagggatgggatgcctgaggggccaccccactgcagtcagagggcaaagccaggagccaggggccttgtgggaggaggctggcttctttgagtagtggccagaagggaagtgcaggcatcagagggtcttgagcaggggaggggcaggactgactccgggtgtaaaagggtcactccattgctgtgtgcggagagcaggcttttcggggagaggaggctactgcagtgacccagggagagacaatggtggtttgggttaagcaggtggcggtggagctggtgaaacatggacatggtttgaaggcagagccaacagaccaggctacagactagataaggagggatggaaagtggctgtgagcaagggaggaacacccagcgggattcggggcatgggcaacttccgtctccagctgagtggtgggtcagagcagacactggcaatccagcctttctatcagaagataaatctgatggtcacatgtttgttttttgtttttgtttgtttgtttgtttgtttgtttttgagctggagtctcactcttgttgcccaggctggagtgcaatggcgcgatcttggctcaccgcaacctctgcctcccaggttcaagtgattctcctgcaatcctgagtagctgggattacaggcatgagccaccacgcccggctaattttgtatttttagtagagacagggtttctccatgttggtcaggctggtctcaaactcctgacctcaggtgatctgcccgccttggcctcctaaagtgctgggattacaggcgtgagccaccgcacctggccggtcacatgttttaaagaaggtggtggggaagatagctggcatttttggctggacacctggaggagtggggcagaaaggttatgggcagctgtgtgaaggtcctgcagagagtgtggggacgggggtcgcagtgtgcagacaccagtggtcagctccactcccggggccctcagctaaatccacattagtaggccctataacttttctgttttatgttgtttttttttttttcatttttttattttagatagagtctcactctgtcacccaggctggagtgcagtggtgtgacctcagctcactgcaacctccaccacccagattcaaaagattctcctgcctcagcctcctgagtagctgggattacaggcatgcgccatcacactcggctaatttttgtattttttagtagagacagggtttcactatgttggccaggctggtcttgaactcctgacctcaagtgatccacctgc

SEQ ID NO: 3050 - DNA, 4001 bp, Homo sapiens
ttgaaaggatttaagtcatctaacccaagatattaaataacctgtccatggtcaggacgctattttgtggcacaaaaccaacatcacaaaataccacaaatttcgcccatcatcaagtgatttttttcaaataatctttttcagtctgggagaagaactttagaaaagtttctggaaggtcccaacttcaattacaggaaaacatcaagcaggcgtgagattgaaattataacaatgttctcactttcagtttgacttaaggaactctagagctggaaatagcagcagaaataaaagggaagcaaaacaggttagagtgtcagcgtacaaagccagaaaaagagtaaggtataatgaaagcagatccgtaaatttttacccattttgggaaaacaaagtggtccatttgtattacacaagacaaaaatatataggagactgctttgcatattgtttaagaaaaaccagttttgctttaagactaaactactgtgccgtacacatacaggatgagtcaacatcctatcacaatgaagtcacaaaacctactcaactcagatttttcactgagttagtgtattacgtcacatttcatcttggctatttaacttttatttctaaaaatctccccatctcacggaagacctgacaagccaaagctggtcccttatgcaaacaggtggtctatactgcgtgccccatcttctcggccacatgaccggattcctcctaatctcacttctgaaacattgtttccggtgccccagatggctctacacgtgcctgaggtagccactcccgaaatataaagagctctctgtcacatctggcttccaaccggatgatggcagaaaccaagggagggcaggcagagcggaaacgagccaggaaaagcgacaagtcaggaaggtaaaggctctgctgaacgcccaactcctaaatgtcactcggtggagatgttcgtgcagcatcgcccacgaatggctggggcgggcggccaggcgctgcagccgcaagccagggagctgagcacgcagcgcgggcaggggagcggcctctctggcgctggggacgccaggcgagcccatcaggccccaccgcggccccaccagggcgacccccgccgggggcggagaagggaagtgggtgcctggcggagggttgcgggcggggaaggcgcgggcggggccgggcctaatcacatggcgcagacggcgcaggccgcccggcacctctttctttctcttttctagaccctcggctcctatcccgccccaccgcagggccccacacagcctgagcccgggccccgaaaggaacgaggcctcctgcgcctcgcggagacactcacttttcacctgaggccaccagctctttgccctcgctgttgccaaacgcgtccgtctccccggggccgtccttggggccgggcgccgccggggcagcgggtggcgacaccccgggctgcggatgcgtgctccccttgcccagctcctgcaagatctccgaaggagagctggacaggccccgcgcgaggggctccgccggccagccgcccccgccccaccacgggtggagtcgcgcggcggcagccgggcccgcggccggccgtcccccgcctcggggacgccggcacagggtgaccaagggctgtgcccgccgcagagtcgcgctcacgccggcgggcgaccgcaggagcaggtcccgcagcatccccgagcctcgcagccgcatcatgccgccgggtccgtcagcgcccgctcaacaggggaggatgctccgggcgtgggcggccggtttcctcggggaacgcggtctgtggtggggcggtgagatgacagaagaggaaagggcagctacttgggtgtggttccggctcggactcccgcagcggatgcgggtgctgctgctgctgctgctgctgctgctgctgctgctgctgctgctgcgcgctaggattgccgcgaccggttctcttcgctccgcctaaggctccgcactgaggctaaagcgcaggggagggctagagaccttcagcgctcgccgacggcccgcccctttcgcccgctgcgattggctcaaatcctcgacctctcttttgattggcgattagggcagtcaaatttctctcggctctgggtgcgcggagagtagggcgggggattggtggggggcggggagaggagtcaaactgacgtgtgaagcgggtgagccaggcccggctgctcagtagccactttctgcacgccgtgccaactccgaggctagcctagttgggtactaggggctctgggttctcgcatttatgaagcagtgggctcctccactctgggaattcgagctgttggggagactcatgggcgagatcccccgcagccgagggcagtgaggtcagcaggtttggcagggctgagtctggccgagctgtcggaactcagccgatcccagctcgcatctggcccccaggtcagggcgtctggcgactcctccgagagcagccccggacaagcttcatccctctcccaaatgtaacatttgcttgaaactttccatgattggctactacccagacgtgaagtgttttggaaaaaatgagcaaaatcctttcagctatgcgacttaagccatgggagggtggaggtggagggagggcgacgagtggcgaggcggggtgggggggttgcggaatccagaatacgacagctttcttttttaaaaattattttttttaaatgtacaccgatacttcaaaaatagttttgaatagcaatgattccgttaacgctatttgcttgaaagcaaaactgtagatacttttctattttaaaaactgcttcactgttttaaaatagaagcgttggaatacgggttctctaagttatttcagcatcactttatccatttatccttttggacctgtggaaaaacagccaagaacctgataaactgagttattccctgaggctacatacacattacattccaggacaaaaaaatgtttttagactatttcctgaaacaattaggtttaaatggagtagatccacagagtttaataagatgttttgggggttggtgtgttgttactgtgttgttgtgtgtgttcgttttgagaaagggtctcactctgtcgcccaggctgaagtgcagtggcgcgatcacggcttactgcagccttgaactcaggggccccggtgatcctcccacctcagccagcacctgcttttttttttttttttttttgtatttttggtagagacggggtttcgccaggttgcccaggctggtttcgagggatctgcaccccctgggcctcccaaattgctgggattacaggcgtgagccaccacgcccggcctaatgaggtgatttttatgaaactagaagggtgtatgtcaggtgcatcattaattgataaccggatttagtaatctagtgaactgtaaaatatttcaatagattaataattaggaaatctggctgtacctacaggttatgtgacctttggcatgttacagccttgccgtgttttaagttttttttttctatctgctctttaaccagaagaacatggaaaaaactatcatgtgtaaaacatagtcaccttttttatttaaaaaaaaaaaagcaggacaatgggaaagtacttagatagcttttattactaatgttacttgtccaaaaatgttgatgaatcaaagtaatgatatattcaggaatagagacatcaagtttcagaggaaaggtaacaaatattacccctgcctaaccctgacttgttaatgacttgcagactttaatattgtccaatatattagctgcaattagttatcaattttaactgcctcttttttctcaacaacacaaagcaactgacaatccagttactgttttcctctcagtttctcccttaatttctctgagtttcttatgaaaattgttttagatatttaaaggtttaaaggctttatagttcacttaacaaataagaaagctaacct

SEQ ID NO: 3051 - DNA, 4001 bp, Homo sapiens
agagtgagtcatgatcccaccactgcattccagcctgggcgacacagcgagaccctgtctcaaaatagagaaaaatttttccaaaggaaaaaaaaactatgctacactgacgcttcaaaaaggttacagggtcaggcatggtggctcacacctgtaatctcagccctttgggaggcttaggtgggaggatcgcttcaacccaggcgtttgagaccagcctgggcaatatagtgagactcctttagaaaaaagctccaaaaatcaaacaaacaattaaaaaagttactgaatagtattcacagtaggggtacatttttgtataataaatacaaatattcatacaaaaaaaggtacaaaaggttttataaaccaaactattaagtttttaatctatgattccttttttacaatatataacacttgtatagcaaaacctttttgaatctgcttttaaagtttaattttaggccgggtgcgcagtggctcacgcctataattccagcactttgggaggctgaggccagcagatcacctgaggtcgggaatttgagacaagcctggccaacacgatgaaacctgtctctactaaaaacagaaaacattagccaggcgtggtggtgcgcgccggtagtcccagctactcgggaggctgaggcacaagaatcgcttgaaccaggaggtggaggttgcagtgagttgagatcgcaccactgcactccggcctgagtgacagagcaaggctctgtctcaaaaagaaaaagaaatcatttaaaaaatttcatgtgtgaccctaccaaataacctttaaaaacaaaagcagaaaaaccaaattgtttgtgtaagcatatattctacctataaactacattccaggtcacaagtcaatattccatctttcaactcatccaaaaaaaaaaaaaaaaggggttaaacaagctgcagcagcaccgccctacatacagtacatccacggtcaacgacttcatcaactactagaaacttgcacagactctgttcctagttaggaacaaatgtacactattgataaacttcacctttacaattaacaagaactcctgtgtgcaattacttaccctccactgagtgggcgacaataagagtgcctatttcagagattacatttagtgtctgtactaaggcaaccggatgcaaaacaacttactctgcggctacccacttgagagggcaaaggtggactgggaaggccagccagccgggcgtctctaaggtttaacgagacgcgagctcgggcttggcgtttctcatcctcatcttggggctgtaacaacaccctggaagcgtctgtggttgaaaatgcggaacacctggcgtctcccaaggcgctccccagtccgccccgcatcgggccggcttccacattcaccctgtcaagggcacgtcccctctccataggctggggagcgctgcaccccgcaagcgcacgaggcgccggctcggccccaggcccaacaggtgcgggtccgggtccgcgcgggtgcgtgcccccacgtaccttcgaggggtgttgaggagccgctgctgctcgtccccctcctcctcatcctcgtccgtctccgagtcagggtgacagtagcagaaggacccgctgctccgcttgcgcttgtggctgcccgcacagtaacagaatccgtggcccgccgcatcgtctccagtgtccggcctccgggccgagccccccgccctggcaccctgcgcctgctgggcaagggctggtcttggctggcgcagcacccggctgctcaacgatcccatgggtcacggctccccgagacttcagggagcccagagaagggggtctcccgccatggctcggccgccgccgccagccttccccgagcgcaggtgcctacaccgccaccttctcacgcgcagccccaaccgttgcagcggacgccacagtctccatcctcttccccgcccgcagcgtccggtcgcgccgcgctctagcaccgcagcacctcgccccctcgctttcgcaacaaagcgcgggacggagggcgcatgcgtacggcgagcctccggaaggggcggggcaaggcgtgcgtgcgtggcaggtggagcctgcgcacaatccggcgcgccagtgcaggctggtgttttcgggcctgcggtgggcgtggcctctgactaacccgaacttcggcgtagacgtagtgttaaaccgtggttcatacgcgcctctgtagtggcaagacctgggactccagtcactcattgtttctacaaaggtgccttgagtccccggtgcttatgggcctgtgctaagctagtggcaaaaccccgaagctatttggtctccttgcgggagctcggcgcttgctggggccacgctctgcttgcttgggcgtggcctcctgtgagagggggccctaggatgaggcgatatgctggattcctgggcttccttaacatgagccctcccctgctgtagacgtgaatggaacccgttaagttatgggaacgttcccggcactcctttcctttcctctcaagtgccagtgggatgtccgaatagggtctggcaccatgactgtctggactcaaaagtgccttcaggaggccctagcaaaatttactagtgtctgcttggagtagtagcagctcttgtgatggactccggacagccagcgttcattccctgactcccttctgttactttttaagtaaaataatgaaaatatttcaaatagagtaatacagattcctgtggaccgaccactagcttgaaattttatcagacttgctttcattcttttttcctcccagctttattgaggtgtaatcaatgattcattcttttttaaatagaacaatacatataggcagaagcccctgcgtacctcctccatctcattctgtctccctccccagtggcaatcactgtgctgagaatgttgtatatcatgtccatgcatgtccttatatgcatacccataaataatattttcttttgcatgtttagacatatcatggaatggaatcatagttgtacctctcattgtgcacctttctcctctctcaaaattatactctcaagatttatccatttggtcaatcgctagataattttcactgctcattgtatgactgacccatatttgtttttacattccttagtgagagaggttatttctactttaacggccttacagagcagcaatgaacatcatgtgcaatggattcaccaagcagattcccaaaagtgaatttgctgcgaaatctgcaactttgttagctattaccaaattgctctctgggttgattgcatcaaggtaccaatttagactcccattggcagtatacgtagtttgagggtccccgtggactaatgtctgattcatgcatgagaaatctgaaccgagagaggctagccgaggcagcttggggtggaggtgggaggcggagaataatggctgcagagggatcagcttgcatacacagaatttgccagcacaaagaacgtgcaggtgtttcccatggagcagatgtggaccaccatgagacagcttaggtcctgcccaacaggcctgggaggaaggcaatgaacttcagcactgagaacctcaaagagtcaccaaattcctagaggctgaaaaaggagtacacatttgccttgccagaggaacctcaggtgagtagcgtgatgaggttgacaaaggaacccacaagaatgcccacaagaatcaactttagtctgtcagggtcacatagggctgatcctctaccaccacagcaatgacagtcaggtaacaactttcctgctccccttaactctcttctttgctacaacccagacatggtaggttggggcagggggagaacattgaaggaaacctaggtggaaaaagaagagaagcccatggtctccctttccccagaaaccagcttcctacttgcaataggccagaggtgagtgagggaagaagcatcaactgtaaatcaagcttgcaattttgact

SEQ ID NO: 3052 - DNA, 4001 bp, Homo sapiens
gctgcattaatccatttccaccccgccccctcccccccggccatttttattatctgtcagcctaagcttgagatcagcatgaggtaagggtaccatttatcaagggtctgcgttgtactaggcattttacaaatatcatttctaagcttcaccacccaacaaggtaggtctaatcacccccattttacacataaggaaactgagtgtcagagagggtgtgttatttgttgcagacctcacagcaggcagagactgaattcaaaccaaaaccttgcctggctcaatacgaaaagcaataaagaaatgagcaacaatgtgatcaaggatatgaatttgtgcttggttatcattaagagtctccatgctacggctttacattgtctccaagatccttgcctgatctcacattccacactttaaaaataggagtgaaatctgagcaggaagaggccagatgagaaactagattaggggaagacagcagggcagctgcacagcataacttgagggggcgccattcacattgtcatctgtgaatgatggtccttggagttatgcctggtgggaagagttcatggttgggaaagggggaaacagcatgaagataagcaggaagtgaggtgagagaggggagcccctgaggttacctgggcacaggcttcaatatggtgttggatcatagggacccctgccacaggaaacaatggtttgggcacctcaaaagacaaaggtctgaagcgagttcctgggagaggagagaggagaacatttcggcctcctgccttcctctgcccccatcccgcctaccactccagcccaacctcctccccccattcccctggcacctcacccttttgagggcctccaatcaggatcaccgctttgagcataatggtgactgctacctaaacttcaaattccaacagagaaatcaagctcagatctcctaccccaaccaagccccaaaacccaaatagcaacacttagccctctcccaagatgtaaacccaaagctcaatatagtctctgcctggacccaacacctcacaaatcccacacatctcaaatcccagcagagaaatcaagctcagatctcacaccccaaccaaaccccaaaccccaaatagcagcacttagccctcccccaagatgtaaacccaaagctcaatatagtccctgcctggacagaacctcacaaatcccacacatctcaaatcccaacccagattccagtcggccttcaaacctcacagtgattcctcccaaattctgaaattcacaccccacaatttgatctctaaaagacttccctctggccatgaacaaattctgcaaattcagaaacctggcagagactcccttctcagacccaaacctcaaaatactgaagcctcaaattcccaaagtgttgcgtcttcattctagatattaagccctgaaccccaatagtgaaccctgaatattggacagcaaaccctgagtgagcctcagatatttaacttaaatcctgaacgtaatccccaagtactgaactaacactgatctgaatttgaagaacccctaatcccagcaaaaatcctctatatgctaaacatgaatcctaaaactaacctctgtatgttgaaccccaaatcaaaagacaggttcccttggcatctcaaacactgaacctattgacccccctccagtcctaatacggacgactgggtctaaatctctggattcggaggattgattgattgctgaccctctgaaccccacaactgactctgtccaataaaccctggcctctcattgccagggattgtgggaccaacacaggggcgggcgcaccgagggccagccaggacctcggagcccgctctccgtctagagggtgtcccctgccccttacccctgccgccacccctccaccagctccctttaccactagctcccttcactccagctctgccgcccgctactgcaagctccttccgcgcacgtgtcttctcgcaagtcgcgagaactcattcgcagggtctgccgggaattgtagtctgaccctttacccgctttctaactttatgggagaggaaagaggtgctgaagtccaggggtgtgaccaagggatcgcggggcggggttaaatgcgaagaagggtggggcctgagaagcccagcctggaacttaagactgggacccgagctgttggggaatcggcctcggggcagcagccgaagtgaggaactgggtcccacaggaaaacgggactaaggacagcaggggtgtgtggccagccctggaaggggcggggccaggggcaaacagccacaaggggctggggctggaggcgctcaaaagcggagaaggcggagtcccaggcccagccggcggtaccgctgggaagtgagggcgccttggacggcgagggcaactcttatcagtttgactgtctgaaatgcagcacggcgctaggcgctctccagacctccctgtgactccaacaggctgtgaccttggcgtgggggtctggaatacgtgtgggcgctggtgcgggggagagggaatggcgacgcggaagagcaggacagacgcggagggtcagagagcagctttattaagcaagctggtggagggctgtgggtcccaccacccccgggctcggcgccagggcggaaggtccgggggtgccgttcaggccacgtcgacgcgagcgaagctctggtccatgcccaggctgttctccacgtacacctcgtacttgccgctgtcctgaggcgtggcccggcgaatggtcagcgtcgtggtggtgctgccgatctcgaagaacaccctgcggaagggcggcggggaggagggcggagccgtggtcagtacacgggcgcactgggcggggctccttagccagctctgttcctcgctgcccagtccccgcccccgtcactccagccagatttctgggctcagtcccacccaggttccagccccaggccctggccgtgccgcaggtcccggccctcgcctgtcatcctcctcgatgtcctccccgtccttggtccagcctacgtcgggcgcaggctctcccaggatctccgcagtcagcgtcacggtggtgcctttgcgcgccttagtgttgtcgggtcccttttgaatcttcgtcgggactagcggaaggaaaggggagcgaaaccccgtgaaggacccggagatgaggcagggcatcacctcaccggctaatacccggcactaaatacagatgcatttaaactcgcagtgtgacgttgagcaaatcattagcctctctggtttcatctccttggctgttaaagggacttatccctgcctctcctacttctcggggtcgaatagaggatcaagagagataaggcgggcgaaagcccctgaatgttcacacatctcgcggtgcctcagagaccgctccgggtagtggaaattgccagagttgggagccagaagacccgggtccaaccctggctctgcctctggcttgctgtgtgaccttggggacccggagccgcgtgatggaagtccacagctgactgctcagcccgggtggagctggatcccgaggtagggaaggacgcacttggctggcgcggcgatgcgccccaggccgtgcccagagctgggctggcggggaccctgtagctaggcccagaggtaaacacgcgcagctggaccgggctgcgggctctggctgagtggtgctggtctgcgccctggcgctgcgcccggggcgcgcgtaccttccacgaggatgcgcgccgagtcggagcactggccgaaggggttggtgacgttgatgctgtactggcccaggtctgccagctcgccgtcgcgcaccaccagtgccaccacgtcagggtcctcgaagacgtagcggtacttgggaccgtcacgtagctccttgccgtccttactccagcggatgaatgggtccgggaaagccgaaatgcggcaagtgagcttggccgcgctgccttcgatcagcaccacgt

SEQ ID NO: 3053 - DNA, 4001 bp, Homo sapiens
actcactctaagaaagactttgcctaccaagctgcattaatccatttccaccccgccccctcccccccggccatttttattatctgtcagcctaagcttgagatcagcatgaggtaagggtaccatttatcaagggtctgcgttgtactaggcattttacaaatatcatttctaagcttcaccacccaacaaggtaggtctaatcacccccattttacacataaggaaactgagtgtcagagagggtgtgttatttgttgcagacctcacagcaggcagagactgaattcaaaccaaaaccttgcctggctcaatacgaaaagcaataaagaaatgagcaacaatgtgatcaaggatatgaatttgtgcttggttatcattaagagtctccatgctacggctttacattgtctccaagatccttgcctgatctcacattccacactttaaaaataggagtgaaatctgagcaggaagaggccagatgagaaactagattaggggaagacagcagggcagctgcacagcataacttgagggggcgccattcacattgtcatctgtgaatgatggtccttggagttatgcctggtgggaagagttcatggttgggaaagggggaaacagcatgaagataagcaggaagtgaggtgagagaggggagcccctgaggttacctgggcacaggcttcaatatggtgttggatcatagggacccctgccacaggaaacaatggtttgggcacctcaaaagacaaaggtctgaagcgagttcctgggagaggagagaggagaacatttcggcctcctgccttcctctgcccccatcccgcctaccactccagcccaacctcctccccccattcccctggcacctcacccttttgagggcctccaatcaggatcaccgctttgagcataatggtgactgctacctaaacttcaaattccaacagagaaatcaagctcagatctcctaccccaaccaagccccaaaacccaaatagcaacacttagccctctcccaagatgtaaacccaaagctcaatatagtctctgcctggacccaacacctcacaaatcccacacatctcaaatcccagcagagaaatcaagctcagatctcacaccccaaccaaaccccaaaccccaaatagcagcacttagccctcccccaagatgtaaacccaaagctcaatatagtccctgcctggacagaacctcacaaatcccacacatctcaaatcccaacccagattccagtcggccttcaaacctcacagtgattcctcccaaattctgaaattcacaccccacaatttgatctctaaaagacttccctctggccatgaacaaattctgcaaattcagaaacctggcagagactcccttctcagacccaaacctcaaaatactgaagcctcaaattcccaaagtgttgcgtcttcattctagatattaagccctgaaccccaatagtgaaccctgaatattggacagcaaaccctgagtgagcctcagatatttaacttaaatcctgaacgtaatccccaagtactgaactaacactgatctgaatttgaagaacccctaatcccagcaaaaatcctctatatgctaaacatgaatcctaaaactaacctctgtatgttgaaccccaaatcaaaagacaggttcccttggcatctcaaacactgaacctattgacccccctccagtcctaatacggacgactgggtctaaatctctggattcggaggattgattgattgctgaccctctgaaccccacaactgactctgtccaataaaccctggcctctcattgccagggattgtgggaccaacacaggggcgggcgcaccgagggccagccaggacctcggagcccgctctccgtctagagggtgtcccctgccccttacccctgccgccacccctccaccagctccctttaccactagctcccttcactccagctctgccgcccgctactgcaagctccttccgcgcacgtgtcttctcgcaagtcgcgagaactcattcgcagggtctgccgggaattgtagtctgaccctttacccgctttctaactttatgggagaggaaagaggtgctgaagtccaggggtgtgaccaagggatcgcggggcggggttaaatgcgaagaagggtggggcctgagaagcccagcctggaacttaagactgggacccgagctgttggggaatcggcctcggggcagcagccgaagtgaggaactgggtcccacaggaaaacgggactaaggacagcaggggtgtgtggccagccctggaaggggcggggccaggggcaaacagccacaaggggctggggctggaggcgctcaaaagcggagaaggcggagtcccaggcccagccggcggtaccgctgggaagtgagggcgccttggacggcgagggcaactcttatcagtttgactgtctgaaatgcagcacggcgctaggcgctctccagacctccctgtgactccaacaggctgtgaccttggcgtgggggtctggaatacgtgtgggcgctggtgcgggggagagggaatggcgacgcggaagagcaggacagacgcggagggtcagagagcagctttattaagcaagctggtggagggctgtgggtcccaccacccccgggctcggcgccagggcggaaggtccgggggtgccgttcaggccacgtcgacgcgagcgaagctctggtccatgcccaggctgttctccacgtacacctcgtacttgccgctgtcctgaggcgtggcccggcgaatggtcagcgtcgtggtggtgctgccgatctcgaagaacaccctgcggaagggcggcggggaggagggcggagccgtggtcagtacacgggcgcactgggcggggctccttagccagctctgttcctcgctgcccagtccccgcccccgtcactccagccagatttctgggctcagtcccacccaggttccagccccaggccctggccgtgccgcaggtcccggccctcgcctgtcatcctcctcgatgtcctccccgtccttggtccagcctacgtcgggcgcaggctctcccaggatctccgcagtcagcgtcacggtggtgcctttgcgcgccttagtgttgtcgggtcccttttgaatcttcgtcgggactagcggaaggaaaggggagcgaaaccccgtgaaggacccggagatgaggcagggcatcacctcaccggctaatacccggcactaaatacagatgcatttaaactcgcagtgtgacgttgagcaaatcattagcctctctggtttcatctccttggctgttaaagggacttatccctgcctctcctacttctcggggtcgaatagaggatcaagagagataaggcgggcgaaagcccctgaatgttcacacatctcgcggtgcctcagagaccgctccgggtagtggaaattgccagagttgggagccagaagacccgggtccaaccctggctctgcctctggcttgctgtgtgaccttggggacccggagccgcgtgatggaagtccacagctgactgctcagcccgggtggagctggatcccgaggtagggaaggacgcacttggctggcgcggcgatgcgccccaggccgtgcccagagctgggctggcggggaccctgtagctaggcccagaggtaaacacgcgcagctggaccgggctgcgggctctggctgagtggtgctggtctgcgccctggcgctgcgcccggggcgcgcgtaccttccacgaggatgcgcgccgagtcggagcactggccgaaggggttggtgacgttgatgctgtactggcccaggtctgccagctcgccgtcgcgcaccaccagtgccaccacgtcagggtcctcgaagacgtagcggtacttgggaccgtcacgtagctccttgccgtccttactccagcggatgaatgggtccgggaaagccgaaatgcggcaagtgagct

SEQ ID NO: 3054 - DNA, 4001 bp, Homo sapiens
gatgaaaaccatgtatactctgccgtctgacttacacagttccagagagtcacaatttcacaagttctctgaaattcatccacagacacacggggactcacagattcccttctaggaagccctcccccaggatcactgtgcaaggtgcccccgggctccccgatccccgacctggtcacaggctggcccctccattgagcagcagacaggaggctctgtagccccttggcctcacctgggtgggcttatccaccatcttcttcagtttttggactatcgtcagacaggtcctgtagtcacggcccagctcctgtgttttggtcaacaggtcaccctgtcaggaaagaaagcccttatgatggtctctcagacactctgggagcgcgtgaaagtgcccaggaaaggggccctttgtgtttctgaggccggcaggaatgtccgtgatctcttcccagagcgtggatacactgaaggcctgaactggctgcctggcccctgcccacccttttgcttgtcttagaggctctgagacaccccagaaacagcctcccacacccccagtactttcccagccctgcacttgcccctctcctattgaggaactcccaggggagtctgcctatttgggttctgcagccccaggctccttggagggtgagaccccagaggatcctcctggaggagtctgccagatacctgtagccctcctggccagacatgaattcaacaaaaccagcatcgtcagaaacagcccagcctccactcccacctcctgaccattagagagctccagacctcaccccaggagccaccagggaggagggaaaggagagggactgtggcaggtgagcagagagccaacacgtacctgggggccctcctgggccaggcacgggcaggatttctcctcatcacgcaggtgggctcttgccaggtcgtagtactcagggctcagacgagagaagaccagacctgaggaagaccagacttcagcttcccctccgcaggcggaaggagagggaaagcccgttctcctggctggtgggagtccaggaggtgaccagggcctaggacaggagctgggccttgcagggggccaggatacctgtccacatgctttgccctggagccgctctgacccactctcagcacaaacacgtgttctcacgttccttctagaaagccaggagggcgagactctctcttctcctctgttcccccagcaacacagatttgggggtcggtttgtctagaaacttccctcaatctcctttcaagggattttctttttttaccttccatccagatggcccagccaaatccactctcccttccagaagtgttcttgcccttggggctcacactgacctcaaggcctgggagagagcagggtgcagggggcaggaagtctgccttgaacacagaagagatcttgttctctcaccagccccgcacaatcctagacagtgtaggcccgaggaaacgcagatccaccgatgagggccaatggccttcaccacgcagatgcggaggcaggggcttgggagggaaaggggggtctcaggccacacagtgtggccagtagagttaggaccagaatccctggcctgtctctcctccttggccaggccagtgacaggctgggcagcacactggactaagcctggctctgaggggaggccaggcctccatgacgggggagaaggccggggggaggcaggggcacctgggtgcccacagagtccaagctccaggttcagccagcctgagagtgcgaggctgggtgggccatcaggatcgatcccgaggggaaggccttacctgggttgcccaggagcatggctgcaaggagcaggagggcccaggtagccatggtggggcagccgctgagatgcctttcacaccctgttttatgggcagggagcctgcagcttaatctttctcaggtcctgccctttttgtatgtcatctcccccgtgtcactgggtttaccacagatacaaataccagtgtgtgaagaagcagctcagggcagtggtagcccacagggtccatgccacaccccactcccacacaactagaatgtggggttgctggaggccagcagctgccaggatgcctgggatgtgccgatggagggagaaaccccttagtacaagtacgttccagatattgcatgggacatacttatactaaaagtataagtgagtcatctcacttgacccaaaaactatttttaaacagctttttaatttaacaatataccacgaacatctttccacatttgtaaatgtagatcttcttcatcatttcccctggttgcctaatggttccctttacacatgaaccatagctggggtcctgtaactctgggactcgtgtcccctgtggtacttcggcttgaagagcagaggctgggaagcctctccaagggctcacccagtagtcaagttgagtgatgtgagggccttcttcagacagggtgcctcagcatctcaaaaaggcagctgtagctcctccaggctacaaggcctgttcacgtggaaaatggaaagagtgaagctgaaagaggtggtacctgtataggaaaaacatctttcccagggaccctcagcctccatctcattgatctgaactgtgtcacatgatgaccctggctgcaaagggcaataggaagggagtcttttgctggaccttcactgacactttgctttttgttgttgttgtttgtttttgttttgtttttcttttttgagacagagtttcactcttgtcacccaagctgaagtgcagtggtgtgatcttggctgattgcaacctccacctccgggttcaagtgattctcctgtctcagcctcctgagtagctgggattacaggtgcacgccaccatgccctgctaatttgtgtgtttttagtagagacagggtttcaccatgttggccaggctggtcttgaactcctgacctcaggtgatccgcctgcctcggcctcccaaagtgttaggattacaggcatcagccaccgcacctggccttcattgacacttcgaacaaaattgatatcctgctagggaggatgagggaatgggaatcgtataggcaatggcagtgtcagctaccgcaggactttttttttttttttctgatacaagttcttgctctgtacctcaggctagagtgcagtggtgcaatcacagatcactgcagcctcaaccgcccaggctccaacaatccccccacctcagcctcccaagtagatgagaccacaggtgcttgccactaccacccctgctgattttaaaatttttggtagagatgggtctccatatgttgtccaggctggtctcgaactcctggactcaagcgatcctcccagcctccaaagtgctgggattataggcatgagcaaccacgcacggctttgcaggactttttgataaggaaacatatttcaggaagaattggtaggactttgtacctatatgattacaagaaagaaagaagagagaggaggcaaaggttttactagtatttggggcccaggaggctgagggactggctgtgaaaattaggaaaaggagctttctggtgagaagttgagtttgaggtattgcatttgtggctgtcttgtttccccagctgtaaatcaactgcttgagagcagggctgcctctgcctgtcagggtctccccaccatgcctagaacagctctcagaccaaccggcaaactcgttttacctcagatgaggaaaccaggactcagaaagatccagtgaattacccaccaacacacagctaggaagggaatggtctgtggatttgaacccagaccctacgactccaaagcccaagttttcccccagccctaccctaactcagtgtccaggttttcagtgcagggccacttaaccctcttgaggccagctcaggcactactcccccatctgagcagaccccctctctcctgaccacttgtagaccttggtctcatgtgtgaaga

SEQ ID NO: 3055 - DNA, 4001 bp, Homo sapiens
aaacgttcttgcctgtgaggagctaatattgagtgacactctattacacccctaaatggcgctacacgctgcggccactctgttgactgttcatgttaacactcacacaggtgtcacagcaaacaaccatcaatgctacttctaaagtcgcccggttccatgaggaaaagaccacatgctttgtaccacccaggcccaggccgttcataggtaggggcttagctgacgccttttgagatactatgtttctctgcgtcctggaagttaagctagggttgttttcctttatatactccgatttttaaaaaaaatttctctgcactacctctttaccactgtggatctaaaccttataatctaaaccacaccctcagcaatcggaacagaacggaagttcccactccaggaaatcttgagaaggtttgggagggtcaggagtggcacgggaaaggaaaagtctggtcaaaatcaagtctgtttaagtccgtcgaacctacttccaggccatttggttttccgtctcctgccctgctggtctttcaggccactcggccggcgccgaggtgatttaacacctgccgccgcaggccccgcctccggactgcgggtccggatccctctcctaggaaagcgcaaaggctgccttcacagtcaccactttggagacgttgcctccgcgcccttcctaactttggaagctaaaaatgagggggggtggaggagagagaaggccgtgcggaaaaagagcaaggttgtccccccttcccagggccgccccctggccgagtcgccggcagccgcctccagctccagcccgtcctcctacagccgcggaccccgtgcccagggcgctccgcggaggtgggatgcgagcggcctccggaaccagcctcgaccaaggcagcgcccgcgaccgccgctccttcgcgggatcgggcctggctgccccgtgaaggagcccatgggggcctccgcctccccgcggccggccccgcctccagcccgcagctccccggccgccgtcggagcccttacccgcagaacgtggtagccctcggtgcccccgcccgggatctcgacgctttgcgaggagcccatggcggcgggcgatcggtgtggccgagccgggctccgcgctgctcccgcccccagcgcaccgcctgctctaatcctccgcgtagcacttgggacgtggcactcgctgccgccggagagccgggccgcacagcccgccgggagatcgtctctgctgcagcccgggccgctgcgacgccgcagacagcgccacctgccgcgagccactggaaggggcccgagcgctcgcgggccgggagggcggagagggagggccggaggaggactgggaggcaccgcgtcgtgctcgcgagagaacagaaatgcgcttcccccagctttggcgccttgctacggggccctggattggactagatttatgcagacgcgttcccgctcgcctgaaagaacacatacttggttgcaggtccccctggtggccagaggcggggaaagggctgctgatgaacaggagcgaactcaacacacaccaagctctctgttctccgggtgtgtaggtattttcccaaactgtacagctgaggggaatagtggcctcctgtgggctgcctagcatctgctcagctaaattttataaaaggaaacgctccctttataaaacagtagtctcacagagtcacctaccaacttcttttttggtttgggtttgtttttttttcttcctccctaattgtgagaataagattagaggattggtcataatcagagcgatgccagcgtgggaagcacggttggatttccctggcattccaccacctgctgctgctcggttccccgtcctacctccttcaggtagccaggtcgtattcatgcttattccgttgtcgtattccgttgctgcttttgccccttacgtgtactccctctgaaacccctagttgctttgtggtcagttggactgatgttgcgtcaaccaggtattatgtggattcctatgtgatgcaatgtaaagtacgtgctatcgcccatgaagtattctagcccaaggtggttaacttgcctctatggcatcttgagtttgatgtttacaggaagtaaggggaattgaggagcaagtaaaatgacaccacagggaaccaggcaaatacaggaagtgggccttccttcaggacagctggccagttctctttgtcgagtcagagtcctatgaaagggcctatgccagattaaaaggaacccgaagaatataaccaagagacacattgcaagggcttgagttgggggccaacttggagaaataagcgtaaaggacatttttggttcatttggagaaatttgaatatgtactgagtattagaagagtagttattcacatggaaacgtggaaattattgtcttttttaaaagctggttacaagacgggatgtgtctgtagacaaaatgaaaaacatgtcctcaaaatacagattaatatgtatgtatgcatatgaagatgtgggaggagaatatgaaccaagggttacagtggtgatctctgggtggtgacagagatattttattttttgttttggctggttccatattctatgatgctcatgaagtgcttttgtaataagaaaatattatttaaaatttaaaaataattttctttgctatcggtaagtgaatagcagatttttaggaggcctaataaatccataaatccataaatgaaatctccagttattaggctcctcaaggacagggtctgcagtggagttggctctatgttcttgatatttaccagaatgcctagcagctaattcaacaaattaatacatttaatgcaagagaataaatggaagaactagatctaattataatgttctcattctgcttggcaattataaccctctttatgatggaagctgctgccatgttcagtggtcaaaatttttggaccagttgtctcccatatgtctgatggcagccgcggcctatagaacccaggctgtggatcgttggtggtccatgggcaagtccagcccttccttagagctgtagtgtatgtttcagcctcatgagtggctgcttgttattctccacacaagccatttactttcttaccttcttgattttattcatgctattctctacttctggaatgcccttccttacattttccacttaaaaaatcctaactttgaaaaaatcctaatcctttaagtcccatctcaaatgttacttatttatccttaaggtcagtgtgactctctccttgccatgaaacagttccttcatttctatgacatcatcgtcatcatcacaggcctgtcttccaccattcgtggtccattcattcagagcaaggatcatattttttttttccttccttccttccttccttcctttctctctcttttcttctttctttctttctctctttctttctctctctctctctctctttctttctttctttctttcttttctttctctctttctctttccctcattccctcgctccctcccttccttccttcttttttttcctttctttcttgtgaaatgggtctcactctgtctcccaggctgcagtgcaggggtgtgatcacagctcactgcagcctccacctcctgggctcaaaatcatccctacctcagcctcccgagtagctaagactacaggcacgcactaccacacccagctaatttttttgattttttgcagagacgacgtctcattatgctgccaggcttgtttcgaactcctgggctcacatgattctcccacctcagtctcccaaagtgctgggattataggtgtgagccaccacacccagccgatcatgttttttcatcttgagatccccagttcctggttgagtattgggaacatggtagtagtgtttattgatttgaattgaatgtgtgtaatgaatagcttcaaagcctttttttcagaatcagttagtaagtgacctctg

SEQ ID NO: 3056 - DNA, 4001 bp, Homo sapiens
aatttaagaatgtgtctcacctaaaacatgggacccagggcaggaaatgaaggtagcaccaggaagtgcactctcttactttcagtgaaaacgttcttgcctgtgaggagctaatattgagtgacactctattacacccctaaatggcgctacacgctgcggccactctgttgactgttcatgttaacactcacacaggtgtcacagcaaacaaccatcaatgctacttctaaagtcgcccggttccatgaggaaaagaccacatgctttgtaccacccaggcccaggccgttcataggtaggggcttagctgacgccttttgagatactatgtttctctgcgtcctggaagttaagctagggttgttttcctttatatactccgatttttaaaaaaaatttctctgcactacctctttaccactgtggatctaaaccttataatctaaaccacaccctcagcaatcggaacagaacggaagttcccactccaggaaatcttgagaaggtttgggagggtcaggagtggcacgggaaaggaaaagtctggtcaaaatcaagtctgtttaagtccgtcgaacctacttccaggccatttggttttccgtctcctgccctgctggtctttcaggccactcggccggcgccgaggtgatttaacacctgccgccgcaggccccgcctccggactgcgggtccggatccctctcctaggaaagcgcaaaggctgccttcacagtcaccactttggagacgttgcctccgcgcccttcctaactttggaagctaaaaatgagggggggtggaggagagagaaggccgtgcggaaaaagagcaaggttgtccccccttcccagggccgccccctggccgagtcgccggcagccgcctccagctccagcccgtcctcctacagccgcggaccccgtgcccagggcgctccgcggaggtgggatgcgagcggcctccggaaccagcctcgaccaaggcagcgcccgcgaccgccgctccttcgcgggatcgggcctggctgccccgtgaaggagcccatgggggcctccgcctccccgcggccggccccgcctccagcccgcagctccccggccgccgtcggagcccttacccgcagaacgtggtagccctcggtgcccccgcccgggatctcgacgctttgcgaggagcccatggcggcgggcgatcggtgtggccgagccgggctccgcgctgctcccgcccccagcgcaccgcctgctctaatcctccgcgtagcacttgggacgtggcactcgctgccgccggagagccgggccgcacagcccgccgggagatcgtctctgctgcagcccgggccgctgcgacgccgcagacagcgccacctgccgcgagccactggaaggggcccgagcgctcgcgggccgggagggcggagagggagggccggaggaggactgggaggcaccgcgtcgtgctcgcgagagaacagaaatgcgcttcccccagctttggcgccttgctacggggccctggattggactagatttatgcagacgcgttcccgctcgcctgaaagaacacatacttggttgcaggtccccctggtggccagaggcggggaaagggctgctgatgaacaggagcgaactcaacacacaccaagctctctgttctccgggtgtgtaggtattttcccaaactgtacagctgaggggaatagtggcctcctgtgggctgcctagcatctgctcagctaaattttataaaaggaaacgctccctttataaaacagtagtctcacagagtcacctaccaacttcttttttggtttgggtttgtttttttttcttcctccctaattgtgagaataagattagaggattggtcataatcagagcgatgccagcgtgggaagcacggttggatttccctggcattccaccacctgctgctgctcggttccccgtcctacctccttcaggtagccaggtcgtattcatgcttattccgttgtcgtattccgttgctgcttttgccccttacgtgtactccctctgaaacccctagttgctttgtggtcagttggactgatgttgcgtcaaccaggtattatgtggattcctatgtgatgcaatgtaaagtacgtgctatcgcccatgaagtattctagcccaaggtggttaacttgcctctatggcatcttgagtttgatgtttacaggaagtaaggggaattgaggagcaagtaaaatgacaccacagggaaccaggcaaatacaggaagtgggccttccttcaggacagctggccagttctctttgtcgagtcagagtcctatgaaagggcctatgccagattaaaaggaacccgaagaatataaccaagagacacattgcaagggcttgagttgggggccaacttggagaaataagcgtaaaggacatttttggttcatttggagaaatttgaatatgtactgagtattagaagagtagttattcacatggaaacgtggaaattattgtcttttttaaaagctggttacaagacgggatgtgtctgtagacaaaatgaaaaacatgtcctcaaaatacagattaatatgtatgtatgcatatgaagatgtgggaggagaatatgaaccaagggttacagtggtgatctctgggtggtgacagagatattttattttttgttttggctggttccatattctatgatgctcatgaagtgcttttgtaataagaaaatattatttaaaatttaaaaataattttctttgctatcggtaagtgaatagcagatttttaggaggcctaataaatccataaatccataaatgaaatctccagttattaggctcctcaaggacagggtctgcagtggagttggctctatgttcttgatatttaccagaatgcctagcagctaattcaacaaattaatacatttaatgcaagagaataaatggaagaactagatctaattataatgttctcattctgcttggcaattataaccctctttatgatggaagctgctgccatgttcagtggtcaaaatttttggaccagttgtctcccatatgtctgatggcagccgcggcctatagaacccaggctgtggatcgttggtggtccatgggcaagtccagcccttccttagagctgtagtgtatgtttcagcctcatgagtggctgcttgttattctccacacaagccatttactttcttaccttcttgattttattcatgctattctctacttctggaatgcccttccttacattttccacttaaaaaatcctaactttgaaaaaatcctaatcctttaagtcccatctcaaatgttacttatttatccttaaggtcagtgtgactctctccttgccatgaaacagttccttcatttctatgacatcatcgtcatcatcacaggcctgtcttccaccattcgtggtccattcattcagagcaaggatcatattttttttttccttccttccttccttccttcctttctctctcttttcttctttctttctttctctctttctttctctctctctctctctctttctttctttctttctttcttttctttctctctttctctttccctcattccctcgctccctcccttccttccttcttttttttcctttctttcttgtgaaatgggtctcactctgtctcccaggctgcagtgcaggggtgtgatcacagctcactgcagcctccacctcctgggctcaaaatcatccctacctcagcctcccgagtagctaagactacaggcacgcactaccacacccagctaatttttttgattttttgcagagacgacgtctcattatgctgccaggcttgtttcgaactcctgggctcacatgattctcccacctcagtctcccaaagtgctgggattataggtgtgagccaccacacccagccgatcatgttttttcatcttgagatccccagttcctggttgagtattgggaacat

SEQ ID NO: 3057 - DNA, 4001 bp, Homo sapiens
ggaatgagcatctagttggggacaaagacagacttttccacaatcactcccctctcacattaacgttctccacagaagacgccacttgtatctcctcagcccctccttcccaccacaatatttccctgaactaataaatacctatgttccttcaaacagcactgaacgactcctggctcaaaaatttgggcctaaaagcccctcttccctatttgtcagcacgaccctgatgagtgggctggtctaatcatgtttccccatccctaccacacttcgatcaggcccatctaggagcctctcccttcccagccacccacccaattctgcccagggttctaagtccacgatgcttctggaacaccctctaagccctccctctcctccttgggttccccagcccaagcctgcccggcaaagagccattcgaagccctcctccagggctatggtttcatctccctacgtggtcagagtgtcctgagggcagggactcatctctgtatgtccagcagtctgcccggtgtgcaagagggaaccaggaagagccagctgacccacaataacttcctcccaagaattctccaggcgcgttcctcctttccccagtcagctcggtttccagccaggaagccaagcagtaatgggatcaggatccctgcagtgcccagggtctcgggggccacgggaggctcatcccaaaggcactctgttatcttgaaaatgttgcatagccctgttcacagacacatggtacaggaaggctacaaacccacgcccgctttgcaaggagggtgtctgtcccctagctgcagaccacccccaacccccaaatctaaccccattaggtctgtgctagctctacggaagcagagtcaaagccatggcaaggggttattcccatctgccagttaacaacacagctcaggactcctacagcagaggatgcaaactggcaccccgagggcaaattcaactcatagacacatatatatacacacacatatatacatatataatacatatatacatatatatacacacacatatatacatatataatacatatatacatatatacacacacatatatacatataatacatatatacatatatatacacacacacacacttctttgactacacaacgtgctaaaaccttatgatgtaaaaccaacgttgaacagcagagggcttgttacatatacattttttgaaaatcaaggtttccagtcgcggctgtaatggaaaaagctgagctctggcatctctgagcacacaccccacagggctcagctggccgccactgtccctttagcccgacagcaggagccctcccgtttgcctccaccttgattatcactgacgcctgagcctgtgcacatctgagcgttcagcccttgatcaagggtaaaactctaaacctgcccccacgtttggaatgcttgtgccctacagagagccgcaagagaacttcaccttcccggctctgctcaaacatggcctcggcgccccacagcccccgcccagggcccctcaggcctcagcttcctcgtcagacccgtgacaggcgctccccgagctaccccaagatgtgcgaagggcacctgcccgacatcaggtcctggatgccctctctggatgtaggggaacgggatgccgaggaagaggcaaagcggggctctccacaacaccacgccccacaaggactcattcccgccacaagacccgcatggccggcactccctccctttcgacttccgcccagtccccaacaggccgctcagaccaggctcttgaagcaggaaagcccctggatgatcccggtccccttctgacctggcctcgccggggagcgaccaccgcgcctctcacctcacaccagcttccaactcccgccaaagcagcagctccgcaaagccgccacaaggcgtggactgctcaagggaaggagcggattgcccacctccgcgcgtccggctaaaaggcagccccgagagccaattgggatgcgcgctggtccagaagccccgccctgcgtcccgtactctgcgacactcaacgtggccacgggacccgtgctctggggatggcctgctccgttttccagtcggccctggcccgcggtgggaggggagtactgcaggcggccgcgaggccccgggtgcttgagcttcgagcagggactcaggccagattctgattaaagaagttatcccagggcttacgctcctccaagctggggttcggctctagcaaaattctgagctggggacgattagaaaggagagaagatcatcaagagacagttgcagtcatgaaaaacaagtcaggcctcccagtgtcatttcctttgttaatgtgaagcctagaccaccgtcagggacctccagcagccgcgcggtgctaaggtttcagctgggcctgtggccggtgtgttcattcgtgtggttatttgattaagacctgactcctgtctcggccctaagctccgcgtaaacaaagaccttatgggttcattcatgttgtaactgtgttcccagcacccagcaggagaccagccagtgggaggcaagcagtatagaacagatgaacgtgcgaatgactgggctctctgttcctgcccccatggaatgagcccgcctgacatgccagaggattccacagttccagagcatgtgacacacgtgtgccggagcaaagccacacatgagcctggcggggcccaagacagcacagaacgtgttcacatcctccctcgtctctgactcaccagccctgatgtgactcccacaccctgcccctccgggatgtagcctttctctccctttgtgccatttcgtgtctatccaggctgtgtgtgcatccactcaccttcattgggatttgcaacgtcctcccggtacctgcagaatccattttgtaccccatcttaccgttcttttgtatcagggtgcctgtccacatcgagatcctgagactctgacgctgaaaaacgaaaaatatagactttcacttcgaagttgtaagttgcctcctaagagtgcagacttgaatttaccgaaggctgacgcctcttagttctgggaacaccatctgtacaggcagccgagttttgccgttgtgaacacgtccccacctcttaaggagttctcatgctgagaagtagccccaaagcagagactttagactagaaggttgcatggattgactgtagagacgaggcgcagcatctcagagttcagctgtcagatgtgctgcttctttggaagaaacgtattttgttatggtggtggtggttgtttgctgcaatttggacatttgaaaagaagcatccctctcagacccagattgggtctgggaccgaggactcagtgtgctctttctccctcaagcagtttgcaggagaggcagagctgcagtgcagcaagacctgtaggccagctgccatacacactgattgtgactgacccgaccctgagagaaacataaactgatttgagctgggccctgcccaacctggactggacttggtgagccccatcctggactcatgccagaatgcattacccagaatatcctgatgcacctaactgactgcctgcgcccagagggacaaaggccctccctgtggctgggggcaggtgttccctgaaggcactgacaggcctttctcctgtatatcacctggagaaaaggacttgagctggcattagaatgggcagaggggctcttgccagtctgtctggggaccaccagcggggcagagaaaaggagatgtgatgtttaattttaggtgtcagcttgactgggatacccagatacccagagagctggcaaggcattatttctgggtatatctgtgagggtgtttctggaagagactggcatttgaatcactggacagagtaaggaatattcaccttcacccaatgggggcagacaccatccaatcggttgagggccttgatagaaaaaaggcagaggaaaagagaatttgcat

SEQ ID NO: 3058 - DNA, 4001 bp, Homo sapiens
acaaagacaagtcccctatatcctccctacctaccactgcatcccaaacacaaatgcttaataattgtttagcaacaatgaggataaaaagggtctttaatatttgtaattttataactttttcctatgtcaacaagtcatttttaaacactttttaaatacgtacagaaaacacataaaacaaatgtacagcttaatacatttctgtgagtcaaacattcttgtaaccatgtggtaccctccaaaatgactcccagtcattcttgctgtgtggttttctacatccttagtgtagtctccttccacagtgaacaggattaacctgtgtaaccaacaggattttgtggagatgatggagttgattttttggtcataactgcagctcttaggtcattctaactttgaagttagatgactcacttgaaggaagtcagtggtcacataataaggatactcaagaagctctatggagaaggtcacacgattggaactgagtcctcctattaaaagccagcacaaactcatgagccacaggagtgagctaccttggaaatggattctcttgctccagtcaggccttcaaatgactcagcctgggctggcatcttcactgcaacttcttaagaaagtccatgctaaactaagctaagctgctaacaaattcctgacccatagaaactgtgagataacaaatgattacagttatcttaagctgctacatttggggataatttgttatgtagcaaaagttatcaggaagtagaaccttatcaggcacctgggagccctctttgtcccctatccagttgcaactctcttttggttctaagaatagtcactattctgttttttatggcaatcatttccttcattttctcgatagttttgtcatccacgtgtgcatctttaaacattacagtttagtttacctatttttattataagttaaaaacgtgcactattatatacagcatttatggtaattcacccgcttcctctaaacctcagattcttcattggtaataacagcatttttacacataatggtttaacacttacccagtatatcacacatttttatcacatttaaccaccactaacaactctacaaggtaggaagagtttttcctgttggagaaattaaggttcagtatggctaaatgactatttcaaaaccacaaagaatccgggtcatagtgccttgcaaataggattacattgtttttaagagacctacttaactttaaagtgccaggcacatctgaatggggttacaggttgcttttaaagctctctttctattggtaaaatatactttagcattatccatttccatcaaagataagcataaacttcacaaggcgataccctggcagagatgatggaggctcgtaccagagtgatagcaatgcaagtggtcgcatttggggtacacttgaaggtagagcttacaggatttgctgatgttgtaggtagtacgtaaagaacgatgtcaagataacgctaagtttttggcctgaatacatggaagaacggagttaacgttttttgagagtgggaagactgtaggagtaggtttgtttttgtttttttagggggcgtagtcgggaaacagacatattgagagtcccattacatatacaagtggagaaatggacctacagtataaatgtgacaagaaacgtcccactctcaatactacgctcaggaaccgctgatcccttccctcacgcgttcctcctggctgcaagcgtcccacagacgcaaccacccacggatggaaaagtggctgacggtgtgatacggtagtcatggccagcgcactctgccttttatcattctaccggttgtccccagacccttacctgacagctctcttacctgacagctctctgctcgccccggttcagcgccgtagagcgcgcgctgcgcatgcgcccaccgaccagcgtcggacttccggacctcggctcccaccagtttcctagtgcagactctattggaaattcgcggcgggtggggataggaggacgtggtgactgcgcttgcgcaagaccagccctccgcgcaagcgctcttcccttgtttcctgcaggtaggagtgcgggaggtggggcatccgggtctcttggtggctgcttctacccccggagctcagctgatcttcccttccagactacgaggtgaggtcgccgaagcatgcatgttgacacgcacggactcctgtccgacgtacattttcagacgggtggggaagacatttgagttcgtaatgaacattttcccttttctggctccgtgcttagttccgagctgccgcctcgtgctattgacagcctgcggaaccccacggaggcttgcggcggcctcttggtgtttccccgggtccgccgcttgcggttcttggagtagccaggtgaagccagaccccgagcgcgcgaggcttctcgggtgcattccggaccgcctggtgttgtcactgacgcttcggccgccgggcctggccgccccacccatccgcgtaggaagagtcttggagacctgcagttcgggatgtctgtgctgggtgttttgacctcagtccctctggccaggtgcagcgcgggagggtaaaggtgctatgtaccgaaccctggacgagaaaaagaggaggatggttgtcaagcccggctggggtgtttgatcttagtgcttcagttttttcatttatagaacgggtaaatgacatatgtgttgctggacatatttcttctggaataatgccttttttggcaataatttcttttaattttcttttcactccatgagtcactcttccttaccaagtagttttcttctgtttttgtttgtatttttgtcatttaaaagtatgttctcaggttttgcctcaaagaagttgagtttttccccaaatgaaatgagtagtcctacttttcttagtgagtatattccattaagcttgacttttaacattaaaaaatacttacaagtattttttactctgttaaatttaaggtgtgaatttcaaacttccgtaatggagttagcccacagtttattgctaaatgaagaagctttggctcaaatcaccgaagcaaaaagaccagttttcatctttgaatggttgcgatttcttgataaagtcttggttgctgccaacaaggtatggtattgctcttttttcccagttgcattaacgtgaagagattatgtggtcatgattcttaagaaaacacatgttatgttttggaaggtttatgggtcacttatggaacttgagagtattacacgaatgggaaatttagtggcaaaactcaaacctcgtttaaatccagctcattgcctatcttctttatgtttgtacctgggcagctcattgtaactggagaaaaacatggctatatgactggtgtcactttaaatttatcatcgtcacccgttgcaagtgatctctctatgctgcctaacaatcccagtgtcttcacttatctctttgaggagtcaataataggctcttttttttttttaatctgttttttcttcctgcatagccttgatttgccgagaccagctcgtttggggagaccctaacctagcggcgctagaggaattaaagacacacacagaaatatagaggtgtaaagtgggaaatcaggggtctcacaggcttcagagctgagaccccggaacagagatttactcaagtgtctattaacagcaagccagccattaacattgtttctacagatattcgattagctaaaagtatcccttatgggaaacgaaggggtatgctgaaacaaaggggtgggtctggctagttctgtgcagcaggaacatgcccttaaggcgcagatcgctcatggtattgtttgtggtttaagagcgcctttaagcggttttcaggccaggtgttccttgccctcattcgggtttcgttatggccatcatgaacatgtcacagtgctgcagagattttatttatggccagttttggagcc

SEQ ID NO: 3059 - DNA, 4001 bp, Homo sapiens
gaggaaggagaagttgggagccaagtagacgaggaggcaggaccagtaaccccggcgactctggttccacagccctggcaatgtgggcaatgccagacccgtgagcagcccagccagcagtaggctcaggaagaagcagccagcaggtgggctgcgcaggcggcggtcccaggcgatgcccagggctaggagcaggttcgcggtgatgatgaggcttgccagggccagggagagccccaaagcccccttgggaatggggctgggcacctcgccagtgctgttgggcgtcatcttggtcctggggacaggggagtcctggagcggcagccggcatgcctgcaggatggggtggccagagttaggatggggctgcaggtcgtgtcctcctggcagggcagcatgttaatccaggggcgcagacccgcaggctgtgggctgtatcatgttcgctgatacacagaatttttcaattaattgccaattaaacatttatataaaaaactatctttggtttctattgaaaattcaggtctggcaacacatatgtcctgtgtggtagcaaccagccggagctcactgctggctgcccttcggacagtccccacccagccagctttatccatttctggtatctgccttttctgggcagctgtgttgaggtctcttgtttagactgaaaggcgggcccatccagccccaaagcattttgtgtatccctgcctccaccggggaggcctctaaatgagagaatggaccagggctggctggtgtgtagtggtcttccagccagccattaggtgacaggctccagcgggccaggtctcgggcaccctgcacccttccccccatctgtccttgtagccatcacagctcagtgagcagcctccgggtaggacttccagcccataaacttgactcgtctttgctccacactagcaacagggtccttcctgggagctggagggaggagagaagcagctggagggcacgtgtggcagtgaacgtggagatgccagcagcaaggagagggactcccccacacccccaggcctgaggctgagcccagaggagagggaagaggagtctgggcagagtctggcttctctgtggctctcatctgtccctgtccttcccgtcattccctggtctcagtcctccagtgtcatggctctgctgccacatcctggggacagggggaggggtcctgggtcctgtgggaactcctgcttctgtcaacaggggagcagctgctgttgctaggatccaagtcaataaggaaaggattcatacctctcccctcctccaggacaggggatcagggccccatggctgccctgagctgagaggaaggaagatgctccccttccttcccaggttcccccagcaccctgagcctgggcctccaaggccttatgccccctttcccctcccctaagcatgttttctctttctcaatctcttccagtgccctccacccaggatgtcttttcctctctagaggccttgcagtttctgttccctttcccagggcatcatcaactctcttaagtcccgtgagactcagggtccattaccccaaacctggcctgagctggagctcccagccctaatcggaatgattccccccaacccacctccactagaacagcgacaaaggcagggagcagcccccaggggtgatttcccagcagggtgcaggctgtaccacctgcacacccccgagggtctggtggcttgggctgggtgtagtagcctctccaggatctggggtttgggggtttgggggagtagctactcacatggctgttgggagcaggtattgcctgcccagcctgggccttcctgagtgtcagggagttgctgcagccagccctgcagcggtttggaccatgtctggtgtcctggctgaagagcacaagtggaccaagtgcatggtgtctccacccagtggggacagcggggccaggctctcctacccaggctctgcccgtctgggttctcagagggatagagaaatgaggctggcaggactcagccctggccccgcctctgggagggtgggacctgacatattccaaactgcagcaactgggaggcctgcctccccctcccacccagttcccctctccccctgccacctaggtggcagtttccctactccagctcggagtaatctgagaaatgcattccagttaatgaataataatgattgacttacccctcccgacttcccgcctcagctgatgcatttacatttaagcccctggactggccagccagctgacagcacaccaggctccctccacacttccgtgtgtgatggtggcagtggcaggtgtttggggcctgaggatcttcactcccccatcccatcacctgatgggcctttcagtttctaaggccagacttgccttcctgaatctggggtcattccacacttttctcaactgctttctgagtcaagttctgaactatgagggacaaatggctctggggatgtgaccatgggtaaggtactactgggcctcggtttttgcctgtgttaaaatgggaacaagaaaaaccacctctaattaaggtcgtggtggggaatatcacaggataacacatatggcggcatataccccagtgcatggcccttgatgggtgggggtttgccccaacaaatggctccctctctttcctcccccatgatgaagaggcatgagctggcgctggaatcagagctgtctggatccttttttaaaaaagccagtgaacttgggcaaatgactaaagttcccttgccttagtttcctcatctgtcaaatggggcccatagttgtactcacctatcgtgagactaaatgaagtcccgtgtgatgaggactcagatcaacacttggcccttcagcactccgcgacaggcagcgatcgctgggaacattattaggatttctgcctttctctgcacctggcccctctaagacagatctgctgagaggggcgcatggggagcttgggaaaagcaagaggggagtgacactcttgctgcacagggaagctgaggaaaccagatacattgagagggaagggcaagttcaaggctgggaagccagaagtggtgctttgatttccaccttgtatcaagtgcggctttggagtgagggggaggagagaagcccagccacactcccttaaggcctgaaatgggagggaacaggcggaaattgcagcaggaaagctgggactgggggtgagacattaggaaacacttgctggctgaagagcgcaagtaaatggagcaaagggactctggtgctctccgggagagctgggcctgaagggctggaagcccgtggagtgtggctgtgccagctctgcacagccagtcagggatcctggagatcagggacttctgttgggacaaaaagtgggaagaggaaagcatccagcctcaagtccatcctcgagggagctggtgggtcggaaggacgcagggttccagggccggtcctcagaaccacgggatctggtcgggcagaagtcacaggctctgggagagttcagcctggggcctggacagaagtgggtgtgggacccttctgatatgtgacttccaggaataaacagacctcctgttcccagccccagcctgctccctgtgggatccaggatgtctgtttcttctctgctgctctgtctaaacactgtgtgtgggatgtgtgtgaagggggacagattaggtagtggcagccagggagcctgggctgtctcctgctcagcctcatttctcccttcctagatcatctagttcctgtctgttccatcaagccctggggctgactcaccccctagcttctcccttcagccacggagggctctggtgcaagccgtcttcagacgctccatccagctgactgtgcccggaccccattctcctttcctcaggcagagcctgaatgggggtgaccaattcagactctggcatggaatcctcctgtgcctcctttgtccgcttc

SEQ ID NO: 3060 - DNA, 4001 bp, Homo sapiens
gggagggattcaccaggaaggccagggatgcctctttatgtgtgagtagaggggcagagaacgaacccaactgtgccgagggccttgtgctgcctggcatccaggtgtgccccctacctgggacagacagagcccagtggggtgaggggggcagcctggaaatgacagggttgcctctgcagaggcacaggaaggcctgtcctggggactttggaggggtccttgcaagaacctcaggctggtggggagggcatcgggagatccgccaagggactgtctgcgggttctgttccttctgtggggggcggtcagggggcccttacaagaacctcaggctgggggcatcgggagatccaccaagggcaaggggctgtctgtgggttctgttcctcctggaggggcaggggtccagagcccgactgcctcctcccaccactccgccccccgcggcaaggcatggccacagacccccctcacccagatgcacggatccttcttgctcagaatccccaggaccatgggcatttctgcgctgagtccccatctgagtagccctccacccgcactcccactcccctggtttcagaggagccccccagagcaggaacctagtctgttttgttcttgcccactgggtccctggcacgcggtacagaccgaggttggttcccacacgtggaaaggtgaagcttgggttccaagagttccttagcacacggagcccaccgttccacccacccgtacacttctgtccccaaagctcctccgggaccacagggagggaagaggcagagccgcaggcggctgcagggcttagggggcgccaagagggccgctgttcttacaaagaaatgacacggcccctgggcgggatccaacgcgccgaccacctgcagctggactcgcggcacgaggctgcccaagcgccaggcgggggccggcgcgtacaagttcttcgacaggaatctctacgaggcggcggcgttccgcccgcggataagtgcccagctccctccccacccctccgcactaccccccgagggggtcagcttataaaacccacctaggctgcctttgctggagaccctacgagaatccccgggcaggaccggagacgcctcccagagaggtctgtacagagcagaaggggtccgcggccaccgtcagcggcgccccgaaagcccggccacgccgagccccacagcgccccgacagccggccccggggctgggactcccggcctgcaggcgcgctgggccgagcggcgggcagaagacgcccagctccagccgtggcccgggaggagcgccccgagcccgcagcccggcgagatcagctccgcagggaagaagccggcgtgcggggggcggggaggggcggaggacgaccgagcggggcggaggagaccctggcgagggagtgcggcgcggggcttggaggcgagggccgtggggttgcagaggagccgcagcgcagggagccattcggggcccgggcggcggggcgcaggcggcaggatcccgcgccgggggcgagtagccgcgtcgggaagaccagggtccggagcccaaagcccggccaggcccgggttcccggcgccgcgccctcactcacccgagatctccgcctggggcacgtcgctcaggctgaagcccttggctccgtagatctggcggacctcgccgcagctccggctcttgctggccgggtccccgcgggcgcaggcgaccagcgctgcggccgcacatagcagccaccagcctcgggcccggagctccatggcggggccggcggcgcccccggccacccgcccgcgcctctctcggatcctggccgggtcctgcgcagttcccgcccgcgaagggcagagccaaggtcccggcgcgcgcggctcgcggtccagaggcggcggcggccgaggaggcggagacaacaaaagccggcggcggcggcggcgcggggcgcgcggggtgcgaggtccgaacgctcgctcgggcagcccagagcgcggcgggctagcgcagtcccggctcggcgcctcccccgccgccggcccggcccctaggcggccgcgggagaggagaggggcggggcagggtgggagcgcaggggtgggggagggactgggagcaccgggcggggcggggcggggcgcggcgcgggggcgcgggccggggcgcactgggcgctcctctggctcttagggacccagagggcccgcctggccgcgcgactctatcgatccccggcgggaggcggcggagccgggcagcgcggggccgcggccggggtccccgagggcggccccccacgcccagcgcccagggcggtggcaccacctgtgggggcggggacgggggcggagggtgcgcgaggcagggcttcccccgccggacgtgacatcacgcctcccgcgccccaatcaggggcctccccgcccccagccgaaatcggcatcccgctccccgctccctcccgcgcgctccggcttcctgcaccctggcagcgcgccccgagaacgctctcccggcgcctccgtaccctccgcccgccggccgcgcctcgagccgccgcccctctccccgcctgcaccccgcagcggctccctccccgcgcccttccagccgtctcgcgctgggctccggctcgcaccgggggcttttgtggtgtgggggctgcacgcaggaaactcgccaagaaactcgacctcacctctcccagtcccagggagcggcaacagatggcttaattgttggaccttgacagctgttttgggggggtgaccctccacgttctttggatgctggagaaaccaaagtgatggggcagggccggtctactggtttgggctgctgggtggggccagatgacctctggagaagggatagggttggaacccggcgactagttaggccactgggggaggagggtggagtgagccggagcagatgcctctttgaagaaggcgggagggctgcctgcaccttgtatggtaggagggcgcgtggctttagctgcacatggggagttgggctggatggggtctgtagggagggggcgaggactgcgatgttggtgtctggagggcttcactccttccttggctcccagaccccccaccccggccccctgttctccacatggtaaggcctggcggtgaagccaggtgcctgagctgcagaattgggggcaggcatagaggtcagtatccttggcagagaacctcaagatgacccccatgtacagcaagggtgtcctgatttcagggcctgtggcatcacctggaagctgcagcggggtccgtggtgggggtggtggcaacattccctaccccttctgtgcctggggctctcagccgctgtgtggggctggagcaggaaggtggggtgccctccccctgggctcttggggtttcctgccctgcctcccagagaaggttgctccttcacccagagacactgagtcattgctggagagggaggctttggggacccaatccaagtgtgcatttccctgccctcccccacataccctctgctgcgtcacattttgtgactcacagacccctgttcagtacatgctccaggcttgctccttcttgcctgggcctggcgtggctgcctgcacaccttatccagcacggtcaggagcctgggcccacgatcccgctctctctctgtgtggtctcacgcactgcgggatcaggcagggctgcctgggcctaggaagctggacttgaggttaacccggcctgaggctctatagttaccccgtcactgtctacgcctcctcttaatctgaccaggttgggttattcctccaggcaagtccttcctccagcctagttctgggcctctggatggcagtgtggacagcagggcttagaacgcgatggtggcagcctctgcctggccctggtgacccctgggtggcttcatctcctaaggaagtccttaccaccatcgcaggtcctggaatcattcccattccgcaggccagga

SEQ ID NO: 3061 - DNA, 4001 bp, Homo sapiens
agtataagaaggaaaaatataggatggaagctagtcttttgaagtctactacttgccaggtacattgctagcaattttacacacgtcatagcatttattatccatattttgccaatgagacaattgaggctgagttttaaaagatgacctaaggccaaagtctttggctccccgctccacaactaccctcagctggagtttgttccacagttcagtcgctcattgagaaaacatttattgagggtgtattacaagctagtcacccctctaggcattggaggtcactcattgagaaaacatttattgagggtgtattacaagctagtcaccactccaggcattagagttttgaaagtatgcaagacagaacaagccctgctactctcatagaacttacacgctagagatgaaagaaaacaaccaaacaggataagttcagagttataatagtttgccaacatgagttatgcacaataatcatcaaatcttttaaaatatctacaatgagattaaatagttacaaaaaaaactaaagggggtggtaacactcactaacaattggtaacactgtggcccttttgtcaattcctgaaccaagccattgcatctttgaatgaatcacaagggagaaagaaggaagcagagctctaatgctgtttagaatttctttataaaataaagtgactctataagctatgagaatggacagttgcaatgaatccattgttggttctcaaacccaaaaccccatatttacccatttattcattaaaatattgctgtattatttcacgagttgatttgtaaaagtcaagggagtgttgtaatttgacataacgcccctgtgagaaacagaggggggtttcaacatccacatcacaaggttccccagactgcacacggtctccattgggcaatggcatccagatgtcatgtggtagccagcaagaactgtaggactgggactagagtggtcagtagctacgaagaagtgcctgggcccagtgtgacagctgccagcaccgtccacacgccaaaaagaaacttcacatctctttaaacttggaacacatgcaaaatactaacagttttgttttagcaataaagactccctgtcacttactaacttccttccctcacctatttatacaagtataagttgactagctgctatttctatagctgcctcctatgatatttataatgtgttgtgtgtgatttgggttgcccatgtcactaacactttgcaagaatttgtgtttgtaaattactctggaactcttctgggagtgaatattccactgcacaaggtggaagccagactagagaccatctgctaagagcagcacttcattcacccagctacaccttcctgccaaagcactctttgcaaatctatttttgctggtagaagttactacatagggagtggaggctgttttaagttatcagtgtgcaccttccatttcctcctaggacggtcacacgccagcagctgagtttctcaaagaagcctcagccctcctccagactcgttctcactcttgcttcggaagggagcaacaatccttatcagactagccgcatctacaagctaaaagtttgcatgaactttcaatggggtaccaaccctcgccccaaaagtcctgccactttactattttacaaatgccgcctccaaaacataaacaacgaaaccctagagaagagcgaatccatcttctgctggtgggaagaaattctaaatctttcccgtttcccgccaccacctaccgccaagactggagtcccagaacactcgcccgggtcagaaagggaccactccccccctagaatactagaggcgggggaaggggtctcccaggaagcacacacctgagatagatcctcacgcgcgaggggccagcgggcaggagcacccagttcctccagccagggtggagtcggcctccccccagaatcagagcctcggcccgggtgctcccagcgaggcgcgcggggctgtcactcgaggcgggctgggcgggtgtaactcgagcgccgggcgggccgcgcccccgccttccctcttcccgacttcctcctcccgctcccgcgcctgctccctcccggaggcctgaccagggcggcgaggccgccacctcctgcccggatacctcgggcccaggctcctccggcccagcggggaaacgcggaagtgggggcgggaaccggggccggggttggcgggggtgtgggagggaaaagccaacagcgggcggcgagcgaggtggtctccgtggcccaatgaacgtgactagacggggacgcgggtcctgccgccgggtggggtcgcgcagcgccacacgcaagggccctcgcccctggctgcagttcctgctttgtgcctcggcgatgccggactccagacctccgccccgccttgccagcgggctggcggactggaaagcctgagctaggccaggctggggaagacggtggcggtgtccgatttcctgtgccctcgcccatgcgggccgccctggccatctgcctgcgggagaggagacactcgtccgccggcacgctggcggggctggcttacctgacgacttctcgttgtccgccctgggatctggcttctcctactctgtacctcccggccggcaggcttccctaggcctacagacgtgtccaggaggcgggcgaccctgcgaccccgccgtcagagcccagaaccctcgcccggctcccccggcgggctctggaggcgcgccaggcctcctggctccccgcctgaatgtcagcgcagggacccgcagggaagaccaagcccaagctccagggggtggaatgctgagcacaggttccccagacccagcctcatacaggtggggggaggcggagagccccggcagctgaacagcaggcttcccacttgcaaccccccgccacccaaaaaaaaaaaacgaccctgcccactgagcatgcccagcttacttgttggaactcctagggctagacaagcccaaggggacctaaggaaggcaaagttggggctcaaatggaccccacttctttaacagctttgctccgaagacctctgggtgctgtactaataacctttctatcgtggtattggaaaatatccaggagatggacggaaatgcctttccaaaagaaggaagaaaattagtgtgaaccaaaaagcagtggtatttttttaaataaagtattaagtcactcatttaatgtccttaaataccgcagaattcctgtagttgacccagaggaatgcatatatttattaaatcccaaactcagtaacttcagggaaccatccatagtccacagaggagcaatgattctcacccttggacacattaaaattggggggagggggcagggaggggtggaatgccagatttccatccccaagtccaatgagtcagtctggacgtgggatctgcaagtccttgtattttaaaactggctctaaaagtgtagtcactggagcccgcagcatcagcatcacctgagaacttgacagaaactgtactccagtgacctgattcatagactctggggctggggctgagctacccagatttaacaagccctttgggtagttctgatgcacattaaagtttgagaaccacggtttaaaagctcccccagttgaatcatgagcaaccagaaaaaggaaattgtagttgagaaaagaaaaatagttcagagcatttgagcaatgtgaggtatgcaaaatttatcaggcccagagagaccttgaatatgggacataagttgcaccccccacactcatgctcagaggcgattgtttaaaggcattttgttcatgactgactacccaaccatatcttcatgttcctggaatttgtgatacgaagaacaatctatagacaattaatagtttgtttttttatgtaaattattggtaaacaatttagaaactgcctcttcttttcctttaaaaacttccttgtggccgggcaggcgcagtg

SEQ ID NO: 3062 - DNA, 4001 bp, Homo sapiens
tggtagccagcaagaactgtaggactgggactagagtggtcagtagctacgaagaagtgcctgggcccagtgtgacagctgccagcaccgtccacacgccaaaaagaaacttcacatctctttaaacttggaacacatgcaaaatactaacagttttgttttagcaataaagactccctgtcacttactaacttccttccctcacctatttatacaagtataagttgactagctgctatttctatagctgcctcctatgatatttataatgtgttgtgtgtgatttgggttgcccatgtcactaacactttgcaagaatttgtgtttgtaaattactctggaactcttctgggagtgaatattccactgcacaaggtggaagccagactagagaccatctgctaagagcagcacttcattcacccagctacaccttcctgccaaagcactctttgcaaatctatttttgctggtagaagttactacatagggagtggaggctgttttaagttatcagtgtgcaccttccatttcctcctaggacggtcacacgccagcagctgagtttctcaaagaagcctcagccctcctccagactcgttctcactcttgcttcggaagggagcaacaatccttatcagactagccgcatctacaagctaaaagtttgcatgaactttcaatggggtaccaaccctcgccccaaaagtcctgccactttactattttacaaatgccgcctccaaaacataaacaacgaaaccctagagaagagcgaatccatcttctgctggtgggaagaaattctaaatctttcccgtttcccgccaccacctaccgccaagactggagtcccagaacactcgcccgggtcagaaagggaccactccccccctagaatactagaggcgggggaaggggtctcccaggaagcacacacctgagatagatcctcacgcgcgaggggccagcgggcaggagcacccagttcctccagccagggtggagtcggcctccccccagaatcagagcctcggcccgggtgctcccagcgaggcgcgcggggctgtcactcgaggcgggctgggcgggtgtaactcgagcgccgggcgggccgcgcccccgccttccctcttcccgacttcctcctcccgctcccgcgcctgctccctcccggaggcctgaccagggcggcgaggccgccacctcctgcccggatacctcgggcccaggctcctccggcccagcggggaaacgcggaagtgggggcgggaaccggggccggggttggcgggggtgtgggagggaaaagccaacagcgggcggcgagcgaggtggtctccgtggcccaatgaacgtgactagacggggacgcgggtcctgccgccgggtggggtcgcgcagcgccacacgcaagggccctcgcccctggctgcagttcctgctttgtgcctcggcgatgccggactccagacctccgccccgccttgccagcgggctggcggactggaaagcctgagctaggccaggctggggaagacggtggcggtgtccgatttcctgtgccctcgcccatgcgggccgccctggccatctgcctgcgggagaggagacactcgtccgccggcacgctggcggggctggcttacctgacgacttctcgttgtccgccctgggatctggcttctcctactctgtacctcccggccggcaggcttccctaggcctacagacgtgtccaggaggcgggcgaccctgcgaccccgccgtcagagcccagaaccctcgcccggctcccccggcgggctctggaggcgcgccaggcctcctggctccccgcctgaatgtcagcgcagggacccgcagggaagaccaagcccaagctccagggggtggaatgctgagcacaggttccccagacccagcctcatacaggtggggggaggcggagagccccggcagctgaacagcaggcttcccacttgcaaccccccgccacccaaaaaaaaaaaacgaccctgcccactgagcatgcccagcttacttgttggaactcctagggctagacaagcccaaggggacctaaggaaggcaaagttggggctcaaatggaccccacttctttaacagctttgctccgaagacctctgggtgctgtactaataacctttctatcgtggtattggaaaatatccaggagatggacggaaatgcctttccaaaagaaggaagaaaattagtgtgaaccaaaaagcagtggtatttttttaaataaagtattaagtcactcatttaatgtccttaaataccgcagaattcctgtagttgacccagaggaatgcatatatttattaaatcccaaactcagtaacttcagggaaccatccatagtccacagaggagcaatgattctcacccttggacacattaaaattggggggagggggcagggaggggtggaatgccagatttccatccccaagtccaatgagtcagtctggacgtgggatctgcaagtccttgtattttaaaactggctctaaaagtgtagtcactggagcccgcagcatcagcatcacctgagaacttgacagaaactgtactccagtgacctgattcatagactctggggctggggctgagctacccagatttaacaagccctttgggtagttctgatgcacattaaagtttgagaaccacggtttaaaagctcccccagttgaatcatgagcaaccagaaaaaggaaattgtagttgagaaaagaaaaatagttcagagcatttgagcaatgtgaggtatgcaaaatttatcaggcccagagagaccttgaatatgggacataagttgcaccccccacactcatgctcagaggcgattgtttaaaggcattttgttcatgactgactacccaaccatatcttcatgttcctggaatttgtgatacgaagaacaatctatagacaattaatagtttgtttttttatgtaaattattggtaaacaatttagaaactgcctcttcttttcctttaaaaacttccttgtggccgggcaggcgcagtgggtcacgcctgtaatctcagcactttgggaggctgaggtgggcagatcacgaggtcaagagttcaagaccagcctaaccaacatggtgaaaccctatctctactaaaaatacaaaaattagccgggcatggtggcaaacacctgtaatcccagctactcaggaagctgaggcaggagaatcacttgaacctgggaggcagaggttacagtgagctgagatggcaccactgaactccaccctgggcaacagagtgagactccatctcaaaaaataaataaataaaaacttgtgactgggcaacatcatgagactggttatattaagtatgcctcagttcttttttctttagtttgacaaatcaaaccaatatttttatcatttttttcaaaccctcatcatttatctagaaatgcaacatgttacccagaaaaggaataatctggttgagttgggtgccagtcctggatttccttctcactgattatcccagatcagttcagtgcttgggaaatgggaccatcagttactcacttttgtactctagtgcctagcatagtgcctgaatataactgatgtttaaatgtttcttgatttgaaatgaatgcttaggtgagcgatctggtccaatccatactatgtcagctgattattttccccactagtcctagtcacactgctagctagtgtaaccgcccaaggggttcaccttgcccgctgcctagacagagtcgattgatcaagacaagggaattgcaagagtaattcacgcaaagccagctgtgcgggagaccagagttttattattactcaaatcagactccggagcattcgtggagcggattttttaaggacaacttggtgggttgggggaagccagtgagccaggagtgctgattgctcagggatgaaatcatagggagttggagctgtcttc

SEQ ID NO: 3063 - DNA, 4001 bp, Homo sapiens
tcacacctataatcccagcactttgggaggccaaggcaggaggattacttgagcccaggagttcaagaccagcctgggcaacatagagaggccttgtctctccaaacaaaacaaaactagcccagcatagcggcaggaggctgaggtgggaggatcacttgagcctgggatgttgaggctgcagtgacctgtgaatcacgccactgcactctggcctgggtgacagagactctgtctaaaaaaaaaaaaaaaaaaaaaaaaacctaagctgtttaggaatgcaagcaaatccaaaggaaatgaaagtagatagtttagaaaacatgaaaaaagaaggcactgaagactggcaggctggaggctttacagagtctcactctattgaccaggctggagtgcagtggcacgatcttggctcactgcaacctctgccacccgggttcaagcaactctcctgcctcagcctcccgagtagctggaattacaggtgcctgccaccgtgcctggctaattttttgtatttttagtagagatggagtttcaccatcttggccaggctggtcttgaactcctgacctcgtgatctacctgcctcggcctcccaaagtgctgagattacagccgtgagccaccacgcctggccttttccattctctttaaagcactgcacacaagttatgttactggtttactcaccaatattggcaggaaagggaacttcatgtactgctggatccaggttgatcacatacggtggagtgccttgggcatgcaggtgtcctgtgagcctctgcagagatatggggagagggttggaaggagacaaagaggggacaagagagaacttccattcctttaacacccatgccttaagaatattgcacttagattttcttctacctgaaatatccaccatgtccacctccaagatacaactctcagttcaaatgctacctttcttcatcacccatctaacaaagcttcccctactcgtagtcacttgtttacttgttttgattcttcgtatgtgggttttctctatctcctccattaaatatttggccccacgaatgaatcttgtcaacctcattttcgctatatccccagtgaatggaacatgacaggcgtgcaagaaatatttggcaaatcttcaccaaaacctgtgtgctagcactgtattaatctttaaagttacttgtaacttgcctccgagaaacgcaattttatcagcaagacaattcctgtacaacgtggtaagctggaccgagtatgccctgaaggtgcgcagaagagagccttaattaacctggctagggcccgaggaggctttgccggggaaggaactaaagttgatgggaagcccccgaaagccatgcgccggtaccctccaaatcctcttccctccctttcttcctggccttccgcctgccggaggcaaccttttgcgctcccctactacacccatgctgtgtacgtcacctgtacaaaagtggttttcccggatcccgccattcccaacaccaacagacacactgggtgccgcggacccccagaagcctggagctcagcggcagctgcggacgccgccatcttcctcctggccccacccacccgaccatagagacaccgcatgggtagagaaacttccgcaatgttctgggctgcgaacgaaaaccaccacagcgtcagaaaggagcgggtgaggggcgcggcggttgccagggcatcttcttagcgtcgggcagggctgatgagtcaactagtgacagtggcgaggaagtgggggcgctgagcaagcgagaggaaggctgaagggagctaggaaaagggcgctgatctctgcagcctgggagggcttttgtctcccggaggaaggccagaagagatggggtcccgagggcagggctcacacagcaagaaaacgaggagcatgcctgtcattttgagcccacagagaacggggagcggagccactggaggaccggctgctcgggcttattcggtagccgaggcggttaaacagttcagggctggaccagccgggactggagcagggtgcagtctccagggttgctgggcagcaccgagaccctttgagcaccgaacgaataaactacgggagctttccacacttgcacattgttcccgcgagttgcagacgcaggttcctgatgctagcgctcattccttggcagtcaccctcagtgaactacacagttgccgtgaccttcaggatgaatgcttggattccaggtgcaagtaggtactggaggggagcttcctcccctccagtcactgaaggtccctcagaaactcaggaaagatgatgaaagagcctagaaaattatttctactcctgaccacccagtctgtttctgtgaccctttgtagctgcaaacagtgttcagtaagtcataagatctggctttaatacccaggctctgccacttgctagtggtgtgagtcatgggcaagtcacttaaactctctgaacctgttttctccttttttaaaactgaggtaatacctcccagggttgtagtgaatgcacgttgtaaatgacgagctacattcctcatcctttaccactagctggattccccacaccttgcataatgtctggaacattctggtgctcagaaatattctcttgtatgaatgaaggacagttgtgcacttacttcctaaagtttcattaactgacagaggaatgtctcgtttgttctttcaggtttgctgagggccccagaaggctccttccaccgtatcatagtctaataaataattttgtcaagccagagaagctaacaaaggtagagacaaggcttaaagaaaagatagtggcggaaatgacggatctgaacaagcatataaaacaagctcaaacccagcggaaacagctactggaggaatccagggagctacaccgagaaaagttacttgtccaggctgaaaacagattctttctggaatacctgactaacaaaactgaagagtacacagagcaacctgagaaggtatggaacagctatttacaaaaaagtggagagattgaacgaagaagacaagaatcagcctccagatatgcagaacaaatttcagtgcttaaaacagcgctcttgcaaaaggaaaatatccaatccagtttgaagcggaagttgcaggcaatgagggacattgctatattaaaggaaaagcaggagaaagaaatacagacattacaggaggagacaaagaaagtccaagctgagacagcttcaaagacacgggaagtacaggcccagctcctccaggagaaaagattactggagaaacaactgagcgagccagacaggaggctactgggaaagagaaaaagaagagagcttaatatgaaggcccaggccttgaagttggcagcaaagcggtttatttttgaatactcctgtggcatcaacagagagaaccagcagttcaagaaggaattactgcagctaattgagcaagcccagaaactaacggctactcaaagccacttagaaaacaggaagcagcagctgcagcaggaacagtggtatctggagtccttaatccaggcgaggcagagactgcaaggaagtcataatcagtgcctaaatagacaggatgttccaaagaccacacccagtcttccccaaggcaccaaatcaaggattaatccaaagtaacttctaaaataacactgattaaataagaactggagcaagtactcttaagtgctacattaacctggttagaaaggctgttggattccagattgctattgtaaaatctccatcatgatgtgttggagtgaaggattagatggttttatccaacagtcctactagatatttggtaaccagcttcccttaactagctttttctttaaatactcgttaataagctattccacaaacctccagttaacctaacacatgaccctaacctagccatttaccatacatcaaactagctaaaggaaaccaacctaaggaagtgaa

SEQ ID NO: 3064 - DNA, 4001 bp, Homo sapiens
gtaatacatacacattccctaccaccaggaaagtaaaactggccttctagccttctcctgtcagcattctcttctaccacctccactttcacactggtttccttccttacaaagaataaatgccaagtaaatcatgaagaatgttagggctaggagctctaaagttgtggcaaagagttttgtctccacaaagtgcaaagtttcatgcaacttaaacatgcctagaaaaagggaggcaaaaatcaagggggaaaaaatgcttcttactaattgcctattactgacaaaggcaacacaatggcaatgcagacatgattttttaaaaggagttaggctgggcacagtggctcacacctataatcccagcactttgggaggccaaggcaggaggattacttgagcccaggagttcaagaccagcctgggcaacatagagaggccttgtctctccaaacaaaacaaaactagcccagcatagcggcaggaggctgaggtgggaggatcacttgagcctgggatgttgaggctgcagtgacctgtgaatcacgccactgcactctggcctgggtgacagagactctgtctaaaaaaaaaaaaaaaaaaaaaaaaacctaagctgtttaggaatgcaagcaaatccaaaggaaatgaaagtagatagtttagaaaacatgaaaaaagaaggcactgaagactggcaggctggaggctttacagagtctcactctattgaccaggctggagtgcagtggcacgatcttggctcactgcaacctctgccacccgggttcaagcaactctcctgcctcagcctcccgagtagctggaattacaggtgcctgccaccgtgcctggctaattttttgtatttttagtagagatggagtttcaccatcttggccaggctggtcttgaactcctgacctcgtgatctacctgcctcggcctcccaaagtgctgagattacagccgtgagccaccacgcctggccttttccattctctttaaagcactgcacacaagttatgttactggtttactcaccaatattggcaggaaagggaacttcatgtactgctggatccaggttgatcacatacggtggagtgccttgggcatgcaggtgtcctgtgagcctctgcagagatatggggagagggttggaaggagacaaagaggggacaagagagaacttccattcctttaacacccatgccttaagaatattgcacttagattttcttctacctgaaatatccaccatgtccacctccaagatacaactctcagttcaaatgctacctttcttcatcacccatctaacaaagcttcccctactcgtagtcacttgtttacttgttttgattcttcgtatgtgggttttctctatctcctccattaaatatttggccccacgaatgaatcttgtcaacctcattttcgctatatccccagtgaatggaacatgacaggcgtgcaagaaatatttggcaaatcttcaccaaaacctgtgtgctagcactgtattaatctttaaagttacttgtaacttgcctccgagaaacgcaattttatcagcaagacaattcctgtacaacgtggtaagctggaccgagtatgccctgaaggtgcgcagaagagagccttaattaacctggctagggcccgaggaggctttgccggggaaggaactaaagttgatgggaagcccccgaaagccatgcgccggtaccctccaaatcctcttccctccctttcttcctggccttccgcctgccggaggcaaccttttgcgctcccctactacacccatgctgtgtacgtcacctgtacaaaagtggttttcccggatcccgccattcccaacaccaacagacacactgggtgccgcggacccccagaagcctggagctcagcggcagctgcggacgccgccatcttcctcctggccccacccacccgaccatagagacaccgcatgggtagagaaacttccgcaatgttctgggctgcgaacgaaaaccaccacagcgtcagaaaggagcgggtgaggggcgcggcggttgccagggcatcttcttagcgtcgggcagggctgatgagtcaactagtgacagtggcgaggaagtgggggcgctgagcaagcgagaggaaggctgaagggagctaggaaaagggcgctgatctctgcagcctgggagggcttttgtctcccggaggaaggccagaagagatggggtcccgagggcagggctcacacagcaagaaaacgaggagcatgcctgtcattttgagcccacagagaacggggagcggagccactggaggaccggctgctcgggcttattcggtagccgaggcggttaaacagttcagggctggaccagccgggactggagcagggtgcagtctccagggttgctgggcagcaccgagaccctttgagcaccgaacgaataaactacgggagctttccacacttgcacattgttcccgcgagttgcagacgcaggttcctgatgctagcgctcattccttggcagtcaccctcagtgaactacacagttgccgtgaccttcaggatgaatgcttggattccaggtgcaagtaggtactggaggggagcttcctcccctccagtcactgaaggtccctcagaaactcaggaaagatgatgaaagagcctagaaaattatttctactcctgaccacccagtctgtttctgtgaccctttgtagctgcaaacagtgttcagtaagtcataagatctggctttaatacccaggctctgccacttgctagtggtgtgagtcatgggcaagtcacttaaactctctgaacctgttttctccttttttaaaactgaggtaatacctcccagggttgtagtgaatgcacgttgtaaatgacgagctacattcctcatcctttaccactagctggattccccacaccttgcataatgtctggaacattctggtgctcagaaatattctcttgtatgaatgaaggacagttgtgcacttacttcctaaagtttcattaactgacagaggaatgtctcgtttgttctttcaggtttgctgagggccccagaaggctccttccaccgtatcatagtctaataaataattttgtcaagccagagaagctaacaaaggtagagacaaggcttaaagaaaagatagtggcggaaatgacggatctgaacaagcatataaaacaagctcaaacccagcggaaacagctactggaggaatccagggagctacaccgagaaaagttacttgtccaggctgaaaacagattctttctggaatacctgactaacaaaactgaagagtacacagagcaacctgagaaggtatggaacagctatttacaaaaaagtggagagattgaacgaagaagacaagaatcagcctccagatatgcagaacaaatttcagtgcttaaaacagcgctcttgcaaaaggaaaatatccaatccagtttgaagcggaagttgcaggcaatgagggacattgctatattaaaggaaaagcaggagaaagaaatacagacattacaggaggagacaaagaaagtccaagctgagacagcttcaaagacacgggaagtacaggcccagctcctccaggagaaaagattactggagaaacaactgagcgagccagacaggaggctactgggaaagagaaaaagaagagagcttaatatgaaggcccaggccttgaagttggcagcaaagcggtttatttttgaatactcctgtggcatcaacagagagaaccagcagttcaagaaggaattactgcagctaattgagcaagcccagaaactaacggctactcaaagccacttagaaaacaggaagcagcagctgcagcaggaacagtggtatctggagtccttaatccaggcgaggcagagactgcaaggaagtcataatcagtgcctaaatagacaggatgttccaaagaccacacccagtcttccc

SEQ ID NO: 3065 - DNA, 4001 bp, Homo sapiens
aaggatttctggacagttttgccactttctaaaaaaccatttgcaaattttctgaaggctgttatggctagtatttcaaggggtttcttttcatattatttttatttttaaaaatagagacaggagctgggtgcggtggctcatgcctgtaatcctagcactttgggaggtggaggtgggtggatcacctgaggtctggagttcaagaccagcctgaccaatatggtgaaaccctgtctctactaaaaatacaaaaattagccagaagtggtggcgtgcacctgtagtccccagctacttgggaggctgaggcaggagacctgcttgaaccaggaggtggaggttgcagtgagccaagatagtgccactgcactccagtctgggcgacagagcaagactccatctcgaaataaaaatagagacagggtctcactgtattgcgcaggcaggtcttaaactcctgggctcaagtaatcctcctgcctcagcctcccaaaatgccgggattacaggtatgggccaccatgcctggtctcaacaggtttttgacagaagaatgtgtgcaagcaggtctatagggccaactgggctcagagatggaagatacacaatgccgctatcatattattctggggactaggatctcccatttcatacaaatagcatttctccactaatgcttgaactatcactattagaaaactgttcttttgaagatattacattgtaaaagagaagatttatattaatctaatgaagctttaatagtgagaaaggtttgggcgattttaagtgggtcatcccctcccctcccatcaaccccatgagaaaaattggggttgccaacttggcctttcatcttttgatatcattaaggttagcattattctttctctttcttgcatgacgttaaatagcacatttctcccaaacatctaaaaactctgatgatagaaattttagaaatagacatttgggagaatattatatcatcaagtcatattaatttttgtcagtgatcattctaatctttttgttgttgtttgaaaaaaaaaatctatccggaacaaaagcattggaagagagatatacaaaaggacactttcttacaaagaagctgatttatgaaaaacaaagacacttcaatttttttcctcctgtcatacagggtgatgactatcttgtgtaaatgcctttcttagggctggctcttcagggtagtcacattggagattagacttaggaggcccttacttggttaaactgtgaggctggagacacacaaagctttttccagagactgaaatggactcacatggcaggctcagtagccctgggggtcacagcgaggaaccatggcaacccagccatacagggacgttttcatccacttaaagcagagaattcttaaaggcttctaaatgaggacgaagccttgtctagattcttgcttctaattctgttttgcccgatgcagaaagtgattcttgaggatacttagtgggaaagtctgcggaggacttagttctccatcttttccactaagatttccgaagttctaattacctgtagaaatgtggggaacagcttctgttttatctctaatttgaataaaccttcacttttaatatgccaaatacgaattcaaaagagatccagatacaaagcatttttaggttggttttcttaactacaatatactggctcagacacaaggcatgcgcggggtgtgaagctttggggggcaaagcaagcactcacctctctgaagttgccggtgcctgtggctgctgcgggaaagtgcgtggccaaagttttcagggctctgggctctgtctgaatccttgtggtttaatgatttctctgggaggacgggtcacagctgccctgagtctaggaagaagtatttcctctctttgcaacaaagggaaatacataatattttaagttattgccctggaaaaggaaatgtggtttgccagtggttaagtaaatctgttgtacatcagttagtcaacagcatctgggtgacaccattgttggccctgatttaagagaaagggctgctgtggacattcaggtcactcccaattacctactctaattatgctacttttctcattaaactgcagataattgtggctatgatgtaagtgtatctggatttttccaaaatgccacattttaggaaaggaaaaggatcagataagacagcatattttctcaacctctttaaacttgttcagctgctacttttgcatttttcattaggaaattggtagcctgggggctcactgcagctgtgaatgtgttttgtttgtgaagcagtgttttctagagtttgaattaatttccaacatttagaagtcagaaatcttagccatctagattatcggctcctcatgaaaaaattagcagatctgggtacactgggcccatgtcccaacagggatactgttcgaggtgtctgcgtagtggcttactcccagcaccacctgcccgcttttggcagggcattgcatcccagctccacacctttctcctctgtcctcctcactcatggacactgtctggatcctccagcaatttacactttcaatttttgtatctttttctaattcttttcctattgagtttcttccatttaggaaaattgaatatgcagaataagtcactgggtgcttatttttactgcataaggagctttagatttgttcattaaaagaaaatgaatccccagtgtttccctagtaaaacctgaatgcattataaagcattatggaattaacaaaaccaaccttgctgagcttaactatggaatggaagtatgacgaaaggccgtgtagtagggagcagtccacctaggtataggcaataaagggactactgtctgtagggaatttaaaaacgataataaaaccaactaaagcccttctgctttttgttggcaccatgtgccagcaattctcaagtcaatgatgaaatactcctcccctcaagagacctcttgttggttttggtttcagttgtgaacaattactgtgattataatgagctgtagttttatgaatatgtataatctacttttaaatagacaatgtattttacataaaagctaagtattcttattttaatttttgttacttctctttaatagacaatgtattttacattgaagataactgaaaaaactcccaattataaagatgccccgatgccatgtgttgattcagatatgctttctcttgagattaagttgataatggctccaaaacactggcacagcttgcattttcccattgtgatctacatgtgcctgcattcaaacaacagatttaaaatacataatgatagcacaaccatggcaaaataaagaagcagaacttgtcatttcaacttctttattccatattctctcttggaatttttagttttttaaaattttaaacagtgaaacaaaaagtgcttcaaggtgtactatttttttttcctttggcaattgtaaattttagtccatagatgaaatttttggctgaatttggatattttttacattaattttttttttttttgagacggagtctcactctgtcacccagactggagtgcagtggcatgctctcggctcactgcaacttccgcctcccgggttcaagtgattctcctgcctcagcctccccggtagctgggattacagggatgcatcaccacgcccagctaatttttgtatttttagtagagacagggtcttgccatgttggccaggctggtcttgaactcctgatctcagatgattcacctgcctcggcctctcaaagtgctaggattacaggcatgagccatgatgcctggcctaaaagttattttaaaaaaatgatcactttgggagctgaggcaggaggatcacttgagcccaatagttcaagaccagactggacaacatagtgagactgtctctacaaaaaaaaaaaaaaaaattgctgggcatggtggcttgtacc

SEQ ID NO: 3066 - DNA, 4001 bp, Homo sapiens
ctgttctcctaaggacccatttatgtttccaaaaatcacttgttttcccgtaagtgcccttctcttccatttctcctattctcctattaagatggcatatataaaacaaaacaaaaaacaaaaaaacacacacattaaaaaaagaaaaagaaaaaaagatggcatataagccctaaattctaactacccatctgagtcacttttttttttttttttttttaagctagggttaggttctggttgcccaggctggaatgcagtggcacaatcatagctcactcagcaacctctgagtcacatttacttgggaacgcccatatctacatacataaaattaaattttgttttctcttgctaatctttcttctgtcaatttcatttgctggtgcctgataacaaatctaagagggaacaggagaagttttttctccctgacacatctataatctcaccatcagagtaacacatctattatcagttttgcatattcaatcttttctacttcatttattttttacatgattatcattctggttaacatgatctgttattaaatatttatctcagggacatgacaattagcagtcaagtaacagaaaatgtatgaccttttataaactaaatgacttaaatcagataaaatcataaaataggccatgaaaaacataataatctagtgtctggaagatgtacaaatatgatgagaattattcactaagaataattacttataacttgagacccaggaaaggtcccttggcctttttttttttaacaagacaaaattaccatcggattaatttaacaacaggtttgtggattcttgggtgaatgagtctgccttaagtgaaaaaggcaatttaagagcattattgccagtgaaagtcctgttatcaaacttgatttggttttcatcagctttcttttggaggaaaagataaaagacaattggtgctcacagtttctgactagaaaaggaataattgaatagctgaacccttgtctcccacagtcttccctgcatttagccatctaccccttgttgggagagcccagataccaattattctaacaagaaattgatagcgagattcaaaaaggcaacaacaacaaacaaatgggaaggcccaacaaaccacaagcctttcatcgtaaaaatggggagccagtggcggggagctgcattacaactcaatttataacttttttcccaccttgtaatctaaagagggcaatatcagctttcatctcggagtaccatttttttctactagtttctcaacagtgagccttccacaaatgatgtttgactatttctagatcacaactccttaaaagacagatttatgagctgtaattatgtaggtaaaagctgagaaaattactgaaagttctttgtccgcccaccccagcaacatgctcattttctctcttgcagtgttttaggattaatcagcagctgtagcgaaccctgtaggatcgtccctaaacacttttgccaagaccaaaaatatgaatctgcagacagagcattttgtaaacgatcaggagtccttttccttttttgccagctggtagttagtcaaatgctgttttgtaaataaatcatctgcaggaatcctcatcaggtccactgtaaatgtgtcagtttgaggaaaacaaacaggaaagcacttaccagttaaatttctgtgaggagagaagctattgtcatgcctgggtgtaccttcccggttccagaatgaaatggagggtggtgttcagaacggctgcattcctcattccacttttatctggcttttgaaatgacagtgtagagaagaatgatgttgggttttgaatgtggttcttcccttcccccacccccctccataaaaattcatcatgcaatcctggagaaaagtaagcaatgaacatactgtacaaattaattctttcgaccagcctatgtttgtgtaagaagtttgttttttgaatggaaaccactgctactagctgttctgctgcagactgaaaatcggtaatggatgggggtcacccagccctcctttgtctgggtaggcttttgcttatgaaaaggcaagttaaattagcagagatggaatgttcttcgaatgcatggtataaggctcatcaggagattttactttctgtgattcagtgtgtcctgatagtgaagagatggaatcacatattggttaagtgtgaattttaacgtttatttatttttatttattttttttgagtcggagtctcgctctgtcgcccaggctggagtgcaatggcacaatctcggctcactgcaacctccgcctcccaggttcaagtgattctcctgcctcagcctctggagtagctgagactacaggcacctaccaccacgcccggttaatttttgtatttttagtagatacggggtttcaccacgttggcccggctagtcttgaattcctgacctcaggtgatccacccgcctcagtctcccaaagtgctgggattacaggcatgaaccaccacgcctggccttaaagacttgattttttttttttttttttttttttttgagacggagtctcgctgttgcccaggctggagtgcagtggtgtgatcacggttcactgcaacctccgcctcccgtgttcaaggaattatcctgcgtcagcctcccaagtagctgggattacaggcatgcgccaccatgcccagctaatttttctgtatttttattagagacggggtttcaccacattggccaggctggtctcgaatttctgacccacctcggtctcccaaagtgcccggcctaaaggtttgatttttatccctggtcaccatttgtgggcctggcagatgtgggcacatctgtgtacctgaggcaggactcagaattcataaattcaagggatgagaagcatggagcttgaaggtaggcatgccttgatgtggtgagcttacctctgacggctagctatctttatttttttaattttattttttattattatttttttttgagacggagtctcgctctgttgcccaggatggagtgcagtggcacgatctcggctcactgcaagctccgccttctgggttaacgccattctcctgccttagcctcccgagtagctgggactgcaggcgcccgccaccacgcccggctaatttttttttgtattttagtagagacggggtttcaccatgttagccaggatggtctcgatctcctgacctcgtgatccgcccgcctcggcctcccaaagtgctgggattacaggtgtgagccaccacacctggccgctatctttatttttgtatggtctaacttcagctcaaccatgtgatacctgaaattgcacattgttaggccatgaaaggtcagctgccagagaagcacaggattttgtttttttccgctgttaaagaccaagtctaggaaatctaaagcaggaattctcacggtggaggtcgggggtagggggtgcactttttcaaactacaaatatccctctgccctataagaatgtataggcttccacacctacccgcaatcccttgattcaatcttggcatatttttcagtgttttgtgagaccggatgaatagatgtcgtcagtgaagggggtacttagtagagctctgctagtttccattcctttgcgttagcagtattagtatttactatagtctatactatgttctgtaatccacaaaatcacaatttcatctgtaaaagccattattgaggagaatctcaggaagttttggttactttacatgagtttatttttggctatagagcaggaaccattgagtagcaaagaatatgaaaagcgacaagagaaatgacattgatcaaggattgtcctatgtgccacgcatagtttaagcacagtacacactgaaacccaggaaagtgtaagcatttttatgttttagccaccacctaaaacaattaaaacatatgcttgcttagctttgaaattagtctaagaaacaataaa

SEQ ID NO: 3067 - DNA, 4001 bp, Homo sapiens
ctgattctacaggagcagaggggacagctggagaggacaggcagcgaggccacaagccggtcccctctggattctctcacctagctggccagtcccaggaatgcagagcagaccccctcccacagcctgtccaggtgcatatagacagggctcaggaagggagcaagtcctcccctaggcactgtgccttcagatacacggcttcatgtcatccgtccagcaacacctattttatggatgaggcttcaaagacaaatgagttcatttccaggcctctccgctagagaactggtcacagacctgtccgactgtgatcagagccagtcctctctctccgccaccactccctcgctgcacctgccctctcttttctgggtcctgggtttccacctcattcccagctcccatctcctccccctccctcctcctcctgtccatacactcaccccctgctccattctcttggtccaggagctgcccagatccagattcccctccagcctgactctgtccctggaacagaacacagaggggagacctcaagtcccttccaaaggcaccccaggggccagcctgactagtctcagccagcatgactcagtctcaaccagctcttctttttgccaggagtcaagtgtacacatcaggaagggaaagcaggcttctgttagggggtgccagggatgcaaccccaggaaccctgctatcccacccaagaccaggaaccaggcacgccctgggaagtcaacatgctttgtttaattccttcctgcgtttacctgtccctgggcctctaggctaattgaaatggcttggtctggagctccagcagcggagctggacattgctggctggggcccaggcgcttggggagtttattccttctgtaggatttgacagcagggtgagcagaaggcagcctctttcctccgtctttggttcctgtacattatttcctcaccaactcctcctctgtcagggtgagggtggaggtctgggcccacattgtctggcccttgggccatcggccaaagctagaagatagggggatggggcaggcagggaagggtctgtctggtagggaggtgaggatggagctggcccaaggagagagaacatggcagtccttcctccaggaaatatggaggggctcactgtgtcacagacctgagccctgtctatatgcacctgcgtgtgcgtgtggatatctatccaaaaccagatattgatatagatacgagtatggataagacgtgagtataagctggtcacaatggcacgtgcctttagtcccagttacttgggaggctgaggtgggaggatcacttgagcccaggagttcaagtccagcctgggcaacatggtgagagcatgtcttaaaaaagatatagatatagatagatttagatacagatacagatatatatttacataaagatagatttaaatttagcaatagagatagatttaggcttagtgacatatagacatagccatagatatagctatctattgaggagaacacagatggaaaggcaccctctagactctgatgtctttcctcagattctctcccatcctctaagccaatagtttccaaatctgcaaaatttttctttttctttttaaatggccagcttgactgaatgagactttatccaaagtacagcaggtatcatatgagtttacagggactcaaataaggaaacaagagctatcccccacacccaggaaagtaaaactgagttctcagagatctcataacaaagcatccactttccttacacattacttcctctcccctcagccctttccccactacctatcctttcattccatgctttgtctctcccaatcaggggtccccattgtcgcctctgcagaccttccctgggtctcaccccagtctcacttacaggttgggatgcttgggcaactggtgaccccagcaggggaagagttgtggccaggagcagcagtggggcagccgaacagaccatggctcagtgaagcagtccctacaagcccacgatgcaaatttccgcaaggaagagctggcagggcagtgtgcagatgggatgggagggaagaggggagggagccagggctgaatttacagaggaagcgctacagcctgtgactctgagtgaaatgggaatccaggtcactgtgggggccacctggagcccacatgccccagtgagaatggtgcccaggctcttcttaggctctggacccaaagctccgagagcaggagaggcttaggggttcgaagtcacaaccagcaacatgtctataagccaggttcagtcatgttcccaaggacctgggaaatctggattgttctgaactcctcaaaggctgaatcactgatcaaacagtcaaggttacaaatgaaaaataaagaaaagataaaaatatgagagctgatttttactctaaaataatttccagatagactagaatcctccctccctcccttccttcccttctttctctccctccctccctccctcccttccttccttccttccttccttccttccttccttccttccttccttcctttctttctttgtttctttctttctctttcctcactctttccttccttcctttctctctctctttccttctttctctctctctcgcttgctctcactctcgttctttttctttcttttagaaacaaggtctccctctgttgcccgggctagagtgcagtagcatgatcaaagctcatgatcatagctcacaatagcctcaaactcttgggctcaagctatcctcccaacttagcctcccaagtagctgagattacacatgtgcaccactgcactggcctagagtcttaaatgtaaaaaagaatctgagagaatactagaaaaaattatcaagttatttcataaaataattttaaactgcggaaggttttttaaattgataatactggttttttatgtatttaagttttttaaatacataaaactgagaagccaaaaaggaaataaatttgactgtctaaaaacttttaagtttggcctaagaagaataattttctcaacaaaggaagtttcttctagttttcatatcaataagatagaaaataggcaaaagatgggaataggcaattcactgaagaaggaatagaaatagtttgataatgggcgtgcacggtggctcacacctgtaatcccaaccctttgggaggccgaggtgagtggatcacctgaggtcaggagttcgagaccagcctgcccaacatggtgaaaccctgtctcaactaaaaatacaaaattagccaggcgtggtggcgcatccctgtaatctcagctacttagcaggctgaggcaggagaactgcttgaacctgtgaggcggaggttgcagtgagctgaaattgcaccattgcactccagcctgggcaacaagagtgaaactccatcttaaaaaaataaaaataaaaaagaagtagtttgataaacatatacaaacctccaactttacgcatcagaaatacaaatcaaacaagaagatactatttctcacctgctaattatcaaaagagaaaattttaattatattaagtattaaaagtatagttgtacatgtgtgtaaaaacatgtacataagaatattcaaggcagaattgtttgtgatagcaaatgagttgattaaacaatcaaaatgtctattaaaaagggagagcttatataaatcttgggatttccaagcaacacattacttaaagttgtgggggaaaagtgaagtagctttattttggagtgatccccaatatatgtagtgaagtttaaatatatgttatatatattatgctcccatgtatgtaaacaaaaggaatctatttaagatgcttgtacttttatatccctagaatatttctggaagaatacatcagaaatttgacaatagttgttgcttctggagaaagggattaaggatctggatgggtctgtgtgctgtttcatatatagtttttct

SEQ ID NO: 3068 - DNA, 4001 bp, Homo sapiens
aagccggtcccctctggattctctcacctagctggccagtcccaggaatgcagagcagaccccctcccacagcctgtccaggtgcatatagacagggctcaggaagggagcaagtcctcccctaggcactgtgccttcagatacacggcttcatgtcatccgtccagcaacacctattttatggatgaggcttcaaagacaaatgagttcatttccaggcctctccgctagagaactggtcacagacctgtccgactgtgatcagagccagtcctctctctccgccaccactccctcgctgcacctgccctctcttttctgggtcctgggtttccacctcattcccagctcccatctcctccccctccctcctcctcctgtccatacactcaccccctgctccattctcttggtccaggagctgcccagatccagattcccctccagcctgactctgtccctggaacagaacacagaggggagacctcaagtcccttccaaaggcaccccaggggccagcctgactagtctcagccagcatgactcagtctcaaccagctcttctttttgccaggagtcaagtgtacacatcaggaagggaaagcaggcttctgttagggggtgccagggatgcaaccccaggaaccctgctatcccacccaagaccaggaaccaggcacgccctgggaagtcaacatgctttgtttaattccttcctgcgtttacctgtccctgggcctctaggctaattgaaatggcttggtctggagctccagcagcggagctggacattgctggctggggcccaggcgcttggggagtttattccttctgtaggatttgacagcagggtgagcagaaggcagcctctttcctccgtctttggttcctgtacattatttcctcaccaactcctcctctgtcagggtgagggtggaggtctgggcccacattgtctggcccttgggccatcggccaaagctagaagatagggggatggggcaggcagggaagggtctgtctggtagggaggtgaggatggagctggcccaaggagagagaacatggcagtccttcctccaggaaatatggaggggctcactgtgtcacagacctgagccctgtctatatgcacctgcgtgtgcgtgtggatatctatccaaaaccagatattgatatagatacgagtatggataagacgtgagtataagctggtcacaatggcacgtgcctttagtcccagttacttgggaggctgaggtgggaggatcacttgagcccaggagttcaagtccagcctgggcaacatggtgagagcatgtcttaaaaaagatatagatatagatagatttagatacagatacagatatatatttacataaagatagatttaaatttagcaatagagatagatttaggcttagtgacatatagacatagccatagatatagctatctattgaggagaacacagatggaaaggcaccctctagactctgatgtctttcctcagattctctcccatcctctaagccaatagtttccaaatctgcaaaatttttctttttctttttaaatggccagcttgactgaatgagactttatccaaagtacagcaggtatcatatgagtttacagggactcaaataaggaaacaagagctatcccccacacccaggaaagtaaaactgagttctcagagatctcataacaaagcatccactttccttacacattacttcctctcccctcagccctttccccactacctatcctttcattccatgctttgtctctcccaatcaggggtccccattgtcgcctctgcagaccttccctgggtctcaccccagtctcacttacaggttgggatgcttgggcaactggtgaccccagcaggggaagagttgtggccaggagcagcagtggggcagccgaacagaccatggctcagtgaagcagtccctacaagcccacgatgcaaatttccgcaaggaagagctggcagggcagtgtgcagatgggatgggagggaagaggggagggagccagggctgaatttacagaggaagcgctacagcctgtgactctgagtgaaatgggaatccaggtcactgtgggggccacctggagcccacatgccccagtgagaatggtgcccaggctcttcttaggctctggacccaaagctccgagagcaggagaggcttaggggttcgaagtcacaaccagcaacatgtctataagccaggttcagtcatgttcccaaggacctgggaaatctggattgttctgaactcctcaaaggctgaatcactgatcaaacagtcaaggttacaaatgaaaaataaagaaaagataaaaatatgagagctgatttttactctaaaataatttccagatagactagaatcctccctccctcccttccttcccttctttctctccctccctccctccctcccttccttccttccttccttccttccttccttccttccttccttccttcctttctttctttgtttctttctttctctttcctcactctttccttccttcctttctctctctctttccttctttctctctctctcgcttgctctcactctcgttctttttctttcttttagaaacaaggtctccctctgttgcccgggctagagtgcagtagcatgatcaaagctcatgatcatagctcacaatagcctcaaactcttgggctcaagctatcctcccaacttagcctcccaagtagctgagattacacatgtgcaccactgcactggcctagagtcttaaatgtaaaaaagaatctgagagaatactagaaaaaattatcaagttatttcataaaataattttaaactgcggaaggttttttaaattgataatactggttttttatgtatttaagttttttaaatacataaaactgagaagccaaaaaggaaataaatttgactgtctaaaaacttttaagtttggcctaagaagaataattttctcaacaaaggaagtttcttctagttttcatatcaataagatagaaaataggcaaaagatgggaataggcaattcactgaagaaggaatagaaatagtttgataatgggcgtgcacggtggctcacacctgtaatcccaaccctttgggaggccgaggtgagtggatcacctgaggtcaggagttcgagaccagcctgcccaacatggtgaaaccctgtctcaactaaaaatacaaaattagccaggcgtggtggcgcatccctgtaatctcagctacttagcaggctgaggcaggagaactgcttgaacctgtgaggcggaggttgcagtgagctgaaattgcaccattgcactccagcctgggcaacaagagtgaaactccatcttaaaaaaataaaaataaaaaagaagtagtttgataaacatatacaaacctccaactttacgcatcagaaatacaaatcaaacaagaagatactatttctcacctgctaattatcaaaagagaaaattttaattatattaagtattaaaagtatagttgtacatgtgtgtaaaaacatgtacataagaatattcaaggcagaattgtttgtgatagcaaatgagttgattaaacaatcaaaatgtctattaaaaagggagagcttatataaatcttgggatttccaagcaacacattacttaaagttgtgggggaaaagtgaagtagctttattttggagtgatccccaatatatgtagtgaagtttaaatatatgttatatatattatgctcccatgtatgtaaacaaaaggaatctatttaagatgcttgtacttttatatccctagaatatttctggaagaatacatcagaaatttgacaatagttgttgcttctggagaaagggattaaggatctggatgggtctgtgtgctgtttcatatatagtttttctaatcatagactttttttttaatcaaaaaaagttgatttaaacacacacacaaa

SEQ ID NO: 3069 - DNA, 4001 bp, Homo sapiens
ccctgtctcagggggcggggagaagcttattatctaccatataccaggtataagattatctattactttctaagaatcatgctttaggaggggagattagacatgtagtaataatactgtgtttggcatatctcgggtccccaataaatagttgttaaacgaatgaacataaaagtatctcaaaataatcgcccttatttcagagacccagagagactgaaaggctccctgaagtagtggtttcccataacacagaactcatttcatgttgggtcgatcatttccgagcttcgtaactaagtgactctgggcaggctgcctaatctgaaaaaggggataatgcctttcacttcagtgttgttatggggttgataatgtatgtgaagttctccccacagaaggcgctcaataaaaagcagcaactattataaaattttattagtagatactcactagccattgatctagtgttttttgtttgtttgtttgttttacaattaactgggctccagttatgtaaaacacctcttgcaaacgcatttaaggactcgtcgagactgagagatcactgcttttatctggtcgggagacaccagcaatcttaatttggaacggtttgatagagcggagtgcgatgaggcggtccaaggttcctaagcaacatagacctgaggggcttgtctccaatgtcctttcacctgtctttcaagtccctctgctgaccgcacaaagactcccgtggccccggcagcagctcggccttctctacatctaaccacgtttactaaatttctacggcacgcagcgcaccgcaccaggagctgggagcggctcgcggtacagacctccttcctcttttacttcgctgcagcgggagaactaagtcctcttacctgaggcactgctgaactggttcgcaagcagtcactctacccccaagactaaaacggtataccccagatcaccacgcaagtgcggataccacagaaatcccaccttcccccgggaccgggagcaaagcccgctgggaaattgacctttcaccccctctcttgccttacctcagctcaccaattttgacgctagcaaatgaagcgacgaagagagctggaaggcgggacttagtgttgcctgatccacgccgattggacaacagcagtgtcgggggacgggccgctcgagcgggctagcaaccccccctcgatgggcggggagaagcgtgggctgcgcttgcgcactgagaggcggccgaaggggccgaggcggctacgcgtgcgcggtgggcggagcgcggctctcctaccttctcgggcagcccagtctttgccatccttgcccagccggtgtggtgcttgtgtgtcacagccttgtagccgggagtcgctgccgagtgggcgctcagttttcgggtcgtcatggctggctacgaatacgtgagcccggagcagctggctggctttgataagtacaaggtaccgcgggccggcggatgcccctctccctgctcccggcctcgcccaggcggctgaggggcccgcgcggcgcggtccgtgtcaccttgtgccgcgtggctccgggcgggctggcgggcgttcctccggaggtcctgcgggtcctggggattgggggtcggggagcgtgggagcatcctaagcccgccgcccgtagtcggcaccccccgggagatttccttttccttaggagagcgctcagtgatcatggagcgagggaattcccttcctattttttttaaacttattattttcgtaagcccccgaaaggatggagttccttctgttgtgtcaatcgccttcattttagtgaagtttccactcgcctgtcatgcatacaacttcggaggaggagatgatcgtttggcagatgaggcccgggaggggagcgacttgccgatgccatcctgctgatgtctccacttctgctcccggcagggacttcctaagcggcagcttgtggcgctagggccaccagatgaaagggaggtgcacaggaaggagctgtggagtggaaagagcgcgggctttcgagcacatacaaacctgattacaaaagtcagatttctttatttcgtcttgggcacgtcattttaaccccgctcagcctctcttttgtgtatgaaactgaaagtaatagcttctgctgtgcaaaatgattagaggaatttgtgaagcgcttggcaacatactaggaccccagtaaataaatgcgggtggttaactttcctccaaatctggttcccatccgcagttcctttaccaatgaatgactctaaccatccagtcgaccaagcctgaaatatgggctttaacccttcatccttgttgttacccgttcatcttcacatcttagcttaaatattgcttcctcaaagaagccctccctacgtgcccctttcccccttaaatgtgcgctctgttcgtttatggaattgctgctttagcgtgtctcgccattagaatataatgcccaactcattagagttttcttgtggaccatcatggcttaagcacagtgctatgtgcatactaggcacccagtaagcatttgtggaatgaatgaataactgaaaaagtcataatggattttgtttaactcgagttaaaaaaaaaaaaagcaagggtccttagaaggtcacatagcatgtttctctgctttcaagccgtattgtgccataccattctgaaccgaggtgatgacttgtcttaacattttaagtggaaagagggtccagagccttcttggtaactcgggccagtgcttttcaactttcattttagaaggctgttaacccagatacctcctgttttgccttaagctctactccccttttgttgtctgttctgcagggtaaatattgacatataaaacattttcttccttactagggtctgactttctaagtgccaataaaatagctatttcaatgggagcagtgtttataataggaaatctcctttttcttataaagaatcttccctagatttatattttcaactaaataagtgtcttaatttactagaagtttcgtgtaattttctgttctgatctttcccccttttttattatataagttcctgtatctgacagcagatgacttcctatcatcctggaaaacaaaggtcgatttagcaagcgtccaatgttcactaaaatagtttgttgatatcattttagttataatgaggcttccttggggaaaaaaaagcacacatttataacctaaatattcttctattgcaattactcaatactgcatttatattaaaattatgaatccagtggtatccaaaggaaaaatccatgggatcagttttgcttgaacacaaatctcacagatctttttttcttatcgttgcgttccccttatgttgtcttcagatagtaagcgctttataaatgcttattttaaaaagtcttttttccccataaatgggtaaagattgaaaacactcaaaagatattttgtattccctcatgtgatgctttataagagggatgtaaagaagaactgacactacaaaagcagttggtggaaaaattacttttgaagtagtttaatttatcttccctagaggtatatctgagagctacagttggaaacctgacagatatacagaataactgctgaaaggggtgcacacggggagtggaaattaggtttctgaagcaggaaactataagacaattgatttttggtatggaagagcgtgggatggattctgtgttatgtattgacacttgcattcgctattgtgttacttaacgcaattgtattaaacagttagttgactattagttgaatgtctactttctcttttaggacgtgagctttaagagggcaggccctatggctgacttttttttttttttctttaataacatgactgaggtctagcacagtaccatgaacagagtaagtgctaaacaaatattgaaggaatgagaatgtaaaagaatcaaccattttggaagtatggttaaaa

SEQ ID NO: 3070 - DNA, 4001 bp, Homo sapiens
atgacgctgctgtcttcttgtttcttcttgctctcattcatggtgccttatctccctatgtggttttgtgagatttgaccatgtgcaactccattatttgaggttctttgactctggaaattctctgcagcctaaggtgaagctcagatcgtccaggagaaccacaccaaccacagactgaggtctttttaccactaacataatttgaagcctagctctaaaactgtctgaagagtggcttctacttaagaattctcgaggaattttcttcttctacacagcacgaaagtcaaggcaggcaaactcccttgctgaccccttctgtaaggttaggttatcatttacctttattgtgagagtgtaacccttgcacactccagctttatagtggtatctccatgacactctccactgctgtggatcgttggcttcctttcctccctcccacatcctgagcggctgctcagatagagctcatggtcccaggactcagcagctctgcttgcttacctctgtggttctcactgtcagcaacattttggcttctgtgtgttggtcagcaaggatgcatccacagtggccagggagggtgtgcagcaagccattggagggacgcagatcaaggcttgacttagaccagagccctgcttgattgcctttacttgcttccgtttccaagtaggatttcagtgtcataagagagctttctctacttaaaaactgtcaaaatggtgaaaatcatcagttgaggtcttctgaaaggcccaattccactattatattgtgctgttctaagaagttagtcataagtggacactgctgcattcaacatatgatttttaacctcagcttgccagactgtggactcaagaactctaggaaatggtaaagatggcctggtgcctcctggatgggaggtggccccggaccatgcccaacagctgccggtagcggagcaggtacaggtatgtgagcatggcacggggaagcatcatgagtacctcactgttagctgccaggagccatgtgtgagtcccagagtcaatgtggtggtacctggtcagcaccatgtccagggagaacaccacccctgtgctcacgtacaatgtgatcagcactgagtggatcagcagggtgcccctggcccgggaatagccctgcccccagatgcctgaagtcttggcctctgcatagatcctccagaaacagttggcaatgagagctgtgcagaggaacagaacgcacagaatggaggtgtaggtaacaatgaccaggaggccacatcccggctgggtgcccatgcttggtggtaggatgtatgaagctccttgctcctccagctgggcatcctgccacttgctgagccaaataaggaatgtggggaagcagcaggccaccagccagatgagggccactgccttccaggcagccccatgggacatgaaggagaggtagcgcagtggatggatgactgccaggtaggtgtgcagcacaatggcggtgaaggacaggatggtgctggtgcaggcggcgaagacagcatcagtgagaatgccacaggccatgcggcccagctcccagccacccaggctgctggaggagatgagcatgtggaggagaatgtaggccaggtctgagagcaggatgttagccgggagcaggtagtggggctcctgtcgcagccgttggttccgcaggatggtcaccagcagcagggggctgacagccagtgtggctgcagccagcaggcttgagggaaggaaaagccagtacagcatggagctgggcaccctgaggtcccccaggcccaaggaagtgttgctggctgcttggggcatgcagggtgtcttgctgatgagctggatcagggccggccaagctgtagtgcccacagggcaaggtgccagctcatcccccatgcttcctggcagggatggctggctttgtcacaggttgttgattctgcacctgccttgagtgttgatctgccccacaggggtcctgatggcaccactcctctgtagagatgccaggctcgggcaggccttaggaatgactgcttaataaagataaaaaaaccaatgtgaattcagactcacacctggcttcctgcattcacatctctgcaactgtgcagctgcatgtgcgtgggtagacataacagatcatcccactgccaccattttgcagtcactgacccctccagaagtgtcccctatctcagtggcccccaaacctgtctgcttggctcacagggagtgtgcaatggattctcaccacactggattatattccgggctgccctcctagaaaggaaggagcagctgtctggaactaggatcgctgggctgtagacctggtctgacctctgtcgagctagaggctcagcaaattggaccaggctggaggggcctgggcgcactcacatttcctcacagagccttgggtatggtctccagctcagggtgaccctgtgcatgcgtgtgagtgtgactcctacaccccttccactcagggctccatgtgagtattcggtgcccccaaaatctcagctgacttgtggggtcgctgtgtggtagaaacgtcccttcctctggggaggaggaggcctggcaggcagagacctcataggagctagtggggaggaatggaaggcaggttccccaggcacctggcttgtcgggggtggggtgagctcagtcagagccagtggccagggtggctgttggtgtttggggatccagttcaagtgaacaagctctcccgctctctcgaggtgttggctgcgtggccttgaaaagctttgttccagtttccttatctgtgaaacacgaatgccaaccacactgacctcagggaaacgttgcggaagcccagaggtaagggactcagcacagtgcatagcctgaagtaaatgctgagtcaatgttagctctcccacctacagcatcctccgaggctcggtcccctctgcccacagatccctgtcatcactgcagaacgggctgcacttggctgctggcagcctgagacccctgcccaacacccaccgccggcctggcagactgctccagaaggcaggagccgcgtgggaacaggcaggatatttttagggccaggaagaggcagaaatttcagactctgggtgtgagaccacgtccactgctgcccagggaccatgctcgtcacagcccgagaccacgtccaccgcagcccagggaccacgcccagaaccgcccctgaccacgtccgccgcagcccggggaccacgcccgccgcagcccggggccacgcccaccacagccccggaccaccatcatcgcagccctgggaccacgccctccatagcccaaggccacgcccatcacagccaaagaccacgcccagaacagccccggaccacgcccgccgcagcccggaaccgcgtcctcctctgagagcctgttacgcagctgccaggagcagcagcgcctgcgcctttttggccgattacggtacagaaactaaaggtggttctgagaaagcccatcaccccttccagagaaaccgcgatgccatggggcggaccccgcctccctgccccagctgccctggcctgcactccctaggggccccttgtactttacagatgctctgaccggtctaatcggccccaggccgggagaggcagcagagccattcgcaggccacgctctctgcgcgggtgccctgtgtgctgcagggctgagggccaaggccgagcctctctctgctgtccagcccagcacaacgaccctcgccggcctttggggtcttagaatgcagattccctgggagagggaaactcgttaaatgacaatccctcagtaaaaatgtggttgtgagctaaatccttatagccggtgacggggtgacaagcagcaacttcatggaatcggaaagcgcgaaactcccaaggtgaaaaagccgctgggatgatacagagcctgcctcctgctgagaatcatcttaggaattaaata

SEQ ID NO: 3071 - DNA, 4001 bp, Homo sapiens
caactaaaaaaagagggatgggatgcgtcataaatttatcagtttttgttttataccaaacaattaagataagttgaatttaatttggtttgatagtaaatggttaacagtgaaggcagagctcttcatttttctcagggtgatggtcaaatagttgtagcaatgtccaagattaactttcaattcgttgaaaaattaaaaaacaaaaaaacaaaacaaaaaaaagggccgggcgcagtggctcacgcctgtaatcccagcactctgggaggtcgaggcgggcggatcacctgaggtcgggagttggagaccagcctggccagcatggtgaaaccctgtctctactaaaaagacaaaaattagccgggcttggtggcagatgcctgtaatcccagctactcgggaagctgaggcaggagaatctcttgcacccgggaggcagaggttgcagtgagccgagatcctgccattgccctccagcctgagcaacagagcaagactccgtctcaagaaaaaaaaaaaaaaaaagcaatctgcccctccccatgaggtttcttttaacgtttctcagtattataaaagaaatacctgctgaggtaaagtcaaaataatcaaaatgactttaaaagtttcatttcatcctaatcttttttaaacgggaagataatatgctttctaaagcatattttaaaatgaacaggaaccacagcaagggaagttttaaaaaaaaaattacatccagcctttttatctataaaaacaaagcttgttacagaacaaacacgttcacagtaaaagaccactcgctgaggcacgaactgaagaaatgctactgtacttacaaaccgcttctagccacatcacatttggcttagatcacataaacgaaccactgatactgtaaataactgctattaagtgaaaatgcggggggaaggcgagggttgactaacttcatagagaaagctttaaactctcaggctatttctcaaacatccaacatcctttatcccgtgggataagtgtaatacagtgtggtactattagagcactcttcaacattaatagtcgcaccattcacccactcctacctacttgcagggcgccaaatgtcctccctagagacccagggtagggagcgctgagcactgcctccttgcctcgtctgcagggacagactgtggccctccaagataaggggcgcagagagttcctaaccgaataggctgctcggagagcagctgccagccaacccctgggaaggcagctgtggaagtggaaaggcagccaggggtctttgcctggcgtaagaaaaaggtggtcgctagtcttcccagggcacgggagtcacaacgtcatggtaactaacataccccaaaaacgggtaagggagaaaatttggcgcagtgctccaggtgcctgggcagaagccttcggaagggccagatactgagggtaccctcgggataaagggaagagtctaagaaagacagggtggacgcccgtgcagtgaggagcttcccaaactagggatggcagttctgtctccggaggggacgagacaccccctcccccgcgcgagccttcccgggtgatctcacacgttccacaggcaggcgctgcggggcagagacagcaggtccagacaacgggccgcggggccagggcgcagagggtcggcggctgcccacgtgcccaggcctgaggggcagaggcaggggtaccccgtgcccgcaagggagaaccaggacccagcaggtccgcgctccaggggcccctctcacctgcttcgtctgcaaccttggagtggcgaggagaagggagctggtgctcgcagggtgccaagcagggagaagaccaccgtcatctcccgcccccagccctcttcgccgagcgcaaccgggtgccagctgcagcagcttaggcacgttccgataaagtaaggtggggtaagccgatgcggccctgtcagctcagcccctcgccggccgcgaggccccgcccccgccccgccttcaggccccgctccctcccagccccgccttcagaccccgcccccagccccgaacttccagcaagacgggccgcttcccgccctcgagccccgcccatttccaggagccttgagcccagagtctccgtcccgccctcaggccccacccacagcctcgggcctccgagccacacgttccccaaccccgccttcagtccccgccccctcctccagcctcggagccccagggtacccggccccgccctgccggctgggagcctcccagccgcgatcctccggggcgggacttccggcttccctgctcccacaaaatggtagccgccgtgggggatgtccagttttttttcctcttcccaagtacagacgcagagcagacttgtctttccgcttaacctcaacctcgtgtgatctgccagtttcgctcccggttagcccaggactttttatagcatagagttttaaagcaagggcttagaatcagacctgggtcaaaatcctgccttccaccttcaccaaggcagtgtgaccttgacgttcctacataagagattaaaatgtaaacccttagccctgagcttgttttagaatctgggccccgtccatgactgcttctattctattgcggtacgggggtggggtgggggtggggaactacatgcatgtccactcagtatactgaaactggttacattgatggaaaacttccaaagcttcttgaaataaaggtattgaaactatcctcacagggtttataagaattctggacaaaaatataattaagcattaatcaggctacactttgacccacttccttgtaacccgaaagtcgggtagagctagatagtacatttgtatcccgttgtccctatagataggctttctgatgttaagagtcgtaaggctttttaagaattgcttaaaatgtttttcagacgccaaattccagcgaaacagctgatgccagccagcttgaagacccctgccacagaagaagggaatcagcatgagaatacagcttcttcatctcgctgtcccatgacttcgccctgtactcttcagccaattaatgatctccacacttgggaccactctaaaacccttaagaacctgagactcaaagtcctcctggagacgaatttgaggtttcctcctatctgtgtttggtggccctatgattaaacctctttctcttctgcaacctggtgtcccagtgtattaacttgccatgggcatcagacaacaaacctatatatagtatcccaaatatggtgctccactttgaaacctgaagaaatcctgcaattgagttagccttttgaaataaaaattatttcaaattttaaaatatttatatatgtttccacttaagatatctacaagcatttgtttacaaccttttatcttgctttgcatcttaaacatttctgtatggcaatttccgtgtcttcctatcatctcggccatcttagtgcaaagatacaaaattgtgtggcttattaagaaaaattacagtaagctaagggtaggttaaaggatctgaaacttagcaggaaaaatgagcagaaattaaagctataaaaggcatggatcctgctccagttctctttgcttctcctttgttctctgtcttcctcacttttaactgccttctttgtttcccttgaacctgactacttaaaaaaaaaattgaagatctaaattatctcaaggctaaaaggatttttgtttaggaagtatgaagattaattcaattaaataaatacttattgagcattgactatcaggggaatactggaagataggcctgcagaggtaagttacggtcaacctgtaggaggttccttgggttagtttgaaccttatcctttggccacagtaaaacatgtaacttttctttccccacaggaacatgtcagaatgatcacactatttgtgggtgtgtaatctggaagctgtaccatgattagttgaaagagagactgaaggc

SEQ ID NO: 3072 - DNA, 4001 bp, Homo sapiens
aggggggcccatgactttgagggtgtcgtgttgcatgtgctgggggtgaggacccggagactggaggaacagggctccagggcagacgcatgggcaagcagagaggacagcccatggtagatgggaggggcacacaggtgtgctgttttcaggttggcaggagaggaggaaggtgtgtgcggggaggccctggagactggaagaggagagggggcccagtgagtgaggggcccttgttagaacctgggggtgggaaggggccaaggtgggtgccctccaccccaggctgtccctcaggcctgtgctgtgccccacagtgcaggcatcacctggccccacgagagagcagctcataggtacgactgaccactctgcctggcatggtgggggcctgcctgtgctggctcaaaccagttttagccccatgttgcaggttagggagtcaaggctgagtgtctgctaacttgtcttaggtcacttgaccaggggacattggccctggagctggaagtgagaccggggaaacggtctcactccctggaagaccgccagggtggggagtgtgactcagtctcagagtttgccatggagttgtctcccaggctcagcaccccctcctggccctggggccactccctcattttaggggcccatgtatgaaatgagaatgtgcagccccttgctcaaaaaggaagagtttcaggacagtgacggcagagtgttactgggctcagggccctgagtgacggcaggggtggcatatctcatggcaccaggtgggcctgtggtgcctcctgcctccagcccgggggcctcagcctgggcactgccctccacttcctgcccgggccgaagggcgtgcccctcgctctctctgggactgagactccattttaaacagctttctggttggtttcaggtttgctgaggtttcttctccctttctgtcccccgtttgaggagttctgatactgattgttgcagtttggtctgagatgggccccgcttcactctctgttgccctttagaaacacaaacttcagtctagactcgctggttcctcacgactcactggtcagacggccaccgagccggtgtccgtaagaggaaagggcgtggcatgggccggggcctgggcagtgttgggtcccgtggctgtgggtgagtcgagcatctaggacaggtcataggcctctgtggaggtggcaggtgggcatgtgtggcctcggggagggcctgtggtggcagcgccatggccaggtggtggcagtttcctttgcattagcgccactccatccctggcccgagccctctcccaggcatctggctcctctatgggtcaaggctgcctaatggttaggggcagcggtgctgtcattgcagcctggactgccggcaagccacttcccctctgcaagcccccatcagagggacgaaacaccgctttgtgggctgctgtgaattcagactgtggtcagccttcgatgcacaggtcagaccatcaccaaagagatgggacgagacaggctgctgcctgtctccctgggcagggctccccgctgagtgtttcctctgcttagccctgggctcccagtccaccccacccagcctgccccttacctctagctgctggtccgggaggaagggacaggggtctgcggggcagcaggtgatctccgcccgtgggtgtcggtggtggcagggggctccttgccgctgtgggtggaacgctggctatttaaggagaggaagggagaccacagcccctctggccctgaaaggctgcttcattcctgaggggtcccttgttgtgtcgggctgctcctctggctgctgctgctgctgccaccggagcgtgaatattctagtgtgtccctagcccatgccccccgcccccagcttggccacatagtctgagtgtgtgactgtctcagagactcagagcaggcgggggctgggtggggggcttgggctggagctgagggacacaacaggacgtttcagaaggggatgatttcctactgatggggggcagggaggggccggctgtcatggcaacaggcggcgctcccaggcctgcgcccgcagacggcggagggggcctgtgaacggagggtgggaggccgaggagtcttgctcacggagtgagaggcgactctttgaggacacttgctgtagggtccttgtgtcctgccctgtataatgaggccccatttgggcacacagaataaatcatggcctttatctggagcgaggaacagctgcaggagcctcataatggggcgctgtcctgtccgtgaggatgcggctcagctcagaggccgggtgctcgccggtgcagctccccttctgcacggaagcccatgaatctgaccgctggcctggggctcctccctggggtggctccgggctggggtgcctttgaatgctgccggcggccgcctctgagactgagtgaacaaagttcatttctctctgtctttctgaaaatgatacatccagcaacatgggaaaccaaatcacccttcctggtttcaaaagactttacattttgttgtttaaacattgaaaactgtatgtatgtggctagcatttaaggggcagtgtcttaaatttgtctcttcacatcaccctgtgcagctgggattattgccccattttacagacaaggaaactgaggctcaggcaaatgaagaaactcacccatcaacaaacagtaggaagcaacagagccaggatttgaacccaagcacatgtcactccagaacttaggctccgtgtgtgtgtgtgttttgtttttctgctgcattttgaatttagaattcttagatttgatcctaattcaacctgaaaaagaattctgaaggccacctttagatctgatgctgtgatctggtctgttgagaagctgtttcccatctggacttccttcaagagagatgggcttcccagtttgtctggcctgagagccagctgggtgtgaggtgtctgagccggggcgcaggtctctttcctgttgtgcccgcaggcggctgtctggaagaactggcccaggctggttggaaaggtggtggcttgaagctaaccaccctgagcagggcatttctgggctcacagaccttctgttattggggtgatcactgtcgatggcttcaagggcattgaccgtggtgatggagttttgaggcgttgagctgattcctgcatctttgagacagaaataattcctcgtgggttgagtgttgtcctgacgctcaggaggagtcaccagaatgtggagtggggtcatggggcctacatgctgagtctgggacagaggcaccgcagggggcatgggctggccgccataggcgccaggtggggcagctcagccccagacctgctgaggaggtggcctggggttggggctggggcacaggtgtctgggcaagggtgggcttcagggattgtggtgatgaagactgaagccacaggccacaactgcttcccgtcgctggggtgtaagagccagggctctggccagtagtcgaggggagatgatgcccaccgaggctcccttcctctcttgtagagtcattcattcaccgaggcattcggtcagctgaccctgagctgttgccccctgctgggcacatagggtcttggggaggcacagagagccagtcggcagcttagccagtgactgctgggcctttgtttgggccccttgccctgcacacagctgatgatgagacaccccagggcagatggagcacagtgctgtgcaggatggagtccagacacccagcagtagcaggtcctggggtccagggagggatgctgaatgggtggccctggcatctggggtctgcccaccataacctgggtggggatcttgggtctgcgattggatctcttccgtatcctccctgaccagcctgtcagaggggccaacactgggcgtcgggcagccgtggaggctcgtgaggagtggagagggcccctggggctggggggcctgg

SEQ ID NO: 3073 - DNA, 4001 bp, Homo sapiens
gactagcctgggcaacatagcgaaaccctgtttctactaaaaaacaaaaatgcaaaaaattagccaggtgtggtgatctgtgcttgtagtcccagctactcgggaggctaaggtgggagaatcacctgagcccaggaggttgaggctgcagtgagctgaaatcctgccactggacttcagcctggacaaacagagtgagatcctgtctcaaaaaaaaaaaaaatttttaaaaaattaaaaataagtaaatggatgggtataccacgttcatagattgaaatatgtcagtcctcctcatagtcatctatgtgatcaatccaatcaagcattaagcaccatgccccaatggttttgcttcctgggtatatgtcaacactagcctattctcctctccatcacctcccacctaacccaggacaccaccttaatgtctgcaacaactttttagttggtcctctacttccaattcatcctcgagacttcagccagagaaagatttcaaacatatgtatgttaggccctgctttaaactatgtagtggctcccaattgcccaggagataagactcaggctccttaaacaacacttaaggcccctgcttacatctccagcctcagctcttgccatattctccaagcccactccccgcactgcaggcacagagagcttctttcaattccctgagggtgcccagcccctttcctgcccttggctgaccctcagctggtcaaggaataccccccctgccactctcacctgttcttctatgaaccccctgtctgagtcaatggattacctttgtgcagacggtcctccctaatggatcatgcatgccatgggggcaggggtgaaggatgtcacggccgcatccacagctatcagcagtgtgcctgccaccccacacatgtgcttaggaggcctcaggatggagggacagtgggcagcaagatggtggaaagtgatgcgtccacgcttttgatgtcctcagagggcttggagaaggagcaatgagcccatgtcagctgcaacacagagacaggcacacaatgccacagtgcccgatgtcacgtccatccaggccccagcccaagcctggctgctcctcccctggcagattcataaaaggactgggtgtcccaggcagctaagatgggcccagcctgagccttgacctgggtaagggacactgcatatgcccgactaaacctactaaacctggtgccatgttccctgggatccctgagtgagtgttgtggtcccagcccagatctgaggcagtgctgtctatgtggacactggctatacctgctggggactagagaggaatggccgggtttggggggcagcactaaccagatggcctgcaagctatggccagagccctgcagccatggtctgagctccccaggatgctacagagagccgagagctccggagactcccaggtcagcctgcctgccaaagcctttcctccaaagcagaaaagacccttcccctgatgaagcagccatgtgcagggcttcacgttgggatcaaaaggccccaaattatccccaggaataaaatgattcttccactagtttcaaaaggcagcaaaactagcttaagtctggcaaaaattaggtgaaaacaaacaaacaaaaaaagcaaaaccaaatgaagactccaagggacagcgagcaaggcgcaaccatgaagaaagcacgagcccaaagtccaggtctgaacaccttggccccagcctggccggccgcatcctgtgtcctgcccgggcagccctgccccgaccagccctctccctgactaccgctctcaggacacaggatctcgacactcaccccagaagctctgctgcccccaaggctggcccaagcctggaggactgtgaaagagaagacggcagtatcaggaccgggtgggacacggctcccaccaaggagtcaccaactgctgtgcctggagctggaagtgactaaaggaaggaacccaggcaggtggtgtgggacaaagtccacaggaaaggccaggaaggaggtgctctcatgggacacacccagtcctgcccgtccggatctgccagggccaccctttgtcccttcccaccatggtggggagacggtcttcagcccacatgccccactctgcaggcccacagtaccgccagggaccccacagccctggaccccatggaaaggccaggccctgccttcaagcattccggagagttctgggtgccttgccagggctggcgttggggagacaggattttatttttcagggtggctctcatttgctaggacacaggccactggggacccagcatttgtgtaagagatgggcccttctatagatgacacatttatgtccccgaaattcacatactgaagtcctcatccccaaggtgaggaatgaaaaggtggggacctctggtaggtgatgaggtcatgaaggcagaggcgtcacgaatgggatgagtgcccacataaaacgggccccagggagttcctttgcccttccaccacatcaggacacagagagaaggtgctgtctctggaccaggaagcaggtcctcaccaggcaccaggtcttccagtgcctcaatcttggacttgcagcctccagaacaaagagcaacgcatttccactgtttacgagctgcccaggctatggtgctttgttacagcagcccaaaggaactcaaagaggggccccaccaaggaactcaggcaggtgcaatgccagaagagccagtaaatcttacaggggtgaggaaactctttggctttctctattttcacgtaaaccagcagccttgcggcaaaacgagtggtcaataggagactgagtgactgcttggcagacagccaagagaggccggagagggcaggaagtgctggacagtggctcccagctccagagcacccctagaggcccctgggtgacacaggcaggggagcctcacggagatccaggagcaggcatgctggaggtggtgctgattacaagcttgctgatggtcaggcagcgctatcagctctgaggctgagaggggactgagggtttctagatggccttcaccctcaagcagagctgtgcgaggagccgatccaggctggctgcagccgctgcagagtccaccccagcagacgctgagagagaaatgtcactgggtggcctgtggccactggcccagaaagcaggaaaagtcccacagtgcctcacccctgcttgccttccttccctcctgacaccccaggtgtctcccccaagccgccaggccaagggcgcttctccccgcaggtgttcccagggttatggtctacacagccactgctgagagggtgcagccagcaaggagtaaatacgctggccagcaggtgtgagccggggcggtagccccaagggaaggcccatggctgggctgtgggcagcgttcttgggggcagccttgtccagggatgccatggggtagtctgcctggggaggctgagccaggcagggcacaaagaccaggcgtttcagccaggtgggggcaccccggccaccgacactccaggcttctccctcaccaaccccacctcttccaccttccctccgaaataccttgcacccaaattctatgtctgcctctgcttctggagaatccaacccccattggagaagagagtcactaatttgggatttggaactgggtcactcacggcccacgggcaatgaggacccatcactggtcaggggagatagctggcgcctggcacaaggtggtcgtcctgtccagtccagttgtgaaactggttccagtgtccagtgggaaagttggggaagggggtctgctgggggccccagctgctgtttgatgaatgaacagacacgagggcctccaaggaggaagcaaataaggcgcaggtggctgaggcctcactgaggtgccctggctggagtttggagaagttgggcggggcgcagcactcccagctcctgatcaacacctagccaaggcc

SEQ ID NO: 3074 - DNA, 4001 bp, Homo sapiens
atggccagcacagatgcccacctactgccccagtcccgcacaggaatctgtgtccaggccgtggaccgtagctggcctcccgcctcagctcctcaggcctgtcttcctcgacagacaccagcaccatcagcctcagggagctcccgctgccggggaccgtggggatggggcccttccacttcctgcccaggaggctttggggattggagccagcagcacgcctctgaggccccgcttccccttctgatgacaaggtcaccctcggcttctgcacacaaaagcagaaaagtgccctttgattctgcactgagtgatccaggagagaaacctggccatagacgggcgatccagccacaccagagcccctccccagcccttccccctgtctggacccgggacccgcccagaccccagagtgcctggctggcctgggattgagaccacaggccccaaccactgctgaagacgtgggggcacgcagtgaggtgcagatccctgtggcccaggcaccagagtcccccgtacctgtgaccccactgggcctgggccccacacagcacaccacaccccaggacccaggatggggctgtgagtgacacgagttcaccaaagtagctgctcacctcggggccacagcacggggtattcttcattcttgtttttaaatgtcacatcccacactccaacaagctgctacccagacacaggctccaagtcttcatcagcctcagccacccctgagaccccaacagcctcagcccacctgagaccccaacacagcctcacctcactgagactccccatcacagcctcaccccactctgagaccccatcacagcctcaccccactctgagaccccatcagagcctcaccccactctgagaccccgtcacagcctcaccccactctgagaccccgtcacagcctcaccccgctctgagaccccatcacagcctcaccccgctctgagacccccatcacagcctcaccccactctgagacccccatcacagcctcaccccactctgagaccccgtcacagcctcaccccgctctgagaccccatcacagcctcaccccgctctgagacccccatcacagcctcaccccgctctgagacccccatcacagcctcaccccgctctgagaccccgtcacagcctcaccccactctgagacccccatcacagcctcaccccactctgagaccccatcacagcctcaccccactctgagaccccatcacagcctcaccctgctctgagaacccatcacagcctcaccctgctctgagaacccatcacagcctcaccccactctgagaccccatcagagcctcaccccactctgagacccccatcacagcctcaccccactctgagacacccatcacagcctcaccccactctgagacacccatcacagcctcaccccactctgagaccccatcacagcctcaccctgctctgagacccccatcacagcctcaccccgctctgagaccctgtcacagcctcacctcgctctgagaacccccgtcacagcctcaccccactctgagaccccatcatagcctcaccctgctctgagaccccatcacagcctcaccccactctgagacccccaccatgcccctgccccgctgggaggcccctagggcagtgggcggcactgacctgcaggcagctttggcctcccgggtggagtgtgtgacccccgctgccaaagcctgcacagtggctgtctgagaagggctgggggaagtgaagctggggtgagccacccctcagggctggtccctgactctgcccctccttaaggtgggggggcgggcggctgactgacggcagcaggtcaggggtaacaggagttccccactgctcctgcaccagccccagctagagggcgtgggggatttctgggagggaagtggggtgccggctgcctgtgctgacacctctgaagagccagcatccttgctgagggcacacatttgttctggaaacagcgtgagagacagacagcaaaaccagagacgctccagccccgcccacggagccttcctcctccccagcccacttctgccctgtcatctcggaaaccttcccagggcccagccctcccagggtctgcggtcagctcgccctccccagcgcctcatgcccagccccaagacagggtgcagcacgcacactcatcctggttcatgcagacacgctccgtgggcgccttccaatacacacacacacgctggcacacatgcacacacacatgcacacgccaatgcacacaggtgagaggcacacgcaggcaggctggctcctcccctgcttccccccgacttggccaccggcccctcctccaagcccaccccctcagaagcctacccagaccacccctatctggtctagaatattctccctggcccccaactcctcagcggacatcttccttctgagctcatggtgggggagcccgtaggcccaggctgcgcccccatggtgcagagcacccccttcctgggccctgtccaccctgagggcaggagcctcgtctcctcaacgtgggccccacagcccctgaccacagcctctccctcctcaacggctgggataggctggggagagcttcagtttcacccctccccactttacagcggtggaaacggacgcccagggaagggaagcgcttggcccagcgtcacacaggtggtggcaggtctgagaccagtgcctgggcctcctgagccagaccagggctctctacccagaggcacgtgaggaagccctggctgggcattggtccttctctgctgtcatcccgggcctggttcctgtccctttcttcctgcttcctcctgctgtccttcctgcccttcctcctgcttccccggctgtccctccaggcccagtccccagtgtgcgcccttgggttccctgcccagtctccatgggccatgatgttcattggagaggggcctcatcctcgggcaggaggctcagatttgggatttcatccatccctcactctggccacagggtctggcctctggggtcagcagaaggcacggcacctgatcagtccaagcccggccgccgtcaagcagggactggaggtgcagggcacggcatctcccaggagtgctccttccacctctggcagatcagatggtgccccaagcaggcctacccagcccaccagagccagggccctgcagagctcccccaccccccccaccaccaggccagccatgaactccaccgtgccccctctgctgggcatcactcctccccagcagtggcctggggcaccccgtccccaccaggcctggcctccctgacgtggcctggcacctgtgctcctcacacactggaagggaagccccactgggcagggccacatggtcccagcggattcttctgggctgtgtggacttggggaagaaactggacatttagagactctgactgtctctgggaagggccccttgccaccaggttccacctgtgtacaggaaacgctgtccccagcccaccccctacctctctccatctgccccttggctgtctccgcaggcacttcagggcagtcccacccagcctggagcctgggccctcgtgctctgccccctcccactcaggcaggccttgcccgggcccctccagagcgctgtttctctcctagctccccgctcacccccagggcccctctctccccaaagctgcaccctcacgacctgtttgcaccctcacgacctgtttgcgccctcacgacctgtttgcaccctcacgacctgtttgcgccctcacgacctgtttgcgccctcacgatctgtttgcgccctcacgacctgtttgcgccctcacgacctgtttgcgccctcacgacctgtttgcgccctcacgacctgtttgcgccctcacgacctgtttgcgccctcatgacctgtttccagcccttcaccctgtttgattttatcacagaacttattttttaagta

SEQ ID NO: 3075 - DNA, 4001 bp, Homo sapiens
ccagattttctggatcagataaacaggccgtcctgccaggttgctctggtctggtaaggaacagacccacagtggcagaaacccaagccctggggagtgctgagagctcccatgtcttaagattgggtcgaagaggctccaaggaataaaatagcagcccgagagtgtgtgtcgctcacagcctgctttctccaaaggaggagaaaaatgggaacaaaatctaattgcacaagaaagtcttccccgggtaaaagagctagataagacggttccctgtatctctgcagaacttggtcttttgcaaaggactttcacctgtcctgcattacctaatttgtccgtcatattctctagtattattgtccccattttaccaaagatttttgtgacttcccaaaggtcacagcagtgatgttctggaatatacccaaaccttctgggttctggtctcgtgctcttttcaccataatctaccatgaatccccgaaacacagagaagaaacattcagagacccagagcaatgccctcatactgctacaagactcttccaccttagtaaacttaagtgtgcaattctagggcaagacttgccctggagagggccacaggcagtggcacgggtcgtgggggaaggttgggaagctgctcacgtgttgcccccgacttaggactcactcaggaagatgatggtctgcctcctggcggtcctgctctcttcgctctcggacttcctcagctgcggaggccgcgtgcccccggccagcgagcccttctggcttttcatgagcacctgcatcatgttccagcacatgaaggctacggagagcaggaccacgaggtagaccacgaaggcgccgaagatgctggactggaacacggtccagcggctggagaggttggtacagatggacatattggaggtctcgggctgctcgtggtggcgggtgctggagcggttgcaagtgagaccccggtggctgggcacgttcaccagggggtactcagtacccatggcaaacagcaagggcagtgccaccagggcggaggtgacccagacgaagccaatcagcagcttcacctggcaaggtcccgacacagccttgtacctgaaggggtgacagatggcgatgtagcgctcaaagctgagtgtcagcacgtgcagcagcgtagcgtagctgcaggcctcgaagaggaaagtgtgcagcttgcaggacagggtgtagctggacgtggtcaggggattccagatgatgctgtagaactccatgggcatgccgatgaggaacaccaagatgtccgagcaagccaaactcaccatgtggtctgtcacctccttctgcaagtatcctttcttctgcagcacctgggtgacccgaatggtggcgctgttccccagaaggcccatcacgaagatgatcaggtacaccagaataagggtgattttgatccaggtggccacctcaaactcggggacatgactgtgatcaatgatttgggagcagtcactgcccgggaggctgggtgaagccatgagaaagagcaccaggctaccaggtccaaagactttctcaacttccctttctcctcccagcagcgtccaaaattcttggctgcaaactcacctgcgtgggcgcacgattttatctcactcgagttctcctcgcgaaggtaacttagtatttcaggtgctttcatggaaacttgctggagcagcccaacctaggagaggcccaggaggcgcctgggtgttgaggtttgggagtgtatgtggctggggcgaggcggggagagggcggaggaagaacgttctaaactcctggctggctgggagtgagaccgcagcacctggcgctccgcctctgcccctcttcgccgagggcgcactccgcctcgcagcactcctcttcctttccagctgccggcacttgagagccccggtccacattcccagagcaccctctcccgagctgcgggaggcggggtggtcagcgattaatcattaaccacagcggattgtgctcagcggcccggctgcagacccagcccagcggcggggtttgactcagcacataggcacggtccctgaaatcagatcgtggctctcgagctacgagcgacccacccccgccccaccctccgtcacccaggcggcagccgcagaggcagctgcggcgctccaacccgacaagcgtcccaaggaggtgcagccccggggaagctggcgaccctcccgagctgggagaaagacaaacttcctctcgcccgcactgcccccacgtccaccgctgccctgggggcccccttcgaaggcgaggtcacggcccgtttggtggtggcttgaccggggcgtcccagaggagccagcaagccctcgcctcctctgtggggtgtttgccaaggacagctgggctctgcgctgcttgcagccgctgctccaggaagtcggccccaagcaggcttgcaggattcactatagaatccctgcctttccccagagcctgccggtgttctgcgcagggccctgcctcgccttcccacggagggacgcgaagaccccggggtctcttctttcagtttcgctccaaggtgcagccgctttcccggcagcgggacgtcttttaattggggacatgtatatggatgaggatggcactccgccagcaagccccaggtgggaagcatgccctccggagggagctgtgcctagaacgtcgaagacagcaggaggagctgaaggctctgacaaggccgtcatgtaaaaacagcattaaggatcatgaccttttccctcgaatggacccattttcgtcttttaattccacaatcagagggaatgagcaatgaagggggaggaaggctgccttatgcgttctaggatgtttagcacctgcatacacacatccatagggacagccaaatgtctccagacattgctaaatgccccttgccagggagtggcaaagtcaaagtcagaacctctgcctcaaaggaagaacatggatcccctttatctgtacattctaggggcctagcacaagccctctgtgctgaaaacatctctgaattatcccaatcgccacatcgatgcaatcattttaaagatgaagcaattctgctgtctggaggacctatgcttccccaaggccataaaagagtgagtgagagcaaggtcttactcagatgtggaatataaaataaagttaaatacatagaaacaaagagtagaaaggtggttaccaaggcctgggagggagaggaaatggggacatgtaggtcaaaggacaaaatgaataagtctacagatttatcatacagccacaggacaacagttaataatgttgcaatgtagattgaaaatttgcagagagagtccattttaggtgcaacacacacaaaaagtcactgtggaagatgacagacaccttactttgcttgactgtggtaatcatttcactttgtatatcaaaacatcatgctgcacaccttaaatatatatgatttttaaaaaatggttagtgacagacttggaaattaatccagatcagtctgacccctgagtttgtactcctaattctgggaatgcagtaggtgcttaggaaattcatcctgaatggtgcacatagaaacatgggactgtacttttttgggggggggaggggacggagttttgctctttttgcccaggctggagtgcaatggcgccatctcggctcactggcaacctctgcctcccgggttcaagtgattctcctgcctcagcctcctgcgtagctgggattacaggtgcgtgccactacacccggctaattttttgtatttttagtagagacagggtttcaccatgttggccaggctgctcttgaactcctgacctcaggtgatctgcccacctcggcttcccaaagtgctgggattacaggtgtgagccactgcgcccggccaggactgtactttctgcacagtgcactggagctattgtctgatgacctcaaggattatt

SEQ ID NO: 3076 - DNA, 4001 bp, Homo sapiens
tggcctcagggtgcagggacggggtgggcccagcaggtggggggcgctggggacatgcaggagttcccggatgtgcttctcacttcagctgggctgcccaggaccttctctgggcttcaagcctctgaggcctcccatgcgtcattgcagggagctcaaagcacagaggctcactctgcttccccgtgtgattttggtttctttctagaaaagatacttaggcatgggaagaaatgcacatctgatcaacataaagaacctcatgtgagtccccacacaccacaaacatcaatagctgaagaaccctggtgtcaaacaaaatgaatgaacacccaggagctcacacctactggggtttctcagggtttctcttgagcaggtgcagagagggctcgcagggcaggttgaagctcttgtgactgaccagtcctcctgccccacactcaaccagcttcattccctgttgccctcctcctccctttctgcccaacttctgcactccccagcccactccatttttgacttaatgacgttgcagttcccatcagccccatatttggctctctgcaaagagaaacaaaaataattcatcgtgccaaaatttgaaatttgggagctgcagctcatctgattacaaatgagtacctttgtgcttaaattgccaccacaaagtgcagactatgaccaacatgccagggaacagagcaggacagatccaccctgggactggggctcagctgccccttctctgtggccccctgaccccctaaaccgcagactggttttcattgcacacgtagactgtgcttggctggattctccttcggatccgctcaggcactttggggaggatttggaaggtctggggcagcaactctatgcaggcctcgcggaattttttgattctccagcagtagacgatggggttgaagacggacttgaggtaactgagccacaggacgcaggtgctggtggcgtagaaggaggaaccgcagtaaaagcgctggctaaacacagacaggaggctgtagacggagtggggcagccagcagagggagaagcccacgaagaggatcaggatggtggtgaaggccttggtcttgaagctcaagtccacgctgacctgttgctgccgctgcaggcgccgcaggcccgccctggtgagctgccgcaggtccaggctgtccgactggttgtgcacgcgcacggcgttcttgcggaccgtgttgaggatgcacatgtaggcgcacagcatgacgccaaagggcgcgaagaacacggccaccaccaaggtgaccacgtaggcgcggtcagcggggagctccgtgtagcccagcacgcactgtggggcccgcgccggcacctccaccagcgtccagcccgtgagcgagggccccgcgatgcagaaggacagcacccaggagaccgcgatgatcaccttggccctgcgcgggttcagcttgtcctggcgctggacgatgatgaggaagcggtccacgctgatgatgagcaggatggccacgccctccaggacaaaaaaccagtagagcgtggctgagaggcggcagaagtggtccccaaagtgccagcgcacggtgatgagggtgacggcggtgaagggcatgcagcagagggacagcatgatgtcggagaaggccagggtggccagcagcaggttgatggccgagcgcatagccggcctctggtacacgatgatgcagaccacagtgttgcccaggaaccccaccacggtcatcagcagcatcactatggccaaggagatcctgaggggtgcgggcaactgggtggaccccgagtctgaggcgttgctggtgttcagcagcaggtatgtgtaagcctcaagggacgtgctgttgcaggccatcgtggagagacccttggagctgggacagaaatggccgggagggctcccctcagcacttgggtggctgccattctttgtctgctggctgcatcttcctggatgtctgtggacctctggggcactggaatggtcttggggagaaatgtccgtctttgtgagcactagctgggatttgcgattcatggatcacatcctaagcatctctgtggagagcgactctgtgcacagcttcgtgcttggaccctctgtagtggacagcaagcaaaagtacaaaagagaagggggttagagtttccaaacgcgttgaagaaagcacgcgtttaagctttacaggtgtttctaaacaagtttatttaccacgtgggacaaagcttgatattcacaaatactgtctgagtcttgtcaagcagcccagaaaaacctaatcagctatcttctgaggaaactgaggaagtacactttgtagttagtgtttatgtaataacttgagttttcagcaacctgtcggaatgaagccttggtctagccaactaacgttagaatcctgctccacaagagaaaggttttgcttgtttcattctctgctatctcccagtactgacaacagtggctggcatgcagtaagtgtccttgttgaggacacttggatgcttgttgagtagatgaataagtgatagttgatgctgctgctataatatttgtttagctttaaaaaaccccacttcatcgaggaatgactgacatgtcaaaagctgtacaaatttacatctcaatataccagaaacccatcaccaccaaggccaaaaacatatcccactccccctgccaaagctctctcctgccatttttctagtattatcattttgttttggtggtaagaatacttcacctaagatctgccctcttagcaaattttaagtatacatttttaagttttaattttttaaaagaaattgtaagtctgtttgtttaactttatttgataagtgtaaattcacatggataagtgtaaattcacatggagttataataataaatactatggtgaaattctgtgtgtccttcacccagttttccctaatggtaacatcttggataactgtggggctgctatactattacttctggaagcacagactgggagaagggaactttccccaaaggtaaggccttttaaaatacaatgttagctgggtgcagtggctcatgcctataatcccagcactttgagaggcagagacaggaggattgcttgaggccaggagttcaagacctgcctgggcaacatagagagatcccatctctacacacacaaaaaaatgagccaggcttccatctatagtccctgctactcaggaggccgaggcaggaggattgctcaagcacagaagttcgaggctgtcgtgagctaagaaggtgtcactgtactccagcctgggtaacagagtgagaccctgtctcttaaaaaaaaagtaaatgaaatgagcttttattccttacattcttgataaacttgctttcactttcaaaaagataaatataattttaattttgtctcactgatgtggcaagagtgtgttcagtagctcaggtctgaagtcacatcgcctgggctgggggaaatccagcctgcgccatttatccaccctggacatctggctgttggatgcacctcttcttgtaagaaatttctcttttctaaattccttgtggtcattgttacagataactcacactgagaggaatgtgggcaatgtaagaagccaggaggcctcagagcaggcttagaggacctgggagtggcagtgtcttggtgatgctatacttcagtttagacccaaccaatccttggtcttccttcccaaacacacccagaatgggttcatctctcagtggtgggcaccagtatccaaactttttctgagctataaaaatcagaaacctggtgtgttaatttataagtgggaattatctctcattcagaccaaaattatgacccttcttcatctcaattttctgatctgtgaaatggaggtaattacatatttacctccagagttggtaaatataatgtgcaatgtctggtaaaagaagggcattaataaattaactccat

SEQ ID NO: 3077 - DNA, 4001 bp, Homo sapiens
acaagcaacaagaagatcacaaccctaaggagggttgcaactgagaaggtggcccttcctgcagctgccaggctgttatctgcacagagcattgcagcgtgagccacctcagagatggcagggccagagcctaaaaaagcagcattggcacagccgcagggatggatttgaggagccctggaatactcccccaaaaatgccgcagttagaatacacagcgtatccaccagtaacaccatagtgtgaataaagtcatccgcctgtgcctgagctgggcttctgggggccacgatagaagaaggaacaggacacagaggggacagagcacatgaccacaatctccccaatgcctgaatgttgctggagcttgggctggggggttggagtggggctgggagaggggaggggccggcttggggacgtgaaaggtggccagcagtgtgctcagtgatctacgatgggaactcaggacactcctaggagattgccctaattatgcccattttacagataaggacagtaaggcttagagatgttaaagattctacccaaggtcaaaaaggccgtgagggaccagctggaactcatgttctgagtctctcctcctcgctcaccctggcccccatcagcatcacaagcaagagcatctgggatccaggagttgccaagccccctcctcacttctttgcatgctcatgctcctctttctccttggactctctcctccactgctaaaaatcccacctcttccttgaaatgcccacttcccaggttcacccacatcatctgatgtggttttcccagtgcagtcctgagtgggtgccttgaaaagtcctctgtgtatcccagggggagcgtgtccctgctgtcctccagcaaccccaggaccaggaccatgtccctttcacctttatcaccgagcctcacatacagtttgtcgttgggaaggtcttattgcatgaaagagggggtgaagaaatgacggaacaaatggccaggtctgctgcagctccacagtgactggtgctccctttacagctgggacagccgctcagaaccaaaggcaaaccttgccttccacagagctgtgggcggcactttgccctgccctgtcctctcatccccactgcctcgggcagcacaaagcccaggtgaagccaggccagccagacatgtcctgactttgtgttctcactctcagggaagaatctagaatgttcagggttctaagtgctgctgtgtcttcccgcccagcctctccaagagacacttggctagggttagagaacaatgcagctataatgtaggatagcaaccagggctttcctctccatcatttactgcccttgagcgccccgtgaggaagaaaccgtgtattgcctcatgccccagagaggtaaacggaggctagagaaattacgcagctggtgagtgggtgagcctgggctcccaggctccttctggtccccagtaagcacttgctcagggctgcaggatgatccctgagagtgtgtcatctcgggcgcttggtggtttcccaacaagattctggggaatgggcggcgggcttggtggagggcggtggcacgtgagctacatgccccgggaaggctcccaggctgcctatggggaggtttcccgacccgacatgatgctgcaaccctgagtcagatcaggaggaagttgagggttcgtagaaaaatgtcactcgtaatcggggacaaaccaggtctgcctgccgctgctgctgtcacggaggctgcctggaggctgccgctgccctgacacctgggactgctcgctgagttgggacaggtgtgcacaaagcccaggcccacacaagccccactgatcttaggagagttacctgcagtccacaagagcaaggtcaggttggaggctccgtgccttagtttctctaaatggcccagaggctgttacctgttggtggtccggtgcagctgagagggctgagagatgtcatttctcctccaggcctggctgtcagcctgttctggggagagtcacttcccctctctgggtctcgacttccttgtgagtgaaataaaggggtgggaccagatgctctttgagccgctccagtgtcaccctgtctggcttaggggctcttgctctggggtctacagagaggctgtgtggaactagagtgtggacatggggagcagtttccaggaggagggtctacactctcccgccctcttggaagatctgcacgcccccctcccgcagctccaaaaaacaaaacaaaaaaccaaaaagccaaaaatcacactgcatgtgtcaagccctgggaagcctctggaggaggaagcctcctacgcaccccagacaccctaacaggggcaccacacaggggcagccattctcagcacctgccaagggccgtcgtggcttccagcactttgggggtttaggatttgaaactgctgcccacagaaaggaaaggaaggtggtgctatttagtacttgcaggttaggacttgcgtgcctagcgtcggaggagacctcagccactgcatgtgtgtctgcaagaatggtcagtggggccccacaggttccccagcctcggcttctctgtcccaggcctgcacagagatttggggcagccttgggcctgtggcttcctagggccctgcaagcagagatttccctggcatctcccaccttcagggctgggagggctgagactcacccgtgggcctgggtggctcttagctgggagccctcatagattccagcccatcaggaaagtctgggctgaaactaccccggcagatgcagctctcatgccctggaggtgctgggaggccctgtcggaggaccaaacacaagcaatttttaaaagctatgcgtgctgggactttcaggtgtctacaggaatagaaactactcctgggttttttggatgattcatccaacacatgggtcccctctgtaaataacaccttgcaagtcactgcaggggaaccacctggccctctggagctgggtcttcccactgtctggtgaagaggttgatggaaccatgacaacttttaagctctcacctgggcttgtgcgatgggcagtgccaagtccactgcctgctccaggccgtggagccccaagctggcctgggtgccaagacagggcacagggcagtcctgcccccagcgaggcccccctactgggccaccagcccaatctaagccaaaggctggctactgggcaagggggggcagccaggcccgcaccctgggtgcgggaggaggccaggagcctgctgggacagtagcagggaggaaacacaccggtgtctggcacccacctccatacccagagcctgcaatgtgaggccccaggaaggcatccacactgagtggcctgcagggagcagtgtctctgctcagccccttctcaaagggagccttgtctactcccattctggctaccttctttttttttttttttttttttttttgatacagagtctcgctctgttgcccaggctgcagtgcagtggcactatcttggctcactgcaacctccacttcccgggttcaagtgattctcctgcctcagcctcctgagtagctgggattacaggcttgtgccaccaggcccgactaacttttttcgtatttttagtagagacaaggtttcaccatgttggtcaggctggtcttgaactcccgacctcgtgattcacccacctcggcctcccaaagtgttaggattacagatgtgagccaccgctcccggccctggctaccttcttttaagaaatgaatatttctactttattgctgttgcaatattaaaatttttaaatttttaaatttttgaaaacatgcacatgattcaaatacatatgtaaacacatataggaaaatatctgtcccactcctaaatccagctctcacctaccccccagggcaccactgttaagtttcttccagagtttctgtgcccgcccgtgtacacctgagctcttattttct

SEQ ID NO: 3078 - DNA, 4001 bp, Homo sapiens
aacaaccctgaaatacttgatataacatctccattttgcagatgaggaaaccaagtcaaagagaggttatctaaagtggtggaacatggatttgaatctaagcagttgctcttccacactcttcaccaccatgctaacccgaacaacaaaaaaacctttttgggaggcatccccaggtcagaagtattaagtggttattacacaccaggcacctattctagaggctttacataaattatcaagctttatttcattctcacaataatcctatgaataggtattgcaatcccttccccactgaaactttctggaatccgaaattctgatacacctatatagctatatctacatctatgtagatacagatagacacacacacacacacacacacacacacacacacacacacattcttctatgtatctaactgtagttcacatataaagtaatcataaatcactcctattgagataattagaaaaaaaggaatcatgggctgggaagagaaaagggagaaaaagcagaggacagaaaagacgaaaaggtttgcagaaaaactttagtataacagaaatcaagaaaatggagggaaagtaaactcaggtcttagtagtaactcctgagactttaagaaaaaggaggctgtgaccataatttggaatgacatgatgacggcagaaaataaaagtggttttggaaggggaataaattaatactgctttgctactcataaatattcaataaagattacccatgttatttgcaatgcaaacatacaagctactcttcatctctgggacggagaataggttatagaagatgtgattaaagtcacaaaatcagaaagattttaagctggaacaccagtcttaagcatgcatattagctgcagtaagaatgaattcacatgcatattcttacaaatgagacatcctgaagtaactagcaagcaaagaatatggatgaaaatttattgtataatttgagtggcaatgatttttcattaagatatgtgaacagcctctgatatatctagtgtgctgttttaaatttttagtgaacattaaaacatgctataggggctttcataaatcaactcacgacctgaattcttccaaccccattccccgcgcgccccaaaatgtcttaggttagcattttcaaagcctaatcctcacagagagcaaggttctgtattattgtgattcccattgtatttctatcgatcaggaaaacctcagggaggttagataacttccccaaggtcattatctgatttcaaagcccttgctctttctatccagtagaactacattgaacccggagcagctaatgggatgggaagacctgagtcatttgatgggagggatgaagaggccagggagcccccagcctgaggacagagtgggaaactgcgggcagggaaggtcgacccccccgtgaggggctggcggtgggtaggggcttcccggagaagggtgaggtgacggtaaggagggcctaggccgggccaggtaagcttgcaaaagaatgccgcagaggggtggtgggttaggagggctcagccagggtaggggcggtgggtgggtgggtggggggggttccacggccgagcagagcctgggaaccggcagggacgggcgagaaggctaccctgcaggccgcaccaggaagacaggtacgcggagccgggcctggcccagcgcagccgcgctcctcgctatcccgccagcctccgggagccgtctccggcatcgtggggttgtcctcctccaggggcccgcggcctctcacctgccgggtggccgcagcgccgcccctcctccatctcgcagtccggaccccagctccgcctgccgctctggatgatgcaggactagaggcatcatcgccatcgccaccgcctccgcgcatcccgggagccgcggcaagacgcgggcgcagaggcgcagtcacggagacgccgagggcaccgccccctccgccggacacccgggcctggcgtcccgcctgcgccccgcaccctccgcgcctccgtcgcctgcctcctggggcccagagcccggccactcccgctgcccgcctcacgaggggcgcttgagccaggtttttcaggctcgcagttttgctgtttggggaactcaagctccctgaaatagccaaaacctgaaacgcagagcaaggtggagtggtaaggaaggaagggaaagataggggtactgatggcacgcagggacccagggaggtctttgcgggcctccctaggctgcttaccctgcccgcagcccacctcctcctcgttccccgcgcttttaagacgtcctaactagctcctcacttaggctgcggctaatatttttcctcatgaattaaattggcggcggcttccagtttggaactttgagacctagaatttacaaatcaagtcattgtaatagaatttaaattaaacctatttgaacttacctaagctctcttaaggtattagtgaattcactgagggaactcagcaaggggactaattggcaggaaacatgcaaagcataaagaaactacccatgcaaataaaacgaccaagcccaggaatcatggatattgatgtattacttaatactatgttgaatgtaaaaaatcttgataaatcatagtgcaatgtacaagctaattttattaagcacaaacacaaaactaaaattaccatcctctctcattcttctagaattcatacatgtccaaaataatgaactcctaagataggttttagtctgaacaatcaagtaacattcctaagtatgtctgctatgatgggtacaaaataaaaccagttaaactcttctcccttcagtatcccaacctggctaactaggatcttactacttttctaacctcagggatgctatttagaaacagagaatgttatttgaatgccctttccttcattcactctggttaccagaaaagcaaagttgattccgttcggatgaaatacttatactggattcttcattttagctaatggtttatctttttaaaacagaactagcaagtatcaagtaatttaattaatgcaatttcttcagttccctgtgctttcataaaaacaaaacaaaacaaaaacaaacgaaaaaacaaaaagcaagaaggctagataacttattattcagtccaggagttgagtatgccatcagaattctgtttagaaataacttcaagaaagttttccagttcccacatattccacttcccaaccacttgcaataaagcagttccagtatatgttatcaataatggtaaccatgagtcccagaaacaatccacagaaaaatactcattagcatttggagtgggaattctgatcaaaattatatacctctctataataaattagctactgcataaataaatgctagttcatttccaggcatttggctatatgaatggagattacaataggtttgggctgcattgagaccatcagagttatacctaccggagaaatggtctgaaactgaaaacaaacaaaaaaccacaaatcataaaggattctagagatctagaagaggaaatcaggactcatcaaagttccagaactagctagaaccattcaacaaggctaaaactagtatatctacaaaatccacaagtgagcgaaattggaaaaaacattggtagtagtaaaaaaatggaaaatctgcaaataaataagcagggctaattatagatcatgaattggctatcaatctgccctgacactggcattcttctaatacactcttattattgcaatgcaaatggatacatgtgcactttgaggaaaacagcaaatatgagagctgttaaaatgttctttaaaacaaaaaaagctcctcatctaggcatctctcactccttggaactgctccaacaaaagaagagttttaaagcataaaggtatgaaaatgtgcactgcagtgtaatctgtagtacaggaaactgaaaacaaccttgatgttcaaaaggaa

SEQ ID NO: 3079 - DNA, 4001 bp, Homo sapiens
ataaaacagaatgtaaaatataattgctgtcaggaataaaaagtgtgctaaggcgaacatgtaccactctgtgacaaggctcatattatataaagtatatagaaaaggtctgtgatgtactttctatgggtcaaaatacagtatgttaattagatacaaacaaatctcctatagttcctctctttctgtctctctctctctctctctctctcccctcccaccacccctcccccccccaccgccttctctctctcttgcctttaaatcaccaggcatagaaactccatcacttttgataattttcctgaaacagaaaaatagactatacaattactaatccaaacatcacctgagaagtcatacattgttatgcatccatgatattgacagtctctaagttgcatttagtgcattcatccttatgatattttactaatcacttttggaagttatgatttattaattatagctgtggttcatctcacttcaaatttcattcacaatgttgcccacacacagtctgttgatttttcaagcgcttatagatattaaacagcaaggcagtgttttgaggcggtaagttaatagaacttgctagtataaatgtactatagtccactggagagtaattttaacttcactgaagttggagcgctttgaaaatcaggaaaaaaaaagtaacatttaaatgtatgaatataaaggactatagatttttgtattgctgtaaccctttttctttccgaaagtatgtgcaactctaaaggcacttagtgctgaatgctatggagattgggaaaccctttaaagcctctattctttcctgccgaacagcaagactgctcgaatgtcaatccatgctttgcttctacagggtcgctgtaagactctatgtgggaggtgaatacatttatgctacgatttttttaaaatatataaaataaaatagagtttactttgtgaaaatgcatggccacgaaggaacagaaggtgatcagcctgcagcctgagctcctagtttcaccaccgatgggcagaggcgagagagatgagagctctcaatgaaacggtgatgctatttataaggcgctgtgagatcgcaatgtcctgctgatccggtaggagccagctcaaaggggattgtcttcagagacttttacaaacttggcccagctctgggcacatggctcaccccctaggaccgcctcctcaccccctcgccggctgcccagccaggacactcccccgcgccctccagggttgcctacctgtctgcagcacagccgcgggtcccgtccggaaggggcaggagcgctcgcgcgtgcagccagggggccggcgccaggtcgtgggcgtcgcccctcccctgggcagcgccacacacctgggcggccagcggcgaatcccgggcagccgccctgctcgcggcgctctgcccatcttgcagggaagtggtcattgtcgccggccggggggctcgggcgtcatgggagactcggcgcgtggggagaaggggtttgcgcggcgggaggcgaggtgccggctaggcagcccgagcgctctgcaggtgtggtggcctcgccgcctgcgctcggggccccggcggctgagacgcgcggccgagctatctgcgaggcggcgggggaggggagggggcggaggaggagggtggggagaggggaggagcggccggtgggtgggggccgcgggcggcgaggcaaggcgcggagggggcggggagggcgcgagagcggctggccggccccgcgcgtggcccggggcgctcggggccactggcattgctcccgcgccgtcccatccgggacgcgaggccgggaccgctgcctcctcaggtgggcaccggggcgcgaggctgagcccagggtctgggcggccccggcgccgctggaggcggggacccagccgagcgggcgctcccgctgggcttgccgggaggaccgcaggcgggataggggtccgcgcagccctgaccctcatacccttgcattctttctgctctgccatctgagatcacctaagctgttgctgggccgccatgacagtccccaccgggccaggaggccaggacaccagagggtttgccccagtccttccccacgtgcctcttcttccatccactccgcagccaaagattggggggttgatagggagcaaggagtccaatcattatagaaaactactgagattttgagaattctcagtaaagcatgagtaaacctgaaggtgtctggaattagaaagactattagttttatggtaatgagagaagcttacattaatgaattccaggttgccttacgctacctattccatcctctcaacagctccataaattagatgtttatctcattttacacaaaaggaaactggggctcaaagccatcgagtaccttgcactagtaacatagcactagtagctggtggagtcaatattccaacccagaagcttccttctcaaaaacccagactgttcgaaatagtaatgacattattatgctcaccctctgagatgcagcaaccctactctgaaatgctgggtgatcctgtttctgctcttccagtaagtgtgcccgtccctatgcaccgttgaggatttccaaatgtttcacagggtctttgttctttgaccaaattaggtaatatctgtccctggcatctgctttaccaggttttcttaatttcaacaacctctgcccagggaaaggtaaacactgcctccagaagaaagcagcagctcccctcccccatctcagtgcattctctcccaccgaggcaccgaccactggagaacccaggggtcactaattcccaacctgtgaggaaacctggggcactccgtgaagacagaaaatccttgagtcacagttcagggaatccaagttctttattttcctaatgtcaaaattaaggcccagaagtgacctgggtcacagcgggtgtgatctctgggatcttttataccaggggtccccaacccctgggccctggaccacaccataccagtccatggactgtgagaaaccaggccgcacagcaggaggtgagcggctggtgaaccagcattaccgcaagagctctgtcccctgtcagatcagctgggcattagattctcataagagagcgaaccctattggtgaactatgcctgccagggatctaggttgctccttatgagaatctaacaaatgcctgatgatctgaggtgcaacagtttcatcccgaaaccatcacccccaccccatccgtggaaaaattttcttccatgaagccggtccctggtgccaaaaaggttggggacactgcagtttatacaatactttggctaagctaggacaaaatggtgattctctttctcaggaagaaaataataatactaatcatggtgataactaacatttattgacacatgtgccagacaaagccctcactcacatccagttctctgaattacagattctatgcctgagtttaagtgaatttaatttaaaagcatacagatatactgaggttattccagcaaaaaacaaatgaggtatgtagttgcagacaacttgaactaaagaaacaaagaaataagtaaactttaatcattaacatcattatcccaattttatccagaactcttgcaggcagtcacttcttctaagaataatatagttgagcacatgaattagtggctgaagtttacactgtctccactcccaacaacactctctctctatctctcctcctcacctcctctctctctctcacacacacacacacacacacacacacacacggcgggggtgggacagagagagagagagagagagaaagagagcacacttttgattttttttttttcttggggaaagggataggtggaatctgtatatgtctttggaatcactggaaatgctattccccaatggtgcatcctgctccacatcctagcataattgccataatttcttaacctcaagaaagagtattccttgg

SEQ ID NO: 3080 - DNA, 4001 bp, Homo sapiens
tatgctccaggcttgcggtggtctcccaggaccatggttaatctgtgtgcttccctctctcccctgctgcctgggatccccaggagagcagagaacatgcagatgtacgcccttggccaatcacagtgcctaggaaatagaaggtatctgataagagtttatttacaaggtagtgtttgcattttacagggaaaaaaaaaagagttcagggcagcaagaagaaagaagatgaacaattccgacatccatatccaggcaaaatgtagacagcccagagatttcagagatttagtgggcacggtcaggaagtggggaagataaaacaaatcatgtaagtggggctaatgcaacctttttctatactcgtgaaaacccaaggacccaagccttcccatctagttaaagactttcctcagcctctccccttgaatcaccgaatcctagactctcagacctagaagtaaccaaagaactcaatcaatgtatttcaatcaacacacaccttatttctctattatttatttattattattttttaagtgtcatcctgtgtgccaggcactggaaactcgaagagtaaagtcctttccttgtaaaaatgctgtttaatggaaacagacatttagattatggtatgagaattaacttctaattcaacatggtacctggcccttcctgagatgaccttcaaaagatactgaattaaaaataaataaataaataaataaataagtggggtgaggtattttaagccacagtgatgaaaagatggaagggatgccattagctaactagaggttcaggtttcataaacttccagaagccagactagagagggaatgtggagctgacacaggagaagggtgcatacctggggggaccaactggccctgaggaaatgcagagactcagatacgccagacaagtgttgggaggagtgcacagcagcgctgggaccaggggtcttctgtgaaatcctgtctacagagcaggtagctcctctacctcccaccccagggccacatgcagatctcccaggagccaggcgttcaccccaggcaaaaaataccgaaagctcttctgatacaaattgaatcaaccaacaagaactagagccgctaacgcacagtctggcattcagaggcctccagaatgccagctgattctgtcctgagcaccccaaaagtgacacctgccagacaccagcgccccctgtggacacaacactcccagtcaaccttctctgcctcactcttaaacacacatgaaaatccaagggtcatgtagcacttaaggaaggaaacatgaaaacaacatccaggagaagaaacagaagaaaagacaccaaagcaatcagagaacaaccaggtatatgtgaagaagaagcacacatccccctctaattaccatcctcaggaagactgagggccacactctgtttcccaaccaacccaatcactgagccactcaacaatcacacaagaggagctctcacgggtgagcctgttgatctggctttactgctgaggggcccccaggtaaactgaagagctgtgcagaaaggctgggggtatgaaagccgcacgctccccacttcagcacacagggtcagcaagagttgcagtgatgttcccacatacagtcagttcagctataacgcttgttttgaaactgcaaatttgtacggacagattgacatattacagaacaatttgaataccttgtgggttttgtgtgtgcctggtgatttcctctgcaagaaacacaaaagtaagttcagaaaaatggtgcccaactgaccccagctgcttgagaatatacaaaaggcgcacacacaccagcctcaagcacctaccacctacctccagtcaccacacgtgttaaaagccatgtccttccacacatggtgtcagaactttccatagggctccaggtctctgtccttcttccatttggcaggtcctcaagagctgcaagccttccattgaaaaaactttatttcatttacctttgcactttgaggtaaaatcccatctctactgcagtatttatgtatctcttaaccatttagcatgtgtaaaacggtgctgccctttttattaggtttttatctttttaaaaaatgtgtcattgatgaagtttttgagagctgttgccctaagcctgtattcgtcataaaccctgcggtttttattgcccaatcttgcatggtgcaataatttttaggaacacatatatcaagttatagtagaattgattatgtgtttacatttctgcctgcaagctacaattttctcctaggggagaacatggcgggagagcatggtgtgcagattctagtttagaaaatatggtccacacaactgaatttcacaccagtcacccctagttcattgtttctggctaccccaaaacgttcatcaccggcttgcctttctccctgcactaagctagaatctcaaagaaccaattgttgggttttgttggtagcaatctgtgtatcatccattttttcctccatcaaacacaaaattaaattcaagcataaataatgaaattgttgttcccggcttctgtttacagagtctcagggacgctgtggagctgggtgtgcctgggtccagtccctgccccctcacccaccggagctgtgtgaccttggacagcctccctcactccctgagctccagtttcctcagccataaacagagataacagtgctgacttcaaagctgactttgtgaggattaaatgagataatgtagtagagtatttagtactgtggctggcacttcagtgttttcccatttatctgtttttttcaagatgagtgatctctttgctgatcataaacatattcctccatctgtcttgtgttattcgcctgcattgaaatcccatcccaatccccgtctctatttgaaagtggagcttaaaaattgcaaaaatgaataattgggatgtgcaaaacctcttaacttgtagcaccaagttttttgtctcatgttgatcagtctctctcttcttgcatttctctcccattagtttggagttgccattcattccttcatttattcattcactcaacaaacatttatgggtgcctggtatctactggctatgtgactgacttaacttcccagagcctcagttttcttggcaaaatgaagataataatacctctatcataaggttgttggaaggctttccatgacaccaggaccgtaaagcaccttttacaccgtctgccatatggcaggtgctcaacaaaggatatctttaagcagtatcatcacgatgacaatggacaagccatatccctaacagggcttaaacctggataacaagaacactgtttccactgcgctagtggggacaagcacacacatcgctgggaagatctgcaagcctccctcctcccacagacccaaacatgctgctgcaaatgtctcactggctacaaaacaatgagtctgattacgacccacagaaatgaaaaggcagcaaacttgtttaggtatgattcatcattgtctgctgcggcaatcagaagtattttggttgcttctaggtcagaatgacccagttgccacactttttttcactgctaaagttcgtaatgaacctttaaacaaaaactaaaggcgtaaggaaagataactactttgtggcttttgctcaaagtgaggacgttatcagctctgcccttcagaagcaagccctgatcaaggaaaccattcacacttgattttctttattttattggccacaattgaacataggtataattttcatgaacctccctcgctccaagaccagagctcctaggaagttgtctttcccatctgtttcccggcccctaccagaaataagtgccatgagagtgttgactgatgaagggctcctatacgcgggttgattttcaagcagttaagaagcaagaattaatgactcgaatatatgatctttgctaaactcttcaggaataaatgaacatttcc

SEQ ID NO: 3081 - DNA, 4001 bp, Homo sapiens
gccagcgttggctcctccacctgcaccctcagcaccatgggcccttccctggggatgagagcaggagccttctggctccagcccattccaaggaaaacattcttgccctggcctctccttagagcgacccctcccctcctcttccctccttagaatagaacagccaaaagtttgcccacaggtgaaaaatggatttctcttaaaaggctcggccgggcgcagtggctcacggctgtaatcccagcactttgggaggccgaggtgggcagatcacaaagtcaggagatcgagaccatcctggctagcacggtgaaaccctgcctctacaaaaaatacaaaaaattagccaggcatggtggtgggagcctgtagtcccagctactcggtatactgaggcaggagaatggcgtgaacctgggaggcggagcttgcagtgacccgagatcacaccaccgcactccagcctgggcaacttgagcaagacttcatctcaaaataaacaaacaaacaaataaataaaaggctctcagactagaggggttaagcatccaactaaaatcggggtctgaatgattttcctactcctctctgaggtcccttcactccacctgttaccaatcatgcaatgaggcacctctgtctaaatgaagcctccatctgtcaacaacagcgctgagtcccagaatgggctggaactcacttcctaagataacacttggctctgggtgctcctgggtgctgtacactcatcattttgctcagaaaaataaagccacagcttccgtgtactgcctacccttcagacccaactcctccccactccccggtccattcacagacgggcgtcaatacccatttcttcacaccacccagcagcacacatcaggggttcaacacccctgcacacgaacatggacaccgaggcccacgaggtgctgagaacacagcgctctggggttcccagttgcaacatccagctagatcaaaaccagcaggactcatagagaaggtcttacaggtctcttcaagttatgagataataaactcattatcattgaacttcaccaatgtcaaaaaaattctcaaacttgggctttgcaaagtgttcataatctgtctgctatagtggtaaaagcattcacttttcaataagaccaccaggggcttgattcatggttatgctgctttcaagctgtgtgaccttgggcaagttacctaacttctctgaacctccatttcctcttttataaaatggagatactaagaaccaccttacacggctgtagtgaggactaaattaacatgcagggcagttggcataaaatagatgttaataagttccagtttcctctctaaaattggaattaactgcccataattctaatttctagatgttaactaaagacttaattttaagtcttaagcttgccttaattttattcactatcacagagtagtttatccaatggaattaattaaacttctggcttccttaggagtacacctattgaaacgtgcctctctgagcagataatatatcatttagtctcttatccccccttctgccagcttcccaactaaacttgaagggctttgacagcagggactattccagtcacctctttacttcccatggtgcccggaacactgcaggtccccagaaaacaacccctaaaaagagacagtagacgaggaaaaggaagaccacatgcttaaggttacagagaggattgtcaagaaatagactgaggtcctgtctgaaagcatttggattagcatttaaagccccaggtgtaccaaataaacacatctgcggctttaatttaggcccctgggatgccaccgctgttagaattccagaaaactaattagctaattcccactgccccaggtattacctgaactcactttgttgttttctgctccaaacaaagccagaggggccagaggagagcccttcctatgggcatcaaagtacaagatgtgcgctttgattctttctccatgaacacactgctgctcagccgccccgtgtctgttctctcttcagtttactcttaagccaaaatcaactgctccctcttctgccctccccccgccccagcactttgctcatactgcaccctcactgggctctgggtttgttctccctggggccacagggagtgtgtcagtgtctacacctcccccagggactgagttgctaaatgcagcaaggaagctcacccatctcccctcttcccctcgttcctctcagagcccagaacagtttcttacgggagagtggatctgcaagggaatggcattgactctgccgatgatcccacgctgcagatcctactcgaccaccacccaggccaccccaagctccaagagcagatgcagccgggggccttcggggtctcagggctcaagtacagatagccaggtctctcccaagccacacatggacagcttctggcctgttctatgcctgccctgtgagaagcaaagaactttcctcttccagaatcaggattttgccttaaacaaaggtaaatgcttacataatctgaattggatccttggcagaaatatttcattaccacttgttgctaagggtgaaactgaactagacacagttcctgccctgaagaacctcaccgagacacaggaagtgcaggtcagcagtgtaatgcaaaatagaagagatgggggcaagaaggcctggagggaaacagagaagggaatggaaaattctatcaggtcagtcttggcgggcctcatggaaggctcagtcatcaaagttgagtacaggtttgctgtctgaaaagaaggggctttccaggcagaacgtatacaaggcatcggcttgacccaagggcgagacacctattgtgtgcctgggcaacacaggtccttccagcatgaggtgtatgcagggacagggggtaggagggcaacgaggggcccgttcagcctaagccctgctaaggtgtttgaaattaaccacgtcaagccaccaaaggagttaggcagggctgatgaggctgtgtttgagattcctgcggcttcctaaggaaggcttctaggaggatactgcaatagaccaagactcaaagaggactaaagactgcctctgtgcagggtgagtagcacgaggagcctagctgacctcgggctttggaaagagtcggaggcagtggtggtctcactgtcatagagaagagtagtgcatgggggtctgaagagagagctgagaggtcacgatgccaagtgttccgatccccatggcccccctctcacttgccatccactcactcgcggatgcccacagaacccgcctgtgcacagagcctcaagcggtgtgataccctctcctccagaaggatccatggcagagaaggaagggccatggtctggagtcaagtctataagagcaaaaccccaaccctggcttcctgcccggcctccctttcccttccctttctgcctcactgcctccattctgaatcacatccaaaacacaccacataccctcccacctggggttccatctccttctgggagatggccttctcctagaagccctgccaacctggcccttcagggccactaccctggccagccacagggacatgaccccaccccaaatctcactagaacaccccaaattccagacatcactgacccatgctccctcctcttctaacttccctacaactaaattctaactggaagaattccccagccaacacagaagcatggtgacttacttctggtgagtccaaagtttgagaaaacaagacttgaaaaaagcaacactctccggactgcgtcctcaacctgtctcactttcaacagctgaggaaggatgggaatggggtgctccagtaatgtggcaatagtcagcccccaatatatgacacggcaataaacgcattgagactgcaggatggtctcctataaactctttgacggtcctcccagcaggaaacaagacatcattctcatgtagattt

SEQ ID NO: 3082 - DNA, 4001 bp, Homo sapiens
gctcagtcatcaaagttgagtacaggtttgctgtctgaaaagaaggggctttccaggcagaacgtatacaaggcatcggcttgacccaagggcgagacacctattgtgtgcctgggcaacacaggtccttccagcatgaggtgtatgcagggacagggggtaggagggcaacgaggggcccgttcagcctaagccctgctaaggtgtttgaaattaaccacgtcaagccaccaaaggagttaggcagggctgatgaggctgtgtttgagattcctgcggcttcctaaggaaggcttctaggaggatactgcaatagaccaagactcaaagaggactaaagactgcctctgtgcagggtgagtagcacgaggagcctagctgacctcgggctttggaaagagtcggaggcagtggtggtctcactgtcatagagaagagtagtgcatgggggtctgaagagagagctgagaggtcacgatgccaagtgttccgatccccatggcccccctctcacttgccatccactcactcgcggatgcccacagaacccgcctgtgcacagagcctcaagcggtgtgataccctctcctccagaaggatccatggcagagaaggaagggccatggtctggagtcaagtctataagagcaaaaccccaaccctggcttcctgcccggcctccctttcccttccctttctgcctcactgcctccattctgaatcacatccaaaacacaccacataccctcccacctggggttccatctccttctgggagatggccttctcctagaagccctgccaacctggcccttcagggccactaccctggccagccacagggacatgaccccaccccaaatctcactagaacaccccaaattccagacatcactgacccatgctccctcctcttctaacttccctacaactaaattctaactggaagaattccccagccaacacagaagcatggtgacttacttctggtgagtccaaagtttgagaaaacaagacttgaaaaaagcaacactctccggactgcgtcctcaacctgtctcactttcaacagctgaggaaggatgggaatggggtgctccagtaatgtggcaatagtcagcccccaatatatgacacggcaataaacgcattgagactgcaggatggtctcctataaactctttgacggtcctcccagcaggaaacaagacatcattctcatgtagatttctccgattttccctagaggaactcataaactccacaggtgttactgaagggagaaaagctgggctgagaggcgactggtgtctaatttgtttgtctctccaactcagactgcctggcccacagccacagctcagccccgagctgctctacatctgtgcacagaatgtcagagagtgtttctttggagaatatctttaagtgctctcaaatggaactacagagccatcagctatgtcccctccgattgcagtaagaactgaatggaagagaaggaccttcagaataaagccagggaagcagaaaccactgaaaaccttctctctggaaccaaccaggcagggcccaagcagtgttttgaatctccttagcctatcattcataagaacacaaactaattatctgcaatccctttggatatcatttcaaacaataaaaataaggacacccgttcattaagtggacttgtctcggtttactgctcccctgcaccttattagaagggccaatgctttgccattattctgctgaacacaggccacagctgtcttcgtaagtcaacacaaacctctccaacccccaaagcaggtgctcgcttgcaaagtcaaataaaccgtaccttacaaaaagctggtcacttcaggcactccacagaccaaccagccaagaggctaagcccagcagaggtggaaagtgtgcaggggctcccgcctcctgggctgcgcctttgatctgtgcctggggatggaagaggatgcgtggggcgcgtaatgccctgctgtgcagagcctggctcgggtctgcctgacacccaggcttcctggcccctgcccggcagggagaggcagccaagccagccaggggaaaagtttcagagctagtatctgctcccagagctacaacaacaaccaaaaaaaaaaaaaaaaaaaaaattcagcagtagcccttccaactggagcttcatctgccccagcgcctgccgggtcagatggcaaatgccaccgtttcgtgtcttcttagccctgaagtgttttgctgggtcacagtgctctccacacaggtacataccaatctgtctaaccaccaacagttaaactgattctttttaaactacatggaagtttgtgtacttggactggagccacagtacgctgtgcaaagaacaaagggtcaggagaagaacacaggctttgtggtggaagacagtcagctggcagcctggcttgcctccgaaggactacaggtagcgtggacctaagccacataagcgagcacgtgccccttcaaacaactctgctgtgaataccatggaacatgccccaacaacaaaaaccccctggagaggcccaggaaatcttcaagaaaacaccagctattggctgggcacaatggttcacacctgtaatcccagcactgtgggaggccgagatgggaggattgcttgagcccaggagtgggaaaccagcctgggcaacataatgagaccacatctctacaaaaaataaaaattaactggctgtggtggtgcacacctgaagtcccagctacttagaaggttcaggtgggaggatcgcttgagcccaggaggcagagggtgcagtgagctgtgatcgcaccactgcactccagcctggatgacaaagtgagaccctatcataagagaagagaagagaagagaagagaagagaagagaagagaagagaagagaagggaggagaagggagaaaggaggagaagagaggagaggaggggaagggaggggagaggaggggaggggacacgaggggaggggaggggacacgaggggaggggagggggaaggaaggaaggaaaagaaagagagggagggaaaaagggagggacggagggaggaaggaaggaagggatggagggagggaggaagggagggaggaaggaaggaagtaaagaagggaaggaaggaaggaagacgggaaggaaggaaggaagaaaggaaggaaagaaggaagggaaagtgagagagagggggagggaggaagggagggagggagggaggaaggaaagaaagaaagaaagaaagaaagaaagaaagaaagaaagaaagaaagaaagaaagaaagaaagaaagaaagaaagaaacacaagctcctgtccagagctctctttacatccctgttgcaattgactcttacgaatccaggactcctgatcaaatcctaattcaaaaaggaaagaaaataaatcatgagagcccactccaattgtgcaaatacctttaactttgctttttctcttcttgctaggatcactaacttcctgcaaaagtgacttgaatatgacccagagggttcaaggtcatttatcttttgtaaaaaaaggttaaagaggtggattactcctcttggtgccccagtcagggaggagagttcccagctgttcctgggctcagtccccaaaattgccaggcgctaaagggtagaacttgtgtggtgggcttcttcgttcccaggctgggcagtgcctccctagaaagggcagtggagaccccacccatccctgcaccttcatcgccaggcaggggtggcacccgctggaggttctgcccgagcgagcatctgcagctctgaagcatccctagtgccagggctttactcgttggggaggcacactgtacgcggtctgtacgtggagtgccccgtgccttctgccactcagggcaccgtgtgtgacggtgggaaactggaaactaacaaaatacccagcaaaaaatgcatacttaacacagcctgcaataa

SEQ ID NO: 3083 - DNA, 4001 bp, Homo sapiens
aacatcttcaaaaaaggggaaaaaaatccaacaatgtatcctcagtcaaaatgaagtgttatttgaaagccaatgtttttactcacgttttggcataaacgttacatttggtaagaaagtcttgaggtggtatactattttaacacaaaacaaacataaaagactgttcaaagccagcagatcatttgtctaaaaatggagaagattgcttacacaaatctcaactttaaagaaaataaagaaatatacaaagtggcattccctgagccatcaggaccagagtacaacagctactgaacggctggtgccatggactgattgactgatgtactgctaagctataattaatagcgtaatagctacttccagaagactatgacagcacttggctgttcaattcccttaatgctagttttcaacttcccttcttctcccacccacatcccaaatttgtacaagcaatagaaaacagagaaagaaatggctttatgtttggaatcaccctgaaggtgtttcatatttccaaagcctgcctaaggccaaaatgttagctttggaaaatttgccttatctaaactatacgtcaagaaataaacacaaaaccagttgcctttcttagtccacttcctcatgacagtcaggaagtaggcttcagtcgccgaaggctcatcatcactttcaggtgagccttaaactccgcgtctgcgatctctcagacttctgaaatatgtttcaggcaataatttaactgcatattctacaacataagagtaatccatttaagatactccatacaaaatatctatctcatccagaaaaagaacacactgacaaaaaccgatccttcacaaataactaagaaactgggaggggtacctatctgccttaaacttcctgatctgaaatatactgactggcctggtgcgatttccctgttttttctttagtaagtttttaaaatttttaggacaattttatattttcagaaaagctgcaaagaaaatacagaaaactccctcgcccagttaatcccccatgccttattacactaccacctcacatttgtcgaaatacgcttttaaatcacacactctaaaaagcatattagcttgtacagtactttctcgtttaacacccggatttcaaagtttcatcctcttgattctctcgagcactaaaaacacggtaatctgtaattaccatcaatgatgcaagtggcaaaataactcctacagccgttttcccactcatgccgccagccagggaaaagaaaacgcccggacatcggggcacttcaacctttccctacatttctgttttggaggttccagcaggtcgccgagtgacgagcctgagaccacagattacctggagaagtccacctgtcccgacgcggcgcgagccccaccaggctcccgaggccgaccgggcaggagaggggggcggggaggcccgggggcgttggctgcgccccgacctcgcgccgcacccgaccgcgccgggggcccggaccccaaggtgcgcgcccgaggggacccaacctggccgcggaggaggggaggagggtggcccctccggtgtcgagtttccccgaggacagggtctctcctcccgaggctccgaccgaacaaagagcacggcagggctaaggggcaaaggccgtggcggcgtggagtggacagcggcccccggctcgcgccccgcgcccgcccgcccgcgcggcctcgggtctgcgcccggctcgctcgctgcaggtgcggcccctcagcgcggcccccccgcggcggccggactcctgcgcctcactcacttgtcgtactcctgtgtcatcgcgcccgctcgccgctgccgggccgcagaactggactttcgggttgggacagtacacccgatccggggggaggaggcggcggcggcggctgcgggtccggagcggcggccccgacgggttgggtttgcttttctcgctctgagccggctccgcgcgggctgcgcgcactgggcgccgggctcggccgctcattggctggcgatgcgccggctgggggcgaggcctcggggctgggaggccggtcgcgcctcctgattggtcggcgagaagagcgccggggcggggctgacggggacgagcggcgcggggcggggggcgggggccgcgcgttccgcgaggttgcgcccgggactgcgctcccggggctgcgcgcccgactcgcggccgtacgcgcctgccctgacaggagagggagcgctgcggctgcggcgcgcacccgccaacctccgcgcgcaccgagagcgcccccgctcgcgccccgccaccgcccccgccgcccccgccgtccccgccgtccccggccatccccttcgcgacgagccccggccgtacagccgcctccttcttcgctcactcaggcctccgcgccccgtgcccacattgcccgctgttccggccccagcgccccgcgctgcccctgcgctcgcccggcgggggcgcctctgccggtcgccgcgctccccggtcgcgcgtctcacctctcggttctcgcaggctgtcacgcccgagtcccgtggcttcccccgagagccgtctccggaatgtcccttctcctggcccaccgcggccgcgcgcttttaggatttcttgccctcgcagctcccgcggtcccctcggcggcagtccctggggctccgcgatgtctgtgccccgcagcctcccgggcgccacttccccgcgcggccgccccacgctgcccgtgcagtcgcgcgccccgggccggccccgggcaccactccaccgcgacggcccccacttgtccttcccgagctgccgtctttcccagggtccgctcactgagtccccacatgcccagcgtcggacctgaccctcggacaggcgcggccccagacgccggggacagggcagtcaacagaacagacacaactcctcgccttcctagttggggtaacgggcaatacaaaaacaagtaaatggtgtggctggttggaaggtaaagcaggcaggccctggggaggcggggaggagcgaggctttcaggcttgaaggagatgaggggccacgaaggtgggactgtacctgaggcagggaccctggtgtgttttgtgacccttgaggagacccgggtggctggtggggcacagggaggcgggagctgcggtcagagatagtgggcgcaggggagcggattgagcagggccttgccggcttccgtaaggactgtggctttccctctgggctaggtggggacgccttggaggggcttggagcagggtagtgacagggtctcacattttaaaatagttctctgctgctgcgtggtggggaccaggtaggaggccattgccatgatgcaggccgagggcaatagagtgaggtggtgggaagtggccgaattctggatatgctttgaaggtgggaccagcaggattgtctgaaaattggatatggggtgtgagagaaagagagaatcaaggatgactacagcgtttccagctgggcaactggaggaatgatttgccatcccctgggatacagaagacctggggcatagaagatttgggggagaacgagagtctgttttggacgtgctaagctcaagatgtatgggagataaaaatccatgaatcaggtgggctcctgggtacgaggctggagtgcaagggagaagtctgggctgaagctcacatctgggcgccgcccacgtctagaggccatttaaagccatgagaaggcaggaaggaaagaggatgggacccatgctggatccaggagcctccgacacagaaaggctgggaggaagagccagtggaggagacagaagacggggacaccgaggtcggaagcaatggaagcgtggaagccaagggaaggaggtgaagtgaggagcagcatgaggtcacagggccctcctgcagccagcagtccctcctctgtgccctggtccaaggccttcagggaccggaatcggcagcctcacttgagaccg

SEQ ID NO: 3084 - DNA, 4001 bp, Homo sapiens
acactagtctttctttcttattagggctaggactatgtgttttatccactatattactcggtaccctgtactacaaacagaagcattaaagaaaaataatagtgacacttagaattctaagattaatttccaatactatttataaaatttatcccaaaaaatttatagagtcaccaatcctatctacatgcttacaatggaaattgagtatgttcaataaactgggacatgtctaaaggaagctataacttacttaaattatataattgaaacagaaagaagaaataagacttttatgtctgatttatggggaataatatgattttaataacaggtcctatcaattcaaaaggataaaccttgtcactttatttcattttaaaagataatactcacaaattatcaagtaattcaatttcagaaacactcaaacataacaaatgatcatatacatgttcaaaatgtggcaccaagctacataccaataaaattttgaagatattttgtaaaaaataataatatttgatcacttctgccagactggagtatatatgtaattcttaaatagtaaacaggagaagaaataaacaagcaaatcataaactaaaaaagaatgaccaaatagtcgactctagtattcaaacataaattaacattgagtgcataaaaaagactgcattatggattttttgtcacacatctattttagaacatacaaaaagagaaaaaccatagagatgcatgtagtatacagatacaagcaaggccatagagaaagaatggctacaaagatgagagagagtgggaagcacctgcttccaatttgtctaatatacactgtaaatagtacctgcttccttgattggaaaagctctaagagaaaaattgctccactgcattagaatgcatgcatatatatgcttatactctcatgtagctgtactgaaagatattatatgggtctcaaaattcaggtagggcaaatctcagtaacaagatcacactaataacctatccatggtaaggctctaaagacaaggatagatttgaacataactctaaacattaagtcctccctgtgtccacacagcatgcatttcaaactgaactaagtaaagactccaacactgtctagagagaaaagcagtgtttttgctgtggggatatcatctctccaggtattgaatccctgacctcttagcgtaataactaattatctcatattttaaaatacataatcaatgcatatatatacataaacagatttaagctaaaagaagagtacaaatattttctatgtacaataataaagactacatgcaggcaagtttactgagtatctgtctcttttggctttttaactcccaagaatgtttgagctgaccattaagactttgctaccaagtccaattctcaatgcttcatctcttaatggactacacaatggctctattttataagtacatataaacataagattttacatgccaatggagaatttttgtctcagaagctgacctaatgtctgaactttggcttaccttgcttactttctccaaaaccctctggaaatctatttctagatcctaagtttgtatactaattcctcccatttccaccacttagcagggtaaaatgccctccctgcgctatttctttataatcccataattctcttacaagttaaatgactgtatgcattatgctgtattattttagttgatttcctatcaaccagaagtgttcactctgaactcttttgcagaagcgccctgttgcatcctgccacaaggcctttgcacatgctgctcccactggtgtgcccttcagacagcagctaaggctcacttcctaagggaagcctttcctacctgaccagagcaggttcttttctgatgctctcggacatcattattttagtttttttcttccccactggaatgagagctccttaaggccagaaactgtgtcaggtccctttctatatctccagcaagtcctagggcaaaaatggtattcattaagtatccatcaatcaaaaccataggttgataattattgaagccaggcaactggtacacgcagagtaggggagggaggatgtttcattttgtgtgtgtgtatgtgtgtgtgtatacttgaaatttgtttaacattgggtgaaaaactctttgtggaagagacttatagctatatataagtaatcttcaataagtaaaagagtctataaacaaattggacttgttcagttttgccactgagaactagtatcaatgagtaaaatccagaattttggcttcacataagaaagaactctccattgcttaaaagtgtctggaaataaagctggttccaaagaagaaagggaggaccctgccacttgggtagttatactcaagcagttggataatcagtggattcctagttaggggattaaaggaccaaatgggaaaaatgaacttgaagaaatcttcaaatcttttgagtatctgaaaacaaagtttattgtcttaaaatagatatatagaagtcaatatgacacacagaagtcaatataaaaatattgatttcatatttcatataaagcatctataaagaatgaagtttttacttaaaaccaatctccctgaaagctttatcttgcaggtgttcactctgcactccagcttctctcaatgcgccctgttgcatcctgccacgtggcctttgcacatgctgctcccactggtatgctcttcagatagcagctaaggctcacttcctaagggaagcctttcctacctgaccagagcaggttcttttctgatgctctcagacaaccatatccctctgctagagatagagagcacagatgccatattttcactaaccactgtatccccagtgcctgtcacaaagcctggcatgttgtaagggctaaataaatatttgttgaatggatgtatgaacgccaacactccctatgaatccagcattttcataaattataatctaaactgaacatgtcaacttgccaaaagatagtcaacctatttctctaccagaagtgattcagctctcatcctagaggatgagaacaataagaaaacagttagccagctcccaaggcagcttttttgtttttgtttttgtattttgagacagggtctcgctccatcacccaggctggagtgcagtggcaagactgtggctcactgcagcctcaatctccatggctcaactaatcctcccacctcagcctctcgagtagctgagactacaggtatgtggcaccattcctgactaatttttaaatttttttgtagagacgggatctcactatgttgcccaggctggtctcaaacaatcctcccacctcagcctcccaaagtgctaggatgacgggcatgaaccactgagcctggccccaaggcattatttttatactttttttaacatgaaaatataacattttcggtaacttttagctacacaatacacaaaataaatttatttttcagaacacttttaagattgtgacaagccaaatgatgctgaggtcaaactgtggtttattaagctgaaagaatatattgtatggacatgaagtttaatgaggatgtttaggtaacgaagaagtaatgagagactcaggacagatggacaagcatcaggtcatataaactatttccacatgtatgtctgaaggaagatacgaaaatgcccaagataggaataatttgtgttgctaagaaacactaaggttgatgagtaaactgtctctcttacaaaaaccaactaaaatcatgtcatttatcagtgcaatgtgattaataattattcactttagaaaacctttataagataaactaaaccaaaagaaaggcaaaaattttaacactcagaaatcactaatgtatataatgtatacagggacatttagtgtagtattttattgacttccatcaaaagtgttcatttaggacaaagttacaagattctacctttggctataaaattat

SEQ ID NO: 3085 - DNA, 4001 bp, Homo sapiens
gaagcgcaagataattgctaattcaaaaacactggaaagtaatgtttaaactcacagaatgtaaatacttcctaactatgtacaattcatggcattttaatctaatgggtccaaatcataaattaaggaaaaaaatttcatttaattacttggctttttaagataccataatcaaacaaactttagtaccataatcaaacaaactttagtacaagaggtctgaattacctagttaagtgtttagttaatgaagactactagttctattcagctcctgctaaatctcatcaagaaactgtcttcgattcttaatttctctataaaataatgggattggattatactgttaatgttccttaaacatcgaaaattctgtatttctgtgatgcataagattaaaatgccaacacaattttcaaatcaagactaaagaagccatcttaacctttgcaaactggtgatgttaaaaaatttactatttcctaccttattgcaagtatcatgcttcagattttacctattcattgttttcaagcatgtcaaagaaagtttcgtgattcaagaggtactcctctaatcctcaatactaaaactgtttcattaaatacagtacaggaccctaaggaaaatgtataccaaaagggagtgggagccgagaagaatctaatccaagtcagacctggaacgcactaattaaaattcaatatttcacttggtatgtgggttcctacatgaaactcctgtcatggttaaagcttaaggttaaacacgttaatagaagccaatagaatggctctattgaattgtactgaacttctttttcagcagctcctttacctaaccactattttaagctttaaaatcaacttcaggggtaggcaccaaataaccaagtgagccacggcagccggggctgcaaactgaaatccatctcgtatggaaaatcatcatcaactcacgttttccatttcaaactgcgatacaggtggaagaaaagctgtaaaagccttctctttgaaactcccatcacacggcctcaaggcattaacttaagaatctcaagataacctaaagcagcacagttgtcagaagactctaaaagttgtatgtgcgagagaaggcaaaaaaactacttcgggactaaaggttaaatttcgctgctgcattcccaagacttaaattcagagaatctttccacctggacagaatgggattgtctggatcccgatgaaaatgggaagttatgtgcttaatcctcagacgagggattccggggtggggggcacagtgagggtcttcacactcggctggcagagaggagtggggcgctggggaggtctggtaactgagggcgactaggagccagaagcgaagctttccgtcaggaaggcctggggctcgcactgcaaggggccaagcgccgggcagcctggtggtcggcgaagcaccccagccaactcaggccaacccggacgcccggcctcccttctcccgcgcgagggcgacgtgcccccacccgtcctctcagcctgcgcgaggaagaagcggagcgccgggccgcagaaaaccagcacgcacgacatgtaggcaccaaaaaaacgcaattcgaacacgaccagtttgcagaaggcacaaaatgccacggcgtgacgccccattccgagcgcggtgcggacggcggcgcagggagcgcagcgcgtgcgcccgggaagcgcgcggctctcagctccgcctcccccacaccccccgcccccggctccccgcgccgcagccgccgctgctgcccctctgggatctccgcgcagcgcggccccgcgaggcgggcgccggggaggggaggggaggggccgcgctccccgcctccccgctggcccgcgcggctccccagcccggagcctactcacctcctcctcctcctcctccttgtctctccctcctggccaccggcgcggcccagccggcgacgcgctgacgccgtgcccctcccccgcggccgccgcggatgccgccgcccctcccggcccgcggccgcctcggcctccgggcgcgtcaggcgctggtcccgcccctcggcccgcccgcgcaatcgaggctccgcctctctgcgccgcccggactccgctggcgcgaggtccctgagtcagcggcgctcccgcccgcgcgaatcgctccgccccagcccgcgggctcggctcctcgcacctgcccactgtcccccggcctcgcactgctccccacctccctgtgcgccctttcccatctcgtcagcaccctgtccgccctttcagctttttcgtactctttccccaacctcctagtcctgttctaagctcgcatagtcaccttctctttccttctggaaggtctgtgctgttcattaggtcgacctcggattccccgtgcagttttccagccggcccgttgcatctcctttcctggtccactccccggcctactagagcctcagggcccctgtgcgggttcctggctcccttgccgacacctctacctgctctgcagcccggagctcctccacagctgctttgccaatgcctcttaatatccctccttctggacctcctcgattccctcctggcaaggctcatgctttcctttatctccatttttcccgtcctttcggttctgactactccacacacttctgatgcagtttgagtattcaataattgcatattcgcggtcccatttacacgaggagagtcacattgagtaattaaaaatcacaaagcaaagcgacagcagtggagaccatcatttgacttgcatagttccatctatattttccttatgcaataatattctcattgccacttgaatttcaaggaatgggattttctgttggggcttaaaattcacaaatgttggatgttttttcgctgcgacctaatttcactttagctcttttatttatagaatacatagtagaaagagtaccaggaagtcccaggtgttcttgactgtaaagtgaggaatgtgtcccttcgttaaattcctttatgaagtaaaggatcctttctaaagtaaaggtttttgtatctggaaggaggttgtaggttaaatgactctggtgaaggcaaaacatgcaaatataactggatgtctggtttattaagtaacttcatttttaaaactgcaactcggaagagttaggctgtgatgtggaaatgaattaggaaacataccaaaataaaggaaatcgattaggtctttgtacttatatccacaagttgctttaagttatgtgagtaaacattcttatccttaaattgaagcgtcgaaactatcttccgttccaaacaaaatccagctctgtgtggacattcaaagtttaaaaccattgttgaattgaacaacagcattgtaagcatttgaaagcctaataaaccatctgtccatccactttcacacaaattgagaaacagaaaagagtaaatgccaaaacctgaaagtgagtgttctgactacacatgaaactagtaaatcctattacacagaataaaatacaaaatgcttctccacttacgatggggttacttcccaataaacacaatgtaggttaaaaatattgtaagccaaaattgcatttaatgctagcaacacagcagatggtcctcgacttccaatattttcaactttaggatggtatgaaatgtatgtgcattcagtagaaaccataaccccatcataagtcataagaagctgctcaacttaccatggggttacatccagataaacccattgtaaaatggaaaaattctaaatcgaaccacaatatctgaaaaatcctaaagtttatggctgccatttcattgttttaaaaatagaattacataattttataattaaactggttcttaaaataattgggagtctaatcctttcattttaaaatgaaaaaaatttttaaatcttttttaatctgattaagaactgaagcccagagagggtaagttgtttacccaatattacccagcttaatt

SEQ ID NO: 3086 - DNA, 4001 bp, Homo sapiens
ataatggggttactaaagacatgataaaatttcatcacagagaattagctatcaagccatttttcatttgaatataatttttgttaatgtgctcagtgaaataaaaagatatctatgaacataaaatctctaatatacatctcaaattatatgttatttcctgtaagacataggggaaaaacatcattccatgcataaatgctatattgcttaaaaaatattccagatgtttgaattttcctttatgacttaagtaaatatcactcattaaatagcataatgcttttcttaataatgttgttccacaaaattattagtctcaatgactcaatgatgttcttcactaataaaactacactttgttcaaagtaatggctacttaaattgcatttcaaagcaaaaaggcttccttttgatgtctaaattttccaatgagcatttgggaggatgggggaatataaatctatatattatgtgggcgggggggggctgtgggggactgtgtgtgtatatttcatttatatgcaaaataagaatcagtggtcgtcctcagatggaaaaggcatgaatcctaggatcaaggacatacatgtttgaacctcagctctgtcacttccaagctgtatgaccttggacaagttacctaattttgtaggacttagtctcatcatctccaaaatagagacaacagtactaacctcagacatgtgttaagataaaattagaaaatgcatgtgaagcacagtagactacaaatagcaagaaggtatttagcccatcccaccattagtataaatcactctacttaagtagaaaggatcgcttcaaattttctaccattttaagttcagtaattttcaatcatgatcccctacccaccaggaatagatgaggaaagtggatatacatatgtgtttgaaattgcagtggatgtttacccattccttgtcagtagcttgcattttaaacattaatttgagagccctgcaggttttgtgagtaagaggtaagttcagagtcccagccatgcagagttcatggtccactggagacttctgctctaataaggtagtgttcaataagttcacagacaccctctaggttcaacaaagtggtagccattaatccttcaaatgatggaaattgctagaaagtaactgaaagaacaataaaaggcaattttgaaaattataccaagggtttcaagacagaatataagcagtttaacattaatttgcttacttgatcacatcgtagatatctaccatcttgctttatttcctctgacttactcagaggaaatgctaaggtgtattaaatatatgccctgtatgtacttaaaaggtctctaaaaggctcttgtaaaaatgacctatttccccaagtgatgaaatgtgatataaaccactctaaagaatatctcactcatctaacctcaaagaaagcaatataaatattggaaaagaaaactgctttctgattcttcatcatcttgtccttttccatgattaatctaaagtacatatcatgatgtttcttatgggtctggttcacgagttatctgcaaattatcagccactatggaggcagtacatgtagatgctcctatagattcaagacgctcagtaggcagaactgaacactaagcatgtgggaggctgaaaaacagaaaaggggaaaaaaagattatagctatagtagatttccacccctctgacagctcagtaagaagagtgaaatgtacaggtttgaactagcatttacgtgagcattttttctgctggccaatgggtgtgcctgcatttggggtgtttttctagggaaaataactatgtcctaccatctctgaaaactatacttagtggctttgattcacggaaatttgttctgcttgttttgtggagacagacatatcctggcagttcccccacttacttctattgcaacttttgcagcaagatgaaaatgcgttcttccctatggtcttcttgaagcacaatctggaagaaagatgattcctattagatacaagtaaatggggagaagctggtatttaaatatatgattcaaaccaaatggcatatagcacattaaagaacagttcaaatactttggctgagcttgagttttgttttagaaaactgcttgaaacaaataagcatgaggttgaaaaaagaaaaagaaaaaaaaaaccacttcactgctatggtggaatttgctaaaatataaagggaatatactagttgcccatttcagcaatagtcaaagaaagctacaagtggtcaccttgatactacagatgttcagaagaagcatgtagggtgaatacagacatttttgcaccactagcaaaggctaataaggagtgagtacttggaagcagcagtaatagggcctcactgttgaaagtgctaactccaaaccaaggacagggtttcctttgtagaaggaggctgtggtcaagtgtttgctagaagatggcagagagccaaatgtctcctattggtgcctgagtttatgaacctcttaaagcattatcacaagtactaccagaaaccttaaattatgaaacatttaaactgatcacgaataccagaattaggctgggtacggtggctcacgcctgtaatcccagcacgctgggaggttgaggtaggtggatcacctgaggtcaggagttcgaaaccagattggccaacacggtgaaagcctgtctctatgaaaaatacaaaattagccaggcatggtgaggcatgcccgtaatcccagctacttgggaggctgaagcaggagaattgcttgaacctgggaggcagaggttgcagtgagccgagatgacaccattgcactccagcctgagcaacaagagcaaaactccatctcaaaacaacaacaagaacaacaaaaacaacaacgaaagaatacccgaattagggatgtggcactttaaaaggaagaaacaacaaaaaacttagtttggaaaacaaataccaaacagaaaacccatgtcctttctgcatggcgctcagaatagtattatatgacattaagaaaagagtaaatggccactccatgcttgctccctgaaagagcatataaaatatttcagataaattttaatcaatttttaagtttttctgcttaaacaagcttcagttaaagaaaaactcacttcttcagcacaatttattccccaatgacaccagatgaatgaaaacctactatactattaaagctttttgaaagtttaattcattatcaatactatgatttaatgatacatggttaaatgctaaacatcaaatttggcaatataaaataagtcaaagtgatagctgtgacatagaaatttcataccacttcaaattctatttaagatcaccagaagtcaaaatgatctatttaaaaattgtctaccttttcaaaaatgcatattcataatcgaaaggggatacaatgtgaaaatatcaatagtatttcatacaaacattttgaccaaaatgaaaaatcaccattagcatcatcccaattaaaaactaataatgcattgataagatcacagagaacaaaagtagcctgaaaccaacgctatgaatatttttaaatttttattaaaactttttgtcactgtacctgcaattattttagacttgacccaatttctttattccctaagccatgatcattttcaaggtgaactacatttttgtctacctcctttagcatttagaactgctgtggtagttgaaatgtttttaacagtatagatattaaaaatctgcaatatgccagtgatttactgaaaagtatatgctaaatattaagtatatcatgtcaattaaaaaaataaattttagtcacactgaaacctataattagctttcatatatgacgtcaatttagttacctataatattcaaatcattttccaaccaaacacccagtaataattttaaatcagaggaattgttgtattaatatattccatagacacctttctg

SEQ ID NO: 3087 - DNA, 4001 bp, Homo sapiens
gagttaaatgtctataacttggctgacaaccaaggaacaatatgagagctgtccacaactctccaaagaatatacattaaaagaaaagtagagaattattatctactatagatgtatgaatacatgaaataataatgagataaaaatgaagaaatctgactttaagcagcagggaaataatctggtgaaacttaaaaaaggctgcttccttctctttagaaatatcaatcatcttactgacccacactgcagtaaacaagacatgatagaaaatgcccgcatattgccacaggacggaattgatggagatataaaaatgaagtcccatctgcttacctgatgatccagatatactgatgtccctttacatatgtccaatctggctaatgcagagatacctgtaagatcacaaaagacatagttagtaacttcaaaataaacccagcctgaattctcaatcttgagctggtcaagagctgattcggatgatctagtctggctcttggatattccaagatgggagaagaacgtgcaagaacagaaattttctgagtgcttctaaggttattcttaattaataagagattttcagtctctccagagattttccaaatcatctgtaactcagtaataataataattattattattattactattcagattagaggtgtttaaccttggtcactggatggccttcaggaatctatgcactcctgaatgatatatgtaaaatttgtgggtttatgtaaataagtatctctgggagaaggtcaatagtttgtcagatttgccaaaaggtctatagtccaaaaaactgtcaagaacctctgctgaggcttgcctaacatctcagaggcaggttggaatgcatatggatgagcattccaggtttgggggttccctcccagagaaacacagacacttgcagatctggggtaaataccttaagaatactactttctgggagagcaatacatcaggtttaaactgttgcttaactcacacagtcctgtgatccctgtaagccatgcacagtcttgaagagaactaacatgttaccatatatacccaagggtgcctatcatgacttttcctgttctgtgtatattaaagtcaggattcctaagaatatcaattctgacagggtcagaactcacacagtaactcatccaaaaaggaccatttatgacaaggaaacttttcctgttctgtgtatattaaagtcaggattcctaagaatatcaattctgacagggtcagaactcacacagtaactcatccaaaaaggaccatttatgacaaggaaaaaataaggtgtgatcaaatcaataggaaatgtggctcccaaacagtctacataacaaaaaaattacagaattagccaaacatatctcttaaaagaattactttaaatagtaatcccagagtcagaataggctacatcagaaagaaacaaggttagagaaccttccaggtaccaactgtgaacaagatgggaaagcattcacagccacagagaacatcctgaactgagatgccaccaaaaaaaaggggtggggtataagaaaaaggctgaaaagacagaaatcaagtagaagaagggaaaaattaccttttgtggtgtcctgtttcaaataataatcatgtcgtatatattctcaaaaaataacatatttagacaatcaccttctgggcatttaccacgcactgcactcagtgctgaggactcagcagtgaacaggtcaacaaagccctattctgctgaagctttactttggggaatgggagaaggatgcagggtgacaaacaagtatatcagcaatatttcaatttgtgatacatgatatgaaaaaataaacaataagatgtgaccaagacatgagacagcagcctatacccacccagcatgtcacagaaatcttcactccaatctcagagtatgtcagggtcttaaagagttgagaccaggaaatgacgttagggacagctagccagacctgtgaatttcagagatgaagacagagtagctattctagaagacagtatcactacctcattatctctacacttcaaaatacatatacctagattgaatgataatgttacgatacaagctctgcttgtagaatataaacctgacaacaagtaaatgaacagcgtttcgttatctctttaaaacctggctgacaatactgcacactgtgtacccttaatataaagaaccacgttctatccaaattcttgtcaagttccattctattaaaagaatttcattttttgcttccacagataaatccgatcaacttgtgctgtcaaagaaaggggagaagagggtacaggtagccagcctccaagacagcccccaataatcctcacctcaaggaattcatgcctttgtgtaatccctttgctcataccagggttggtctgagtgatcaacagaatgcagtgaaagtgacagtgtctgtcctaaaagatattacagcttcttccttactctcttggatcttcctgggggaagccagctgccagctgccacgttgtgaggacactcaagccatcctagggaaaggtacacaaggcatcttgccaaatagccagaatcaacataacagccatgtgagagagccattttctaagcagatcctccaggctagtctaactttcaaatgactgtcactctggctgacatcttgattgcagcttatgaaagaccaagagccagaattacccaggctgcactccaatccctttctagcatgcactctaacttcctgtattcacaaagctcaagctaaaaacatttctcagatgctcttgcatcacgccttccacagggaacccaggttcaaccaaatccattcaaaatttagaaagcagaaatgagcaaatcaaggaagtagccaactacaaatgagatcaaattttgtagtgaaggcattttgttcttctgaaacaactatgtagatatgctactaaatgatccctagtctcatagactctaagtagcaaatggcagtggagttttctactagaatagtatcatggggtgtttctcatggcttgtgctgttcctagctattcacagtcaactttggttccttggcacttctgcaaattaagtagcatgtgatacatctctgtatgcaactcaaactagctgttgcctgcaactaagaacccactctacatatgaaaattctcctgtctcataacactttcattcctatctcatggttgaccctcttttccattatgaaaccctctacctgtacaatgaatcctattcatttatgctgtttctaggaacgtgcactatctggtttctccctttcttctccactgctttcttctccttcatcaataacacagttcttccaaccctaccaactatccccatgaaaaaataataatataagctcgttgtttttgcttcaacttccattcaatgcttgaattaccataacttggcttccttagccatcactctaccaaaaccactattgctaaggctggcaagaaccaattacttattctcattcctcactctactagactgtggcattggcactcctacccaccacacctctttgaaactttaatgataacaagattataaacctccagcctcaatgaaagaatctagcatcccaccttcacacatcatcatcacccatgccctctgcacttctgccaccagagacatacaacaaataggcatacagagaccatttcaaatgctaaggctattcgaatattctatttcttgagggcctaactgcttagacaaccaaaaagacagatatacgcactgttaaaaaaaagaaaagaaaaaaaagaaaaaaaaaagaaaagtggatgctacaagctatcaatatagaaacgtatttcattattttcagttatttaaggaaaaataaatgtttggaagtcagagattccaaaagagcaatgctacaaaacaagtgtataacctcttaaaactaacttcccaaagc

SEQ ID NO: 3088 - DNA, 4001 bp, Homo sapiens
gaaaaaactcagcccttcatatctatataaactatgcccccaggccaaaatggcaatgctatgtgctgacaatactgacttagtggaagttccaccggcaagaaacagcaaagcaggaatttagttgagttgctcttatttcaaattgcttaatcacgccaaaatgaaaattgtggcactctaggattgccttttcatcctaccctattcagtactcattaagagtactaaataaatactcctaaatactcctgttcatgccaagagtagctgtgctttttttttattattattattatttttttttttttgagatggagtcttgctctgtcacccaggctggagtacggtagcacaatctgggcccactgcaacatctgcctcctaagttcaagtgattctcctgtctcagcatccagagtagctggcactacaggcgtgcacgacctcacctggctaattttttgtatttttagtagagatggggtttcaccatgttggccaggctggtctcaaactcctaagctcaagtgatctgcccacctcgaccttccaaggtgctgggattacaggtgtaagccaccgtgcccagcccctaagagtatttagtatttaaagctatgctttaatccttctaaagacccagggtaaacctatacgaataggccaatcagtaacatttaaataatgttattcacaagcacatgcattaagactaaatgcccctaaattaggtgcttcttctaaaacagtttatcctgataaaggcatactaaattgatgcttcagtggtagtcccagctagtgtgatcacgcttaacaccgaaggaaaaaactcttaggtctaaaaaatcttaacacagcagtagtcaaaaagtacccattagaacacagtttttcagaaatcaaaataggtattgaacatattttctcttctatgaccacagactttgtattgcatccctgttattaaaactatgtctagtccatcttaactcctctatttaaaatacagacactccttcatagaattcacaatcagataaattggcatacatagtaaccttatattcaggcagagtataggtattttatgtatcttaaaacgcactatcataaaacacatataattaaagtagcatgtctctaaaaatggagctgttatactgcatatataatacccggaacccataaaattacacagatctggacaggcacattgcctttcacgaaatgtgaagtctgttgagatgaattggtaataaagatgaatccttgatttttgttctttgattcaggtttttaagattgatggtctcctaagtgccactgagactagaaattctcactgtgcaaattaagtgtccgttagaggtaggagggtaatgtaggttgtacacttaagcattaagttgttaaaggacaacgaaatgggcgggtagtgaaagacactaaaaacatgtggggaggtaacatgagatatcacattgttatttcaagcagtaaataatacagcttggaattaacaatgtccacggtaaaattaacacaaccgaacttggaggttttctagtatctaggaaaccagcagggttgaggatcagttccacctctaaacaccccaactagatagcctcagtttgggtaaaaagagaaaaagggcacttgttcttttggcggggctggcccaacttcctgctgaactactggccctcagcagcttcctccaacacagacgtgaagaagagccccagcccctaaggaagagagagggtttatgacaatctgtaaagtgtcagggggaaacaaaaggtgcagggttcggctgccgtgaacccggagtcccagggcgctccctctacacagagcctgaggtcttccttaccaccgggttgaggcaggccatgacagcacctccagcacctggccctttgcgcctgcgcggcacgcagtgccctcggagggaaacactgggcacgttttgaacgatgtacgtcaggtgcgcaaccacggagaacgccgggggcgtggctgggcagaagagaacgttaatagatggagcgggtttgagtggaggtgggggtcaaggcggagaggcggtcggcctgtgtgagaaaagagacccgctaaaacggatggttaggttgggtctagccggctttgggccgttcacaggttgtttcctcaatccgtgaaagatgaaaatcgaggaggggaaatgcaggggtagatctcagtctaacttcagctttgaagaagatggggaaagaaaagaggggagactagtgatatctgtcctctgcatttaccaattttcattcctccccctacaccccactcacagctgaactccattttttgttgtataaaaatataacaagagccaaatttttctaagacttgtcagcgtggtacagcagcatcagcagcatctgggaacttgttaaatatgcaaatgatgggtcccaccccagccctcctgaatcagactggaggatggagcctagcattctgtaactttaacatgctctccaggtgattccaatgggcgctgacatgagaccccctgacctaagacaaagagtctcaattttgggtgcacattaaaatcacgcggggagctttaaaaaaaagtttagtgcctggatcccactcggcaaaatctgattctaatatgcagccaaggtggaaaaccactgctaaaagaaagtcagcagctaatacgttcctatctccttttcttagttaggcagaaatcaccagctgtctacctacaataattctctctcctgaagggcagagcatcttggggcatacgttacctagctaagactgagggaagatgtaagcacagataacctggaggattagaaaagggaagaagtcaccatctgttgccacaactctgcctttttggcagggtctcacactgttgcccaggctgcagtgcagtggcatgatcacagctcgctgcagcgtctacctcctgggctcaagcaacccactgacttcagcctcccaaggagctgagactacaggtgtgtgtgccaccacgcccagctattttgtgtgtgtgagtgtgtgtgtgtgttttgtagagacaggttttcgccatgttgcccaggctggtctcaaactcttggtctcaagtgatccaccagccgcagcctcccaaagtgctggaactataggcatgactcgccgcacttggccacaactcttctaaacagcctttctatcctgcaaataggtcttgacctaaccagatggatacgttatttgatgattaaaaactctattatatttaaaattggctgtttatttatttatttgtgcaagtaagtgcagtagagctgtttatcccctaccactgtgtatgtgatttgcctgggtcaggtaccttatggtttgtgagtttcaagtagctgatttatatgataccctttagaaaactttcctacattgaaaactattagaaatttcttttacaaaaagccaagaactatatatggtcattttaatggtcatatctctccacctggcaatttactaccaggagtgttcaaagtgacttatctttcacccaaagtaggaaagctaaaagcagtcattgattcctactgatattataaaatccaattaaattattcaagctgggaaataagaaagctaaaagtgtctcttgttttccatctttttcataggaaggttttaaagctttatttctaaatgcttaggattggtaatcacctaactttctgtgacagcatactgttttactttattacacattctgcccttctcagaactatacgtagatcatgtatattttttaaattattcttggatcttggtacccataaaaagtgtaactaaaagttgaattgttatttcttagtacagtcagtatactcaagttatggagaggctatgtaatgttagcagagaaatgtcagcaaatttcatttgccccttgcagtttgtctgaatggtcactagtc

SEQ ID NO: 3089 - DNA, 4001 bp, Homo sapiens
ctcaccaaaattaaaactatttatgtatattagtacccattttatcataccgttactgatctttttaattttcgccaatctgataggtgaaagaattcttccccactctatttatttgcactgataataattggtgtcagcaacttctttctatatattggacatccatatgacttttatgaattgcctgtacatataatttgcctggccgggcacggtggctcacgcctgtaatcccagcactttaggaggccgaggtgggcggataacgaggtcacaagttcgagaccagcctgaccaacatggtaaaaccccgtctctactaaaaatacaaaagtagccgggcatggtggcacgcgcctgtaattccagctactcaggaggctgaggcaggagaatcgcttgaacccgggaggcggaggttgcagtgagccgagatcacgccactgcactccagcctgggcaacaagaacaaaactccgtatcaaaaaaaaaaaaaatacacttctcatggaaggcagcagcaggatgtaatggtacaaattctggatacacagtaaaggaatagatgatcagtaaattcgtactgagtttctaaaaccttccattgcaccccaatctgtctggttcccatgctgctccaggatgccagcttgacctccccagccaagaaaaaataatgacacaacactgcaccttaagtatgaaattactttgaatacactgcttagcttaatatattgtttcctaaagtgttcctagggtacaactggcggtatgcaagatgattttaatggtacgaaaacgaacattttaatgactagtgcttttatttcaacttacataaacaattataagtagcccatgaaacccacggtttcatttatattgcttaggtcgagactaatgcatttaaactttttaagtaagtcaatttaaagagaactattcagaaaacaatagtacaattgataagagattgcaaaaatagtgatggcacgggattgacttaaaattgtatatgcctctggaacaaagaggtttgtccataccctatacatccctccaacaaagtgagttgcctccgacggagttgaagtcgccacctctgacttccccaacaggcagccaacttgccacgggacaaaaggactagacagggaaacacaactggcccttggttacgccaatggcgttgcagcgcgcggggcacaaccctcggggttaaagagcctcctcgaggaagaggctgggacacagctgaaagagattgacccacaaccactctaggggccatcacctgcccttcttcagtcctgggcgtgaaggtagatttctcccctagcctgtgcgggagaggagccctggtttttctaacaaggactactgtaggttcgccgagttcgagggacgctacgtatgcagcgcctacgcccggacacaggcttccgcgttaccgacaccgcgtgggggaggagggcaagacccgaggcttgcagagatggggggtgcacggtggccacagtagggaaggtgcggagcatgatggtgctctgtaggagcgcagacgctgaaaggcgcgctgctgtggctgggagaagagcggagccaggagtttgttcccaatatcttagtgctatggcaaaagaagggggaggagtaattgtggggccccccacacacccgctgcggcgatacactcaccctcgccaaagtccttccggaagtctaagttcgaagatggcgccgcctgtctggtcgcggtcttatgacgaaatcttgttagctgctcttcactgacgcccccaccccagtgcacaaggtaaacacgtgtgcttggtccggagtcggtgccgggctagttttctcttagactctgtattccataatgcagcgcggccagagtcaccgagccctccgaagccagccgagttccagggcgtcttcagcggcgccagggacgctgcagggcctcatgggagttgcagtgtcaaaaaggggagatcgacgcctgcgcggccaacgggatcccacgcggcctcgacgggagccgggagtaggcggactcccaggccgggctcgcgctctggatccctgaatccggcctttccggccggactgccgcgcctgtggccggaagagccagctagaccagagagtctgtacctgcaaccctggcggcgtccgagcccaaggcggagtctgggagacaaagaagtcctcgccgccggccgctggaggattctgccagtagtgaagtcagggatgggcccgagagagcttggaaagaggacaaggaagggaaggagtaggagtagaaaagcatgactttggctgggtatggtagctcctgtctgtaatcccagcactttgggaggccaaggcgggggaggatcacttgagcccaggaattcgataccagcctgggcaacatagtgagaccccgtttttatttttatttttattttttcctgagatggagtcttgctctgtccccaggctggagtgcagtggcgcgatctcggctcactgcaaactccgcctcccgggttcaagcaattgtcctgcctcagcctcccgagtagctgagattacaggcgcccgccaccaagcccggataatttttgtctttttagtagagaaggggtttcactatgttggccaggctggtctcgaactcctgaccttgtgatacgcctgcctcagcctcccaaagtgctgggattacaggcatgagccaccgcgcccggcctaattttttaattttttctagagatggggtctcgttatgttgaccaggctggtcttgaacacctgacctgaagtgatcctcttgcctcagcctcccatagtgctgcgatcacaggtgtaagtcactgagtttggccattattccatttctgtacacaaaaacctttctcattctgtgctataactagttagcatttaattgggtggatgtggtataactagtgccttgttgatattgatgcatatttacatggttttgctgttataaacaatggtcccttgctattataaatcacactgctataagtaaccttgcatctaaattacttcaaatgtgtaactatatgggtaggataatttctagaagtggaattgtgaaccaaagttttaggtgcatttgtaattttgatttataaccaatcttttcactgatctacttctctgcctctaatttctactaggtgtttgtttgtttgtttgtttgttttgagacagggtcttgctctgtcacccaggctggaggacagtggtgcaatcacggctcactgcagcctcaacctgccacctcagcctcctgaatagttggggtgtgtggcaggtgtataccaccacttccaggtttttttgttgttgttgtttaatagagatgaggtcttgctatattgcccaggcaggtctcacactactgagcgcaagcgatcctcctgcctatgcctcccaaagtgctgggattacaggtgtgagttgccatgcctggcccggttatctttctaaagcataaagcaaccctgttgatcctctgcttaattttgatgattaagtagtatgttcaaaatatagaaatccatgtattgataatgatcttttaaaaaaagtaaaagccaaaatatcagctactcatcctacaccattgaaagtagtgaccattaaactgctctacctctacctccacctctctacctctctacctctctacctctacctctacccacggtctccctctctttccatggtctccctctcatgtggagccgaagctggactgtactgctgccatctcggctcactgcaacctccctgcctgattctcctgcctcagcctgccgagtgcctgcgattgcaggcacgcgctgccacgcctgactggttttggtggagacggggtttcgctgtgttggccgggccggtctccagcccctaaccgcgagtgatccgccagcctcggcctcccgaggtgccgggattgcaga

SEQ ID NO: 3090 - DNA, 4001 bp, Homo sapiens
ttgcaggaagcacataattttaacataccttcattgacatctttgtcttgggatttggtagagttaattcctgatgatgatggaacttcagagtcatcgggattttcttcagctgataacttgcctttttcctgaagactctgtgattgcaaattaattaatgattccaaaaaataatgcagacttagctctccccagccacagagtatctggttctagtcctagctttgccactcgggcattttgtgaccatgggttggcagtttatagaatagggcatttgcctaattttctattcctacaaaacttgagctgtgaacacatacacagtagatggaatctaaatttgaatactgtcaaagcatttcaaagtacttatatcttacccttcaatctgtcatttgtaaaaaaaaataaataaaatatcttaataatttcattaatgaacatattgtatcctaatattttaaataaaaaatgacttggtggctcacatctgtaatccaaccactttgggaggccgagacaggcggatcccttgagctcaggagtttgagaccggcctgggcaacatgaagaaaccctgtctctacaaaaaatacaaaaattagcagagtgtgatggctcacacctgtggtctcagctacttggaggctgaggtaggaggactgcttgagtccgggaggcggaagttacagtgagctgagatcgcgtcactgcactccagcatgggtgacagagccagactctgtctgaaaataaaataaaataaaataaataaaaagataagtccctactactcgcatgaattattaaagaatctgccggccgggcaaagtaatcccagtactttgggaagccgaggcaggcggatcacgaggtcaggagtttgagaccatcctggccaacatggtgaaaccccgtctctactaaacatacaaaaattagccgggcatggtggcaggcgcctgtagtcccagctactcgggaggctgaggcaggagaatcgcttgaaaccagaaggccgaggttgcagtgagccgagatcgtgccactgcactccagcctgggcaacaagagcgaaactccgtctcaaaaaaaaaaaaaaaaaaagaatctgccttcgaacttaaaaatttaaaaaggttgcattacttttattttctcttgcacttgaagtaagcaagaagatacagtaagttcagatatttctaagtatggggaaaaaaaaggtatgggtgaagattatcttcttatcggacaatacttttttatggactattacttcacaccagtgggagactcctcaaaaacaggagctcaatcgttccagttcagaaaaggagacattggggcctaaagaagagaagtgagctgtccacccaccgtcacaaaacgacttagtggcaaagctaggactagaacctgaaactgactccaaactcttctccccacctcccatttaacttaccagcgttaagctaccctgaaataaaaacgtagtattgggggaaaaagaagaggttaccaccaagacgaaagcttttcggtgggggaaaacgttttaaggagcttagcacagggatgaggggtgaaaaccggagtttctgtaagataaggaagaagctgctgaaagttcccagcccgccccatcacagtgaaagcggtcgtctgggtcccccacacctaagggtatgaaggcaacaagagtgaagggcaccgtggcctagcatcgcctcactttcttctcgcgggtttttctctcttctctccgccgttcgaactcctcaaaggagattttcccttccaagtagtcgatgagttccggactgaaccctgacatgtttacagggtctgtctgtgcaaccccaggaaccgggacagagaaccggaagagcagcgccttccagaagctacctcgccggggccagcaagagcaaggaaccggcgtccttctgggaaactcgcccggtctgcgccgcagctgcagcactcaggttccgcgtgcgcgccagaccgggacgtataaatgggaggcgcgacccatgctgactccctaggccgcgtctttcagccctcgttgaaggttattagatagctcaaaaaaaaaagtgctttaaatatattttctttaacctaggtaatttccctcaattcttcactaagtgttagtttcattctcccaatccattttttttttttttggaaggagtctcgctttgtcgcccaggctggagtgcagtggcgcgatctcggctcactgcaaccttcgtctcccgggttcaagcgattttcctgcctcagcttcccgagaagctgggactacaggcgcccgccaccacgcccggctaattttttgtatttttagtagagacggggtttcaccatgttagccaggatggtccctatctcctgacctcgtgatcctcccgcctcggcctcccaaagtgctgggattacaggcgtgagccaccgcgcccggcctctcccaatccattttcttttctgaaggttctttaaattaatttggtcgctgctgtgtgatatttttttcttaatttaaccatttgctctgccatgtgcatgtttcactttccagttctctcctgctacagaaagctaaaatcctcccccaatgtatgctttaaatttcactcccgccagtttttcctccccgctcccaccgccccgcgccctgctcccacccggaatcctcaaactctccctttcctcaagcaccgtctcagtctgtaaatacgttcacctgggcttcctgttccacctctcccacccaagttttcttcctttcctaacagcaaactttcagaaagaaccaaatacttgatatggttactacacattgttgcccatttactatataataaatacataggccatctactgttttatacatattacatacatatctcaaaataacccttccttctaagtggatgttattcctaacgctattgtctctatctaataagtagtagagccaggatttgaaccctggtttctgactccaggtcctatgcttggaactataatatactgcctcctctgaatggtacggtttttcaacttctacacactcctgtgatttatattttcccttgtattataattatctatttgtccaattctagagacactagctgtaaatatcttggcaacagccctaactgatgcatcattgtaaaccctactgtatggcctaataatttgtgctgaaaacacatttgtgaattatattggatggaattgaaagtgcctttggaaccttgggcaagggagctggagtaggggaatgaagctcaatatgaagctaaggttaaagacaagttacagggagagtatcacctagccatctttatgacaatcctggtgagaataaacagcaaaaggatgggagaatgaggggccaggacctgcaagggcaggactgccaagtgagaaaaaaaaatatctcgcagctagaagtcttcccctttctcatgaggaaggatcctcagagtcctacctgggtataaaatatggaaggtgagcagggtagagtgtgttaaagtaatccacttaaaccacttatagggaaattctcccctaagtttttccagacagtggagcaattgtgtctaagaggaatttaggaatcttcagtcctaactctcctaggggaaaagaaaagaaatcaagtgagaagggatggttacctgtaaggagaatactctcctaagacccaaatgacttagactatcttgtcttattgctggctatctggaatatgggaataacaattctggagatatagattcatgttatgaagaacaggaagcagtgaacaaggggtaggagggtagttttttgttgtttgtttgttttgtgtgtgtgttttggttttttgtttttttttggggggggctatggaacaccttaatgacatgaaagttattttagaggtcagactgttgcaacatatcttgaaatttcaatctttctgt

SEQ ID NO: 3091 - DNA, 4001 bp, Homo sapiens
ccagcgactgcactctcccaatttgtgggttttccagccaaggctacttgttcatatggggggaaaagggaaagactggcagagaaagggagcaatttgcaaatttgaagaatttccaattcctctgaaagttttccacttcctcacattcactctgtctaataatctcccttactttagcacctaatcacccattttgtaatacagacacaaaatcatcagtattgtctcctgctagtcctagaaatcagtcatgacttgaacattctccgtaactttttattctcaaatgttggtgtaacgtattttaaaagcaggcacaaaataaatttattaaatccttcctaattgactgcattacactttgtcaaacttgcagattgaaatagtgcatgtaaaatgtctgattgcaaatgagtaaggcgagctcagttgggaaacactactaggacctagggaggggtaccttgactgccagccctcacttacttggagtttgcccagcgtaccaagtggacccgccaagcccaacaccagctaagtcttccttactctaccttggcacgctagttccagctgcagcgtccagcttcctgttcaagtcccattcaacatcgtaaacacattccaagaaaaccagcctgcccagagttccctcccgcacacagggaagtcagcgcggcagccgcaggagcctcagaatagagagaactgcctgctccggattctgatccgtgtggcgagtgaggccacgagaaggtggacccggccaagcgaatttagcagtcggagcgagaacccaagggctcatcacccccgccgcgccttgcgccctccagaagaagctacttgacccgcgcagcagaagggtaaccatgtggacgccgccccttcctttgggccctcccagctctgagctttaaagtatccgcggcccggcctcggagcttcgcgcctccccacccccatgcccacattctctcccagcgccaacaaaagggaggctgccctggaagttcgctcctgggtcgcctcgctgtgacccgacgatgacttgcctgctcagcccagtctgatccacgcaccctcagccggacggatccacggtttccccaccgcctccctccagttcctgctcaccggccccccgccgccggaccaaagttaccacaaaaggctaaggaggtttctggagcccggagaccgctgcgtccccgacctcgctggactcccccagtcatttctcaagcgctgccatagcaggcgtcaacaggtcttagcctcctttagtgctggacgactccctgagcatttagctgtcctaattttttacaacctgctggccagcggctacgcgcagccccgcgccctccttcccgggcactggtggccggagctgtccacccccaccgcccctcgggatatcagcttctaagcgattccacgctacctggagggagcctgggttcgcagccagggaagagcctagataaatctccgtacctcactgagagaggcagtcgggtcaggcttcgggcaggggcgtggagagctgccggttcctccgagcctggcgatctccactccggcacggccggggcgccgtctccgaggccgagagggaaagtttctctacgccaacacggcgctggactcgggaccctccagcttcggtcccctccctcttcgcgctctctcccccctccctcctcttcctaatccgccgaatccaaaactggcgctggcggcagctgggacgcggggctggggactccgggtcgctcccggccgggaacgccgggctccccctctcggtgagaaggaaactctagccgactccggcttgcgcacttctggcggtctccttggacatttccacacgggacgcctgtgttcaagctcgctgactttccttctttaatctctgatggtcgttatctgtgggcccactggactatctcgcgcgtgcacgcggaaccggaggtgggtggagggtggaatgagagagaaacccatccgcagaaggaggggccctaccttactcagtcttcagcccggacagaagcaaaaccacaggccccctctcccaccccactcgcgccgcgtttcctttccagcctcttccctgagacactagatcaggaccatttgccttttcttatctctgtgtgtttcctaacacaattttaaaacacctctgaggcttcatagaggggtaaagtgtcaaaagaaatacacgaataagagtaaaacgtgccgtcttcacagcctttatcaagaaagcagccacagttgctgctgctctggccgcacctcagcggactggtttgtcctcattggtttgtcctcatttgttttttaactcggccttaatctctggactttgttatgccttaaaacagacacacacatacacacacttgaaaattgccttaacccccagatcatactcatttgttccattcagatgtttacctcggaattaaggacttctgtataggatttgagagaaaacacaacagcccattcttactgacctttggtaaagttctgcgtgggaaagggagcaagaaggagtatccttatataagaagttcttcaaggatgagaggacctttactaaaattttttctgctgctcagaatttagtttactaaattttagtttgagtgtgaaaatagatgagaaaaggaaaaaggcattttgcaaagctagcagttataatgtattacagtggatccagggcttagagtcagacaggccagattccattccaaactccatctttacgctttctgtgcctaccaattataactgtcaacaggaattctataatctagctcacggagtcacagtcacatttacaggagttaaaatagagttgtgataggcgcagagaaaatactcaataaatatttggttcttatatcccaccatgttttactgtaattaggagagagggtggtgctagaaattttcccccaaagaccctgtaactgaatcagttttcttctccttaatgctttttccatttaaaaaggcatcatttcacaatttttgaaatggaaactatgtttacagattaactagttccagctgaactcccttattttaaatacaaggtaactgaagtctagggctcttaagtgactttccccaaatctcatggtttggaggtactaaagctaatatcagaaatcagtcctcataataacttggctggggtcctcttttaactgtttttctctttatcacaatagtcaagcacacataaaaataattatattaaaaatattaatctcaggacaaatgctagtttttttctgtaaataactcttaagcaattaatttatgaacaatcattaaaaattaaataatgtcatttagatgatcacttggtatcaatgtgattataaaaataaaacaaatggtagtccagtatttaggaataaggaggttgatgagatgaacgaatccatgcttacattatatatttacacatagatattttgggttttttagccataatattaaaagattataataactctcgattcccaagaatacatcaacataccactacagttggctgaccctagtttgtgaacaactagatcagtgttcaggacacacaattcaacttgaacaagttcaaggccaaagaacaaaatcaggctacagagatcaaactttccatcctgtgaaataatggaaaatcccatagcatgtacttatttctcattcatttgcctctagtacctgtaagaaggtctttttaaaaaattcttccttaccatatacaatgttgaaaatcatctgaacatttacataactaactcccatgttctcagggatgagaccctatatactccttctaagtaagagttatttactactccggcctcatcctcagtttcctaaaggcatatcatagcctctttagagatctgtctttcctatccataagacttggaagatcctaaagagggaaaaaaaaatat

SEQ ID NO: 3092 - DNA, 4001 bp, Homo sapiens
acatcctgcctgagttagcagcaagaaatagccgccccccaccccccctgcagttctcgcacagcagggatcctgccataaatcaatccgaagtctaatgtggaatggcttgcaagcaagggctgcaccgctgtttgtctcccaaggcaagtgttgaaggtctgaaacctgagtcctggagaactgcttgggctgctgggctgggctgggcacgggggcgggggtcaggcaagcccatcctcttcagacatgagaatgcctctcagcctcacctcctcagtgactgaattggaataatgacagtggctcctgtccctttaacccaggacctgccgtatacacacacataaacatatgctcaagttacgtgctccgggaaccacagtctcatgtgcaattatataaacatgcccagcacggatccagcacttaggatgtgtcagactccgtgccgggacatttatacgcacttcgtgctgctggatgagttatctcctgttattattcctactttcctactttgcagatgaggaaactggagctaagagaggctgccttgtttataggcagtgcagatgatcccagtgcagactgaggggcctcgctcccaagcaccactgatgcctgcgcactcccaggctgacgcaagcacaaccacaggcacatggagtgccgtgtacacacgtagaccgaagcagcactcctccacgccaagctccaagctcaggcggggtgaggggtgaggcctcacaaccccctggatttcaaagacttataaaagagttggtgtctccaatacccatatcattatcatatcaataaggtatcattgtcacatgataggctcagggtatctcctctctgacagactctaagaatcagaccgcggcagggtgggggtaagagggatgtacattacgttttttggtaaaatcaaatggtagtttttattgcaaaagtccaacggcagaggaagagggcagagagaggcccagcaatgtttccaagcatctacaaagactttcatcacagatgatttcctctcagcaagaaaacgtgatggtttaaaagagaaaaccagcagcgaggaattacaaatccccaaaggatccaggccgcaggattccctcgcatctgtgtgcctttgcggcgcccagcggagcgagcaagtccctgggcaaggctggagttgcctggagttcaccggagcctggccggtcggaccctggctggggagcagcacagaagcaacttgtgatgtgaactctcacctaactgttctttagggagacaattctggccccacacatttcacatgccccgcacaaagaaacagaaagcgggcgacacgccctgggagggcgggctggcggcttctccagctcggagcgcgtggaggctgcgcgtaggggtccgggacgcgggacagggactccgcgcagcccaggcgccggggaaccggggctggagtcggggatctgagcccagcggacgcctcctccgcctggaggcccggcacggaccgggacaccagggcgtccgtggccgtggctcggcccctggctgctgcgggccgcggcctccagtgggtccccaggacccttccccacggcgggtactcaccgaggctgagaggccacgccgtgctgttggggcttctcgtcgaccacattcctgggcgtcagcccgggcagagaccgcggggactggccaggccgggccaggccgggccgggggagggtcgcgctcccgggctcctgaccctcggcggcgagaggaagcggcacctgggtcacactcctcccgcgcgggccgaggggaggggctctggcccggagataggcagacttcatttattttttttctgcagacttggctggtggggtttccacccccttttttttttttaaacacacacccgcccacttctgaactcttctttgctccaactttcctgcgcaagaaccacgcttttctaaccgtttctctttccatctgccactaccggatacagaggttgtggttgagaattccccctggagtgcagggaaaactccccaatgtgacatgatggcctggcccagcactgtcggggatggtgaccaaatagggcagacctgtgttgaaatcttggctggctgcgcggccgctggatagctgggcggcctctctcagctgcggggcatttgtccctggagagagtccctgtcttgttggcctttgggggccctgtactcatggatgggctgttgagcaaagatcattccaaaacaggaagaattgctggacaagagtcgtgatttgttcccattgcttttgtctgaagctgccagacacagtgcagtttgtgaattcgctctacttttgccatgaaaatctccacgtggatttcgatacatacctttgttggttaaatgcagtcaaatggcaccacctacaaaaaatgtatcatagcattatctgccccttctgcccagagacaagggcagggaacttgaggcccttgttttaaatccccacccaggggaacaccctgtgcttctcctgtgtgatgtctgaaccttcctgtgctgcttttcattgtttactttatagttccccaagcacttttgtgacgcccacctctcccctaccttctgccattaaggcctatcctgcacaatccggagagccaggccagctgtctgtacaatgtatgggcggtgcctttgggactgtcatctgcattgaatacaatgagaggctgcgccctggagatttgcaacacagaggctttgctcacctctagccgggctgcacaaactccaggccttcttgacgcagtgggaaagcactcatgattcactttagttagatcatgaagaacccccgatgctgatagatctttactccaactgccatgtgcagcacagccatgttgaattgaaataaactactcacagaatgcctttggcctggtggggaagccctgagtcttgatttcctcatctataaaatggaggcaagaacacctgcattccggggttttacagaggcagtgattgtagaatcacagtgggaacagaaaaggcatttaataaacagcaatgagtaatgattaatttatttttatttatttatttatttatttttctgagacggagtttttgctcttgttgcccaggctggagtccaacggcgtgatctcggctcaccacaacctccgcctcctgggttcaagcaattctcctgcctcaacctctcgagtagctgggattaccagcatgtgcctccacgcctggctaattttgtatttttagtagagacggggtttctccatgttggtcaggctggtctcgaactcccgacctcaggtgatccacccaccttggccttccaaagtgctgggattacaggcgtgagccactgcacccgtgattactttaacagtttaacttttttttttggtaatacatacacatacgtctacgtggaacagtagtcccgctcctctgtcctgagagaaaataactttaattatctgaaatgcagctggaaagttggaaagaagcagaaagttctgccaggtaacaacggacaagtcattaggtcattgcagcacacttagagaagtcacttttacagactcatttagaacctactggccttagacgtaatcataagagatttccttaatttcttagggtaagacaggttgaaggcatcaaaatgttgcagagaattccttacagaaaataagccaaaaattaataaactaacgaactaaacagtgaaaattgaaagccccacaaactgcagaggtcagatacaagaacgaagtagcatttgttacagaactaaagcaatctcagctccagccatcactggaggatgtgacagttccttgcgctattaaagaccacagggctttggaactcaatctgggttagttactctactgcctactagctgcgtaaccttcagcatttcactttctttctctgagcctcatttttctcagc

SEQ ID NO: 3093 - DNA, 4001 bp, Homo sapiens
gcctccacctcccgggttcaagcaattctcctgcctcggcctcctgagtagctgggactacaggcgcgtgccaccacgcccaggtaatttttgtatttttagcagagacggggtttcaccatgttggccagtctggtcttgaactcctgaccccaaatgatccacccacctcagcctcccaaagtgctgggattacaggcatgagccactgcgcccggcttgaaagttgttttttaaaatcaacttcactgagatgtaatttaggtacatacagacaattcttaaacaactccactcaagaattctttcaacccatcagtcagaatgcataaaccagacctgcccctcctctgcccagaactcttcagcagcttctcaccttgcttgcttcagcagcttctcaccttgctgaatagtaacccctcctgtaaaatttatatgttgaagtcctaacgcccagtactgcagaatgtgaccttatttggaatagggtccttgagatgtagttaggttaggatgaggtcatcctggagtagggtgagcccctgatccaatatgtctggtgttcttttaaaagagggaaatttggacacagacacacacacaaggagactgccttgtgaagacgaaggtggaggtgggcgtggtacagcagaagcaagaataccaatgatgccagcaaaccaccaaatgctagggagaggcccgggcagatggacgcgagacctcagggggagcgaagggaggactgagaaggagcgactgcagatggggatgaagtgttggaaggaggcaaagatgatgctacatctttaattgggggtgggcaacaacagtgatagaagagatctttggggagatattgactgttggccatgtggtattgcatggtaaccaagagtgtgcgtggactctggagtcgaactgctccgtgggttgagtctggagcctatcgcacaggcgctccgtgacactagaaaagttacttatgaaaatcccccctcacggtgctactgtgagaatgagatgagatgatgtaaaaacacttggcatagtcctgggcctgctgtttgccttgaggtgccaccctactgaccatgtcctgtggacacagcaaaaatggggaatgtaaaccttgatctagctggcatgtggggccccgccatggaactggggggatgagggaggtgaccataccacaggggagggcctgagaggtctgcctgagaaagatggcagctggatggccaaccctgttgggtgctgcaggcagaggctactggcagaggtggcctagggagggtctggtgtggtgtgtgtgtgtgtgtgttcgtgcacacctgcatagaggggccctgaaaaaagcaagacatcaagatcttcccaaaggagcggattctctgcctccccctttgcctgtggcttctgggacagggttggggtgtatgatttggctgcccccaggcctacattctagtgcatttctgccttgaaaaccaccctccccacacttttgagttttcccaaaatgcacagtgtcacttggggttggagaattgtttctcagccctggaaggagaggtgcaccctgtcatgtcatctcctacagcctgagaaccagctcagccttcttcagaagtcaaggccacagtcacaagaaagaggaacagaccgatgtggtggaaccggaacagcctgtctccatcttcccccaagaaccaagagattaaagcggtccttctgcaagcttctgggtccaggaactcggagctggaaggtgagggcgcagatggaggagggggaggaggcgagggcagggggcggccatgggggtgctggactcacatgagcttgttgcagaccgggggctggaaggagccccggttctccttcacccaggccctcactcccaggcggcgctccatgactgtcccgggcgcctcctcgcagcgctgtcctcccgccgtcggaggcccgcagctccgcccagccgcctttttaaccagaatcccaagctcacgaggcggagcaaacccccgcgaccccgtggtgggggcttggggcccgcggactttgccccctggtggactttggtctgagcccgccgccctccgcgccactccaggccctggcgagcgcggcggcggcagcgctggggaacggcgtcccgcgccctctgcttctccgcggggcaggggctcggtccccgccaccgtctccggggcgccccacacactggcgcctgcggtggggcctgctcccggcggaggacaaagaatccagacccttcctggacgcttgtccccagacgttccttccctctacgccccgaggggaatcccagggaaggttcccagaaatactacagtgaggagatcgcgggttggaagtcccagcacctgagaacacggtgctggcgctgggctcaagatttggctttcccatctggaaaaggggaatgactgccccgccactcagggctgcggcgctcacccagcgggaagccgcacggcggtccccgcaggtcccgattcaaggtgagccccagacctgctgcgtgcggccggcagactccgccgcgggctcggcgaggggagcggtgcaggcgccgagctgcggagcccgggctcagggcaggaccgcgagccctccccacctgaggcccagccgagcggccgctgtccgcgcagtgtcgcagtggaccccgagccccgtgctgaactccttaggcgtcttaggaacatactcagttcgcacgcagctatgggaggaatttggcagatgtggacaccggcctcagtgtcctagccctcgggaatctcggggtgttaatgatgacagccccgtgtgagagactctaacagttatcctgggggtgaggggctggggcgctgggcctgggcgtgcatgtgtgaggaaagagaaatctgcgcgggtgtggaagatggagaagcctgtctttctgcaggactcagaactttcttaggaagtttggagggagtgggagctgacgggtaggggaggaggaaaatggctcaggcccctgacaccggaatccagactatagagtttaagaaactaaacgcctctaaatcctgccctcacagcccgcctggcctgggctggttttctcagcattccagacataaagactcctctagtacaactcaaaatcaaaacccagacgacaggaagccgaattccccactgagaccctcccgtttcctctctgacgctctttttttttttttcatttttctctctccttttttttagttatttatctagcacagttttagctgagcacttctagtgcaaaactagaatatcgttttgcacccaagtaactcacaccaccttctttatttttctcatctacaagtaatcagaggagacgtaaacaatgacacatgaagcactgaggatctgagatgtgttaagtttgctttgagtgttagttaaatggagggatgggtgagtgggtggatgaaggcatcaatgaattcacacaaaaaggagaaaaaattgatttcagcccaacagatgttccgttaccatagtgcaaaggaaagaatgataggtactctgtattttaactgatgtgatcaaataatgtgaataattaaggccacaagtagaattttgggggtctgaaatatcccgagtaaccctctacacaagctaaatgactgctatgttatcactatcaaatatgccctctgatttgtgctgtgtagagcaaataccacgtctggtctactgaattggcaagcctcctggctcaggcaccactggactccaatgttcagaaaacggacagttgctatgttgtgagtattctggcattgttgagttggaaccatctggaatccttctggatactgactgttgggccccttgtagtttctggaatttacccgcttctaggagccacctctctcctctgcacacaggagctcatctgcactaaaggattagaagcaaatagaatctaccccacg

SEQ ID NO: 3094 - DNA, 4001 bp, Homo sapiens
caaacccagaagtcagactccaaacaatgttttttttgtttgtttgtttgtttttgagacggaggaccaggctggagtgctgtggcgcgatctcggctcactgcaagctccgcctcccgggctcacgccattctcctgcctcagcctcccgagtagctgggactacaggcgcccaccaacacgtccggctaatttcttgtatttttagtagagacggggtttcaccgtgttagccaggatggtctcgatctcccgacctcgtgatccgcccgcctgggcctcccaaagtgctgggattacaggcgtgagccaccgcacccggcccaaacaatgtttattaattgctctgtcatgctacttctcatgcaaaggaaatccatcatctcaatcattcattttgcagatgaggaaaataaagcccatttagtttaaggcatttgtccaaagtaacacagctagtgactagaaccacgtgccctggctaccacttccgagtgacatcagctgccgatccataagaaataccttcaaaccaatgcaggggtaagataaaaattacacgttacttttcaaaagtgttgtgaaaataggggaaaaaaaccaccaaacctgtaaggaaacataaccgaaggctaaccgtaggtaagcatatgagtagtaagacaatgggtgattcgtttttttttcatctctttcctcaatccttacagcatttcaatgttctataatgtgcttatgttataattggcaaatacatgctacagttttgtggagactaaaaacagctgttgaaaaaagggagcagaaaaatattcaatcattaaaaaaatccccttacagtaagggatttcagctacttgtctaaaaaaagcatactacttcagcggttccggaagagggaagagaggtaattcatattacaaattaaattaaaagttaaaatttctagttaagtaacttattaagcacaacatgcaataaaacgttgtccacttttgactttacagatttgggatggaaagaaaatgcaacgtttcctacaaccacccactttaaccctttcactgccagtttgaaaaggaaaaacactagctaatacaggctgactgggaatcatcagattacaaatcgttctcagaacgatctaacattttattgcttaaggtagaggtattagcgtatttttaaagtgtgtcttccagtaagttgcagaacttcccgctgaaattcaaaatactatacgttcacactgacattactgaaactgcaagagttgagctccctacttgattggggtagtaagcacaaaaatggttttgagggaacggagcagggaggggcagtgatctgcaaggctgattaatcccatacaagacagcgcttgttgcggggtaaggtgctgtttttaagacagctcttgttgcggggcaaggtgctgtggagccacaaagatgcgacagaatggatcccgattctcctggaactccggatcaagaaaatatgaggggcgtgagcccagaagtgcgacgcaagagacccgcggaaaggtgacagaacgagtggcaccagactcagaaagttggggagttaggaagcctgaaatcgccgcaggagtcgtgagaggggaagtgacagtctcttcagaaggtcacgggaaaccgggtcccagggcagtatccccacagagggctgcgtctccgggctggggcaggcggcagcgaaagggagacgcggctccggggccaccccagtcccggcaggagttctgcccggaggtctgggatgccctcggccaggcctcacctcgggagcggaggatcctgaaggcagaaaagcggctgaggatgccaatcgcccggcaggccaccatcttgagctgaagaggacagcagtggagagcgcctctaacgggtgcggccgagcggaggacttttctcccgtagcctggcagccaggcgcctggagcactgcctgactaaaacccagatgccgagtggccgccggccccttagccctgcccctcgctcctggctaacatggccgaaaggtcgtattctccgggggaggacgggggcccggagaggagggggtggagtgcctggttttccagtcaggcggccggagggcagccctcaagaacggccctgaccgcccgcggggtgaggggccctttctgggcaggacccgccccttggtcccgcagagccttggtacttggacctgaaccttgctccgagagggagtcctcgcggacgtcagccaaggtgagacggcgagccctcagctctccgcccgggctttcccaaaggcgagattccacttccttccccgcaactgtcgccggtgcccccggccccctcccctccctgggaaagtgggagttgagggagcggaaggaaactcctcggacaaggtcggcagtgctagctgcagttaggacagtgacttggactagcgttccagctgaagttcgggacagtagtgtcacctgcgccctaatttatcatcacaagttaacgaagtctgggggtgtgggggtgtgtgtgtgtgtgtgggtgtgtgtgggcgtgtgtgggcgtcggccttaatgtaaccctggtctgcgtagaagtgtgtgttgtttcgcctgcttcccctgtacccaggtcggcggctatagagattgtggacggcgccatgggtttgcccgatttctgctgtaaagaataagactaggtcaggtgacctttcggggcttgagtgtgggaggaacggagacaatcctccatccggctccgttatccagataatcctgcgctctcgggggttttccgatctggatgattatctatctggtcgttcacacctcagctcacttaagcggtgaagaaactgcctacgaatcagagagagtgattttacccatggccatatgtagtagaaataagactggagcctaagtctactaactcctagtgaagagttcttcattgcatggtagctgtttttgtgctggaatgatgggctggagtcctggaataaagtgattgatttcaaaaggaagtcacattgagagcctgctgtgctctggtcaccttcatacctttttgtttagtcctcacattccccaaattattatcatttgcattttctagatgaagtttgggaagctcagaatatatacattttctagtctgtgacagacctagcattcagacataagtctgagtctcactactcgccagactgacagctctgcaggacaggaaacaaggggcatcgaagttaagactgaaatgagtatagagacagagtagagaggtttctgtttaaagctcaagttgcatagtgagtgctcatcatgtgagcactttaagcagaaactggatgacctgaccacttctgaataaattgcaaaaaggattcttgataatcttacaaggtttttacagttcagagcctgcctcctgcccatgtaatgctttcttcaacacctaactgcgtgtaacacttattatttaggtcagaagtggtaaattttgttgttgttgttaaaggtccagacagtaaatagttcaggatttgcaggatcactttggtctctgttatatattgtttcttttgttttgttttgtttacaacttttttttttttttgagacagttttgctcttgttgtccaggctggagtgcagtggcgcgatcttggctcactgcagcctcctcccgggttcaagtgattctcctgcctcaggctcccgagtagctgggattacaagcgcacaccaccacgccgggctaattttttgtatttttagtagagacggggtttcaccatgttagccagcctggtcccgaactcctgaccttaggtgattcgcccacctctgccccccaaagtgctgggattacaagtgtgagccaccacgcccgaccttacaactctttaaaaatgtgaaaaactatttttagctagaggcccgtgtgttgtagtttgccaatccctgatttagatcactcatt

SEQ ID NO: 3095 - DNA, 4001 bp, Homo sapiens
gggagcaaaaaaatggagccaaatgagtgatctaaatcagggattggcaaactacaacacacgggcctctagctaaaaatagtttttcacatttttaaagagttgtaaggtcgggcgtggtggctcacacttgtaatcccagcactttggggggcagaggtgggcgaatcacctaaggtcaggagttcgggaccaggctggctaacatggtgaaaccccgtctctactaaaaatacaaaaaattagcccggcgtggtggtgtgcgcttgtaatcccagctactcgggagcctgaggcaggagaatcacttgaacccgggaggaggctgcagtgagccaagatcgcgccactgcactccagcctggacaacaagagcaaaactgtctcaaaaaaaaaaaaaagttgtaaacaaaacaaaacaaaagaaacaatatataacagagaccaaagtgatcctgcaaatcctgaactatttactgtctggacctttaacaacaacaacaaaatttaccacttctgacctaaataataagtgttacacgcagttaggtgttgaagaaagcattacatgggcaggaggcaggctctgaactgtaaaaaccttgtaagattatcaagaatcctttttgcaatttattcagaagtggtcaggtcatccagtttctgcttaaagtgctcacatgatgagcactcactatgcaacttgagctttaaacagaaacctctctactctgtctctatactcatttcagtcttaacttcgatgccccttgtttcctgtcctgcagagctgtcagtctggcgagtagtgagactcagacttatgtctgaatgctaggtctgtcacagactagaaaatgtatatattctgagcttcccaaacttcatctagaaaatgcaaatgataataatttggggaatgtgaggactaaacaaaaaggtatgaaggtgaccagagcacagcaggctctcaatgtgacttccttttgaaatcaatcactttattccaggactccagcccatcattccagcacaaaaacagctaccatgcaatgaagaactcttcactaggagttagtagacttaggctccagtcttatttctactacatatggccatgggtaaaatcactctctctgattcgtaggcagtttcttcaccgcttaagtgagctgaggtgtgaacgaccagatagataatcatccagatcggaaaacccccgagagcgcaggattatctggataacggagccggatggaggattgtctccgttcctcccacactcaagccccgaaaggtcacctgacctagtcttattctttacagcagaaatcgggcaaacccatggcgccgtccacaatctctatagccgccgacctgggtacaggggaagcaggcgaaacaacacacacttctacgcagaccagggttacattaaggccgacgcccacacacgcccacacacacccacacacacacacacacccccacacccccagacttcgttaacttgtgatgataaattagggcgcaggtgacactactgtcccgaacttcagctggaacgctagtccaagtcactgtcctaactgcagctagcactgccgaccttgtccgaggagtttccttccgctccctcaactcccactttcccagggaggggagggggccgggggcaccggcgacagttgcggggaaggaagtggaatctcgcctttgggaaagcccgggcggagagctgagggctcgccgtctcaccttggctgacgtccgcgaggactccctctcggagcaaggttcaggtccaagtaccaaggctctgcgggaccaaggggcgggtcctgcccagaaagggcccctcaccccgcgggcggtcagggccgttcttgagggctgccctccggccgcctgactggaaaaccaggcactccaccccctcctctccgggcccccgtcctcccccggagaatacgacctttcggccatgttagccaggagcgaggggcagggctaaggggccggcggccactcggcatctgggttttagtcaggcagtgctccaggcgcctggctgccaggctacgggagaaaagtcctccgctcggccgcacccgttagaggcgctctccactgctgtcctcttcagctcaagatggtggcctgccgggcgattggcatcctcagccgcttttctgccttcaggatcctccgctcccgaggtgaggcctggccgagggcatcccagacctccgggcagaactcctgccgggactggggtggccccggagccgcgtctccctttcgctgccgcctgccccagcccggagacgcagccctctgtggggatactgccctgggacccggtttcccgtgaccttctgaagagactgtcacttcccctctcacgactcctgcggcgatttcaggcttcctaactccccaactttctgagtctggtgccactcgttctgtcacctttccgcgggtctcttgcgtcgcacttctgggctcacgcccctcatattttcttgatccggagttccaggagaatcgggatccattctgtcgcatctttgtggctccacagcaccttgccccgcaacaagagctgtcttaaaaacagcaccttaccccgcaacaagcgctgtcttgtatgggattaatcagccttgcagatcactgcccctccctgctccgttccctcaaaaccatttttgtgcttactaccccaatcaagtagggagctcaactcttgcagtttcagtaatgtcagtgtgaacgtatagtattttgaatttcagcgggaagttctgcaacttactggaagacacactttaaaaatacgctaatacctctaccttaagcaataaaatgttagatcgttctgagaacgatttgtaatctgatgattcccagtcagcctgtattagctagtgtttttccttttcaaactggcagtgaaagggttaaagtgggtggttgtaggaaacgttgcattttctttccatcccaaatctgtaaagtcaaaagtggacaacgttttattgcatgttgtgcttaataagttacttaactagaaattttaacttttaatttaatttgtaatatgaattacctctcttccctcttccggaaccgctgaagtagtatgctttttttagacaagtagctgaaatcccttactgtaaggggatttttttaatgattgaatatttttctgctcccttttttcaacagctgtttttagtctccacaaaactgtagcatgtatttgccaattataacataagcacattatagaacattgaaatgctgtaaggattgaggaaagagatgaaaaaaaaacgaatcacccattgtcttactactcatatgcttacctacggttagccttcggttatgtttccttacaggtttggtggtttttttcccctattttcacaacacttttgaaaagtaacgtgtaatttttatcttacccctgcattggtttgaaggtatttcttatggatcggcagctgatgtcactcggaagtggtagccagggcacgtggttctagtcactagctgtgttactttggacaaatgccttaaactaaatgggctttattttcctcatctgcaaaatgaatgattgagatgatggatttcctttgcatgagaagtagcatgacagagcaattaataaacattgtttgggccgggtgcggtggctcacgcctgtaatcccagcactttgggaggcccaggcgggcggatcacgaggtcgggagatcgagaccatcctggctaacacggtgaaaccccgtctctactaaaaatacaagaaattagccggacgtgttggtgggcgcctgtagtcccagctactcgggaggctgaggcaggagaatggcgtgagcccgggaggcggagcttgcagtgagccgagatcgcgccacagcactccagcctggtcctccgtctcaaaaacaaacaaacaaacaaaaaaaacattgttt

SEQ ID NO: 3096 - DNA, 4001 bp, Homo sapiens
gtcgagacggatatcatcctggccaacatggtgaaaccccatctccactaaaaatacaaaaattagctggacgtggtggcgcgtgactgtagtcctagctactccggaggctgaggcagaattgcttgaatccagaaggcaaaggttgccgagatcgcgccactgcactccagcctggtgacagagcgagactcagtctccaaaaaaaaaaaaaatcagtaaaaattcagacagaaaaaagccataagcaaaaaataaaaaggggtacaatgatgtgctataaacttcaaaaaggggttaaaacacacacacagaaaatgggaaagacttgaagcagtacagattaatagtctggagtgagaattcctggattctgactatttcacacacttactgagctagtaagctcagggaactagagcacattacttaacccctctgaccctaatctacagaaccgagattacagaatttacttcgaggaatgtaagcaacaaaatttaacctgtgaaatcatatattagctcaatctgcacaattctataagtaggtattacatcaaccccattttacattcaaaagttcaggcttagaaagaggtttagttgaagggcatccaactactaaatgatgggcccaaaattcgaatttagatgtaattcttagagtacgtcctccctcttctgtggtacttcaagatcctacaatctccatctggtagaaaagtccttctttaaacatctgtagagctcacacaacagcttgtctatcccacatattcataaaaatggaatggttaatgtagagagactatgaggaatgccctgtaaagagatgataaaagcaacaaaggccagcgaagtggctcaatcctgtcattccaacactttgggaagctgaggcgagaggatggcttgaggccaagagttccagaccggcctgaggcaatacagccagactctgtctctaaaaggttaaaaaaaattgtttttttttagccgaatgttgtggcgcatgcctgtagtcctagctactcgggaggctgaggcaagaggatcgcttgagcctacgaggagttggaagctgcccggaactatgatcgctgcactccagcctgggcgacagagagaccctgtctcaggaaaaagaaactgtccataacttcaaaagataagtaatcgaaaaaaataatcacaccaaaacagccttaatacacgtacaaagtaatagcaattatacattattaaatgttgtaacttgaagggtctctagaatgtacacaagagaattgtattatagtagtccaaccctaaaagagaagggagcagttcaggaacaaagtctttctcaaagggcatctaaatacgatcctcggaatactaaagtgtgacagattaacgagacgactacgaagtcagtcgagatccaagtgggagcgccagagcagggcaaggcagcaatgcgctagctcagaagttgactgtagtggaaggtagacggagacctggaagaggaggaggatctgagcattaaaatcagctggcgggaacaggaccagatgtacaagagctgaagcaagcagcagtggacaaaaggaatgggaagagaaacaggccccaaggcatgtggcattttacgagcccaaatcatgacgcttttccctggcgtcttcggccctcggtaggggccggattgctggcagaaggcgcagaaccccaagcagttgggggcgggggcgcggaccgccgccaacaaggagctgctgggctgagagttccgcgcttccggtcccaagcaggccttctggaacccaggctacagcccgaaagttctaggcgggcattgtcaccaccgtctcggcgttctatccccgatctggccgcctcctccccttggtaaacttttcccggtaacttacccgccatttccgagctacgatcacccgcggctgaggaaggacgaatcaacccgcgcgctcccgggccggaagtgaccgcacagtctgacatattttccccgcccactcccagcgtgacgttagccaattaaaggaggcgtgtccaggagcccggcggcggaagcgcctcaagaggcggggctaacgccgagaagtctgcgcgggccgttgcctagccactgcgaatgccgtcagccgctttgcaggcctgaagtggagaaggaggccgcaaacggactttcgcggttgagatgctctctggccctaggaaagtttctctggggttgatttgatcaatacagacactttacgcctgttttccatacccgtccctgagatgttttggagactggctgaaaatctttcctcttggcctggacagtgcatccaaacacctgagccctgtgggcaattttaccattttacctaggtaaaatgtagaggttgagtttcagttgcgggagaagctttcacttgttttcctcatttgtttctcattttgctgtaaactttaacaccttttttcctttctcccctgtttttaacgtatacagtatgatatttaggtactctgctttcactctgcaggttactaagaaccgtttagcgcgcaaaaatcgttacctaggccgggcgcggtggctcacgcctataatcccagcactttgggaggccgaggcgggtagattgcctgagctcaggagttcgagaccagtgtagccaacatagtgaaaccccgtctctactaaaaatacaaaaattagccaggcatggtggcaggcgcctgtaatcccagctactcgggaggctgaggcaggagaatcgcttgaaccctggaggcgaaagttgcagtgagccgagattgcgccactacactccagcctgggcaacagagtgagactccgtctcaaaaaaaaaaaaaaattgttacctaataaatacctcaagtagcctgatgtagtcttgcatgccacatgtcctagtggtttgaattacatcacaaggtgctacctgattttagccataggccttgttagtatttagtagctgtaggaactgctttccccagaggataaaccactatttaggtatccacaaatattcccacaatgttggctatacaccagaattccttatctcaacaaatatttgttaacaggttttacagtgatgcacgctaaagctaaaatggacccttgggatgatggtctagaactaacacgccctctcattttagagatgaggaaaccaaagcccagaaaagataaactgcccaagttcattctcagtatgcaacctatgcagagtgcagttcatcagatactcagcccagtatttatttgctcaactatatagagatggctttcctgaagataaagatcagaaaaggtactgagaatgcccagatcctttttctttcttttttttttttttttttttagacggagtttcactcttgttgcccaggctggagtgcaatggcacaatctcagctcaccacagcctccgcctcccgggttcaagcgattcttctgcctcagcctcctgagtcgctgggattacaggcatgcgccaccacacccagcaattttgtatttttgtagagacggggtttctccatgttggttaggctgatctcgaactcccaacctcagatgatctgcccatctcggcctccaaaagtgctgggattacagtcgtgatcccaagaaaaggtttcaagatcctttttcttgaaacctaatgatacacaagaaattacagtcataggccgggcgtggtggctcacgcctgtaatcccagcactttgtgatgccgaggcgggcggatcacgagatcaggagatccagaccatcctgactaacatggtgaaaccctgtctctactaaaaatacaaaaaaagtagccgggcgtggtagcgggtgcctgcagtcccagctactcaggaggctgaggcaggagaatggcgtgaacctggaaggcggagcttgcagtgagccgagatcccgccactgcactccagcctgggcaagagcgagacccc

SEQ ID NO: 3097 - DNA, 4001 bp, Homo sapiens
ctctttaggatgggatttgatctctaaaataaaagcccagaacacagaaagctatagaagtcttacaatgtgttggggtgtgtgtttttaaggcatgaaaatacttccctcccacacaaatgtgagttcttctggggaaagatgccacagatcccagagagtagaatatctgggaaagcccgatcagtcttaaaaataggtaattgaacacagattttagaattcacaagagctacctgaaaaaaaattaaatttcacatatttttgatatccaaaactccattctgatgaaacttctaactcggtggcattttgcatttccaattataatagagtaattgtgttgccatagttactgcaaaattctgcaataacttttgttgctttgtaactgctgtagtgtatatttgtgtacaagcagctgagttttcttaattcgatctccctcccttccaccctccctctccccagccaccaccaccacctttcctggctaggtcctgaaaccaccacaccagccttctttggacagtcccgaaaataatgcacagaattatcagaagcaattaaaactccaggcaaccacgatcatattacaaaagaaaaagtgaaaccaggtcaaggtgcaaacctgccagtatccccccagtcctgctgggctggcgctgggccaggactgtttacaggcttactcccaggccttaactgcttcggtgatttgtgggaataaacagaaaagcctgaacagagaaaaacggggcggcaaagtgactgcacaggccctttcctccctcacggagagcaagcagaactgctctcagcaagcaattaggtaggtctctacagtcatgcaattaggatttagtgaagaaagtcattagttttaaaataacttaagtttaatttctgcaacgctttatttgaaaactgtgtcacagcaggtcaatttacaacatgcaataaagaaaacactcatatcagctgcctcaagttattacaaatttttgatgtgcattaaatgagtacactgggttccacccccggcctttccaactgatacgcacggtctcctcctataacagtgtcaaataattcaacgctcaatgtaaatacgagataatttgcttatgattccgtggtgtgttttcgcaacgccggcaaacgcggatcccacccccgagcgggaccgggccccgtctcggcctgctggcgccctgcgggctgagccgagcgggtcccgggcagccccccgccctcccgcgaccccccgggcgctcgcagcggcgacgacaagcgcggggccgcggacccccggcagggacgtttttctgcaaactcacagcatttgacaaagttacataaacggcgcccggccggccccggcgcccgcccgcccccgccctcactcccggcggcccggagcccacctgctcggggggcgcgggccccgcaccgggagacggcgccgctgcctgccgtgcccacccccgcgcccccgccccggcgggcgaagccgcctcgcggcgcgggtggaaaggtccagaaggggccgggcggccctggggaccggcgggtcccacggcgcgcggccagcgctggcccccgcctcccacggccgcgcgcggggcgggtgtggaccggcggcgtccacctgccgcgggctccaaggcctgcaggctgcgcggggcgcggggcgggcggcggacaatggcccgcgggcgccgggccggggctgcgcttaccgcggcgggcggcggcggccggctctagccctgctccggcgctccgcgccgcatctcctcagcctgcgccgccacccgccggcgcgcgggctcgggctcgggcggcgacagccgggacgcggccacggcgccgccgggggcccaggctgggaggctgttcgggcggcggcggcggcggcgcgggcgggtgcgcgggctcgggctcgggctcgggcggcggcggggacggtgctccgcggcggcggccccacaacctcccctcctcattcacaaaaaattgacccacgttgaaccatgatgcttctccccactccagcgtcgagccaggcggcgataggccaccccgcacgcccgtcagccggcccggccccgcccagccagccggcggctcgccaaccattggctgcggcagccttgcgtcacctccccttgcgggccccgccctcccgcctggtttctaatgaagagctcgtcaattacggctcggccccgcctcccgcccgcccgccccgggcgcctggccggccttccattggcccgctgaaacctgcgcacagcccgtctgctcccacccctcgcccagcggctgctcaaccgcggggccggatgccctatgagcggcagagaggctccacccctgcccgcctccccgcacgcgtcctggacctcattggctgctggagctgccaattctagagggtggggcgtaccaaaagacgctccaggcgccagccgctgggtgcttcgcggttgaggaggcgcagggaccgggggccagtagtggccgtaaacacgggccccggccgtgtccggtcgcactcggtagcccgcatggctgcctagcggtcagcaccgcatgtctgcgagcctaattcgcgcttagagggcacacaatggggtgcaggctaacgcggggagccggccaggcctcgccgcggcgtccatcttggatactggcagtgggtcacgtggtgctgcgtgcgcacggaggcgcagggcggcccggtcactgagtgcgcaggcgccgtgggcctcgccctgccccgcggcgggaacgcggccgtgagggtgtggggtgtaggtccgccaggcctgcaacggctgccgagggtcgtgggatgcgctcgccgcgtccctgctcaggcggagggagcccggcccgccgccagggtctcgagtccgggtccaggcaggcgtggaggtggcgggaacggcgcaccgcccgggtgggcgttgttttaaggccgcagggcttgggaggcttgtgttgagttacaggtcggcccgtagatccccggaagcgcctttggttgccagcaggtgtcggcgagggtcttcagtggccaccctcctggtggtgatgtttccgtttctttccaacaggagtatgacaacttttcaacttgagtgcacacactgtccccggaatcccgcgttccagggaggaagcgcctttgacagcgcgcgccggttcgtggggcccgacggcgtgggcctgtggttgcggacctggcggagatgcgcgttcgcttcgattgtaggccattccttttaggagctgagaaaggatccgtttttacagcattctcgacctgtgattcttggtgggggaaactagttatgtggataaaaatacagttagcaaaataaaaatgccaattttacatttccttaaatatctcattaataattagaaaactttggtcattgcaagaaatgcttaggctaaacttagaaggaaaggaatggtgaattagagaactttaaaacaagatacagctgaagaaaaggagagcaattacggggttttggagacttggctgctgatggaaacggtgcactatctaattttcatgtagaatgaaacagggtctgtagctagctaacatctagataagattcagtatcatttgacaggattctcaaaaacatacaatcacgagaaaatattaaaacctgcctgtaagtctaccaaagttagtttttcacgtacaaagagaagtgcctgcgcaaaaagtcacgtgaaacgagctctgggatctaatgcttgcagaggtaatttttaaaaagtagatttccattagaaggaatgggtagccccattgctgcgtgccatttagtcctcacaggagtcctgagaggcactccagcagagtgaggcaccacgcagacgttgggtggatggtgcaagaacctcactcgccatgtctggaaaagagaaacttggcctgggtggctgtgtctgccattatgtgtcag

SEQ ID NO: 3098 - DNA, 4001 bp, Homo sapiens
cccaggataccttgggcaggcctagatacccaagaacagaggctaacatcgggtatctcagattctcactggatctaacagtactgtccaaatcaggattgaaaggaacctcagatattaatctaatcccatttcttaataccaccagggacaggaaattcatggccttctcagggcccgggtccacccctgcatggctgtaaacgctccacctcaagttatgacaaaatctacaacttctttcccctttctggccatggagaacaagtccgctctcctccaaggctccttctggtaggtgagccctatctcctgtctccttcagtccctcccatatggccccagtcccttcgtgattctggctctcccaactacttttcccataggaagctcggatcaatcagtgtccaggtccacctaatgtaaacctcaaactatactgaacctggacttttaattttgtttcccagagtgcaaacatccaaagcaaaaaaggtcacatctcagaatttaactttcagcaaacagaactagaactaaaggaaggagggcaggaaccaagacccctttccgccctaatacgtgtagagcaaaacgtggagtcctgacagagctgtgtgttgcgtgggaaacctggtgcttacaagtttagcacaagtctaacaggtttctgacagcaacaaaaaaggcttcacatgaggggttctacttttttgcttttaaacgaggaagtaattaagttgattcccttgtgataagttttgccaactacatattcaaggggcaacagtcttcgaagagaattatcagtaatactccaggaagaatttcatttcagcctcagttaatgagacccgcaagtgctttaaagcaccagacaggaccgggtatggagggcaccaaaaaagcctccggctgaaacccagacttctcctcttccaaaactaaaattactcaagaccacaaaccaaagttcagaatgggaaaataaaatcctgatccactcagagatcacaagatcgaaatctaggagagaccacaggcgactggcgagcagaaggcaggctccgctccgcacttctcaccaagttctggaagtcggcacccatcctgcatggaggaactttcgcagatgccacctcagcacggccctcccacaggccacgagggcccgcgggcggggacaggcttaaagggacagcaacccctcggcctccccgcctttcatccaaattcggtacttttccgtaatgtatttttcatccacgaccctggggcacgtccaagttgcactccaggcccaagaagagcagctttccccacccccgaacacgtagactgacgcgggccccgcgcggcaggtggaggtgctgcgggggccccgccgcccggtctgcgcccagacccccgccccgccgccacctggggggaaggaccccgctggcctcccagggacccccaccctggccgcacacggcgcccccgccggagcgggggaggggagggccggccccgccaacgtcagcgacctgggctcaggtcggccgcccctccgcgccgtgcggccacggcaccaggggtgccccaccgaagccccgggaggaggcgggggagcccagcttgcagccaagagcggcccagcggcgccaccggacttgagaaagtttgtgcgcgcccctccgcgccacggccacgcgcagaagagactcggagccggccccaggtctggcccggaaccgccacgcgcggtaagcaggacacccgcgggcgggggccgcagcctggggcccgggtgggggccgcggcacccgggcccctccccctccgcggcctccacgtcagcagccaccccccacccccccgcccggcagcccgcccgccccgtccgcccgcccgcccaggcctcccagccccgtgttgcgcgctcactcgtgggcccccgcccgctggtcctgccgctggcttactcgccccccgcgcgggagaagccgggacgctccgaggcgcggcgcccgggccccggctgctatatagggcggcggcccaatcccgcctggacacgtcagcgcccgcccgccccgccgctggggtccccgccgccccgggccgcccagcacccgggaggcccacccaactgcaggcgtggttctgcatccttttttcgggtggggaaggcggtgccgaggagttgggaaattaatcacctccagaaagcagagggagcgcgccccgcaagaacccgagtggaaacaaccgaagaccagaaagggagcaggaaggacggctgctctggaagcagatgtcaccagtaccgcccacctccccaaaatcagaagaaaaacctcaaaggatgcccaccacatcgtaaacggatggccacactggcacgaggtcctacagcgcagtgaggctcccaggcggctccagggctttcattccctcattcctgcgtgcctattccttatgtccctcacttttataaactatccccacccgattccttggcaatcaacttaatctcccccccaaaatgtaaaatccccttcctttaaagcgtgtattacttatggctccatctctacatagatgtatacacgcaaaagaaccggtgtgtggcctctgagcccacggtggatacgcaggactgggcggaacggaatccctactctcggggtctccaccctccgggaaggacttgtcacttctgcatccattgtgtttactaagtgataactgccactgtttcttttaagggtataaagggagtcgagcaatctgtagagatgtcagtctgaacctctggcaaagtcgcaggtcaacagaatcctgcatagggcacaggatcaactacaggtatctggggacaagaccgtcccacacaggggaagaggtaggggcacacccagccttacccagggaatggggtcaggtccgcacagcctgcagccaggccacgggtgctgttgaggatggtgggagctgggtgggggctgcaagcagcagaaggcaggatcagacgtgtttttttttttttcgtggaacactgacactaagtggcaggggaggggagggcaggggaggcctactatagttcagtctaaagatgacaatggcttgcattatggtgggcataatggaggaaataaatggccagatttggtatatattcagaaagaagcaccaagaagttccttattgaccagaagaggggtgtaaaagaagttaagaaagacacaggttcttggcctgagtgactgggaagagctgccctcactgaggtgggtaaaattcaaggaagactggatggataagggggtgtgatgccctgactgggcaggtggggaagtggagcaggcaactgtatgtgcaaggtcaggggaaaagcctaggagccagcagaaataccatgcacttcatgacaccacctagggaggggagcagaatcacagaaggcagagaacacctgcggcttgacgcagagaaggagccaaggatatcatcagcaaagccgtgctctaagtcagcagcacggaactgggcaggtgggcctccctagatgtggaaataggcattcccttctgtgtcactgctgtggtttgttggtaacctttccgtggggattaaccaatcagcaactagtgcaagtgtgttttttgttgctgttttgtttttgagggctcagcactgcagagggagatggagaaagagtaacgggtagggattcggtccgctgtcaaggaacttccaataaagctaggaagtcagcacaggcacagtacctagtacacaggacaccgtaaagagttagtttaaaaaacactgttagcagaagagattacaaaatcatatgctaactttgtgctaataaccgtccagaatgcttctgtgctgatgctcacaaccagcatttcctcccagcaggcttagcacactgaaactaataaatagttcgtagaagcaaattttagaaattccatggctagcaatattcagaccaaatg

SEQ ID NO: 3099 - DNA, 4001 bp, Homo sapiens
ctggaaggccaaaacaacaaaacctggaaaaatacgtatttactcaagaagaaattctcccaccaggccactgagaagttagctttgcccactggagaggacactgtaacagggattcaagtaagcctagtggcgctgagggacgtgatataggtcaactatatctttgaggtgctctccttacactcaatgcacttttacccgaatgacgttaatttgactcctgataagatgagctaagtcccttcaacagtgcttggcaccaagcaaaactaatagcagtaacaggaaagtttaatcctcatgatgaattatttaatggggtttcaaacgctgtccctgagacttgaggcagtaggctccagctccattttccccaagtctaaaacttgataggttgatgtttcagactcagagattcggtaatccaaatgatggaaataattcttacccaaacaccttttcaactatttttaaatactgttgccaagcatcctaatatcatgtgtacttaatgaatttagcctagggatacttttacatgtcaaaaaatcaaaatataaacctaagcactacgtttcatccagtgtttcagcatcccagatttgcttccctaaatgaacattaagcttattatgcaatgtgccgctaccaggagccttagacaaaaccctaattgtgacttaacctatcttaatagggttttaaggaagttagctgctaagaaagtgactatccttaagcagacaccaaataaatgtgaagtcattgattgagggcttagggtataggtagctatgaatctgaggacataaaacgcaaaactgaggggcaaatcgtcatgttccttaagattacgactcatccacattccttcagccgtttaatttcaccataataggcactgtttaataagcaaagcccaagtcgacttccttcgattttacatggcgtccaaacaccatgtcaagtctgaccctctcattttttaagtcgaatggagaggatatgtagcagctagccttgagcacctaaccacttttcaaaggagctacgcacaaaaataccctagcaacatgccacggtgtcagaaaggctcaggttcccaacaccatgcgggtcagccattaggaactcaggaagtgtttcctctaagcgggggaaacctaggaaggcttcctgaacgaggggtatttgcgccaagccttgacgtgagtctcgaacagttgcagtgcctccaggccacgcgggagggaggaaaggacaccccgggccggggcacaacccgcgggccggagccgcccgcgcccatcccgctcaggccgcagccaggcacggcaccctcccgtccccgagccacgtcgctgctcgtgggctcgcggagcactccccaggtctcacctcgggccccacaccagaaggagaaagctaggggccgcgccagctccgccctcccccgcggggcggcgggccccagcccgggcacaggaaggccacgtccccggggagggacgcccgactcgatggtctgcgcagggcccgtcggccccacgtgacgtgcgcgcagccaatcccagagaggccccccgatcatcgagacggcggcggtggtgggctagacgagtttcgcgcggccgctcgccgtcccccgcccagtcgtactcggcgccccagctcggtgctgccgccatcttcttggaggacaggaggagaggcgaaggctccccctccccgtgatcgctccgcactcccgccaccacctgccctcccgcgaccgcctctctcctcctcagtgggcacttgtctccttctaacaaacggccttccccccactccagttacccaccgcaaggcgaagattctcattacctgttccactcttataagcataagaaaaccgagctcataaggtaggaactgtggcgaaacagggacaagccgccatcttggtaaaggagaagaggctacgcttgacctccccccccacccccagcctctatatggccaactgccgtgggaggagcacggcgcttgcgcagaggcggacaacgcggacgactctgggcttgcgcactcggaagccggccgcatgggggaggggaagaaggccaggtcgcactgagccaggaagcagttggcaaaggggcggggtgacgcggtgacgcaatccgcctgcgcgctgggcggggcggggcgggctggggcgggctgtgagcggaccgcgagcgctgggcgggtccgcggcgcggtcggtcggcgcctgttctcgggctgtttggcgggtgagtgtctcgccggtgtaccccgcacaagttgtgggccggccctcccgaggagctgcgggggacgcgccgctcgtcccatactctcgggcggtggtcggctggctctggggtgccggcggggcggtgtgggggaggggcggccgagcccaggctcttcggcacttatcgtgggctcccccgtcccgggcggtcctagtgccggcgacagtggctccgacacgggcaggcccgggcgcgggagtggggattccggtgaccccttgttgaccctgcgggaattcctctgcactgtcgtcggtgctgggcctcggggcgtcgagtgcggtcgaggtcgggaggtttggtgcttggagggaggatacaggtttaggcccgacaaacacttagagcttgtgtggccatcttgtctttctaacggtgccatttcctccctgaggcgtggaggactggccagcccccaaacctccaagcccatcggctggatgccgtggataagcgaggggagagcgactaggccctgtctgcgggtaccttcggcgaggagaggcgacgaaggtctgcaccagcgaggcacggacaggcagcagggggtagggtatagggttggaggccgccgagttggcccggggatgaggagcaaacctgtggcttccgtggtctcagtggagtcccaactgtgacctggcctactggcccagacaaacctggcttgcttttttaccttttcggtctaattcttgtcagtgccaccagaccttgtcctctctccacggaaacacacgaaccaactacactgaacttcttgtagttcaaacttctgcacctttggccattgcccaaactcttaaatctggctacttcccaccttaactgccttctccttacctagtctgtgcttgtgggattccgcccaaattagatttcctccagacaggcttaggtgtttacctgatgttccagatggtatttgtccagtggactattggtgctgtgagggcagggcacatgttgtcacccatactcattgcctcggttggtgtctagcacctagtaggttctcaaatactttttgaatcacagtgcctgccgatatatttaatgtttcaaaatagttctgccgtcataaagaaaaacatcatggtgtaggggtcatgaaagctgattcttgatacttctgatttgagcctcattgttttcagtgatttttgatagctcccattaatgggttctttgcaccacccagcatcctaactcatgatgtgtactgttatgtataatcttggcattgatctcattagctataaaggttgtcctgattttttttcctcaacttccaccttgatttctctcaccagtgccacagccaggaataaagaacaagagcgttttaattagatcagatttacattctgactggctcttaaactagcaaggtgacctagggaaaggggccagggtttccctctatcattcataaatgtaattcagggcccctttttatccccaataccagcatacagaaactgctgtaaaagaagaagttgtgggtatttttttttttttttttgtctggaggaatggggacaccaaaactcatttggcagcagaggtgaggtaaggccatttgtattgtctgttctgttagtagtcatacatgccacttatccctgccccagtccctgttaggagtgttatgtgggtatactgaacgtggac

SEQ ID NO: 3100 - DNA, 4001 bp, Homo sapiens
gtgctgggattacaggcgtgaaccaccatgccgggccatatctacttttaaagacagaatataaaatacacagacaataaaaagtaagttgaatcaatgttgggaactggctccaaaactggccataaataaaatctctgcagcactgtgacatgttcatgatggccataacgaaacccgaatgagggcaaggaacacctggcctgaaaaccgcttaaaggcgctcttaaaccacaaacaataccatgagcgatctgcgccttaagggcatgttcctgctgcacagaactagccagacccacccctttgtttcagcataccccttcgtttcccataagggatacttttagctaatcgaatatctgtagaaacaatgttaatggctggcttgctgttaatagacacttgagtaaatctctgttccggggtctcagctctgaagcctgtgagacccctgatttcccactttacacctctatatttctgtgtgtgtctttaattcctctagcgccgctaggttagggtctccccaaacgagctggtctcggcaaatcaaggctatgcaggaagaaaaaacagattaaaaaaaaaaaagagcctattattgactcctcaaagagataagtgaagacactgggattgttaggcagcatagagagatcacttgcaacgggtgacgatgataaatttaaagtgacaccagtcatatagccatgtttttctccagttacaatgagctgcccaggtacaaacataaagaagataggcaatgagctggatttaaacgaggtttgagttttgccactaaatttcccattcgtgtaatactctcaagttccataagtgacccataaaccttccaaaacataacatgtgttttcttaagaatcatgaccacataatctcttcacgttaatgcaactgggaaaaaagagcaataccataccttgttggcagcaaccaagactttatcaagaaatcgcaaccattcaaagatgaaaactggtctttttgcttcggtgatttgagccaaagcttcttcatttagcaataaactgtgggctaactccattacggaagtttgaaattcacaccttaaatttaacagagtaaaaaatacttgtaagtattttttaatgttaaaagtcaagcttaatggaatatactcactaagaaaagtaggactactcatttcatttggggaaaaactcaacttctttgaggcaaaacctgagaacatacttttaaatgacaaaaatacaaacaaaaacagaagaaaactacttggtaaggaagagtgactcatggagtgaaaagaaaattaaaagaaattattgccaaaaaaggcattattccagaagaaatatgtccagcaacacatatgtcatttacccgttctataaatgaaaaaactgaagcactaagatcaaacaccccagccgggcttgacaaccatcctcctctttttctcgtccagggttcggtacatagcacctttaccctcccgcgctgcacctggccagagggactgaggtcaaaacacccagcacagacatcccgaactgcaggtctccaagactcttcctacgcggatgggtggggcggccaggcccggcggccgaagcgtcagtgacaacaccaggcggtccggaatgcacccgagaagcctcgcgcgctcggggtctggcttcacctggctactccaagaaccgcaagcggcggacccggggaaacaccaagaggccgccgcaagcctccgtggggttccgcaggctgtcaatagcacgaggcggcagctcggaactaagcacggagccagaaaagggaaaatgttcattacgaactcaaatgtcttccccacccgtctgaaaatgtacgtcggacaggagtccgtgcgtgtcaacatgcatgcttcggcgacctcacctcgtagtctggaagggaagatcagctgagctccgggggtagaagcagccaccaagagacccggatgccccacctcccgcactcctacctgcaggaaacaagggaagagcgcttgcgcggagggctggtcttgcgcaagcgcagtcaccacgtcctcctatccccacccgccgcgaatttccaatagagtctgcactaggaaactggtgggagccgaggtccggaagtccgacgctggtcggtgggcgcatgcgcagcgcgcgctctacggcgctgaaccggggcgagcagagagctgtcaggtaagagagctgtcaggtaagggtctggggacaaccggtagaatgataaaaggcagagtgcgctggccatgactaccgtatcacaccgtcagccacttttccatccgtgggtggttgcgtctgtgggacgcttgcagccaggaggaacgcgtgagggaagggatcagcggttcctgagcgtagtattgagagtgggacgtttcttgtcacatttatactgtaggtccatttctccacttgtatatgtaatgggactctcaatatgtctgtttcccgactacgccccctaaaaaaacaaaaacaaacctactcctacagtcttcccactctcaaaaaacgttaactccgttcttccatgtattcaggccaaaaacttagcgttatcttgacatcgttctttacgtactacctacaacatcagcaaatcctgtaagctctaccttcaagtgtaccccaaatgcgaccacttgcattgctatcactctggtacgagcctccatcatctctgccagggtatcgccttgtgaagtttatgcttatctttgatggaaatggataatgctaaagtatattttaccaatagaaagagagctttaaaagcaacctgtaaccccattcagatgtgcctggcactttaaagttaagtaggtctcttaaaaacaatgtaatcctatttgcaaggcactatgacccggattctttgtggttttgaaatagtcatttagccatactgaaccttaatttctccaacaggaaaaactcttcctaccttgtagagttgttagtggtggttaaatgtgataaaaatgtgtgatatactgggtaagtgttaaaccattatgtgtaaaaatgctgttattaccaatgaagaatctgaggtttagaggaagcgggtgaattaccataaatgctgtatataatagtgcacgtttttaacttataataaaaataggtaaactaaactgtaatgtttaaagatgcacacgtggatgacaaaactatcgagaaaatgaaggaaatgattgccataaaaaacagaatagtgactattcttagaaccaaaagagagttgcaactggataggggacaaagagggctcccaggtgcctgataaggttctacttcctgataacttttgctacataacaaattatccccaaatgtagcagcttaagataactgtaatcatttgttatctcacagtttctatgggtcaggaatttgttagcagcttagcttagtttagcatggactttcttaagaagttgcagtgaagatgccagcccaggctgagtcatttgaaggcctgactggagcaagagaatccatttccaaggtagctcactcctgtggctcatgagtttgtgctggcttttaataggaggactcagttccaatcgtgtgaccttctccatagagcttcttgagtatccttattatgtgaccactgacttccttcaagtgagtcatctaacttcaaagttagaatgacctaagagctgcagttatgaccaaaaaatcaactccatcatctccacaaaatcctgttggttacacaggttaatcctgttcactgtggaaggagactacactaaggatgtagaaaaccacacagcaagaatgactgggagtcattttggagggtaccacatggttacaagaatgtttgactcacagaaatgtattaagctgtacatttgttttatgtgttttctgtacgtatttaaaaagtgtttaaaaatgacttgttgacataggaaaaagttataaaat

SEQ ID NO: 3101 - DNA, 4001 bp, Homo sapiens
accaaccatatagacttaacaagcattttgaatgcaagatcatttcattgatgtgtaggcacatattaaaactgggaagatcccaaaagccacctctcctgcaaaacacattcatctaggagaaaacgccaaagcatctgtcctcaactacaggtaacaaccttggtttctttgcctttggctgaaatcagtgttgcaaaagccttttaaaagagtaagaaaatataggtttttctcccaagatcacattgcccaagtgaaacagaaccagtgcttacttttattttttgtctcctgttcagaggggtcaaacattgctcataatcttcattaaatttagtcctgtggctggcaaatgttaatttactggaatattttccttcacattcataaagagggaaaactagctttgtgatctggttgcaatctacacaacacatagataatccacaacagtggtaggcgcagaaaagctccagctggtttatctcaaatgttcagaatgattttgatttctttaccgacaccacagccattcataaagattcattgccaaatgttgcccaataccgtgatagaggcgatggtgaagcgaatgtcttagactgggaaatcatcatggtgcccaaacctcagagtctgcggccaaatggtggggatttggaaatcacctgtcacggagatggtgaaggaaactggattcaaactaatgaagactaaagtctttccagccagaagacggtttgagtccaaggggccatttatatacaagagctaagaaaggtgcaactgattttcccccagaagcagcacgattatttttaagttcaaagacatttttgttaataaactgcttcacacaaccacatcgaagccaaaatgtgccaatgaaataatcaaaacaaatagctcaattgggactttttgaatgttcaacaaaaagaaaaattaaagctggttagactgctggatagtaacgttacagtgtctcctttaagagatcaaaatgtctttgccaccctccaccccaccctaccccacctctaatagtgaagtggataatttctgaagaatacaatgaccctttatgcctggcttctctagtctgctagggatgccatctgtctcccacgctatataaacaatccccgcaggaatcttctgatgaccaaacagattagcaaactccagattttcacgccattaataatatccccatccagattaggccttttattttaataactccaaagataaagtcaataactgatctttctttctttgtagataatgtgtgtgtcattttaaagataacctcttggaacatacagccatctgttgggaagagaaagaaaaaaagctctctcaaagcaacagaagaaatgaaccctcgagggaataggagaaatagtaaaaagaaaatcatatttataagacaaacacatggagagctctactaattacactaaaatattcttcttctaaatgacaaactatagaacactactccagaaaagacaagtttcacactttcacaaaggtatatatatacgaaaacagtttgcgtgagtctaggacagtgaaagcagaaatcataacccaaaagctaaaggcccccgaagtttgcatgctgtccacctctatctgtaatgatcacaaatgttttccttcctgaagtttaatatcgattgaacccttgtaactctaattgtgagctctctgtactgactccaaagacttctaactctaaaagaaatgtgcctgtaaagatgttctctaaattaataataataaacgacgaaaagcacccgagcgctgctaatagtgaagacaaggcatgagagagtcagacctctgcagtctcgcgtcctcggaaacgtctacgtctaaatctgcagccccagtttgctccaggccccaagctccagcagaggatgttcacggcacattcccaaccaaaaaggaaatgaagcgtcctctccctcaactgatgctcaaatagaccccaaagtcccagtttccctggagaaccaaaccatccaacacatcctgggcagcggaaaccgaaatggcaaatgaatgaccgcgccggggcgcaagggaggaaaaacaaagccacctcccgccgtccgctacctgcggcgagggccgcgcgctcacctgggctttgcgcccgtcgccacaagctgcgggtggggacccggccgcggggcgggagggcgcccccaaagtcgcccggacccgcggccccggcgccctgcggccggtccgtgcgcgccgaggagaaagcaggcggccgggggcgccgccgcgcgttgcatgcagctcacggctgctgcggccgctgccacggagccgagagtctctgcgctgcagtccccgaccccgagaccgcgagaagcgcccggagagacgcggcgcaggggcagagcgcgctcggcgcgcccctcagcggctcttcccgccgccctccgcagcgggctgggtctcggctcgcctttgtgctggcatcttcctagctcccagcgacacccagagctctcgaggcggctccgcgccgccacccacccccgggttacgccacggcccccgcgcgacccgccgattgtgtcgagtcagcagcggcagcggggacgcgcgaagccatggctcccgcccgcgctcgggagggcgccgggggtcctgcgcctccgggaggtttgtggccgagcgcggcgcggccccgagcggccccgcagcgcccggctccccgccgctcgctctccaggcgccgacccgcctgcgtcgccaccctctcgccgctccctgccgccaccttcctcccgcccgggtgccgggcgtccgctccagccgcggtgccccggtccgcggagagcgaagagtccggcctcctcacctccagccgcgccggcgcccttcccgctagacgcttcggcggcatctgcccgcaccgccctgcgggacgctgggctgggagctggcggcacgtcggggaccggtggaagggaggcgggggcagaggacaggagggacagccagaccttggccagcgggacctccctgaggaaggtgcggaagaacggggcgggtgcggctgggcggaggacgagtcccgaggctgcggcggagcctgagttgctctccttctgcgaagtcgaaggacaggaggattcctagaggtgtcgcggagggtggaggagaccctctgaggtcgtgcagacaacactgttcctcaaccccaccagaaagctgaataggggagtgtcatgcctcggtttccccaactgcaagggcaagacggtaatactcatgtcgcacacacagggtgtggtcacgatgaaaaaatggattattgaaagcgttcccagatactttgcctaaagagggcactaaaatttaaaattactgtattaatactttcggctttctgtttacttctatagcatcttcatcaaccagtcccacgtaggagaaaaagtaaaaatgctaaagtgtaaatatattgtgtccctccccacccacccttgcatctgtccagatttagggaagatttattcaattttacaatttaactatatccatatggagtaagtccccaaataatggatagccattcctttgggacttttgagtgtgtgctcaatattatccatttctccgccttttctggtaacagcagttcattattcctatgggaactgcccttccccctcacccacaatgagtctttgtggctccagggtactgacacctcccaccctcaacccccagaactagccagtcatcttccggaccgcagtgatcggttctgggttgggcatgttgatccaggaactcggcctagggctttggatgtattactgcagaaaaataagctctttaaactaggataactaaattggaaggatataagcctacggtaacaaggaccaacagtgcatgccaatgaagccaactttgagggaagaaaagctgctggtgagagggtgatgtcccaccct

SEQ ID NO: 3102 - DNA, 4001 bp, Homo sapiens
tccccaccaccatcacactgctcactctgctgagaaagggtgaggttttaaaggacattcaccagcctcagatgcaggggaaatgtgcttagtttagcatttacatatcttgacacagtaatgacacatcactcaacaatacttcaagggtaactaactccaaaattctttatttagtaaaattgtcacatttgatgtcaatggaatacacaaactcaagtgtgctacaaacaagatgtacagagcatcacagctctgggcagtgcagctcagtgcacctgcctctcatctccccgctgaagtggcaagttcaagcttttgtttagcccagggctgcctggaacactagtgcccagcaccatttctgccacctctgcccccagagcccgcacagggctggtgaagcctgggtgggtgaacctgggagagcgctggcagctctacaaaattcttcctcctgcccgtagctccctccctccacccactccagagctgcagggtccctaaaagtttcttaagaaacggggctggggcctgactgggctggttaccaggggctgccctgcaagccatccatcagaggagggagggaagacctgggagacttccagggccctaccccaccacatctgaacccctgggaggagggaggagatccagggagggccgggcccacccccgcaggactctggctggcattggtcaccaaggcctccagacactccgggcaatttgggctgtggtcaggctgcccagggctgcgggcaccaagtcgggcccctcagcaggagcctgactcagttcagcctcaggggcctcctccaggtcggagcacaggtcgtccccaggacccggggggctgggtattggggatcccggagcgccccccgcaggccagccactccgtccaggggctctaggtggccccgccagggcgtcccccagcagatcctggaagctgctgccctcacgcagcggcatggactcgagcagatggttcaggagctcggcagcgacggtagcgtcgatggcctggcacgtggacacgaacgtgtgcacctcgtgcatgcactggatgtagccggcagcgaagcgctcgctcgcttccgcctgcagctgctcgcgctctgggcccgagggtgggagggagagagccgcgtcccgcgcggtgagcggcgactgcgtggcccagcccacccggcccgcggggacgcggctcacccaggagacgcgggggcgcaccctgctccggtgggagccctcgccgccgacaggacaggggcgccgggagggaagtcctccgtctggcaggggttacaggcgcccgcggccggcgcccccgcccgccccgccgccactcaccgcgcgcccggccccgcagcacaccctggacccgccgcaccgtcagctccagcacttcggcgttctccagcttggcctgcacctgcgcgggcgggaagggcggtgagccggcagcgcgctcccggacccgcccgcccgccccgcagccccacggcgcctgcccggccgccgcacctcggcgcccgccagcagcagccgcagctcctgcaggctctcgttgatccgcgcgcgccgcttcttctccaccaggggcttccgggcctgcggggagcggggcactgaatcccagccccgcacggcctcccgcccgcttgctcgcccatggccccggcccgcaccttgcggtcccctcgcgtctcccagccgtcctcatcctcacggcccacacggtcccggccaggcgccgcgggtggcgccatgcccgctccgccggggacgcggcaggggctaggagcagcggggacggggagcggcggggaccggagtgccggcgccctccgctgccccgcggccgcccagcagcagcccagccgtccgcgctcctcgcggcttccggcccgccgcggtcccgccccttttatagccgcttatttgcatctcaatgcgccgattggccgcgcgggcccggggcggccgaccgcgaggcgcgctgcagccaatcggggcagcgcgctttgtccggcccagcggctctggcggtcgggcagctggctgagctaggcggggcccccagcccggccttccctagacccccgcgggggcggcaccggggcggcgaccccgggtagctgcggccctgcccgcgcttgtttctctccgtctgctgctctaggaccactgatctgccgcgcgtgcgagcaggcgtccacccgtccgtccgtccgtccgtccactcattcattcacccattaattcattcatttccctccttcgccgatggcgcctccagagttgagcgctggggccactggccccaggagatgcgtccctggtgtgcagagccacagtcaagtccgcggtctctggacctagaggggtttcaggtcccggctggggtggctgccaagccccggggaggcagggtccattgggcagcggtggcggggcggcccctgagtttcttccggactcgtccagacgccgggccggacccccgacgccgccctccgccagcactggagtcctagtggggcggggtcccgggtgctcccgcccgcgccgctctccccctgggctctgcgggtcaccagccccgcccccctctgagctcccccatctccctctagtcccctttggcccccggggccccctccctcccttccactgccccccgcccgcctccctcctcccctcctcgtcctccgcgccccgcctcccaggcccgccgaagctgccgtctggtcctgtaacttgatgcccgtgacagttggcagctgcggccgcttcggcggagaaaagcgagaaaagcggcggccgcgccaagagcgacaggtgttggccgcgcctttgtctcgcaccctttgtccggcgggcaggcggcgggcgcttgtcccggccagacgcccgcgactcccccatcgcggcgggccgcccatctgctgggttcctcttggccgcgggcggggtgcgtgggcggtggggccgcgccctcgggcagcgtcctggggacccctgcccggctcctgccccggcgtcagtccagacgctgtgtggaggagccggaacgggagacgccttctcggaccccagccggccgactaccagcctgccccgcacagcacctgccttcctcagtccccactactcacccgggctgggatcgtcagggtctgttctgagcccctccaggctataagcgtccctggacaagggcacagtctgacctaggaccccctgtccacctccccgcacccccagcagagcctggcctcacagaagcgctggtaggtagggaaggtgaggggtggccctggcaggatgggctggaaggccgcgtgggaggggaacatcacgggaccgcagcagctgagcggagcggcaggactaggctgcagaccgaccgccccactgcccctagagaggtctgacaggcctcccatggcccctttacttgcgcctctccaccagagggacccctgcaggcttcctgctgggtgagtttggtgagaggtttgaaagctcccaaagtcacctcactgacctctgtaattacctgggaccccctcccgctggctcccaactgtccctgctctggctcttggttgctctatgagcagggtcctgagacttcccccagcccagcatcactcacctgggtgtgaaactaccgctttacttcacacactccccacctgcccagtagtggggctggcagggtggggctggagtggtggatcccaaggaagtggattattagcctgtgactttactctccttcaccacttagacatcaccccagggaaggagaacctccactcccccaagtggctacaatgacatttccactacttcgagaaactgtgatagggaaaaataaactcactgatatttcctgtactcccaagtttgcaaactgatttacactcctctcattatccaaacgaacaaggccaagtagatgttttaggatgctctcatcc

SEQ ID NO: 3103 - DNA, 4001 bp, Homo sapiens
gaactcctgacctcagatgatatgcccgcctcggcctcccaaagtgctgggattacaggtgtgagcccccgcgcctagcccttaagtgcaaatttatatatgaggtgcaactgaggcattcagagggttgtgaccagcattagagctcagggcaagtcaggttagacaaaaatttgagttaccctaagacagatgatttgggaaccaaaaaaaaaaaaaagtccaagagctaaactggcactggggtaaggagaggcggtggagagtggcattagaaaagtaggccagtaccgaagaagccaagggaggccagagttcaagtggggctgcccaacactgtcaaccatggcccaaggccttttttcctctcagaaacactttccgtggcaccctattcccttatacagttgtgggttagggtattgtggactggaccatcttggcctctgctttctaggataatacccacttcagggctgagtctggaaaaggcatctcagatcaaagcccccaaaatggtcctggcctcacctacagagtactgcatcttggaacgtggggtggaagaaagccaagctgaattgtggaaatgacagatcctttcctaagtcagctaactttaacaaacatgtctttccagtttgtttctctatttgctatttgctgacaacactgaaaaagcggcagtaacgattacgtgtactgattttcttagcatttactaaatctctccatgagctggtgcaaggacaactaattttaaggtattaaaaaaacaaacagaaaagcaactcttaaatgtataacaaaaatttactgagaattaggtctgtggatacagtgttagacatctagacactttcccctgaaactattcttcttaagtcaaggaaacacctccatcccttttcaggaaacccagaaggcaaactctaaggcttaaagaatccagtaatttaagtcgtccttattttaaagaaataaggacggttctcccttcaagtgggcgcagctgctacctggtatgacagtacagggccaggcagtgggctgtttaaggcgcatgcagcctaaagatgatggctaccagatttcctaggctgagctcaaagcgcagtgaggggtactttcaaaaagttaaacaatgtttgcaaacatgctcccccatgccacgttaaatgtccctcaacactagcctgaaagttccaaatgcctatactgacgctgcagccatgcaagaaagctgaataaaatcacaccacgggcagagagaggtgcagcaactggcaaagcacctgtgtgtgctggctgcacaaaacatgccgcacagttccgctaagctaaatctgtccgtgtccccagactgcacccaacttttaagaaaggaaagaaactgaggccaaaagaattaaagtcgtgtggggacaagcctgaattaagagccagagtggcagaaaaccagagtgctgctgcaaagaagatgctagagggagaaaggaaagacagggacgggggctggggcttggggagggccaaggttggggtctcacagcggcgcctctgagcgcgactcgaaacttcgaggccagcagtctccacccccggcccttttcccactgtggcgagtgccgctgaagagcctgcccttggcccctcgctctctcactcacctcgacatgagcctccacatctcgcgctgccccatcgccaaacactccgaagctaaagcagcagagcgagaatctcccggaccgttccagcgcctcgcgtgagccccgcccaccgccgtcctgcgccgccgggcacagatgacaagtcctccaggaagccagagcgaccgtttccgctacgcgacggggaagggcggggcaagaacgacgcctggaggaaatagttgagggagaggaagggatcggggaccgggccagggagaaggcggagagcgagctgaggcggagcgggaagagggaggatagaacggactagggcggattcgcaggaaaggagattgccctctagaggctgtcttagcccaaagcgcaacctgttgtctaggcttggcctgccaatttgaccagcagggactgatgtgaaagacttttctggaattttagtaattttttattaaaacgtaaacttagtattctttgagactcaagtagaggaattacagttgataaaggacatcgatgtagtttattcattcctaacccaatacagccgaattcctttaatattaggattgagacattttcatttttcttgggaaaagttacagatctcccactcttcctcaaagacacacaagagttgtctgattaagacataatagatatgtcttcccaactaaagtaaaagttgctgttatcagtggaagcataattacattcagaaagtagcttactcttaaatgaaaccaacatttaactcaactactaggatccactgttaaattgaggaaaacgttcctccgcttccagatccacccagatgtgtagcagaagacatttcatcgccactattaagtattgacacatttatcagaaagaagaaatccggtgacaaatttcagagaggacacatgaaaggagttattcttagtaccttgatatttaaagagatacactgttgagactttgatcaaaaattacgttgctaacctaggtcaaatgtaataaccaaatgcccactgagaagaggacagacaacagacatcacagaaggaactccttacctgcaatttggtttttaactggctacaggacatcaccatctgacatcaccatcatgcctcattcactgcgcacagaaatgaaccattcatctgacctagcatggtttactggaaaaagcatgggctttcctgttagtcagactgagattcaaatcttccttgccgccctagcttcatgtgtgtgaaacctgagtctcacaaggcctcatcgttagaagggccctgtgcttgttttaatgctgtgctattaataatttttgaacaaggaaacacaaattttcattttacactaggcctgcaaattatgtaatcagtcctacccctagcacactaatagtttaatgaccttgaacaaattatatagcttttcagaacctccattttctcatctgaaaatggatgtgctgatgattagaggtgtttgtgaagatccattgaaatatagaaatatgtgcataaattacttaggacttcgtaggtatcaagacctgtcagttatgccacaccttccaccaagctgtccttcctattcctaaattctctatttcttctaatgatgctatcgtcttctggcttcccgctctagaaacctcagtcctttaaagaaaattatcttaacattctattttgaagattttcaaacatatagcaaaattataaaaatttaaagcaaacgcctatgtgctcaccacatagattctacctagatttacattttatcttgctttattccttatcccaaataccttatttttaaatgcatttcaaagttaattacaagcatcgttttacttctcccaaaatatggcatgtgtcttactacctagagttaaatatttgtttacatattttcccttttgagacaaaatttacatacaacaaaatgcacaaatcttaagtgtacattcactgagtttgacaaatgtatacacttgtgtaaccaaaattccttagatataaaccattgtcatcaccccaaaaagtttcctctcacgatttcccagacattctctgcctaccactgccttccccaccccaacccccgccccagaagcaaccactgttctgtctcgagaaccactgtttgttttgagacagggtctcactctatcacccaggctagagtacagtgccacagtcatagctgactgcagcttcaacctccctgggctgaagcaatcctcccacctcagcctcctgagtagatgggactacaggcacatgccaccacacccagctaatttttgtattttttttttttttgcga

SEQ ID NO: 3104 - DNA, 4001 bp, Homo sapiens
ggatctctccttcgtttctttcctttattagtcttccaccccaaattctcaatcctgaagaaaagaaacaaaaatgaccatttacataatcctgaacgctgaacttctgctcaatctgtgttcaccagatgccaaagtgacaggcaaaaaaaaggtacaatattaaaaccaagccaggtttctgataccctgcgattgttcctctttgtaaagtttcaggtttttaaggcaaattcgtcattcatggaaatctctcctacctactagaaaacggctcatcaaattacatcattagcccaaaaagttaaatgaaaacaaggaacatatgacagcgactgtccttaaaatatatagagggcaatctatataccatatagagggagtaagcacttttcgcaggcaatctctacatcccatatactgaatgaatgctttctaagggcaatctacatgttatacagagaccaaagggtagcagacctgccactggaatattttagtttctgcctgtgtaaacttttcacccaagatgtgtctggattggctataaaggcagaaaggtaggatttcttttaactcaaggagcagatcttgtgaaccttctgtgtccgtttaatgcaacatagaacttgctctgaggtttgttttcattaagtgatactgagttagttataaagctatatgggaggaattgaccccagccagtgcaaagtgtcaccagctatttaccaaaaagaatccacaagatttcagtccgtttacattaactattaaacggaatgccttctcctccctattcaagtacttggagcctcaaggaagacagttactactccaagttaaacagggcaaacaatagtcaatgtgagtattcacagtgcggggcggggtactgttcacagtttcatagggattgtacgtgactgttacaacacccacgcccaggagacattattgtcatcatccttcccatttcacagatgaagacactgagaccagtccagctaagcaactgccccacgctgccatggtggggaggtggccagcggggatgccaacccggtaagccggaggcatgtgagccaggaggcacctatgtctcttcaggaattgttctaataagtaattcaagtaatttacaggtttaagggcaccaatgttttggttcctattagttaggtgaacaatgtttacttcttaagagagcagggacagcatttcaactactccattcacactcttcacccgaatactcagaaggtggggaagacccttaccctgtggcgtctcgtaggtcagcgtggccatttgcaccaccggggtgtcctcgaagggctggttgtactgcggaggaggaaggggcttcctgtcaggttccagggccacgaggggccccagacccgggaggaggcggcgccagcccgtgagaggccgttagtctggcctggggcgccccaaacgcggtctctgcagcggagcccccaactccgcctctctcgtcccactcaggagcacccccagccccaccaaaccctcctctctgcacccgagccccaggcctgcttccccactccccgttccggaggccccagtctttcctccccgtccccgcaccgaagccttcggcgctgcctcctttttccctctccggagcccccagctccgcctccaccttctctccgcatccaagccccagtcccgcttccccaacccccgctccgagtcctcagagccccttcccttcccgtcctacgtcccctcccagcctcactccgacacgcaggcctcccctcccggcggaccggcgggggccgcaccttctctatcagccgctgcatgcgcctctggaagcggcggcgactggccctgagcttctgcagcagctggtcgtcttccacgtcctcgccctccatggcgcgcagcgtacccagcatcggacccagccagtacccaagcgccaacccggactgcagggcctcgcgcgccacaaactcaaataggagactccgccctccctgccttcctctcggttttctattggctagagcggagaagccgggcactgattgggcctttcaaacaaatttgcgtcccaccttccggccaatccactcccgagtttccagccacgccccaatgtccggcggaagggagggagggtctccggccgccacggccggtggtagttgtacaaacagctgtgtgcttattcatcagcggtgctgtgcgagatccggtgggatgcgtgtcatctcccgcgctgtgcaccggagataagtgcggcctggagatttctgcgtgacttgctctgggtgtcgccgctgggcgaggtccgccttcctcacccctccgcctgggatcccggcgcagtttccagggcaggggcctaagaaagacaaccccaaattaccaacccaaaaggaggcaggatagcgaatattcatctagaaggaaaaaataagtctcaacgaatgacacatttaaagatgctgacaaatgcgatacacatcacaaaatccaggaaaatacttctattaacccagctttttccctatgtatttctgattgcatattctgcttcttcattgatattaatcttgtaatattttctccagagagaagagcaagataaatcagtctttagtatggttgatggaatttatgattgacatcttaggaaagtttcattcagcttcatcacttaaccacatttgtgtgcttgtgctgatatgattaccatagtatgtgattgaaaataaaagcattactgagcaccaggaggtcccttagagggggctcttcacctcctttcagcctgcacggcaattctatcatgatgtcctgcggaaatttaggtgggagtgggtggagggtaagaacttcagggctcatgtagtgtgtgtgtccacaaaacgtgttgcgttgtgctggacacagagatgtgctggcctgattccccttaagatgccacagctgctaggagggcagttggcaggggccttcagttgtcagcctattctgggatgattcagttgcagagaactccctcacccaaggtcctgctgccccagggtggcccagcaccagtgactgatccaggtgggaacaggaaggctgtatcatttcagtctgatggaagaaaaccctgggccactttatcttccgagctctcaattccacggaattggatggggtaacctaccaatcctgtttctttccttcccttcctccctatataaacatcctctctgagtcttctccagttgcaggatctacacatttaacttgtaccttttccaattttcacaaacagaccgaggtgtcttcctcctccttccttaggagtgttcagaaacttaacatgctcttccttggactctgtgcttcccacacataatttacttttcaaacatctaactgggcccatttagagacttgagaccttgaataagattttcttttttctttttgagttttggatgattgactcttccattgttaccagatagagttgtccaggttcttggtgtgttgaacaaagaattgaacaaaacacacaaagtaacaaaggaatgaagcaacgaaaaacaaagcaacaggagaacggagtaaggaaagcacagattcattgaagacaattcacagagtgcgagcggactggagcccgcagctcaagagcctcttcaattagggtttttataaagccaaaagaacttggcaacacccctgggtaccctttagaggcctccaattggttacaccctatgaaggattggcctgtgaccaatcagagcctaaagtggaaacttggcctgcagtcattcaggggctgaagtggaaacttctttcttgttatcacgggagtgaagatgtagcctatgtcctgcccaatcttgcttaaaactggctgcacctgctgttctcttgcttatgcgaactggctgcatctgctgttcctttgcttatgcctcaaccctttgctaccccagttccctattctc

SEQ ID NO: 3105 - DNA, 4001 bp, Homo sapiens
gcgctgacttaccttctgcacttggtcatggttgagctccgtgaagaagtaggcaagcagatgcgaggcaatcatcctgccgcggcccgacggcgcagagttgggaaaccgaggcggagacgcgagaggggaggcgggcggcgcggtccgactgctttgtgctggggctcggctgccgggccgggagctgggagtccggacggcgcacaaagaaggctaccggcgagggtgcgcccggctggcggagggcgcgggtctccggagacgtgattttggcgtcacaactgctagaaggcgcctcagttctctcctggcgacgtgtccggttgtcccacgtcaaggcgctaacttcggccacaggatcactgaggctcaacttgagaagaatctcagcccggctccactcgggcagtgggacctctccgattcacaggcgcgtggctcgggcccgcggattttcttagctgggtgacacgatgttgccagcggcagcccgggactcctgcgccggagtttcatgcaacaatgtggcttattgaggggctgccggcccgcgggcctccggatcagtgacgtgcgcacgcccattggctgcgcggggagggtgtgtgcgcccacggaccgcccgccgccgtggcgcagccaatcatcgctcacggctcgcgggcgcggccgctcagacaccggagccggcagcctggggaggcgcgccgggggcggggggcgggggaggggcggggcgcctgagatgggacgtgtggtccgtggctaaaggctgggacggaaaggcgcatgagccaccgccgcgtcaggctcggctatgggtggggggagcgtgatcgcggacccggggtgtggggcgactggaaaaacgggcctctggaccagcacacgccctgtgcggagagacactgtctggcatctcgggatcatgtgaggggctcccactgcccagtcacacgtctaaagcatcctagttcttacctattgtagcacggccggaaagtgagccgccttagctgctgattgtactagagcaggcaatacaagagtcggcccatcctcaaaaccactgataggatgtgagtttcactaaccccgttttacagatgaggaaattgaggcaaggccagggctcacacctgtaatcccagcactttgggagtccaaggttggagggttgcttgagaccaggagttcatgaccagcctgggcgacatagtgagacccccatcttcccaaataaaaataaataaatcagccggacatggtggcatgtgcctgtagtccctgctgctcagaaggctaaggtggaaggatagcttgagcccaggagttcgaggctgcagtgagctatgatcataccactgtactccagcctaggtgacagagggagaccctgtctcaaaaagaaaagagacttacacgaggtcacatagctaataagtggcagatagggaagagaacccttgtccctctactttaaggccctattcgcttgccccattatcccatgctgcctctctaagagccagagaagtaggaggtagaaaaagagcatctctgcagctctgggactgatgatgtgaatgaactgggtagatggtaagtgtgtaactgggtgatcttggacatgggatggggtgggtgaggaggcttaccaatgctgagaggagtggaagctccaaccccagctaatgctagacaccagactccaaatttaaacacacagtggaaactggcaagaatgaaatactgacttcaatacagatttcaagagacatgacattagcactggtggagaatggcaagcctaaggttggaaaaggttcagggaaggaagatgaaggtctgccatgttctactgaggaggagtttttcaaacagtggggtgctgtctgcaatgtgtacagccttaaaattattatataagtaatcaatactcattgttgaaaaataatatatggataaacaggaaaaataaacaaaaatcataatccatctagcctctcagcaaaacttccttttttttttttttaaagcagggactcgatatgttgcccaggctggtcttgaactcctgggctcaagcagtcctcccacttcagcgtcccaaatagctgggattacagatgtgctcagcaaaacttcttgagaactatgtacccttctaaatgcacgtcctcaaccctccttccctatactccacacagaattgagctcaaactgcttttgtcatagtcatcataatgacctacatgttgccaaatcttgcattctcttctcttccctgcccttgtcttactccttctctcagggatgttgaggacagttaatcacatcctccatctggacacaccttcctctctcagtaagagcaccagtgctccactctgagggtttctggctaacctcactccccaggctcctgagtccctgtttgctctattggtaaatgctggggtattcggggctgccctccaccctcttctctgaactagttacagtttcaaactccctgaggagaaactaacttcctagccccatgactgttatatcatatgcatgctgatgactcaccatagtaaatctacagcgaggtcctctcctggagttgcaggcttatttctccagcttgccatttgtcatctccactgaagtgactagcatatcacacttaacatgtccaaagctgaactcaactttttttcccaaatctttttctttcccagttgtctcagcaaatggcatcgccatccaccctaactcgtcttcgattccttcttgccactcaccctcacagccagtcaatccatcagcaagcagttaattccacctataaaacagaccgtgcatctgaccacttatctccatgcccttagacacctcctgagatcttcccacagaatactgcttggcattcacactagcatgctttcctcaaaaatacaaactctttctcacccaagggtctttgctcttccttttccttctatctagaatattcttctccaggcctgtctccaactcattcttcctcctcattgacgttccactcagatacctcctcatgatgcagggcaggcaggccccaaaatttggacttagcctgggaagatttttggcttcacccagtaaagaattcaagggatgccgggcgcggtggctcacacctgtaatcccagcactttgggaggctgaggtggacggatcacgaggtcaggagatcgagaccatcctagctaacacggtgaaaccccatctctactaaaaaaaaaaaaaatacaaaaaattaggcgtggtggcgggctcctgtagtcccagctactcgggaggctgaggcaggagaatggcgtgaacccgggaggcggagcttgcagtgagccgagatcgcgccactgcactccagcctgggcaacagaaagagactccatttcaaaaaaaaaaaaaaattcaagggcaagcaggtggcattagacagcagcttatattgaagtggcagtgtacatcaggagcagaggcactggtctttgcagagcagggctaccccataaggccgtgtgcccagagtagcagctcagaggcagctctgcactcatatttctacccacttttagttaacatgcaaattaaggggcaggttatacagaaatttctagaaaaaggttggtaacgggttgttgagtcattgccatggaaaggggcagtgacttctaggtgttaaatctggaactctaatctagagtctggtcccgagtcttagcccccacctccagagtcaagtccccaccttctacctcatcaggctttccttgaccagtttatctcaaatagttccccaagtcactatcacttggccctagttgatttcctatttattttcgctatgttcttcctctcctcaatagatgataagctaaaagacagcagggtctgtgtctgtcattccttcaagtttgcagtgcctaaaatggtgcctgacgcatggcagacatgcaata

SEQ ID NO: 3106 - DNA, 4001 bp, Homo sapiens
atggcatgtcttgctttaataaaaatttaataggctcgctccacactcaattagcacagtgagccacaaactcaacaaaccctgccctaacatacacaaagagtatcctaatcacattttggtacttcataacttatagacaactctaagtaacaattttaaaagtccttcagctaaatcttatttcaaacattaccttcaggaaaaaaataaatgacactgaatctgatcattcctaactatatactactgttataagacaaacagtgtgcccttaaaaattcttcagtctttcacagattttataatatttccagttagatttaaactttgaagataaggaaggggtcattcatcatcgattatgttatctccatccacggtacctcttcaaaccaaactgtgtatggctgaagaaaaccaaggatctggtaagctacagacatgagcaaatacttttagtactgaaaaagaattgagaaattaactcattacctttaactttagaaatgagcaaagaaacccaaagaggttaactataattagttcctaggtaagaagttctctatatttgctatttgctttgatgtttgcatccttatcctattacatattaatttttaatatataatatcctattttttgaaagctaacatttaaaatctgaatcatgttaaatagaaaaggaaataaaattttatgtacatctaataatgcctgctctggtcagacataggtactgccctggtgaaagaatttcaggcctgcaatagagaaattcagcaaaagataaaataccactttcctttgctgtttgcaaattggatccatagtcatttcttcccagttttccattattatttcctgaagtagaatgagttacagcaaatcacccccagataggtgatttgattatctttagcatgtggaatctgttactctcataatgcttatcagctctggcacaaattgaacacattaatcacccaaaaaaaagaactctgcaagaaggataggaaccagtgagtttcactgataatgggaaaatggttctttttttaaggaacacattgctaatattaagctgaaagaaaaagacaattttgaggaagagagtgataactataacaatggataaggaaaattaatttaaatggatattatgagaactgaggcactcaatcctcagggcaaatcgtactttggcaattatttatatttgattctaatgaaaagcataccagactccctttgggacttttttgggatgtaaaatttggaggagggctgaaaaatctgagttcgaagattagcatcttatcttttcccaaatgaacatggatttgtgccttcaaatggttaacgcttatctctatgcagctggaaatacaacacaaatgggagcctttgagtgttcaaagcaaacgtggaaccaaagcactgcaggagaaaggcagggcagggcagcgaggaggggacgacggggagctgctatcagtaattcgcccttatccctgtgcccagcctgcgaggctgagcgagacccatctatcactgacgcacagccagtctgaggcttgtccctttgacaacaacgtcccttttgttaccttcctattatgcctggcagcttcttgtccatgaattcctgcatgcactggtgttccgtggaatggttgagaaacctccggaaagattcaacatatttcccgtggtcagaaaacaagctcctcatggaagatgccatatttggttttctgagaaagacagagcaggaagcaaggtttaagttcccctccttctcttcccagttccctctttctttccccacccccaccagtttctatccaaaaaaaaaaaaaaaaatgctaagcttgttttgaatttaacatgccacaaaggctggcttgtagagctcattactgagtcaatatttgaacgggactttgcactgatactttaacccctatacggttgttttgtaagaaatagaagtattaagcaaggctgtaaatccactgctaaaacttttcaaattcctgaggttgaaaggtcataaaaacaaactgtattcaaatcacttcctgttttgtcagcaaagccacaagtaagttccaagtgggaaagtgactgttcgaagtggcaaacaccaggataaagaggacagctacacagcactctcagaaatctacagcagtgaaatctttaacggaagactgtcatctgcctctgtgctttctacgggattgttttgggcctttacattcctcagcacttgaattttcaacttatctgctgcatttcttcaaatgctgatttgttgtaactcagaaattatcttaaaaggaagtcacgaaggaggagcccaagaactcgtagctagaaggtgtcagaagctgcatttaggggaatgagagtggtaagagaagtcttggagcaagaatgcaggacaccagggtaaaagtgcagtccatagaatccttccctaagcgcgctgaacacgacgaggtcatagatacttcgcttggctggatgagcctttggaaacccagtggtgtccccaccagaagagccaaagcttcagagtacccacacacagtctttttcctgggaagaggtctttaagaaggtcatcctttatctaatattgggttgttaataatagcatccaactcatggaggagtgctgaggatcaaatgagttaactcatataagtctcttagaaatatgtctgcttaaaccgtcccttcttctaattgagttcccaagctgccctctaagcattcaaaacacttcccaactctctttttttttttgagacagagtatcgctctgtcgcccagcctggagtgcaatggtgcgatctccactcactgcaacctccgcttcctggactcaagtgattctcctgtcttagcctcccgaataactgggattacaggcacccgccaccacgcctggctaatttttgtacttttagtagagacagggtttcaccatgttggccaggctgatctcgaactcctgatctcaagtgatccacccgcctcggcctcccaaagtgctgggattacaggcgtgagccaccattcccagcccccaactcccttttataagtatgttttgttctcactattcttagagccagtgcttttaccccgggggaaagtgtaatatctggacaggcagattgccatggatgactctgcccttaatgaactgtctgactttggctgaaacataagctgcagtttgctcatcagtaaaatgggaatgaattttatcttatagggttgtactgagaataatataactaatgtttaaaaagtgcaagccagtccctctgcaaaaaaaatatatatatataaaatgacaaaaacagtcgtcactttattcacggacattgaaatttgagtttcatatcattttcacatgtcatgaaatattatccttctttgaatttactttaaccatataaaaacataaaagttattggtagctcatgggctgcacaaatcaggttggtagggttgggtttggccacaggccttatttggccaagccctgatttagctcctgtgcccttcactcatccttagataaggtctttgctggttctttactcacatctctatccaaccagccttccctttcctcagatgggctctgacaaacttttgcttctattaccatcttccatttttctctttagagctcaacccaaatcattcattcattcatgtgtaacatctatctgtttttgtttcactttaaccaaaaccaaaaatggccaataatgtattcatctattgaataaaagtttagtaagagtctctgtttgctattctgctgaggaatactcctgacatgactttctcttggaaagctgctgttaaggcctcccttaactgaaacttggtcttctgagaccatcacctcccttgcctgctgtcaaatattctccaacagagccagttcttcatgtggatcccagtgagga

SEQ ID NO: 3107 - DNA, 4001 bp, Homo sapiens
gcctcccgagtagctgggactacgggcgcccgccaccgcgcccagctaactttttgtatttttagtagagacggggtttcaccgtgttagccagaatggtctcgatctcctgacctcgtgatccgcccgcctcggcctcccaaagtgctagaattacaggcgtgagccacagcgcccggcccatacatttaaactcaaaactgtgatgaagaacaatctaaaagttctgaatgtcaaacttacagaaactcactgctttcaagcaaattaatttaaaacaggcattcctaagccaaaccagcatttcccaaaaaaactgaggaaaaaaaaaagccgatcaaatagctttctataacccatgtttgttatatgctgcaaaaatctgcaatttacaactcaattttaagagtcacaactaactggcaagttggacttacattaggaatggtatgtattgtctgactataagaacggagtacagcaaaacaaaaattgagatttttaagaattaagatgtcttgaaattgttttatactttagtcaagactttttaacacattgcatgaactgtcatttaatgcatgcattaaggtttccttcacccgaagttcttaaataaggggctcacatttacattctaatgtcttcctgtgtctcctagaggtagagatgttaaaccgtttaatgtgaagagattgtcacatgctagaaaaaaacgttaatagcctaaagcattaattcatgtaatctcatcttttcaagtcttggataaatgtattcgattgacaataacgaaatcgacaaaaatatttaggatccacattaaatgtactgcaaaaacgtgaaaatttcaactctggttgcagtcctctaaataaaattccaggaaactacaaccagagccgactcaaagaatgggaaaacatgaagataaaaaacatttctaaattcttccttaacatactatactcaaattcttctccacccaccctcctcagcggccggagccgggaaggagctggctgggttgtttttcacatctacactcaaattctcaaaaattaagtccttcgcccacatggcggtttaagaagtgtaatgtaagtactttagcaaaaatatatcaggaagtattttaaagcagcaaagtttttaacaatctcgtatttccaacaggatgctgcgaaaaaaagaaaaggccaattatcgacttctcgcggagaggacccgtaaaaggcctagaaaagcgtcggcagaacttcagcgaaagcactacctccccatgcttcgaggccatttgcggctttttctgccgggccgcctccgccctcttccctccaatcccaggctcgctttcccggcggcagagcgaggcggcggccattgcgggccaatgcgccatttcgtaacgcggcggcggatcaatgtcaatgtggccgccgcccgcttgctcgctcgcccggatgtgcctgctcgtcccctcccctcccccaccacctcctcccaaccgctcccgccggggcccgccatgccgccctcggcctcgcttcggaggccgcgcagccggcaggccggcttccctcccgaggcctccccgaccaagccgcgcctccaaggggccgcctgtgcagccgaaggtgaaggcgaggcgggcgaggggccccaaggaggtctccaactctcgctcccctccccctcccacagcctgtctcaacgcaagagcgcgggacggccgacccggtccacccggcctccccgctcccaccgaaccaggcccccaacgccggccattccccaccaaccccccgctctccccctaatacctcctccccccggcggcgacggcgacggccggagtcgggctgggggcgaccgggcggcggttttacctccattttgagaccggactcgcctcttccaactcgagttcaatatgggaccgagaggaagaggcggggccagtcgtcacgtgacgcgttttccgcgcgccgccagtctgttgggggaggagcgaattgggaagggggcggagccaagcgggcgcgaagagggactggaccagcgggttggcgggcggagggcggaggcgcggcgtgccgcgggagcgcgcgcgcctcgccagctttcaggggaagagggcctttgccgccgttcgcgtcagggcgagttccgggacgtcagtgcggtctccgccaatggtgagcgtccacgtagagggaacgccttgtgatcgcgcgtcaccagagagaaaggcctttccctttcttctcgcgcttgtccctcattccccacgcaggcctctagttctccatttcagaattcattctattcctgtgcccgaaataaaacccacgtttttcttgcttgtaatttaaaggttgcaagaaaaactcctcggcccctcggaccatctttcctgtttccaaatgccggggaccagtgtctgtgactgcgccgcctgcctgagggcatgtactgaaaagccctgcgactccaacatgtgggactcacaagcaccttggacaggcctcaaaacgcggctgacatacagaatttttaccattaacgacctgaggcaggactggtggaggtcagttcattagttactgatctcaagaaacaagtcaggactattttctaatgtgcttctttcaagttagtgtggaaagagctgatgcatctgttgtagctgacggaatttaaggaactgaataattgacaagatttccagaaaagcagggtcgccagataatgctacctgtttgcgaatgattgttaccgtaatgctctagagagctaatcctttctcggcctagtcagatgattttaaatcatttgattttacagagctttagtttcagttttttaaatgaaaatggggatgggattaggtcatcttctaacacccacgacagccataaattgataatctatggatccatatttaaagttactgataaaaataaccacaattgaccagcctcccttccctgttaggaaatgctttatattttaatttagcaacccatgtgaccaacccttttagaattgaactggctctccctaggaaaggttagaaatctaatcagttatagtaagtttctgttaacaaatggggagtggtcgacttggagtttggaaaaggggagcgtaaagtctaaaagtttgttaatttatctagccgttgctccaggaggacctgtgttatagtttggaaacatttacaaagggtatttttgtggggcagaaaacagttagcagtccttaatgtaatttggttgaaataaccgttcaaaccagactcctcctgttgctttgattcctttttcgcaaactttcttatgttctacgtatccaggtgctcctgatggccagcaatagacttgagacattggaagaatgtatagccttagcgtctatttagtgttaagattttgtaagtctaattactgtgaaatagtcctggtaactttatcgattctggatacaaagaaaaatgcaaagtgaaagacctttggaaattgctattcacaccagagtactctatgagacattacataggtgatcaagaagagtgatcacctggctgcactttagggtatgtttgtccaggtttttctaataagttaattctaatcaataacttttgttctaattagtaacttttgtataaatgttaatgttaaatcgcgaaacaatgtgggatgggatactaagttctctccaggaacatgaaatgtcagcccatttattcacatctttttgtcctccctattgtattggtccagatttgttgttcatcctgactgtatgctgtttttagacattagttattttttatgcttttgtctaaacaagctctggccgggcgccatggctcacacctgtaatcccaggcctttgggaggccgaggtaggcaggtcacctgaggtggagagtttgagaccagcttgaccaacacggttaaaccctgtctctacttttaaaaaaaatacaaaaa

SEQ ID NO: 3108 - DNA, 4001 bp, Homo sapiens
cgaaatatcagttataatattcctgtttccaatttccacaacagagttggctttgaactgaaacttcctaagaaaaaaccatttcctttattcacacttccaagttacattttgaatatttcaaatagctcggcacaaaaatctaaagtaatagctaacaccgtaacaagactgagagaaaaagttccttttttaaatgtgttgcaaagtttgctctcacatcctggtaactggaaactgcaacgctgggtgactgaccagcctttttttttattatttaaaaattcaaacggctataaagggcttctaatgtgcgtcttatttttaaaaggtaaggtaaaaacccttttaacctaatagtaggatatatgtgtacagtttcgtaattctgttaaagtttgcagaattaatcacaattcatgtgttaaatgtttaaataacatctaagtcattaaaaccgcttaagtgcaccaaaaaagggcaataacgtttgctccgctttgtttccttaaagtctccatccaactgaagctaactacttgctgtggacaaaatgatcacattccttctgcctccccctaacatttctggtaagagaaagacctggctctaggaatgtgtgtttaatgcaaccctgagctcacttcatcctttcatggggcaaatgtggaataaattaccaatgaaaaactttagtaattttaagatttgttttacttgaaggtaggggtgtaccaacagctgccaacacttctgttgaagtgttgtaaccgaagaggtaaaaagtgtactgagtaatccacaaaattgggtagagcaaaggatgcacgccatgcttataaagagtttaattttaaaattttttaaattaaaccttcaagggaactagcatgtgaacgccaaggcataatctgttatttaattacgggtctccataggaccgaggcggagagagctcccggtagaaccgacgcaaccatcccgggatggtgaccaacgcgcggctgctgcgggcagagggactgaagagaaccggtggtcccgacgctggccccgagcccgaggagttaaactaacaaagagctccccgagccgcgaaaccccccagagcggaagcgacgcctccccgccgccgccgccgcgccgcgaccctccccaagttcagggcccggcagtggactcgctgcggggcctgcggccaggacggcgccgggttcgcagtcgggatgcgggaaacaggtagaggccagaatacgagccccaaagagaagagtgggcgcttccccaaacgggtcggcgcagcggaaaaggctaactgaagcaagcgggaggccccgcaccgaggccctgcttcccggggagcagccaggcacagcggacaggggggccgcgctttgttaccggctgagagaagctccggccgccgccgccgccatcgcccccgccccggggcgtcgcttcccggcggttctcgccttcctcggccgagtagtcgatctccccctcctcggtcttgagacgcttggcctggctctcgtactcccggtcctcctcgtacgtctccctgggggaggaagaggaggaggacatggcggcggccggagggaccggctggcaggcgggtgggggtggcggtggggcgcgcgcctcggatgccgccggccagtcctcgccgccggcagcgcctcttctgcgagggtctccgcggcccggccgtccgcggggactgcgcggccaggagactggcggctgagaagcgcggacggactgaggggggcgccccgggaggaagctctggagcggccgctcctctcaattaccgagccaacattcagcctctccctcctcctcctccgtctccgctccctgcccggaggagcgaatctaaggatggggacgcaaccgtggcttccggtcttccctcctcccctaagccgctcccagccgcgcaggccgagcctccgcccccgccttcgcggccgtcgcgcaggatcgaatccagccgcagcctgcgggaagcgccccccccggcccgggttctgctccctattggcaggggcgggaaagtcgaccgggcttcccattggctgtgagggccgttcgtcaaaagccgcccgctgctcgacctcacttctctccccgcgccttctgaactcgccgcggtcctgggaggcccggcgcgcaaggcgcgccgcctgggagtagttgcgacccgcaaccgttggcgctatgcggctcctacccgaggccaggcgtggagtgaacacggacgagcgacgagaagtgcggagaggctagggctgcgggtgttaaccgccctgccgctaatttaaatgctttttatcacctcttaaaaagagaatgaggaaaaaaacctctaaaatccctgcagtcataccccccgaaaagccctaaaattgcaggcgatgaagggagaaaacggcttggagccatgagaatggtctttccactgttttgtgtgcaaaatctggtagaagtgggcggaccctcccgcccctagctgggtgttggagaacagctgtcagcattgactgaaggctgcgaggcgcgcgtcggcaggaggcgctgcacgcgggcgctcgtcggtctgatcggttataactcgtttgtaacctgggccctttactgacttgcctgtccctgtaagtccctgctccagttaaatatgttttaatccttccatataaaatctcatcctccatcccaattctttctcttctggacaatgtatttacttcacttgatcatttattgtcgaaagatacaaaagcctttcaaagttctgtgatcacagcttgcttcctctgtggtgtcctgagggcttttccaagattttagttgctgctctctttttgcaacagggccccttataactccctcttaagatgttctgttttaaaaactctgtgagcgcctgaagacaggaactgtgtgcaattttcattttcgcaagcccagttcctgtgcgatctccagcacaatttaggtgctcaacaatgctgaatgagtagtccttgggaaataaaggtccagtgtatctttcaggacagaaactggcaaatcaaggcaacctaactgccctctgtcaggtgcctcttggaggactgcctgagatcaagagcctcttgtgtttctgttgtccttgtccctcggatgctttcctagatgtggctcttcctttcctaagagtgtagattgcttcctcctccagcctagttctctccaaagttatttcctcctccaaaaaagctatttttatttattgctgagagtgctttaacataacacttttgtactttgtaaattacaccggctgtcattttggaatctaattgcaagattttccacactatgcagctataatcaaatgtgtgtgcggctgcaggtatacattgacaaaacagaactaaaaaaattataaatttattttttaaattaaaatggaagtcgacagaagaaatagcaaaagagtggcagagctggctgcggatgagaaaatgtcattggcaaaaagctctgcaatggtttgggaaagtaaaatagcaacaagggaaacaatgatacaattctgcttaaaatatgtcctatggattcatatgtcccctaacatattcagaatgcagacattacctggccttcagaaagctgaagataccaagggtcaaaaaaaaggtctaacaaacctacttcacgtgttatctttagcatccattgtcctttttatagcagtctcagtatcaaagatcaggaaaggatgagtgaattaataaacttgatacaaaggaaacttctttgatgaggtgagatgggccattctcaagatatttttagtttgctcaaattaaaagagaagagctgagagcttaaaacaattattttttaggagaaagaaaacaatagaatattatgtgaaataattgagtgtgatgagaagcactaaatatctttttgttaagtatgagcaactacctgttaatttt

SEQ ID NO: 3109 - DNA, 4001 bp, Homo sapiens
ctttggtcatctcaaaaagctgaatatatgtagccttgtcctttaaattaaaaccagaaaaactttgggcaggtgctcttctgagcacatcagagtgctgacagaactcagcaactaatggtctgccactctgcaacgcgaattgcacatgactaagtgaggcaaagatagcagcggagctgggctggcagctgggcaccttttccctgataagacacaaatcataaccaaacaagtggcttacaagacagtcaattaatatctggacatatagtctggaactcggaagccaactaaagtacttcatttcccaagtgaaatccctattcatttttgttctcccacctccatcccaaactgagctcctaagtctagatagggatgggggtcgcctgggacttctgcaggccacagtttttcggccccaagtaccggcctcacgaaggctcttgggactgagaagggctgccggggttcttgataaacttagtgggggttgttccagagaggggaagttggaggggagccacaggaatggccgtggccagaagcccttctcgttcccttttcttctgtttcatcctgcggttctggaaccagattttgacttgcgtgtcattcaggtgcaagcagttggctatctcgatgcgccgggctcgagttaagtacttattgaaatgaaactctttttccagttctgtcagttgcttggtgctgaaattcgtgcggatcgcgctggaggggctagcggccccatactcggcgagtttgcctgcaacgtaaagacagggcgtcagccaggcctgaggccggggacagaatgtgggtgagcagtggagctagttagaatcaaagtcccagcgcagccctcctgggtccctaggaacagaatttgtaccaggagaagttccacggagagctccttcctgaaattttctcaatgcctggcacattttccgaatctgtactcgaggcagactccatggaattcgcccgggaacgcgtctcctccacaaaacccaaaccgctgtctggaaaggcagcgacaccacgctcccagcgcatttccgcgggggaggctccgtccccaaccccaggtggccccatccaaggcccgcggacttacctttcttagaggcattcctcttcactttcatccactcgaacgtgctgaaggcggcagggaggccggaggcgggagagacggacttggggtaggtgcctggggccggggatgcggtctggaaagcaccagggtggccgtcggctgacgctttgagacaagccggaaaagggccgggttcgccgaaggccgcgtaatccacctggccgctgaggaggaaagagccgccgcccgagaagacggccgaggtggcgtagtggacgtgagacccgccgtcgtcggccgcccgccccagcacgcccgggaagtcgtacgccggcccggaccccaggaagccgtagtccgcgcccccagctgccgcggcaggtgcggcaccaggttcgtaggccccctccagggtgcactgcgcgtactggggcgcggccggaggcggtacggacggccgcgcgggggcggccgggggcgaaggcgagggtcgggcggcggccaggggcagacagctgacgaaggcgccgtcgccgttgcccagagggaaggcgggctgcagagccacgggccgggcgtcggagcggcagaacttgggtgccaagctgagcacgtcgccgccgaccccgccgctgctgctgcatgacacgtactccaggtaggagctcatggttcgggccccacctttctgagggcgcaggccggggccggagtacggagccgggcagaggctgagcaggactgccgccgtctgcgccgctccgccagccctctctacccgagctgccctctccaacccatggcgagtgagccggaggtaaatagtggcctaatataccggcgggggcggccacgtggcgctggccggccaatgggcggcctctccgctcggcccggtcggcgcgccgctcctcgcgcctgccccgcagccaagttagccaaagcagcccagggccgccgcccagcgcccccgagccccgaggagagccgtcgcgaccgggggctgcctgggcaagggcggggcgagagggcagaacgcctgctctcggacaggtattgggcgaggtggggggagaaaggcaggactggacgcttgggtgagggcccgtggatgcagcggggcgagccgcttctgctctggatcgtggggggggctagtccctcgagggcggagtgtgggcgtcgcggcatggaaaaggttaaatgggagcgtgacgcgcggccggtggagactgctcttcgcccacctccaggacagataaagttattcctcttcccctcttctgagtcctctgcgctttcggtttgcttggcgctgatgttatccctcttctaaacctagagcagatgtttggttttttcctttcttccccctttcctaggactcatggaactacatcttatgctgtgagtgctgtgtgcctagggcgggacaaaattttcactttttgactaggcttccttttaacgtgactttgcagctttcttctatccctcgcaatttgtggcggcgtgatgagggccagtgttgtagtgccagattttgataaagtttctgccttgtggggtggtttagcagattttcccctccggctgggttgttggaataaagaatccagagtggtggtggaacactccttatgctcctttctgggagactggcacaggcaccggtgcggcgcttgctttcactgaggagcttgtctggagggcgcaagggcttaccggggacgggtgagatctcagaggtttagatggacttgtacctcgaagcaattagagcttctgctccatcagataagtgctgcatcgtctcttgtgagtgaaatctgagggctcacaatgttaatgggctcacgtctttcccttgataatatggttttgtttactgagtgtagagagacgggaaataaaagtgcaattgccacaggaaatgaagagtagaaaggttacaaagaccagctttacattgacaaactttccaacttcctttagtatttcttttaatgttcccttttgaggggactgtaggaaaattacaaattagataaatagaggttatttacacacagtagttatgaaagagggtggtttcctaaaaccctgtgtgaataaagactctaaagagtctactcagagcttatatcaagtgcccttgaaaagttaatctattacagcctctaagttatggtaaccgaggttttatcattgttttactgattgacttgtcataaaagagcgattgagctgttgttgcctaaatttccactctgaggaagtctttagaataggcgccatcacagcccagggagccagttccttccagggttgtggacttgtgaataaacaaagccctaccaaaatgtggactactgatggacccgaagttgctgcaggatgggggagggatgtccccaggttgaggggagccagtagagggtggatgcctaggaatcagcacaaagttaaagaggtctgtggttcctgcactgctggagttcttgagtttgattggaaatggaatacctgtgctgaaaatagcccttcaatcttgattttgctatttcagttgtgctatagccagtcagataaggtcctaaataatttttatttatttatttatttaatttttttttttaagtgcagtggcgcgatctcggctcactgcaagctcagcctccccgattcacgccattcttctgcctcggcctcccgagtagctggtactacaggcgcccaccactatgcccggctaattttttgtatttttagtagagacggggtttcaccgtgttagccaggatggtttcgatctcctgacctcgtgatccgcccgcctcggcctcccaaagtgctgggattacaggcgtgagccaccgcgcccggccctaaa

SEQ ID NO: 3110 - DNA, 4001 bp, Homo sapiens
tactcacatgaagtgggccttggaagggaatcttacattgatgccacattacttaaatgacatgatggcaggacagtctgcatttgggttctcgctctctctttcaactttctcacttgtacaaaacattagtagaatagtaaactttccagatctccccagcaacattctaagggttcagctcctaacagggacggaggggaatacgccacgacctggacaagcctaccaaccccactgctgcctcaggtccccaaatctgccacttcttccccacctctcctaggcagtcaggaatcctgacagtcaggtttataggtgcccattctctttcaaaagataaatggggaagcgagacaccttcccccaccttgcctgggtattgttgcattccccagaatttccttaattttcatgtcttcttgcccccacactaaagcattcccccagaaagggagccccctactgtggcccacctctaagcactgggggagaggaggagggttccttctcaaaaagccagatccctggctctttgccttagcccagccctaaggctggccttgcagggagggcaatgcgggttccactctccccctccgcctttgccctctttgccgacggattgcaaagactgcagcacttttcctaaacaaagccaaggttacctagcccagcaaaggcagtaagccctgtttcccaactcaagcaccaaccagcccagccatctctttcccctcaccacccccaagctcgcaggatgcggggtgcatacacttgaacacgaacacggtgccctggatcaccttaacatgatcattgggctcaaggcaaaactggaactgcaaatctgagcaggagaaaagaggctctgtggtcgtgtttatgagccgcaggtctcctttgcgctcttttgttgtgttcaggtctagctcaggaaaaataaaaccggcaagcttttcctctgcccgggcgccatcagcgtggggccaggactggcggagagggccagggcagcaggggagaagcggggactatctcagggctgagatcacccctctaaaaccaggcggagcagcacctgccaagtcgggctccggctcggcgctgggcaccccggcactccctctctgccgggttcccgggctgcgcgccccgctggggtggcaactctgctcataccgacctttgctttccttctcctgcacttcgggactggacacggagacctcagccaggcagctcctctcttcgggaaggccgcctttggcctcggggctctccacctgggagactttggtgggctcctggccgctcacgggctcgttcatcttcttttccatctgcagctgggcagcggagagctgcggcttggccgcgccacgagggttgagctggagcatgacagtggagctgccttcggggctattattgtactcttgggttttcccggtggcgtaggtctgactcagtctaaaatatccagggacgggaacctcagggttctcaacgggacaagactcagggaccagcctctggtacgaagggacctcggccgaaatgagtttgttgcgcttatcagaatacatgcagcaattggattcttccttaatgttggtggtgaaggagcaagtggggacttgctgtgtaacaggttgctctattcgacaagatctgttcggatctgtccaactgtctacttgaggtatataaggatgcacattcatacccatattttggtggttcacttctcttttggccagagacgggagcagtccacaggtttgcattccataggtccccatgtctgcgctaggtggtggcatgtacatgctggcgctgctggaataaaaactgtcactcctgcaggcactgatcaaggaatctactaaaaaagtattagcagcaggagagctgttgggaaaggacattttggggaagaatttgaagaagagagattgtgtcctttgtaggctgacatctctaggaaaacattccccgtgtaattgtggatgcctctgccgaccacatgacaaccaagccaatgagatttgaaaatggccttgagccgcagcctcctctcgggtcacgtgctccagagcctggccggccggccgggtaagcacggacaacagcgacatctactacgcgcccgcgatagtgcgcgctggagacaaccggcccagcgctctccgccgccctcctgtccgcctctccagggctcgctcggccagcccgccccactcgcgtcccccgcttcggcccctgggcccaaccggcggaaggaaagtctcagctctaggggcctccaagtggacacgcacggacggggagggaagccagagtgccctggcgccagcgcacagaagcattccccccacacacaaccaggcagaacgcgcttaagagggccgggtccaggacaagcgggtgggggcgcaggctggttaatttagtcccgggcagcccagcgggaaggtgagtcggattccgcgggccctgagacatcccaccccaggggtccaaaggaaagatcccttggggctaagaagcggccaaggtgtctctaggagggcggaggcaaaaagggccgcgagggccgggaggccaagcagctggccgggcccggatccccatggatgggttggtccctgcgttgtcctcccgctcggtcctcctgcctggctccgggttcctatgcgccccggagggctacacgaggcttcggctctcagaggaaccacaccctgacctctgcggggccggacctctgggagctttcagcccagagacaattctttgccagcagttcactatccgcgaaagcgtccctcgggctccctgtaggagaactaaacagaggtttctctccccacaccctgataatggagggcaaacaggaaggaagaaaggaaaaaataatttaagaaaaggggaaactctgaccctcagaatccagaagttttagaaaactgactgggccaagaaggacagagagaaatgcaaaggtgtcattttggttcttctgcaaagaaaaatgttttccttttatggattttgtaaaagcactggtttctgacaagtgcaaggtacaaaaggttgtggaatttattaatacatattaagaagaatcagggcgatcaataaaattctcatctacattcttgggctacttggtaattttcttgcttctgaaggtttttaaagagttatgcccgctgttgccacacacgggaagatactttattaacaaatcaatcgagactttgtaaaggataagattaatagttaaatttaccataatggcgttcgctttatgaattattgaaaattatactattgatttttttcccttcgctgctaaccaagaaggtcatttttgttttaatacaaattgtcaaatattaaaagctatacttttgtcagaagttgagttttacagttttggacaatttctgaaattatttgacaaggctttgcttgggtaagggaggggaaggaggtgggaatcttagttctctgtttcctttggtgagggaaacttctatgaagaggatatggtctggggttgtggtccggctcattaaagaaccaccactaccaccactaccaccactaccaccactaccaccatggaaactcagagttttatgagaaacttcaacaacttcctccctccctctcttgctgcaggcgggtgagccgccctgcggaagcccgggcctcggggcagcagcggggagctttaaccttgatttccaaagacttgccctgagtgaggggccggccagggcttggagccgtccttcggcctgccaggttcccttcctgccagccaagaaactaaagcggtcccagaaactctgaccatgaaccagttctcagtccgggagggcatctgtgttctcttttccccgtactcgctggggcatgggctggccttggatttcaggcccagagactgaacttgtgggtaaattgggtttccacctcaatagaac

SEQ ID NO: 3111 - DNA, 4001 bp, Homo sapiens
ttttccccttattaggatccgctcggccaagtcccggcctcgtccgcaggctgcagtggtcgctgggaggtcccgagttgaccgtgggaaggaatcgtgaagttccacagagaagagacgtcattaaacccaaggacagtgggcctgcggagagcaggctggtgggaaggagggtgggtgagtggggctggggtgagggcgcttcctggagctctcaaaataaggggtttccagtgaaatactgcagacggtctctgttcagtttcttttctttcatcctgcgattctggaaccagattttgacttgccggtcagtgaggttgagcatccgagagagttgaagtcttttctctttgtttatgtacacgttaaagaaaaactcgcgttccagttcgcggatctggtacttggtatagggacagcgctttttccgggaccgctggggggcaactgcaaggcaaagagaccagggggtgagagaggccgctgcctgacagcccccacccgcccgcccgcccgggccactgagcgagggccaggccctggccccgttggggacgttctctgccgcggccgaaaggccctgcctgcgtcgtgggggatgatatatgggcgggcacaggagagagtgcgggcgtggacatgtgttcacgcccggacacacacacacacacacacacacacacacacacacacagagcctggcacggaggtggggaagcagagggcaaggcaggctctaaactggaacctgagggaacagagacaagagcaggcccgccggggcatctgcttgactccagcggcgcgcgtcagctagcggcttggataaagtccagtgcaaggatcaaactccccccacttccccaccccccgcctctctcccttaaaagcaggaggctccggtgtatgcactcacactggcttgaaatctccctccctccctccctccatggtatctagcaaccccctgcccaaaactgggaaaaggctctcgacagctattaatgtcctcctcgaagtctaccttaagcccacctaaattggtttcctaccataaacacactttacaacggcccaggaaatcttataggatgtataaacctcttcgaatgcttataaagtagcacataaaaaggcgcaagcagagggaggcctccgccccccccccctcccccgcggcccccgggcccaccgcttgcccagtacccggtgcctacctgcgctgctgctcttctcggcccccgcctctcccggggggccctcgccgtcgccaccgctgccttctgctgcccccttgggctccgagccaggggtcgccttggtgcagggactgcccccgccgccaccagccccggtcctggggtcgcccttgtcggctgcgccctcgggctgtggcggcgcgggtggcggcgggggctgcggcccggcgaacgggggcccgggcgctgcctcgtagaactggtcgaagccctgtggcaagatgccattgcggcccaccgcgctgtagaagttggaggcggcgcccgcggggccgtgcggcggccccggcgcagcgcacaccggctcaggcgccttgaagagcacgtccggccggcggcccgcgggcgggagaagctcgcgttgcatggccgcctcctcggccgccgcggccgccgcagccgccgccgccgccgccgcgtagtagggagcgtagccccccgcgccgccgccgcccccgccggggccgcccccgctgctgccgccccccgcgctgccgccgccgccgccgccgcggtacggccacttggcgcgctccaggccgtagtcgcggaaggccacttcgcgcacgggctggacgtgcggagccaggttggaagagtaggggaaagtcatctggcaggacgacggttgggaaaggaacgaaggcttgctagcgaagtcagacggggccacatagtaggcgcagcccggcaggtacatgctggctgcgctctggccgcactcgtcaaagtcgttcatgactccgcggcgtgcgcgccagcgagcctctggccgctccccgcgcagccaacctgagccatcgattgcacaagaggcttgggccaggatcaactaagcaaaaatccccaccgggcgctgacgtgcaattcatcttgattgattctggtggtaattatgtcacgtgacgccatgaagagaaatgtccttatatctatatcaacgctcgccaacacgccccgggacggctcctggcgccgagacgcgcgcgctgggggcggatcggctgccctctgccgccagctctccccgggcgctccctgaccaggctgcgcctcaggccggtcacctgcgcgccgctggccgctgtcaccgctgggcgcatctgccaccgcccgaacgggccgcccgcccgcgtccgccctcccgcgccgctttaagtacgcggaccgaggccggcggggaggaggaaggagggggaagagggggaggaagggggaagggagagaagcagcgagcagagggggggaagccccggctccaggctccctagaagctaggaactaggtgtgagggtgtgaggttccgaaccccaccccccttactgcagccgctccctcccccgcgactctgccaccctctgcagctcacccgcctgggagcttgttgcttcttgttcaccgggcgggagtaatttcgccactctccagggcgcagggagccctgatttacatatttttctgcccagcgcgttcagagtggagtgacttggctctttccggttctgaccccaagggtgcgagtgctggcctcggaaaaacccaggccattcaccacctaggcactcacccaggccggggccttcgtgcccacccggctctcttcccttctctctggtttccctctctgttcttgtctctctttctccttgcctcgtttctcttcagtcttctcccttctctctcctgtcttcacttctctccttcctcttcttttccgctttccttcttccttcctcttgctttcctgtctcccttctcctctctctctctgtcctctcatcctctcccctcctttcctctaagctgtgtgtcactgtctctgtctctctccccgttgcctctctgccttctccttcagcactgaagccaggagggggctcagcccgtggtccccagcctccctagaatctggggagtctggtgaacaaaaggatctggagtcctactcttagggtgcttggcttcccgctggctccccacaagagacaacccccacacactcgcaccttcgtcctcctcacccctctgctttcaggcctagcctgggtgtccgccttatacctagacccttcactgcttcggagccccgccaaggcctgcgaatccacgccgcgtttccccgaggctcttctggtacccttgggtctgcatggtcacttcagcccctcccccaagataggttgtctctctaagggctctcagcggagcctgactccctcctggagcccctctgtgtcacctggctctgaggcagactcttcgtggggcaccccatccactcccccaaggcctcactctcctcccagcctgccgcgaccctctcctagcccatgggtccaggcaaggcctgggatcccacctccgagtgagcagacgcttttcaaaggtaaaccgtctcttcccaaacccaaatcccagaaccgagggcaggaggctgcccctttccccaagattcctccgcccaggcaatcccagcgctggggcctgggcctcagtcctatacccagggcaggcggcgctggctgtgatgctggttccctccctggcccgggctgctgcagtgccggtgctgtgcgctctgcccaccgtgcggacagacagagaaaaggcgggtggtctgagctaatatctattttctggctgatgtacccccccttcctctttttctcctccctccctttctcccttcctctctccttcctccgccccttcccatgtcttcttccctcccccaacact

SEQ ID NO: 3112 - DNA, 4001 bp, Homo sapiens
attaaggtaattgaagaaagaaagatgcaccaacacctttactcacctcaactggaaagccatatttacagttggagtgcagcacccctcctcctcttattcactcccttctcctcccctggatatttttccctctccctgtgcaacagagcttcaaagcagaccaacagctcctttcaccagagctagcctctggggatccagttacagggttcataggcctggcctaggcatgtttgagaaggtgggagtagggcaatgtttgccagtcttgtctggagatggcacttgtctggagtcccagtctctctcatcccatctcaggaaatgaaggttccacatattctacccagctggaaataggccagcctatttcgcatttctcatttcgagatatctccaagtttaccccactacccagcccctccccttccctcccttttcctcccaaagtctgaagatctagtgtggcttttgttctctcaaatcagccagggcagacaggagggtggagggtggatggtgccctttcctttctccagagtgaagatcctggccttgccacaaagggcttctgctgcagagacctaattgtacccacagtcctttccattccctcaggaggccttccactctgagccctaactaggcgactgctatacgctgaaggggctggagagagggggaaagggagaacgaattgggtggaaacagaaaaatccaggtaccggggagcaagaatgagcggtgggtgcaaatgccccagccaggagcaaggagagttggcctcagtcccccaacgtggaagccttaaggccagccagagttgcactggtacttccgcacgtttctcacgggcttctcagggactgaggaaagcaaggaggcccaactggcctggtctgtaaatctcttggtggcttctggggccagcagagaaggaaccgaaggaaaagccttagccttagccccagatccccctccccaaacaaggcctctgtccaaaagggcagatccaacccggccctggccacgcgcgcggctagtagagcgccagcgcctgctcccgaagcaccacgcgcttcttcttcatacgcctgttctggaaccagattttgacttgctggtcgctgaggttcagcctattggacaattccttgcgtttctgcctgttgatgaattcgttgacgaggaattcgttctccaactccgcaatctgctgcttcgtgtagggtttccgcttcttgcgggccctccccggggccgccccccacggcaggcctgcaacacagccccaacccacgtcaacccagcccgtactctgtctattgcccgcccccaggcggttcacctccccttacactctcccttgaaccccacctcccatcccggcccaaaccggcccggggagcatgggcaccgtttaccgtcgggcagtgaaggtcgcaggcaagaggcaacgcccgccgcctgcactgtcatgttcaagttgagcgggcccttggtgtcgtccttgaagccaggggcgcagggagccccctggagcagggtcgtggagcccggcgtggcacgacccacaccagcgtagtcatacttggccgctttgagagcagccactgcaggagccaggctagactcgggggcgaaggacggccgggtacgaccgcgctcctctggcccagcggccgcttcgggcgcatagaacttagcctgctcttcgggtccgtctttggctgttgggggctgcaggccgagaggcccggagccagccaggtagggctgcgagaagccgccgaaggcagtggcgcccgcaggctgcgcgggggcgcaggaggcgggcgtggcggcccagggcagcgcgccgcgcgggtaggagatagggggaagcgcggccaactggccgccattcggcctcaggttggagaagtagaaagagtctggcgactgcagattcagaagcgagcccacatagcccgctctgtagagactgcgctcacacatctccaacaaagggcttcggctgcgctcgcaacagtatttagttacaaccgggaataagaggacaggctcagacgattggacgaaactttgcctgcaggttcttcaaagccggtcatttcagcaccgcctacatccccccgacccgttttcccccccttcagagtattatgataacacccgcaatgttcgatggcgaaggacgaggctgccagcagagccaaatcaggttgagcgaagactaactgtctgcgggtttccaggcccggcttcagcagctggggacatcgggcaagagggtgactctgcccaagtgtcccctgggactcttcttggtcgtgattggctttgcgattcgttttccgcaggctttctgggcccggcttgcttctaccggctttaagttgcagcggaggcattttccattaaccggcgcctctcgacttatccggagagggcgcggtccggcggcaccaggagctctgtcccttggcctgagcaatgtcacttttaccccaatcactcccacagagagggtttctccagagacctctgcctgaggatctggcagcaaagacccattcgctacttgagccctcagtcccaggccgcagacacaaaaagggcatcacaaactacccaattttgggatccaggaaggaggccacactatttctggtttgtgtccccatggctaagaactctgatcatagggaaattgccatacaggtccatggagaatgtccgccagggaacccatcagctcgatccaccaatcgtggccaaaggctacattccttttatcttcaggagtcctctccaggactacacactgcaaaccagaactccgaggtgtccccatccaccaagtggagggcaaagcaggacgaactcccccgactgggtgtggaaaggcagaagagccagaaccacctggccggggaacagcgggcgttcggaggcagctggctagcagagttccttgcctcagcgcccccaggggtgccggggatagggagttcacgggtctgacaaacagggaagtgggaaaggcagcagttcttagccgggagcggtgtgctcagaccccgtcgctggccctcttgcctagtccggccagaggactaggggtcctcccctcctgcctctgatcccaagaccctgggagacccggtgaccggcgccagtctcagcctgcagcaggaccctcggtctccgagccaagctggaattggttagatcgcgggctcctgcactgagaccacacaggcgccgccggagggcaagactgaccgccgcgctgccactttattgtgtgagttatggcgaccaattgggtggctctggggaacgcaatcggcctcttcctcctgctctggtgggggggagagagggagtgaggacgggggggtggggatgtctggggctcctctggctctgccagagagtttccttaggagcccaggcatagagactcactcgctctcgtcctctcttgggaggtgggggcaagcacaaactgcaatcccagttcctagatactcaagggaatacaagcctcagatccctaagagctcttattttggggaacccatcctattttcgaggagctgcagcttcgttactcccgaaagctccagctccaggggtccctgcagtctctcctcacgtttcagtgcacgacgattcctcgttatttccaagccgaggggtgtctctttcggacctttaggcagccctacaacagctgtttgcgcctcaggactaaaggcataaaagaactcagtgaaaaacaggaaaaacaagaacaactaggttccctccattgctccttggacagtcttcccacttcatcccccgggtttatgactttcgaggtctggcaggcaaagtcttatgcgagctggggaacctgatcgagggaggatcggggtggaaagtagtggcgggagagtggcttggctggtgattaagagaatggaacaggatttggctgaggagcg

SEQ ID NO: 3113 - DNA, 4001 bp, Homo sapiens
attcaagtctttccaaaggccttttggagacaaccgaatggcttctaagctgtctgtggccaacctggaccacatcaggagacagtatctttgagcttggagacaattttcttgtccttcactcttcggttctgaaaccaaatggtcacttgtctctcagataggttcgtagcagccgagatacgccgccgcttgtccttgttaatgaatttgttaatggcatactcgttctccagttctttaagctgcagtttggtgtaaggcactctcttcttcctccctcttcggtagacgcacatgtccggctgatttagagccacatcccctgatacaaacaaaagcacaagaaaaattaggctgggatattcggagcacctagctgaggattgtgtgtgtgtgtgtgtgtgtgtgtgtgtgtgcgtttgcaggggtgcaggaaatttttaaaaaatgccatgctgtttggtctttattatgtacatagacataacacttacctgttattaaagaaggattatttgcacttaacaacaatggttaatttgattgattatcatagtttctcaaaccggcatcttaacaagcttgcaattttatggtgtggttattgggcacgttcatgaggacagtttctgcaaatgtcggttgtataaaaacaaacttacatacatagacacataccaactcaggtcttttgctcaaattttgatttcccgcgttcctatgttaggagttcgtgagcttgatctaacaagctttagtagtcatcttggggcagtgatgtctttgaaaatggggggacccaactctgtcaggtttcttaggaaaaagttctctttaggagaaaagggagaggcccaaggaaagggcacgcagagactctcaactttaggagaaaaacgtgtctgcgctgcacacaggaaagaaagggcagtgacggaggcagttgaaatcagaggaggaatttacagatttcacacgaactggacaaatttccactgggttaaccctggtcacgtgtggagcacaggcacaactcccactcccaagtaggggcgcatactcttagtcctttcttttctccttctctctccccctccctcgtgtcggtcccttttctccatcgcccctacctggaaaggaagatttccaaaagtgggacccctgtggctggtccttggtgcagtacacctggctgttccacccgttagccagcgtccaggactggtacccctccatggagatgtaggcctcgtgccgaggctccccggagccgaaagtggacaccatgtcgatatagccgggcacgtgctggtaagggctcgtatagccctggtagaaggatacctccttggctcgcgctggcacctcgttggccggtacgctgctgctcgccaggcctgacacgtccatgtacttctccacgggaaagcctcccagcgaggcgtgcggcgatgacttgagcgcattctgctgtaagcccacgccgtgcgacatacggcagctgtagtagccgttgccgaagtggtagccgtagcccagcgctggagcgctcgggggcgctgcagcggccgctgcaggcgtgggtgctgggcactctttggctgggggagcctccgggcgcgccgctacaacggcagaagaggacgacgacgaggaagagcccgtgcgctcagaggtcccggggtacgcaaagccggaggctgccgccgccgccgccgcagccgccgctgccgccgccgccgcccgccccgaatgcgtcccggcgaacacaggcgcggagagaaagccgcggcactggcctgacgccgccgccgccgccaccgatgaggaggaggaagaggccggggcgccaccggcgcccccgccgtctgcccgcagcccgtccatgtcccagctcccggcgcggctcatggcccggcctggcccggccccggccctggccctggccccgcgcaggacaccatggcgcggcgcgcctcctccctcctctcctttctctctggttcgctcgctcccgccctcttcctctagccctctctccctctgtgagcctcccgcctccggcccgcctgccctccaacaggttagctcatcgcgggacgtttataaaaacgaagttcaggttgggagggggcctgggccggtcggggggccgcctcccgccccgagggcccccgccgggggcgtgccattggctgcgcgcggccacgtgggggtaggaacgcgggggagcctggctcccggcccaggcctggctggacccacccactccggcccccacccctctcctgccccttgcagggtccacctcccattcccgccctcccccccgacccaggcgtacgcgctgcagccacccccacgagttgattgcgcgacggcccatcccaggccctgtctgcgactgaggcgggcgccaaggcctgcgccttgtctcggcaaccgctgtttttgccacctctcctcggctccccgagttgcacagcaaaatgaagacgaaggacagagatgatcagaatgatgtgaaaacaggcccatttttttatcctgttgctgaatccctcagttagtcgacttctagaccccaaatccgagtgagctaatttgccctaccttgtgcactggtacccggcaaaggcatttcacacaggtaagaggcattggagcagacccttcctatacacacacgctgtccgttcggaaaatgcccatgaagcgcccttggggctggcggcagagacttaaacagatgaaagacaggcatcggcgcagtgagcctgacaatctgtcccagaaagaaaagtccatggatgcctactcaacgctcttcgcctctactcttgggccagccgggagtgcttccgacctgggcctctcagctcccgcgggtccttcttcgacccgcagaaagaccctgagaacggcgccgggggagaaagccactcagcctcccaccgtgaaacttctgtgtctctccagcagccgaccggcctcgcattttgcagtcaccacccactcccgcccgtttctcacaccaaattaattgaaaacttcactttcccagggacctttgtttcgcttccttttccaagctgtcaactgcagagaactgagaggggcaaattaagagggcgcttgttccaagcaaattcggattttgtgataggagcagcccagagaaacggtctgacttcaaggggttaggtgggctcagggcagtgctggtggggctaggtccagctctggaaccaagctgccagggtgttagggattacagccctgtccctcatcatccctttctgttgctcctcagcctcagagctccagcccaccatccctcaatctcagcaactaatggggcaccaatgagagtcctgctgtgactttggggctctgccttaggaacaatattagatccaatgagcccagggttctgggggtggatatgggatccttcagagcccatttggttctgtggcatgcactccccaagccagcccatctccaagaaaatcactcccctaagcctgtgattggtgaaagcttgtcacccagcaccactgttccccgaccaaagatgccctgagtaagatgaggaagagagccaggaaggccctccttggcctggcctggcatttcagggtaggctgctggtgttaggagtgttgacatgcaaaacgcagtaaccataaaaggctcaaataaaggggaaagttatgagaggggtgttggaaaggaaaagcaagagaattcgtttcatcgttttgaagttctagacatgttcatgatcaaatttgagatgggaggggcctgaatttacaggaaatcatagggaatagaagtttgctgatgagaaaatttttttcactatttgggaaaagaaggcaaaagtcagcaatgaaagttcaaccagcattttaaaaaggccaactgtggcgaggcgacaggattgctaacttttaaagagggtttggctgggtctttatgaaacaattttg

SEQ ID NO: 3114 - DNA, 4001 bp, Homo sapiens
agtgatggtgctgtccttactggaaatggctttgcagtcccccaaaaatgcagtttcccaaaagtgatccctcttaaaacaaaacctgagaatatagttacaaaactggtaaaaaggcttatttcttttcagaaatccctactccttgtgaactctgcttgaacctaaaaagcaggaacgggtcataaatcacttggacaatggtcaactgttcagtggctcatcttttcgatcaccccctcaccctttttttaaagcctttcttttctcgccctttggtacctttgctcatttgggctccaagacccaaatgtcttggggtgaagatgagccagtgttgggggaggggtggtcgagcacggcttctcatttcttccaagtcctcagctgccctttcctctccctcctcctctcctccaccctctagcccggggaactggccagggcagcctccccaaactccgccggcgccatcccctgctcctcctgggaaaggggtgccaaataggtctggctcgccctttcttgcggtgctgggaagttgcccaactcagcttggaggcccaaccgcaggcccggaatacagggccaaacggtctcctgccggaaggaaggtattctctgagcggccaccgcccgcttccccgggcccgccggcccgccgcaaccgctgcgcctccaaagcagccgaaccctgatacttgctcaccgcacttaatgctactagagatcaatacctaatatgataccaaataaataaaaggcgctcacagcgaccaggggacggggttattaagcagctggagctctcacggtgcatatcaatgcacctgtcattgtggtttgtagcaaaatttatgactgcgaccacggcggcagtaaacgcttcggtaaggaatgaaaagaaaaacacttcccaaggcccggcacttttcagcagtggaaagcaggctccgcgtaggaggcagcgcagcaaaagaattccctactccgcacttttcccgctcttgcaccctgcgagcagcaggattatataaagtgaccggcgcctgcttctgctagcagctctgctcggcggtcggaggcgggacgaacgcgcgcagcctcgctggggaccaaaaatctgctgcccgtggtggcctcggacgccgggaggctagtccgacttgcggaggccggctcggcacttgcttgtacgccggtggcagtggaaaagctgagggggcttgggaagggaggggacaccaggcgccaggctgtgactagcgctgcaatcgtcgtaaatcaccgacgggtagagtcagcccatccaagttgaaagagagggggaaggcgatggaggttgcggtcagtttctctcaaaatccgctagtgctcgagctggtctcggcgcctccccctgttttgcctaaaccagggtcagaagcccacggatctctttctggcggccaagacttttgctgagcatccccacgaattcactggaaccgagcaacgattctccctttcctgttggctttgctacttcgggattcgaaaccactggtttttgggtttgctcgaaaggagacttctttacgttccgcccaagttctcccgatctctaagcttgagcctcttttgctctataagaagacctggacgcgccttctaaatcactcttatttagcccagataactcaatactgtaatgcaccctgtatttaaggcactgggcttgccccattaaagcgccataaatttgaaggccaatgatcggttttcatgtaacgggtggtacttcatactgaagtgacccacttcaaagctgccctttgttctatgtcttgatgtatgaattttgagatggccaccttgagttgcagagggaaatgtactggaaattattatttaaatgatgcccactcaccacaattatgtatgtgtgtgttttcttgaattttgtctttatctcttttttttttgtaggctcttcaggtttcttttgatatctgtggaggcgaatctggaacaaaatggaaaactctcagtagcagccggttcttgcttacaaacacttacatgttgaagggcttttcccacttgaaggacgtcatagtcaatgtgactattgtatatggtacccgtgaccatccagacgccttctccccggcaaaacacagactcagttggctcctggggagcgagggcccctttaacgccaaaatccatggctggatgggggaggggagagcccggacgtgagggaagcgccagaccctctagccaggtgggtcagaggtgcagggaagccaatctgctctcctcctgcccctaccaaattctaaatgctcctccaggtcccaatcccggaagccaaacactctcctaggggcagaagagagagaccgtgcagaattaaggtgggggtttggcaggggaggctgcagaaaagggcaccaggaaaggaaggtaaataggcttgggtggatcttggtcaggggctgctctacagagcctcagtgaagaggacctgggcgctagttcctgatttatacattaaatatatcagatgctttccctgagtttattcattccggtaagtatccaccacactcttggccctgggctgcccacttctgggtcaggatcagactgcaaatcgcctaagaaacaaacatcctttccacccccacccaaagccacagaccaagctcccccaccactgtcaccgctcagcgggtgaccaccccccgtcaggtgaaaggagagagacagagtccccctcttgcatctgccctgtgcaatttgtcgactcagtagtttgcgagcactaaactacacccgggaaagcctcacacaaagcgttcccggcgcttctaaagactaaagcgcgcagccataagcctttgaagtgacctttggctcgcaccgcaataactcaccccttaatgaacacccaacagaagcgcctcgaagagatcccagcccggtagggctcctaacttcgcgctgcggcttcagcttcccagccggcctggacccagggggaaaagccacttgcccgcccccctcccccaagcgctcttggctgggccgggacctgagggtggtgcggtggaggcccgaggtaccagggctctcaagccagctggtcctgtagctgctttatataatacattcacgtgggcggacgtcaactttcgccgcttgattattttttatttatttatttttaaaaaagagttctttagaagtaggagcatcccctcaaaagaagagctaagttgggaggtcacccggggccgccacccccttatgcctctagctagatttttctttttccagccgcggaggaacagggtaagtttgcgcctgggggttccggggtgcgcggtgcgctttgagctcttggcgtaagaggcttgggaagaagaaaggaaagaggaccccaagttaaccaaagttggaccaccagaaaagccttcagcaccttctcccacgctccctaccctgcccacccaccatcccacgcgggtccaactttggctccttgtttgcccagattctcagccttaaccgggctggctttggaccaccagcactggtgctctttctggagccaaaaacgggaagagcaggaaggagctgcgtccgtgagctgtcaaggaagagctgagtccaggcagccccaaccctacacctcatccctcagcagcaccctaggaaaactctttaggatagggccagcgtggagccttggtagggattattgaaattttcgggggaagttataagtgaatgctccatggggccaaatgaaatgctactcgcggtaattggattcagctgactaagctggcaggcgcgcagcttcaaggcagctagcaaagaaaaatgtccagcgactttcagttctgatgaagccaagcgcaggagattgacaaaacaactttactgctctcttatgatggcgaagcccctggaagtcggttcctctcctgctagggcctgtcccaacc

SEQ ID NO: 3115 - DNA, 4001 bp, Homo sapiens
tgaaagcacctagcacaggggtggccaaccttctgcctcaactcccccacattattaagccacaaagcaccctggaggggtggagtgggggagaatgtccaaattcacagtgggataaagcatccaaccttcatttgcaaattcaaaatccaagagcggtgattttcataagtttaatgactcgccaagattttatgttctcagtagctcctgccatataatatacttagagagagaatcccgccccccctcccatccccatcccgctctagggagggggctgccctcgggcaggatgctaacctagtccgagggcggcctgcttgtcccaggtccaccccacagtaccttagagcccagcgaggtgacagcaggcccggcctgcccccgcagcttcggctcagcctggtgcgcagggagagatgggcccagggtccccacttctataaggtcgtcaggtccgtgtggtggtctttggccatcggctgtaaatgctggctgggggcgactgaggaggagcaagatgaggaggaagatgaggacgatgacctgcctttagtgttgggcagcttatgatcttttttccacttcatcctccggttctggaaccagatcttgatctggcgctccgacagacacagggtgtgagcgatttcaatccgacggcgccttgtcagatacctgttaaaatgaaattctttttccagttctaggacttgctgccgggtgtaggccgttcgggaccgcttgggttccccaccggtgtagttggggttcactgcgagacaaaacagacaggacaggcaggtcagcgcccggccactagttaggcccctcgcctccgccgctcacttcctggcgcgccccgaggcccgcggccctccccgcgcgctcccaagctcgcttgcttcctccctcccgccctctccccggcgcacacgctcactcccacccacctcctcaaacacacccacataccccaggcttgcgggatccccaaatgtgctccttcttctgggcccaccaccaggtccggaaccctcaagcattttggaaatcccccgctcctccacagccttccccctgctctgaaaatggagtcctcccccacccccccatccccacccccttttgcgcccacagccgagcagccagccacatggtcctgacctgctccctcagctataaaaatttatggggagagtaattgcggcgcccatggaagctccacacgcccccacctactcgcacccccttccagaggacccaggctaacgggctgggatgtggacagaaaggttactggaccctagccttacccgaattcacgtgcaccttcttcatccaggggtagaccacggccggctgcttgagtgccgtcccggagggcggctgcttggggtcggactgactgtaggcccgggcgccaggcaggggcgccggcggaggcgccgggggagctgggcaaggctctcctggagcggcgtagtgaccgccggggccgcctggctcttgtccgtgaccccgcgcaggcagcgccgagccaggcccggggccgctgcctccgaaaggctgctcaccgaagtcgggccgtgggtagagccccgggggctggaagtctgcgccctgcgcgccgccgccgtagtagtcggcgccctgctcgcctaggtagccgccctgcaaatactcctcgcacggagggaacttggggtccacatacttggagttcaccatatacgaactcatgaccattaatttcagaaggtagaaaatactaatttttctcgtgttgtctttttttctccttccatagggccctcctacttgctgtcaactgaataaagttgggcagccatgtgaccaggccagccaatggcgagggagcaagtttatcaccgggttggtgagcatctcataattttcacaaatttaactaaataacatacgtgtaatcaagtagcttgctatggcacatttgagagcccctgccagatattaatgtagttccagtccccagcaccccattcccctcaggtaatcccagcttttgtctgccactgattttgccaaccttccgtggcccttccactcacccccagctgaatgcaacccccgccccccgacaccaagtaggcacagctcaagggagaatgaatcctcctattggggtacagagcaatgaaaggtgggtgggtgaactcgcctctgagttgggcagagtgccccaggcgaggagggttcctgcctgcccgccctgcctgcagccggcgggagcagggattctgccatacaaaggccgccgtcctggctttgtcttcatcagggtcacccaaaagttaccagaatctggccagcttgaatcaaattaggcaatgagtaaccgccatgctttctaccagtgcccaggcccgggggttcccagccaaagctgggccctgccaaaatagcagggggccctcgctgcccttgcccatgtagctgggggtgggctgggatggtggcaagggcacctccaccttgtcaaaatgcaccctagagctccccactgggcttctttgaagcttgctttcttcccacaggccccaaatacaagcaagcccccatttgggtacctttgcacctcatgttcctggagggcagagctgggactgggcaagctggccttgtacctcactccctagtaccccaaaacctagccctttggccctgcatccatgcaaccaattaggcttgcattctctctttctctctctctctctctttctctctttctgtctttctttcttttcagcacccagaggatactctgtttaaaggtgaggagcttctggagaggaaaagctgctctatgtcaccaggcgcagctgatcctcctggagtccaaggtaataaaacagaacgaggcggctgaccagcgccggctgcttctagtctccatgtcgcactttggtctctggctattccgaagaaacgtgaagtttttgcatcgaccatatattcccctagaatcgaatctgtgactatacggataccacacaaattcggttctacagggtatatatagacaacgttacaacctctgggtcccacccagagtgaggtacctaggtcgctgccggccccaatctcttcctctgagccaccaccgttcgacgcagccacccgcactttctgagacagttcaggtagcctaatgggcttggcgacaatttgaagcaatgagttccctcattcttctgccagggtcagggttaccaagcaggcgaacaaccagaatattcttcttaagaaagaaaaaaagaaagaaagaaagaaaaataatccatcccaaggatggcggctttattaaccaccctcccccaccaggatccaaataaccctcctccttaccaagtggtattttccagaaaggaacaaatgccctcagcggcagaagaaaaagaagcgagaggggaatatcctgtgtctactccttttcctactgcccgaccaagccaggttgtctgccaaagctacttctccaagaagtcgcgcatttaccttcatgggccctgatccgggctggcctctccgttccgctgctgctgcagaccccgaggcaggcgctgctcacaggcaccgagccgccttgggctgaggccggcgcgctaatggtgaagggcagggcgaggggtcattcgaaatcatttacaaacatatcacaaactttcattatttttgctttgccgacagcagcacacaagagtacaaaagttcacaaatttcacccgccccagcgcctcggcactgtgcagtgcttgtccctcagttcagggcatggagagcgcagactcactcagagcctcgatggatttcaggggcacagggatgccctggctcgagtggggcttttgggtgcctaactgtaggctgaaggtgttagatttttttttaactgtcttgattgcccttcctacctcccacataattcaaaatttagtttcaagcctgggcctgggcct

SEQ ID NO: 3116 - DNA, 4001 bp, Homo sapiens
caagagcagtgacatgaaggtagcttgaaacacaggtaaggtcctttccaacaaagaaaataggtggtgtccacagcatatggtgattattagttttaatagtctgtggtaaattttaaaggtagaagttaatttgtcaggccttcggctctgtcttcctccagctcttgggcttcctttttcgtttccccgtccttcacctcctgccgggaaacgggaaatttgtccttgttgttttcctttttccatttcattctcctgttctggaaccagatttttacctgtctctcggtgagggctagggcgtgggaaacctcgattcttcttttcctggtcagataggggttaaaaagaaattccttttccaactctagagtttggaagcgactgtaggtttgtcttcctcttcgtctaccaggagctgctgattaaaacaaaaaaaaagggggggggaataaaagttttaaaaatgttatggtacctctgcatgttgctggaggtttgtggaacgggggtctacggggtgaaatatacacagagctctttagctccgatatatatatatagggtgtgcaggcaagaggagcagagaggtcttcacaattattctgtccccatcatctttacatggttcctacttttttaaaaaaagtctgtattactttatgaataagagccactgtggctacacaagaaggaaaaggagggggagagggaacgggagttttaaagccagaacgtgagatgaaagcagatttctccccctctcccttcttaaaaaaaaaatgcatcccaaccttgtggtctcatccacggaaacatttgagaaggagacgagctctgatttaagtggtctgggtcctcgccaatattaccactggacgatttacagtcaggatattgtaccagctcggcctcttgctgggtcgtaaaaatcggctgtctctgtaagttatcgtatccgtaaaacttcgcgggctccccgtgacaggcaatcccgccgcaggggggaggtggcggcggaggcggaggatgcggaggaggagggggggcggcctggtaggcagcggccgggctgcccccgccggggtggaagtactcctggccccggccttccctaccgccgcacccagtcccggagggcggcggggacgggtgcgggtgcgcgtgcgcctgcgggggcgcgtgcgggaagccggcggcgctgttgccatagagctgcagggctgctgcggcggcggcgtgacggccgccgacctcgggcgcgaagtgacagtcgtagtaagtgggattgatggcctcgcccgccgccgccgccgccgcagccgccgccttgtacttggagtacagcgggttcacgaagtacgaactcattggggcgtcagcggcggcggccccgggcgggcgggcggcgctaagcagccagagagcgagcctcgactcggccgcactgccgcgggggcctgtggggcggctgctctcgccgccgggaccgccgggctacgtcgctgctgccgcccgcccgcgctcgcgcgtcgcttctgaggccaggcagccgcgggcgctcagctactgggcgctcatgcccggctcttgcgcccgccgcctcggcttcgcgccgcctccctcgcgggtcgcggggcctcgcccagcccccgcgcgccgccgccctcccggcctttcccggcgcgccccggctcggccgcaatataatcgccgacgccccaggcgacctgccccgctgcctccactgtttcctctcaggcaccagtgactgagcgcacccggacaagaaaaaagtgcgctcggcccacggggacactctggcctcggtttacaaaccccggctctggagggaaaagaaaaaaaacaccctctgcccgccgccacctcttaccgcgccccccccgcgcccccctcccgccaatctcgcccccgccgccgaggctgccgacccggtgcgcaccggcgaggcattttcgcaccacagcactgcacggaaagtcagcgtgacggggacgaggagccccgcggagggatccgcgcgcagttcagtcgctacggccgacggacggagcgccgcgcccggcccgagatgcctccgccggccttaaagggggcccataaagacgcactgccaagggctccgtgtgccccggggccgcgggaatgcggatcgcagccggcagggaggggccgcggcggagccttagacttgggggagccaaggaggccactcccaggaggctgcggagcaaatgactgcctccccgagcccctggctgcaaaagcagaggttgcccgtggcttttgcagctctggacacgcgggtgcagcccagggaacgtggacaagaggtgttgacggaccggaccgtgcatttgagttggggcatatcgaagtggtttaattaaaagccgcgagtgtggccccagatcctggcgttatcaaagcaaatcaaagcctttcttttccagccgagcgggccctgtggaaatgagatgtacatttacccttgacgcaccgcaagcctggccgaggctctcaggttaattgatatttaatggaaatcatgcccatgaatatagtttccatcatttcacccttgatagacgtcagccctgggcgcagggggaggctgaagaatgcaggagggggcattaggcttgctgagagagtaaatagaagagcggacagaaacgttctgaggcgggaaaaagggctcgcgctggggagggtgacatttcctcgggcaggacgcggctcccgggtctcagccccggcgcgcagcgaaccagggccggctgcggttcccggaggagtgcggagggcagacgaccgcaagttccccccaggagcctcccagccggcgttcagatcgcgccggttccaggcagctgcaggcggcccatcttatgctaacgatcctacttcctccgccaagcctgtgaaattactgccgagagagcgcgcaggcctcaaagttacgaatttttcccaaagcagagaaagagaaggctcagcctagtttgtgagcagagatgaagaaaagttgcccgagtcatgtggcccagtcgagtgtgaatcgacaaaatattcccgattttagcagctctctccaaagctgtctggctttaccctaccaaccgcctccccacacacttcctttccctctctgctcccgtttcaatgtccaataaatgcaatggttctctgttgtgtgtgtgtgttttcccctctcctgctcggcctttctcgtgggctctttgggtgactgagccccgtttccttcgggataggtacaatgtcgtgagggcgccaggcccacagccttggaaatagacctccaaggcgcccctgctcaagctaaacgcaccacgccggctttccacaccaaatgcaaatttccgaaaaccccagacggcctcagagatgctgcaggctggcgagcgatttcagctacccctagctccttgtgggttggcccagcctgcgagcgcgatcctgacttgtgtccgggtggactgaaatatcatttttacaaatggagaaaatgagatcgagatggacagacatagcaaggtgataatgtccgactcaattatttctactgggaatgactgaaaggtaaaggaatcgttaatgaatctggagatgacagaggcatgctttatttaatttttaaattagtaaggagtgcagacttggggtggtggagagcaagggtttttttgttgttgttgctgtttgtttttgtggggttttttttctgctggttattgccaagtataatgactttctttaaatccgaaggcgaacgaattgattctgacaattaaggatttgtccttcaatcttgcaaatgcccaattaaaagattattattgtcaataaagccttggagctacctttgtaattgtgcccctttttttcagtttggcgtgtgtgtgtgtgtgtgtgtgtgtgtgtgtgtgtgtttgaaccctggataaatgagtgga

SEQ ID NO: 3117 - DNA, 4001 bp, Homo sapiens
tccaacaaagaaaataggtggtgtccacagcatatggtgattattagttttaatagtctgtggtaaattttaaaggtagaagttaatttgtcaggccttcggctctgtcttcctccagctcttgggcttcctttttcgtttccccgtccttcacctcctgccgggaaacgggaaatttgtccttgttgttttcctttttccatttcattctcctgttctggaaccagatttttacctgtctctcggtgagggctagggcgtgggaaacctcgattcttcttttcctggtcagataggggttaaaaagaaattccttttccaactctagagtttggaagcgactgtaggtttgtcttcctcttcgtctaccaggagctgctgattaaaacaaaaaaaaagggggggggaataaaagttttaaaaatgttatggtacctctgcatgttgctggaggtttgtggaacgggggtctacggggtgaaatatacacagagctctttagctccgatatatatatatagggtgtgcaggcaagaggagcagagaggtcttcacaattattctgtccccatcatctttacatggttcctacttttttaaaaaaagtctgtattactttatgaataagagccactgtggctacacaagaaggaaaaggagggggagagggaacgggagttttaaagccagaacgtgagatgaaagcagatttctccccctctcccttcttaaaaaaaaaatgcatcccaaccttgtggtctcatccacggaaacatttgagaaggagacgagctctgatttaagtggtctgggtcctcgccaatattaccactggacgatttacagtcaggatattgtaccagctcggcctcttgctgggtcgtaaaaatcggctgtctctgtaagttatcgtatccgtaaaacttcgcgggctccccgtgacaggcaatcccgccgcaggggggaggtggcggcggaggcggaggatgcggaggaggagggggggcggcctggtaggcagcggccgggctgcccccgccggggtggaagtactcctggccccggccttccctaccgccgcacccagtcccggagggcggcggggacgggtgcgggtgcgcgtgcgcctgcgggggcgcgtgcgggaagccggcggcgctgttgccatagagctgcagggctgctgcggcggcggcgtgacggccgccgacctcgggcgcgaagtgacagtcgtagtaagtgggattgatggcctcgcccgccgccgccgccgccgcagccgccgccttgtacttggagtacagcgggttcacgaagtacgaactcattggggcgtcagcggcggcggccccgggcgggcgggcggcgctaagcagccagagagcgagcctcgactcggccgcactgccgcgggggcctgtggggcggctgctctcgccgccgggaccgccgggctacgtcgctgctgccgcccgcccgcgctcgcgcgtcgcttctgaggccaggcagccgcgggcgctcagctactgggcgctcatgcccggctcttgcgcccgccgcctcggcttcgcgccgcctccctcgcgggtcgcggggcctcgcccagcccccgcgcgccgccgccctcccggcctttcccggcgcgccccggctcggccgcaatataatcgccgacgccccaggcgacctgccccgctgcctccactgtttcctctcaggcaccagtgactgagcgcacccggacaagaaaaaagtgcgctcggcccacggggacactctggcctcggtttacaaaccccggctctggagggaaaagaaaaaaaacaccctctgcccgccgccacctcttaccgcgccccccccgcgcccccctcccgccaatctcgcccccgccgccgaggctgccgacccggtgcgcaccggcgaggcattttcgcaccacagcactgcacggaaagtcagcgtgacggggacgaggagccccgcggagggatccgcgcgcagttcagtcgctacggccgacggacggagcgccgcgcccggcccgagatgcctccgccggccttaaagggggcccataaagacgcactgccaagggctccgtgtgccccggggccgcgggaatgcggatcgcagccggcagggaggggccgcggcggagccttagacttgggggagccaaggaggccactcccaggaggctgcggagcaaatgactgcctccccgagcccctggctgcaaaagcagaggttgcccgtggcttttgcagctctggacacgcgggtgcagcccagggaacgtggacaagaggtgttgacggaccggaccgtgcatttgagttggggcatatcgaagtggtttaattaaaagccgcgagtgtggccccagatcctggcgttatcaaagcaaatcaaagcctttcttttccagccgagcgggccctgtggaaatgagatgtacatttacccttgacgcaccgcaagcctggccgaggctctcaggttaattgatatttaatggaaatcatgcccatgaatatagtttccatcatttcacccttgatagacgtcagccctgggcgcagggggaggctgaagaatgcaggagggggcattaggcttgctgagagagtaaatagaagagcggacagaaacgttctgaggcgggaaaaagggctcgcgctggggagggtgacatttcctcgggcaggacgcggctcccgggtctcagccccggcgcgcagcgaaccagggccggctgcggttcccggaggagtgcggagggcagacgaccgcaagttccccccaggagcctcccagccggcgttcagatcgcgccggttccaggcagctgcaggcggcccatcttatgctaacgatcctacttcctccgccaagcctgtgaaattactgccgagagagcgcgcaggcctcaaagttacgaatttttcccaaagcagagaaagagaaggctcagcctagtttgtgagcagagatgaagaaaagttgcccgagtcatgtggcccagtcgagtgtgaatcgacaaaatattcccgattttagcagctctctccaaagctgtctggctttaccctaccaaccgcctccccacacacttcctttccctctctgctcccgtttcaatgtccaataaatgcaatggttctctgttgtgtgtgtgtgttttcccctctcctgctcggcctttctcgtgggctctttgggtgactgagccccgtttccttcgggataggtacaatgtcgtgagggcgccaggcccacagccttggaaatagacctccaaggcgcccctgctcaagctaaacgcaccacgccggctttccacaccaaatgcaaatttccgaaaaccccagacggcctcagagatgctgcaggctggcgagcgatttcagctacccctagctccttgtgggttggcccagcctgcgagcgcgatcctgacttgtgtccgggtggactgaaatatcatttttacaaatggagaaaatgagatcgagatggacagacatagcaaggtgataatgtccgactcaattatttctactgggaatgactgaaaggtaaaggaatcgttaatgaatctggagatgacagaggcatgctttatttaatttttaaattagtaaggagtgcagacttggggtggtggagagcaagggtttttttgttgttgttgctgtttgtttttgtggggttttttttctgctggttattgccaagtataatgactttctttaaatccgaaggcgaacgaattgattctgacaattaaggatttgtccttcaatcttgcaaatgcccaattaaaagattattattgtcaataaagccttggagctacctttgtaattgtgcccctttttttcagtttggcgtgtgtgtgtgtgtgtgtgtgtgtgtgtgtgtgtgtttgaaccctggataaatgagtggattttggaatggaatggggggggggaaaatgaaagagcctggatctc

SEQ ID NO: 3118 - DNA, 4001 bp, Homo sapiens
ggggctttcgcaactggtgggcaaccccgccgggcttcaccgtgggctagcagccggggtgtccgcactgttgtcgctctgccttcattcttggaattggggcgcacttggcccctgtttgggcagtgctgggggtgaggggactaaactacagcacttttcagaaacatgggggacatttacacaagagagggctccccaagccagcttgcactcacaaaatatagcatttcttaaggaaccaatggagcaggaaagagagggagtgggatagggcgaaaccccaaagccacttggtttttccaacacgtaaacgagcaaatacagagtcccccaaatacctcagagaccaaccacacagtcacttctatctaaaaagaaaaaaaaaaagaagaagaagtccaagtcgctggagagtttctggaaatcaagcaccaaacacccacaaaggaaaacagcaacaacaacaaatccgctgcccttgagcgctcccgccagcaccgcgccgggtcagtctcctttggggcatttctccttgctcatctttttcattttcatcctacggttctgaaaccagattttgacctgtctctctgttaggttgagaatcctggccacctcgtagcgccggtcccgggtgaggtacatgttgaagaggaattctttctccagctcaagcgtctggtatttggtgtagggacagcgctttttccgggtggagcgagcgtggatccagttcgcggcggggttgtctacaaagagggaggtttggagacggggagagaggagaggaggggaggcagggagagaccacagggtggggaagagaggtcgttaaattaatttcaccaaggatggtcgcttttcacaacttgtggggaattatcataaaaagccttaatgctcgcgctctgtttaccgtactaactgagcgcccagggtaggtggttatgggaagctctttttatggatgcatgttgttcgcctaggcttgggtaggcgtctagacgtttttataggttagtaaaactatcagttttgcacattcgagccttacaggtttcagcaataaatcagggggcaatttcttttgcacttacttgggtcaagttgctgctgctgcggctgcgaatgctgcttctcctcctccttcagcgaacagcctgggatcgggtggtcgctgcaagctgagggctccgacgagccgcccgtcccagtcgcggccccgatccctgccccaggcccggttccccccgtcgccgctgccgccttctcctgcaggaacgagttgcacgagaactcggggccgctgctcccctgggactcccgggccacggagcactcagtccgtttggaggaggaggataaggaagtggaggaggaggaggtggtggaggcggccgtggcgggggccggggccgctcgggtttcaggcttaatcccgtagtggcgcccgttggctgggccgctggggccagggctgggaccgcggcccggaccgccgcctccaccaccaccgccaccgcccgcaccgcccgggaagccgggcagcggctccatccaggagcgcacgtagcggccgggctcggaggcagaggcggccaggggcggcgggggaacgtacgggtggtagaggccgctcatcgccgccgctgccgggggctgggagggcaccgcggaccacgaggcagagaacacggccgatctgggggcaaaactacacgaggcgaactcggcggcggtggcggccgggccatcagccacacctgcaggccggccctgcgcgcctggccccggcggcccgaagcgcgccgcgaacacctcgtcgccctcatggcctataagcgagtccacgtagtagttgctgagggtgccactggaagacattttgaggcgtcccgcactcccacccaacattacactgtccgccgccgagcagctccccgccggcgcccgagccaccgactagttcgcaggctgcagcctccaccattggtcgcgcggcccacgtgatcatatttaccaataccgggagtaaatcagtccgctaaactgggggctgctgtgattaaaaaaaaaatcatcaacataagcgccgcaattagagcccgcaggcccaggtccatgtgcccggctcggcccggcccgacctggcctggcccgcccagcggctgccaggaccacagacgcgaccgcatccagaggaggcgctggggactatttgttcgcttcttcttgcagccctcggtcccgcagtcgggccccgtcgctgactctccagcttccgagccgcgggcggcgagtccagggcacacggagcggccgcgggggcgccaggccggtgtcgcccgaggcaggcgggccctcggggcggcccctagcgcccgaggggagctgttctcccctcgcctctctccctactcacacccacccctccccacacatccccacacacacgcttgctcacagcttgtcgtgttgtttaaaacaggtggaagacctctgtaatgatattatgcctttcaataaaaattttatgaggtgtatttgattatagattaatgtgtccctaataaaacggacggatggagcagatcggagggccccctccccctgccacactcacacacgcccgcgcggccacacacaccccgacgtgaggctgggcacacgccgcggcccgaggggcgagccggggcgcggcggtggaggacacagaggggcttctgcctgccctcggaagggcgggcggccgggcgagttggcgcagcacggacagtggcggccagggtgcttcgtcttctccgatgatgctggaaaggccctggaagagaacacgccacagggcagaacccaaatgctagagcagcttgctcccgcccgccgcctcagccctgcctcagcgagtctccccgggcagggccgcttcgcgcggttcgcacttaaaggcctcggaggagactcccaaaatgtctaaaaaattcggccgaatggctaggtccttgggacactcccttctgatttttttccccctacagaggtgaggttgagcagccttgaatctgagggaaatgcccattgtcactcccaaatccatggtacaaagcctcggaagcccggctgggagcccagacaaaagcggccggggcgccggcagcggagggcatattccttgctctacaagttgcccagctcacccttggagggctcccggcccacctccagccccgaaaaggaagcgggtaaatggctatttatggcctgattgattacctttgccaatagctttctgattttgttccagatgggatgcctttgccttgtagctcaggctttcctcggatacatggcccgctatcaacagctaatggtattccccacatgatcggagaaacggctaaataaaaattaccctcctcctgcccaaccggtgttaagtctggggcaaagctattacaacgttttcaatctagcattgattccaagccctctcccccacccccaggaaatggccccctaaaagagttctgtcttggaatgttcctggttttggggcggaagtttaaaattttgaatgccagtgtcccagagactccctggctgaggacttatagcacctaaatggatcgttcttagggaaacatttaaaaggaagaaatggaaaggatgtgttttgtaaaactgctggaagctatttgaaactgcaggcaggacctcaggtaacgaattttctgttagctttctcctgcaaggcctcttctcccttttccccgacaggactagataagtctgggctctctagtggagatcctgttgaagccggtggaagctggtgggagtcccctggaccatggcagcgaatggaacattagacttcatgggaagtcatgttcatttgcaaaattttcagtcaccctttctgcattttcttgcatcccagatgcagcagttcccaccagcattttgtaattaaatagaggaaagactgactggggaaaatc

SEQ ID NO: 3119 - DNA, 4001 bp, Homo sapiens
actgtcctgtgatcgtccccaaaagcaggaagggagaagcaaagtgagtacacctgacaacgggtgacaaggagcgctccctctgaagcaacaagtgacacagggctcataaatgacaatgggtgacaaggagtgctccctgtgaagcaacaacaggtgacacggggctcataaatgacaataggtgacaaggagtgctccctgtgaagcaacaacaggtgacacggggctcataaatgacaacaggtgatgaggagagctccctctgaatcaacaggtgacacagggctgtctcgtaaatgacaacgggtgacaagaagggcaccctcaccacacacaggcagcaagcccagctggggccaccacaggattggccaatgtcaccaagcagttgatggcggcttgtttatgtccccatccacaaaagactagaaacaccatgccagacggggagaaagatgcatgcgggggaagagacagatgcctctgacagccgggcgtgcagtggggggcagacagcctcacacccatccctggaccccgggcacagtgcagctgggcccaaagcacacactgacttcagcgcagctccaccaccagccagcgcttggccgtggaaaagctcctgggagggtgttcctgccccggaaaacctcgctgctgcatccgttccaccagcaaggtttcctgagtgtctcctgggttcagaaacggtgtcctgtgggacaagggacatgaagaaaggagccagccccgtgcctgcagaactccgagctccccggggagacaggaggaaacgcaggaggaggggtgacgatgcgtaggtggcgaggtgaggaaggagagggcgctcgggtgacaggaagggcgcctgtgggctcaggaggcaggagaggcggacgtgctgagtaacaggcagccagcaccctgtggctgggccgggggcacctgggggcaggcaggagagtccaggctgtccccagagcccgccccgccctctgcaggctcttggcaaggcccgcatgcagtaagagggtgcggtcacttgcaaggcttagagaaaccgctcctgcagccgggagagcagatgggaggccacgagatggagcgagaggcgggatgaggaagaagccaagatggcaagacacagagaactggagaggccggggctgcaaaggaggcacaagcaacaggcttcccgctaaggctctccgaatgcaggggtgggcttgctgcacccccaggctgcacccagaagctctgactcaaccagcacggtgtgggcctgggaacctgcattctcacaaagatgatcggggtccgcagtcggagacacactgacagagagcccctgccgtgggcaggaagtgagttaacgtggactgagtgtgtcccccacaaaacccctatgtggaagccccaatccttactacctccagatgtgactgtatttggacacagggactttgaagaggtcatgaaggtaaaatgaggtcactgcgtggctcctgatctagggctggtgtcctcacaaggagactgggactcagacacactcggagggatggccgtgtgagaacagagggagaaagggctacacggagccgaggagagaggcctcgggtgacaccaaccctgccgccaccctgtctcagacatcagcctccaatactgtaaaaaaaaaagaattcctgttgtttaaggcacccagactatgaccccgtttccagcagccagagctgactaatacaccgggaaggttagacgactcagggcttggtggggaggggcagggtggcccttgctccaaagctgctgcccttcgccactctcctatgaggactaaataagaataagcattctgggaattgcaaacatccaccaaaaagtcaggaattctccttttgtccatgtcagaagcatctagactgggaccttctgagcacgactcaccagcccccattccctgtggcgccgacagacagccccgaacacagcataaaggccgctctgaaaaagaaagcatctctagcttgccacataaattgtgcatagtctctaaaaggaaaaaaaaaaaaaatcaaaggaccaagatttaaataacaggaagtgttttgagggttgaagaccatttgtgcaggtgtcacgagaccaggaactccttccgtgtggcccgactaatcctaaagccagattcttggaaacttaccctgctcgatatggcctcggcctgcatccccaactaggtcagtcaggcagggcctggagctgtctcttctttagaaaaaaagcagcaaatctgaggccgagctgatgtgaccaacgtcacctcaaagcactttgtagaaccatgaactttgcattcctgcagctgggagccccaacccaggcccacctggagcccaggatctgggcctgggcagggctgggatccacgggtcagaagcaggggaagggatcacactggaggaaaagtcaaaagcagagacaaagcccggtgtcactgctgtaacaaatcaacctagtggcttacacaccacaatcgtgttttcatacagttctgtctgtggacacaggtcccacggagactgtgtcagtagggctggttcctctgggggacctaagggtggatctgttcccttgccttttccagcctctgtaggccaccacactctggctcaaagccattcctgtcagcagagccagcagtgtttcatctctgcgtcttcttccagagtcacacctccctcgggctcactgcagctgggacaggttccttacttttatggacttacatgaatacagtgactacaccctggtaatccaggatactgtccccacctcaaggtcctcaatcttcatcacatagcaaagccctttaccgtataaggcaacatatccgcaggtcccagggattcggatgtgagcatctgaggggtgggagttatcccgcctatcacaagactgttcaggaaagattcaatgaagcttggagcaatgagtctctaaattctaggtgcataagaacccctagagaccaacagtggcggctcacatctgtaatcctagcactttgggaggccgaggcaggaggacacttgaacccaggagttggagactagcctgggcaacacggcaagatcccatctcaaaaaaattaagtaattaaaattaaaaatttaatttaatttaggaagaacccctcggacagcttacaggcatttaaaggctcaccactagtgatcttgatgaaggaagggagtgggggtggggtgtcagcaggaacctgtattctaattagcttccccagcaaccccccacatgtcgaacaaaaggggcagagaaagttcagatggggaagtattagtcagggttcttcagagaaacagagccaataaatatatagaaataaacagacagaaatgtattatgaggaattggttcatgttattatggaggctgaagagtcgcaagacctactgtctgcaagctggagactcaggagagccggtggagtcactccagctcaagcccagaggcctgagaaccgggagctccatgtccaagagcagcagaaggtgggtgtcccagctcaagcagagagagcacattcactctttctctacatttttgttctagctgggttctcaatgattggatgatatccacccacactggtgagggcagatccttactcagtgtgccagtctcttccagaaactccctcccagacacaacttgaaattatgctttaccagctacctgggcatcccttggctcagtcaggctgacgcatgatattaaccatcacataggtcagcaaacattactgaacacctgctctgtgctggcaccactccaggttggggttcagatgcatctgagcgccaatgtaaatcctgccacccaggagctgttaaccctcagacaagtcacttaacctctctgggcctcagtgtcctcctctgtaaaatgagatcctggccatcaccttcctattg

SEQ ID NO: 3120 - DNA, 4001 bp, Homo sapiens
cctgcaaaaggccaatgccagcagtggccccatcatctggagtctgccctatgtgccctggcatcatggggcagccttgcctgagggctagctcacagttgctgctcagttcccacatgttagaccccgctctggggaccagacaaagtggctggccctcagccagcccctcctctgctccttgaagcctcttcctacctgcatccaactaagtgttccccagagagccagcaggatctgcacatgagggtttagggcttgtatgggttggaacaaaacaggtcagtgtcaagccagcctggaaatcctaaccccaaaatcttcccccactgccaagtcccaagcatgcacctgcaggcaggcatgggtgagcacaggctgcttctctgtgcccccgcaacatacacaggtgtcccacctgctccacgactgacgggaattcgattggaagaagataaaagcagaggcgatttggggaatgggaagggagccactactgaagggaaggagaaatgcaggaaggagagtggaaagagggtgcgcagattagccaggcatgcccaatgggcccatacaaaggaatgcggagactccacttgggcagaaggccaaggccaaatacagtatctatgtgcctgccactcctgaggcctaacccagcacatttcttgaagataagtgggccaggtaggcgcctgcacattgagataagggctaagtatagaaggagaaagttgttttttccaaaacgttaagaagcacatttcaaggagtaaggaggtctcaaggacacactgggggcagcctaatgaggccagagccttttcctttttcaaaattacaagctgaacttctatgcctcctttgagctcaatttcagctttccctagtggatccgaacacggcatattcattattatttgattaataaggacctggtgacagtttccaatggacaaagttagctggcttaaccaccacctcctccaagaaggcctcagggatcccctctcagttctctgctacatttaggctgcccctgagtcccatcagagcccacctccctctgcctggagcccttgctgctgttgaacttgctcctgcctgggacaggtgctcacaaatgctgtcaaacgggcctgagctatgaggcagccaggaagccagggctccggccccaccaagtgtcaacatccaccttgatccagcctcccaggcctgcaagtactatggactcagaggcagacattcctgtaggtcctctatggattctgcagacaggcaaggccagaaaaaatcccgagagaattcctcaagggctggaggaaaatcctaactagccatgatggccgtggaagccatcacaaccccttacaagggatatgtgagccctgaggtcaacaaactctaagaggcaagatgggggcacagaaatcaggccacgggcatcatgtgactcacatggcaggactcagtggccctctgctccccacatcacagagctggaggggaatccttgtgttgctgcagccaccccggcacagggttttcagcctgagagggctccttgatgtgatgggcaggttccagtgcgaaggtggccagcctgaggcgaccgtgagtcctcaggcttcccccagtcacagggcaacgccatcggctgccgccagcttgggagatgtgcttttgggaaaatcaagtcaccacagcattctcctgcggtccctccccactcggtttagatgttggtgaagaaaacgaagccagttacggcaatgacttccaacagatacaatcaaataatctattcctggattccgcaagtactgaaatgtcggtaattcaattcctgaaatgccattttggagctgccggagcaggctgcggagaaagctcagtaaacacacacatcagttcaagcccaaacacacacccactgaccttgagccccggtgcccggcgctgtgctgagaggccagctccccaagggcggccaccaccagacagggcctggggaatgggcggtccaggagggaggcaacagcaacagcaaataaatattgacaacgctgcaggaggcgtgctgctgggaaaatgtggacgaactgcactgagctcgaggaaagagtactcagtgtgtctgggggagtcagaaggctcccaaagcaggcttgacttactctgtgattaaaagccaggccggagctgggagctgggggaacagagaggtgggaaccaccctgccctcaaggagctctggccgagtgaatgcagacacacatatgctgacacgcacacacacctacacacacatatgcacacacacacacaaacctacacacactgcacacacacccacacgtgcatatgtgcacacacatgcacacctacacacacgtatgcacacacatgcacaaacctacacacaatgcacacacacacatgcatatgtgtacacacgcacacccctacacacacgtatgcacacacatgcacaaacctacacacaatgcacacacacacctacacatgcacgtgtgcacacatgcacacacctatacatgtgtatgcgcatatgcacacacaggcacacacctacacatgtgtatggacacacacatggaaagctttggaactgaggtcaccatatgcacacacatctacaatgcacatgtacacacatacacacctacacaggtatatacacacatgcacacacctatatacacatatgcacacacctacacacgcatatgggcacacacgcacatacacacatgcaagcacacaggcacacagtcccagggcaggcagggtaagggtcacatgaggaatcctgaacaccccacactgtgtggggatccagggccggcgagggtggccgcagcagcagaggctgctcatgtccgaagctctgtcaccctccactccagcacagggctcacactgacatcagttctaaggctttccatgggagtgtgggtcatgggactgtgatatgggacaagggcttttctggcactttcgacaaatttttgcaaggaagcataaaatttacatctaaaccaacccgtgggatgacagtgattgttgttgctattatgattttgctttacatattattatactttctgaaatgtatgaattggagattaaaattttagttgagcccaggagtttaagaccagtctgggtaacatggcaacatcccatctctacaaaaaattagccatgcgtggtggcgcacacctgtagtcccagctattcaggatgctgaggtgggaggatcacttgagcctgggagtttgaggttgcagtgagctatgatcgagctcgcactctagcctgggtgacagagcaagactctgtctcaaaacaacaacaacaacgacagcaacaaaatccccccttaaaacaacactaccatccgcccgtcatctgtatattaaatatctaactgtaaaaagtctcagcctattttgagagatgaagttaccctcaagtcccaagcagatgacaataaactggaaaagcaatgggaaatctccagacagaacacccaggtcctccaccagatgctcctcccggtctctcttgggccatctggagggtgtcagatcagctgggcgagcaagggcagggccagcctcactgtgggatctcaggcagcctcctcgcccagccaacgtctttgtcccaacacatcaaggaacctggcgtccctcaccccaggaaaatcctgggcctacacagcctcctcaaacaaggtcactgtatgagacacactcagagctgcccccggccccagcatccttggatctagcagtgaaatagttggtgccttcaccgtgctgtggtgggaggcccagaggtcaaggtgcagaaagcccgtaccacagagctcctagtggagaagacgggagtggaagcacacaatgcaggaagcccggggctggggagccggggcaggtgccagagaaggtctccagaccaagcttgag

SEQ ID NO: 3121 - DNA, 4001 bp, Homo sapiens
gcagggcaccacatctttgggattttccaaaagctggtacacctgtatgggtggctccaaaacacacccctggcagactcctgtgccctgcaaaaggccaatgccagcagtggccccatcatctggagtctgccctatgtgccctggcatcatggggcagccttgcctgagggctagctcacagttgctgctcagttcccacatgttagaccccgctctggggaccagacaaagtggctggccctcagccagcccctcctctgctccttgaagcctcttcctacctgcatccaactaagtgttccccagagagccagcaggatctgcacatgagggtttagggcttgtatgggttggaacaaaacaggtcagtgtcaagccagcctggaaatcctaaccccaaaatcttcccccactgccaagtcccaagcatgcacctgcaggcaggcatgggtgagcacaggctgcttctctgtgcccccgcaacatacacaggtgtcccacctgctccacgactgacgggaattcgattggaagaagataaaagcagaggcgatttggggaatgggaagggagccactactgaagggaaggagaaatgcaggaaggagagtggaaagagggtgcgcagattagccaggcatgcccaatgggcccatacaaaggaatgcggagactccacttgggcagaaggccaaggccaaatacagtatctatgtgcctgccactcctgaggcctaacccagcacatttcttgaagataagtgggccaggtaggcgcctgcacattgagataagggctaagtatagaaggagaaagttgttttttccaaaacgttaagaagcacatttcaaggagtaaggaggtctcaaggacacactgggggcagcctaatgaggccagagccttttcctttttcaaaattacaagctgaacttctatgcctcctttgagctcaatttcagctttccctagtggatccgaacacggcatattcattattatttgattaataaggacctggtgacagtttccaatggacaaagttagctggcttaaccaccacctcctccaagaaggcctcagggatcccctctcagttctctgctacatttaggctgcccctgagtcccatcagagcccacctccctctgcctggagcccttgctgctgttgaacttgctcctgcctgggacaggtgctcacaaatgctgtcaaacgggcctgagctatgaggcagccaggaagccagggctccggccccaccaagtgtcaacatccaccttgatccagcctcccaggcctgcaagtactatggactcagaggcagacattcctgtaggtcctctatggattctgcagacaggcaaggccagaaaaaatcccgagagaattcctcaagggctggaggaaaatcctaactagccatgatggccgtggaagccatcacaaccccttacaagggatatgtgagccctgaggtcaacaaactctaagaggcaagatgggggcacagaaatcaggccacgggcatcatgtgactcacatggcaggactcagtggccctctgctccccacatcacagagctggaggggaatccttgtgttgctgcagccaccccggcacagggttttcagcctgagagggctccttgatgtgatgggcaggttccagtgcgaaggtggccagcctgaggcgaccgtgagtcctcaggcttcccccagtcacagggcaacgccatcggctgccgccagcttgggagatgtgcttttgggaaaatcaagtcaccacagcattctcctgcggtccctccccactcggtttagatgttggtgaagaaaacgaagccagttacggcaatgacttccaacagatacaatcaaataatctattcctggattccgcaagtactgaaatgtcggtaattcaattcctgaaatgccattttggagctgccggagcaggctgcggagaaagctcagtaaacacacacatcagttcaagcccaaacacacacccactgaccttgagccccggtgcccggcgctgtgctgagaggccagctccccaagggcggccaccaccagacagggcctggggaatgggcggtccaggagggaggcaacagcaacagcaaataaatattgacaacgctgcaggaggcgtgctgctgggaaaatgtggacgaactgcactgagctcgaggaaagagtactcagtgtgtctgggggagtcagaaggctcccaaagcaggcttgacttactctgtgattaaaagccaggccggagctgggagctgggggaacagagaggtgggaaccaccctgccctcaaggagctctggccgagtgaatgcagacacacatatgctgacacgcacacacacctacacacacatatgcacacacacacacaaacctacacacactgcacacacacccacacgtgcatatgtgcacacacatgcacacctacacacacgtatgcacacacatgcacaaacctacacacaatgcacacacacacatgcatatgtgtacacacgcacacccctacacacacgtatgcacacacatgcacaaacctacacacaatgcacacacacacctacacatgcacgtgtgcacacatgcacacacctatacatgtgtatgcgcatatgcacacacaggcacacacctacacatgtgtatggacacacacatggaaagctttggaactgaggtcaccatatgcacacacatctacaatgcacatgtacacacatacacacctacacaggtatatacacacatgcacacacctatatacacatatgcacacacctacacacgcatatgggcacacacgcacatacacacatgcaagcacacaggcacacagtcccagggcaggcagggtaagggtcacatgaggaatcctgaacaccccacactgtgtggggatccagggccggcgagggtggccgcagcagcagaggctgctcatgtccgaagctctgtcaccctccactccagcacagggctcacactgacatcagttctaaggctttccatgggagtgtgggtcatgggactgtgatatgggacaagggcttttctggcactttcgacaaatttttgcaaggaagcataaaatttacatctaaaccaacccgtgggatgacagtgattgttgttgctattatgattttgctttacatattattatactttctgaaatgtatgaattggagattaaaattttagttgagcccaggagtttaagaccagtctgggtaacatggcaacatcccatctctacaaaaaattagccatgcgtggtggcgcacacctgtagtcccagctattcaggatgctgaggtgggaggatcacttgagcctgggagtttgaggttgcagtgagctatgatcgagctcgcactctagcctgggtgacagagcaagactctgtctcaaaacaacaacaacaacgacagcaacaaaatccccccttaaaacaacactaccatccgcccgtcatctgtatattaaatatctaactgtaaaaagtctcagcctattttgagagatgaagttaccctcaagtcccaagcagatgacaataaactggaaaagcaatgggaaatctccagacagaacacccaggtcctccaccagatgctcctcccggtctctcttgggccatctggagggtgtcagatcagctgggcgagcaagggcagggccagcctcactgtgggatctcaggcagcctcctcgcccagccaacgtctttgtcccaacacatcaaggaacctggcgtccctcaccccaggaaaatcctgggcctacacagcctcctcaaacaaggtcactgtatgagacacactcagagctgcccccggccccagcatccttggatctagcagtgaaatagttggtgccttcaccgtgctgtggtgggaggcccagaggtcaaggtgcagaaagcccgtaccacagagctcctagtggagaa

SEQ ID NO: 3122 - DNA, 4001 bp, Homo sapiens
cataccaaaaggccgcccatgctgtcccctccgcagcccaaccccatgccggcgctccattttgagagcctcctgcactggtgagatcttggctcccttggttaaaggcgatttttttcccccagagaaagacaccaaggcgatgaagggaaagaatatccttcgctctggccgagagccacccgacccctagagctggccttgctgcgtccgagccagcgccgaggcgccagaactctccagagagtgagtcgtggtaagagctgggtgctcgttcactgcggttcaattttacgactagtaggtttcaaaagtaaatgttttaaattaaggtgtgggactaggaggaggtgtcccatgtggcacccccggcatgaggctggctgcaagggagcagggatggcaggggctggggctgggggttgtctaatgccgaggccagcagctggactcggcgtccctggcaaacatcctcctctggtggaattggggtcagccaggaggaaaggggtggcctttggcggccgggacaccccgggagcccgagatctgcatgtgcgggaagcgccaattttacgccgtgactctcggactccacgagctgagctgcatcctcccggactaggaacttgttgaaccaaagggttctcaactccgcagtcgctgcctcccggccaggagagggacccccacgcttgcgcgggagcctgggggctggggcagggccggcgcccagcgcggcgctctcgggcactcgcggaggcggcgccgcccgggaggtgctgcaggaggcagcgcagctggcagctaaactttctcgaatctcagtgcttcgcggttaagttagggccagggagaggcacaaaacacgcccggggaaaatgtaaggccccacccacgataaaggggaaaaaaaaaggattttaaacaggagacgctaatccaattaacacagtacctactgtgtgcggggctttggaccaagagctgtcttcagtgcgttctcatttcacctgtcaccacagcccccaagggaggagctgtcctcattttaaagagaagcaaaccgcgaccggggaaggtggcgcgtctggcccaggtcgcagtgcgggtcgcggggaggccagggctctcctcgtcgccccatggccctgggaggaacgagcggatcgcctccgcgtgggcccccacccttggcagaagctcacaggcgacccacgtgggccgcacggacctgttccctgagggctgcccagcctgcccgcgaggcccgcccttgcccgtcgggtcccagctgtcctcgaggctcctaagctacgcactgcgccgaccagcagggacagggggctctgggcgtggggctggaccacccacacccaccccgccaccccgctctgcgcacagctgctcacacacgacacccgccaggcaccgctccccaccagcaactgcgccccgacacacaattccacaaacgcagtccaaaatgtgcacacctaaggcacacatggatgcccacgagtacacgccattcgaaagacacaccaccgtccgcagtcacccacaactccaccgcgcagagaaacgcgggcactcccggacacacacacgcgcgcacaacacacacgcaaagagccggatcgcagcgctcgccggtgcacacgccgggtgcacacgcccggggcacacttcagcagccagcagaccgcagcccgccccttccctacctgctccggcgcaggacgcggtccgccggcttcccgagcccaagttcggcgccggcggcggctgcagcgggcccgggccgctgcccgggacaagcgcgccgaggccgggaggagtgactagcagcgcgggcctccgtgcgcccgcagctgctgcgccggccctgcgctcatcgccgcccagaaagacaaaaggaagccggcagccagggagggagcaaggtggaggcgcccgtcagtccgcccgtccgctgcccgccgccgccgcggcccgcctgccagctccgggaaggaagggacgcgaaggcgggacctggaggcgggacccggaggcgggggccggggcggggcgcgcggccagaggcgggcgctcaagtttcctacggccccgccccctccgggccccgccccctccacgccccctgccggaccctcagcgcccggctcggccctcgcagcccctgcacctcgctgctcctcggccctcgcggcccaaacctggccctgccgggtcccagcccccagtggctttcgggacaggggcggagccgggcaccggttctgttcccctaacccttggcctctggcctgctggtatagaagaggccgagaggcggcgcccgggaggggccagccctgcgcccgcgccccccgcccccacgccgcaggaagtggcccgggcggcctaggaaggggaagagccgagttgccccagccccgcacccccagccccagccccgcgtgcagctcgcaccccttcccacgcctgttcgggggagagccccgggcctggagtgggaagcctggctccagctctggttacctgcagtgactccccaggccgtttaggcgagtccattgggccgcctctgcctcggtttccccacctaaccacggaaggtgctcctcccttccaggcatctgtggtcttcgagctccacgcgggagaggcgccggtctggcacctcctgcccagggtcggcgcctcctggctctcggggaggggggcatcctccatcccctgcacctgcctcgagaggaaccagggacagagcacccccacccccaccaggagctccggaaaaacggcttcagaagagcaaatatacacacacacccacctcccgccccaaacatccccgaagaaaggtaaccacagaaacagccagaaatgtggagctgggcgatcgtatgaggctgagacaaaactgtctttctagcgtctctaggggagagcttgaatccctccttccactcctcctccacggaaaacagagtgaactcctgctacagaggccgccagagcaacatgcaagaccagctttgaggggagcgggcacagggccttgcagggaaggtgggccgagcccagacccctcattcttacttggctctgaaggcggaaaggcaaagctagacctcgaggaagttcccctccctgtgggccctacagtgaagattacatgaaggcatgtgggcggtggaccagagtgcaccgactgatgaaggcggcccggtacccgcgggtgccatgcctccttcttagccaaggccactctagctccccgtgaagtatccaggtagaaggctggtggggttacaggtgagaagccgtcggtggggtccaggagccaggcctggggaagcacacgtcacttccacccacatccatgggccagaagtagtcgcacagtcccaccaggatgcaaggggctctggcagctgtggtcttcatgagtgtttcggaagtaaacaaagccggtttgatgaacacgtagaaacatccctgccacagaaactgagcagatttctcccaagcacacacagggcaaaggggcaaagtctgtccacagactcacaggaagggaggtgcatggcagacacaggcaggaggtggggttggggtggaaaagttcagggagggctcaaaagcagaccaaggcctgtttctgaaacccagcccactcactggttcctccacacttggcccatgctgttcctctcccatgtgacttttccatcttccccctccaacctgtcacccatccatccttcaaaacttaggtcagttagctctcacctagccctcagcagcttagcccgcagatgcttcctctgtttctgaacttctagagaaacacacttaaccgcagacctcttattccaggagtgtatctctctcagatgagatacaagttggtcccttcccttgcgtccctcctgttccttcaagaggaggactgtctacccaccccgaagcttcatggagagagagca

SEQ ID NO: 3123 - DNA, 4001 bp, Homo sapiens
taaatgggtcattggctggagtttgggcaaatctctgttcttctggggttttgacttgttctggtttctccacagatcaaaggaccttccatttattggattccaaagacaaagtctcccaaattgttatcacacattgacatttctgttccaccttaaaaacagcatgaaagtgggacgcagagggagcaggcaaggctagaatgtgccaccgtggcaccacatcccaccgcaagggagaggcagggcccccgggccttccctttgccacattatccaataaaacctcaagagctcagtaattacaggcactttcaaaagtgaaacagaaatagatctaaggccaaaacactggcttgcttgagacaaagggctggctttaactagaaaaaaacaaaaacaaaacaaaacacaaacctgggtttgggtctgtcttctgagctgagaaagccagactgattttttttttaatattattatggaacctgattatgaggaaagagtaggattcacaccaaaagcccttttttcttgtaggacataaaatcatttgatgaaacagaaaacagggtgcattctaagtgtgcccctgtcactaagtcaggatgaaaaatgagaaaatgagttcatcgcatccccctggcctgccatggctaggattgcagggcttcagtctcggccgagggaaaccaaaggaaccggaccaggtttctatccctggctcctaaaagcccgcaaagcagcccgcctctctgggaacaccatcacgtagcccctgacagttgggaagcgcatccataccaaaaggccgcccatgctgtcccctccgcagcccaaccccatgccggcgctccattttgagagcctcctgcactggtgagatcttggctcccttggttaaaggcgatttttttcccccagagaaagacaccaaggcgatgaagggaaagaatatccttcgctctggccgagagccacccgacccctagagctggccttgctgcgtccgagccagcgccgaggcgccagaactctccagagagtgagtcgtggtaagagctgggtgctcgttcactgcggttcaattttacgactagtaggtttcaaaagtaaatgttttaaattaaggtgtgggactaggaggaggtgtcccatgtggcacccccggcatgaggctggctgcaagggagcagggatggcaggggctggggctgggggttgtctaatgccgaggccagcagctggactcggcgtccctggcaaacatcctcctctggtggaattggggtcagccaggaggaaaggggtggcctttggcggccgggacaccccgggagcccgagatctgcatgtgcgggaagcgccaattttacgccgtgactctcggactccacgagctgagctgcatcctcccggactaggaacttgttgaaccaaagggttctcaactccgcagtcgctgcctcccggccaggagagggacccccacgcttgcgcgggagcctgggggctggggcagggccggcgcccagcgcggcgctctcgggcactcgcggaggcggcgccgcccgggaggtgctgcaggaggcagcgcagctggcagctaaactttctcgaatctcagtgcttcgcggttaagttagggccagggagaggcacaaaacacgcccggggaaaatgtaaggccccacccacgataaaggggaaaaaaaaaggattttaaacaggagacgctaatccaattaacacagtacctactgtgtgcggggctttggaccaagagctgtcttcagtgcgttctcatttcacctgtcaccacagcccccaagggaggagctgtcctcattttaaagagaagcaaaccgcgaccggggaaggtggcgcgtctggcccaggtcgcagtgcgggtcgcggggaggccagggctctcctcgtcgccccatggccctgggaggaacgagcggatcgcctccgcgtgggcccccacccttggcagaagctcacaggcgacccacgtgggccgcacggacctgttccctgagggctgcccagcctgcccgcgaggcccgcccttgcccgtcgggtcccagctgtcctcgaggctcctaagctacgcactgcgccgaccagcagggacagggggctctgggcgtggggctggaccacccacacccaccccgccaccccgctctgcgcacagctgctcacacacgacacccgccaggcaccgctccccaccagcaactgcgccccgacacacaattccacaaacgcagtccaaaatgtgcacacctaaggcacacatggatgcccacgagtacacgccattcgaaagacacaccaccgtccgcagtcacccacaactccaccgcgcagagaaacgcgggcactcccggacacacacacgcgcgcacaacacacacgcaaagagccggatcgcagcgctcgccggtgcacacgccgggtgcacacgcccggggcacacttcagcagccagcagaccgcagcccgccccttccctacctgctccggcgcaggacgcggtccgccggcttcccgagcccaagttcggcgccggcggcggctgcagcgggcccgggccgctgcccgggacaagcgcgccgaggccgggaggagtgactagcagcgcgggcctccgtgcgcccgcagctgctgcgccggccctgcgctcatcgccgcccagaaagacaaaaggaagccggcagccagggagggagcaaggtggaggcgcccgtcagtccgcccgtccgctgcccgccgccgccgcggcccgcctgccagctccgggaaggaagggacgcgaaggcgggacctggaggcgggacccggaggcgggggccggggcggggcgcgcggccagaggcgggcgctcaagtttcctacggccccgccccctccgggccccgccccctccacgccccctgccggaccctcagcgcccggctcggccctcgcagcccctgcacctcgctgctcctcggccctcgcggcccaaacctggccctgccgggtcccagcccccagtggctttcgggacaggggcggagccgggcaccggttctgttcccctaacccttggcctctggcctgctggtatagaagaggccgagaggcggcgcccgggaggggccagccctgcgcccgcgccccccgcccccacgccgcaggaagtggcccgggcggcctaggaaggggaagagccgagttgccccagccccgcacccccagccccagccccgcgtgcagctcgcaccccttcccacgcctgttcgggggagagccccgggcctggagtgggaagcctggctccagctctggttacctgcagtgactccccaggccgtttaggcgagtccattgggccgcctctgcctcggtttccccacctaaccacggaaggtgctcctcccttccaggcatctgtggtcttcgagctccacgcgggagaggcgccggtctggcacctcctgcccagggtcggcgcctcctggctctcggggaggggggcatcctccatcccctgcacctgcctcgagaggaaccagggacagagcacccccacccccaccaggagctccggaaaaacggcttcagaagagcaaatatacacacacacccacctcccgccccaaacatccccgaagaaaggtaaccacagaaacagccagaaatgtggagctgggcgatcgtatgaggctgagacaaaactgtctttctagcgtctctaggggagagcttgaatccctccttccactcctcctccacggaaaacagagtgaactcctgctacagaggccgccagagcaacatgcaagaccagctttgaggggagcgggcacagggccttgcagggaaggtgggccgagcccagacccctcattcttacttggctctgaaggcggaaaggcaaagctagacctcgaggaagttcccctccctgtgggccctacagtgaagattacatgaaggcatgtgggcgg

SEQ ID NO: 3124 - DNA, 4001 bp, Homo sapiens
caaaggatctctataaaccagaagttgggccctattgcacttgaaattaaatctgatggcccctccacagccttctcggcctttcctgatcatccttcactcccaagcttgcctcttcaccgcatcacctaacactctccctgggctcactccactccagcataccagcctcgggaccctggctcctgctgtcctgtcctcccagtacacacttttccaagatttctttttcatggctctctccctcatggagcttgtccgggatctgtccaggcgccactccatcagaaagatgcctctttaccacaccatagaaaacagcatgcatgcctcctaccactctgttgcccccactgttttgttttccttcatagcatgtatcatccctgacatgtcgtagatttgcccactgggcctgtgccctcattaaagctctacgagagggacttgtttgtctcctagaactagggccagtacccggtacagagaaggctctcgataaacaccttctggctgaattcaagcttgagtgcatgtggcaatgacatgtgggaggagatcgggctggaaagaggagctggggtgcgactgggaagggccggccttgctgctgggctaaggcgtttggactcaccctgcaggcaagatccttgggtgtgctggtgccctcagcaagaaatgagcctgactcatgtggccttaccaccgccagcgcccccacatctgttaacaagccacgtccaggctgtgcagcggggcagggagggaagccacccaccccatcccaagcacccagcaccaaagtcacaccccatccatctgcacatggctgaggggcatatactactgacgttgctcatgcctgccaatctgaaacctccaattcacagaaaaggaaactgaggcttggtgagaggaggtgacgtaagtggcagtagggaaacctcttctgcccatgaagatacaactgtaaccacacttgatcatgaaagaccaagcagcctccgacatcagggtttacaaaaggaatcatacctttctagacctgaagtcacggggaattcctgattacaactggaagatcaacagttggctgggtaacacgttcatttatgtcataaattggcatcttagcctaagactttgtgtagggagagcaagggtgaagtgtatgaaaatatttgaagtaaatcactttacagcgttttaaaggcggaaagaagtaaaagcacgtgcctcccagccttgccaggatccaccttgggctgggtcctccaggtctcgatcagggccgacccattctgcatcctccgcctggacccctccaaggcttttgctgtaacttgcgctctcctgagctgcctcgcaagcagcaacgacctctccctggtctctcatcaaactcatcctcccagaaaccgggttcctgccctgtactgtgttcccatggcaacctgagcttactacccgctgctggcatcaccccctctccgctgcagccccctgcagggcgagcttgtctgattcgcctctgtccccagtgcccagcaccgggcctgggactcagggagctctgaaaggatggggaactagattttcgggctcaaaagagaagaacccaaggcggtaggaaaggagagcagagtccccactgcgcccgcctgcactgaaccagtcagtcccagggctcccgctgtccttggctagttctctaccctccagagggcctcggtttcctcatctgtaaatcggggtcgccacctctcctgcagggcggtgcaggggcccagcccggataagccaccgagggcgctggggagacctgcaccaggtccctggcctaggaggcggcggcctccccccgcctctccgcccgggcgccccggactgcgagctgtgcggtgtggggcgcgggggtctggctcacctggaggtgacgagcaccgccggggactgcatgacggcggcggggactccgggcggggcgcgcagtcacgggacccggcagtgcccgcgtcaccgcgtccccgccctgcctcccgctgccctggcctgccccctggtggcagcggccgcgcagttcgcgcctgtggccagaggcggggcggaagcgcggctgggcgggtcccgcacggtcgccgtcggcctgcgctgctcggagcttccggagcacccaggctgagccgcgcccgccgcaaccacctagaagaagcccagcctggccctggcacacggtgaaccttaatcggtgtgtctgttttgcgctaaagtttagccgttagagagacgggactctgctgtttccgccgccagtccccattacaaaaccactccccctctgccccaagaccatttcattcaaccgatcggtcaacaaatatttaccaagctggggctctgtccaggcttcgtggggtcttcttcaagctgcacagtgaacgccacgcagcagcccagtccccttgagcttgctgcctccagctagctcgcctatctggttcctactgcctgcccgctccataaatggcaggcactctcccgacaggggatctttagagaggcagcctctgctgcttggcagagccctggtggaggcctcccggggccgggcctgcctgggatggctgcacttgggtccccagctggagcagggcaacggggtccaggagccagttcccctcagaaggggaacgtacagacatgcagaccctaacagacccactcattttagattcacctctccatggggtgaggaacagagagatcgtatcacctgccaacgtagcccagggaaagaaaagctgagtctgcaaacagggccagcagaaggtgcaaactgctgcccctgttctgttactccctccacccagagccccagtgacaaaaagaaagagaagctgggcttaactataccagaattcacggcagggcgatgtcagccatgtttcctgagcctatcaaccaccgccaccagcatcaccaacaatatctaccagtttttacagattttagtgaagaaatcctacagtaaaagattttgaaaaatgactttccccaatgtatctcttgaataaatacggacattgatatgccttattatttgtctcagatttgtttataggcaagatgagcaatcatgaatgaagtatgacaatgaatgaaagttctgagggagacccttgaaggctgcagtgaagagctgggatgatggcgggaacccctgtctgctctgctgctcatcggcctgtccgtctgcagggccgtgttcatggctgcaaatggtcctccgtgttttgtttaaattggcatgccctactttagagaaagggagttcagggtctggacagaaagcagtataggcttcagcattccaggagtctgagtgtagtgccaggcagtcgagcagtcaccattgcactcacatttatccaacagacagaaacacagtgaataagacactttagatgccttcagtggacttctttgccctcctacatggggagtgggtgggggtctggaaaggctttctaaaggagctgaagtccaagggaaaacctgaagaaatatggatagaatagattagaaggaatgtcacgtgcaaagccctagcgacaggataggaacaccagggaacagggggaagaggccagcaggagccagggtgtggacagcctagtgcaccaaggccagggctttgcctgatcctgaggccaacacagcgccatcagagggtcagggacataggagtggctgggccagctagggcgtgggcagggttttggagcatgttgaaggtatgaagatgagctggactgcagaacaatccagacaagagacaatggtcccatgaactagggtgatggccacccaggtggagaagaggggacgggtaagagggccttaggagaaggagttggtcaagacttgggaatccaatgggtgtgggcgggaagagataagataccactatggtttggctcttgtgagtggctggacattgg

SEQ ID NO: 3125 - DNA, 4001 bp, Homo sapiens
ttcaggggccctagacaggcagctctgtgaccgccaagtgtagaatgtggctgtaagaggctcagaacatcacctcccaggctgggagctgcagtgtgtgtgtgtgtgtgggtgtgtgtgtgtacagttgggggaggggggagaaagaaaagtgggaagatgcccctccaactctaggaccccaatttcctgacagcctgagaaagaccacagagcaaggattgaggtctgtgcaggggagcagtgtctcggactctgctcagctccaggctggctggaccttccaggctccccaggcacacctgagagcctacagcctctggacccaagagtgccagccaacacgcctacaaccgcccagcctcctaccaccagcctgtctgcaaattcagtcctaaggcaaatttggaagagaaacaaaaggcagacaagaagccctgctcctggcccttcccagcccagactttggggagaaaggccccgcagggcatccctgcaggacgaatgggcaccaacaggaacaggaggaaaataaccccaactttaactgctggaaacccagcagcaccccaggttcccctacaaacggcttcccagaagagctgccccggcacccctcccatgctctgtgtcctcacgcagctcagctctgacatggggctgggggaccccagagaaggggtgtggcagcacaggttccctggaccagctcaactacccccaacctggctggtagcttcctggggaaggtggtcccccatcgggtggcttttgttcctctctccaggcaagcctgtgcctggaagaattcggctggcaggccccactgggaggacaggcggtactgcctcctccccgcccccagccccaggtcaacagggcctttgttctacctgcacacaccggcaggcaggcgggcagagccagcccccttccctggcagctcccccaccctctgaaggcaggcactccaggcacaggggcggcacctcactactctcacttccacttttgggaccacagcaccgaagcggcacggggaagccaacactccaggtaggccacgcacacacccagaagcccgcgtccccaagtccggcgggccagacctcacggcgcacagcaggtaaggtggcccgagggcagcgggcggggaccctggagaaaacccgggcgctgcgcagtcaagccggcagtagggcagcacaaggcaaggaagagagtgagagcgaggtcagaaagcgcggtgacagccggctcacccagaggagctgggagcctcgggcgctcggcaggtcgggaggggtgccggcgagtgggggcccccaagagggcagaagggggtagggaaggcagggccgacccagtacagcacggcgggcatacggcccggcctcgggggcgcagctgcgcgaggatcccgccgcccgggcgctcacctgggcgtgcgcagcgcggcggagtcgcggcggtccagcacgccgggcacgcagttggtgagctcggtccagtcggcgtgcagcccgcagctccagccggtggagaagcgggagaagagccaagtctcgcggcggttgggccggtagcaggtgcacttcttctggccgggccggcagtcgcacggcacctcgaggcgtacgttctgcacgaggtggcggccgaaggtggtgccgcccgtcttctggatgtgcaggaagacgatcacgtcgtcgcccttcatgtcgaagcgcagcgagcgctccagctcgcggaccgggaagtagtacttcttctcgtagtgggggtcgggtgtggggaacaggtccaggtcgtcgggcggcgcgcggccgccgggcgcgcccaggctcagtcctgggcccgcgtactggtacaagatgagcatgaagcacaccgagcccgccaccaccagcacgaacttgctggcgcgctcaaccatggtcctgccgccggcgcgccgccgccgcatgtgtcaccatcgccggggcccgggcgcggggcgcggggcctgggagggcaggaggcgcgggcgcagctgcctccgccgccgcccgcgctccggcccggcccggctactcggcgcccaggccgcccgcagcggcgcgggccccgaccctccgcggtgccatggctgctccccgcccggccccggctccccgggcccgacgcccgactccgctcccgctcggccccgctcccggccccggccagcacagcgctctccgcgcccccagcaccagcccgctccgctccactccgcgccgagaacgctctgcgccgccccgcgcgccgccgcgtctccgcagtccgccgccgccgccccgccccggtccgcccctggcccgcccccgtggcgtctcttgccgtcgccgcccgcgccgatcctcggccccgcctccggagtgccggggttcgccgcgggtgctgggcgcgggacctgggtctgctgcggtggcgaggccgctagcaggcgggcagccagcgactgggaagtgattccgccctcaggggagtgggggaccaaccggcagtgcggagccgaggcgtgggaggctctcctggcgggggccgcggtgagggggcgcggcggctggcgcttctggagcctgggtccgtaccccctcctccccaagtcccagccgcccacgtccccgcagcccgcgcgggaggaaaggccttgaccttgcacgctggggcgctgaagttagacgctagcctactgggctgcacttccagggaccagggcggcgggggccgcccaccaccaggaccgagagggaaagcgaggctttcctttcctgctcgaccccctcacccctgcggctggctttgggacagtgccccgcagccccgcattgaagagatgttgggctgtctgcagaggcctgcggagcggctttatggcttcctccttgtttgaaaagaatatcagacgaggtgcattttcccccatccatgtttattatactccaatgaaagagttataaaacattgagccaattcttaagaatcgtgagtgcccaccaaatattctgtctttcgtgggttggttggagagtccagcggcccgggcccaacctggctgcggagggctcgctccacgttggctcgtgtgtgggccgggtggtgcgggctcctcactcgccgccgcccagcctggcaagcacgcgcggcattcgtggggcggggggtcccgccaggtgcccactcacactgcttgggctctggcagtactcggaggctgcagcccgtcggaagcgcaggagtggggctgggacctgccaggatctcacagctgcagggccggccgcggtgggccctagtgtgttggttcaggccagcgagggctctgggagcgagtctggctgccaggcgtgggctcccagtgtccacgtcaagccctgccggggacggggtggggggggaggcggggtggtgccctgccttccgttctgttagggaccggaagcgatcatggggtgtcaattatgcctcagtaaagctgttaaacgtagacaacatcacaccagaaagccctcctggaagcaaacccagagagctggaaaaaccaacaccccaaacccagctgagcgggcggcatgcattttccaaagggaccgcaagaatatccgctgtggacaggcgggtgcagaaccctcaacacagcccagcgcaccctggagtccatggtgtggggtcctcagtgggacctagggccccaaagcccctgctcatcttgtaggctgctttaaaactgtccctggcccgagggtcctgggggcagcttggacaagcttctccagaagtgactcattcctataggagtgggggtgcagtccccatgggacacaggtggggccgccctgcagtgtgcttggacctgcctgcagccccttgacgcagtctgtgcctgagccctggggagccttcctgtgtggcctaggggagcacagctgccccgggtccaccccccagatgtccttacccagataaggatcctcgtg

SEQ ID NO: 3126 - DNA, 4001 bp, Homo sapiens
ttaggcagttgttggatcacttgatatctgaactgtcttcaaactgaaatgaagcaccacttgactgcacaccaccttcaaaggcctcctcaaaacattacccctattaaatgagacttattttaaatatgctttggaacaagagaacagcagaaaaccgatgggtaaaactagcatcttggggtggaggagagaatgggaagctactgtctaatgagtacaaagttacaatttttccatataaaaagttttggagatggatggtggtgatgactgcacaacataaatgtaattgatgtccccaaagtgcacacttaatggtaattttatgttgtgtacattttactacaataaaccaaaaaaaaatttagcatctacaagcacatacctaaggaattatggaagataagttaaactcttctctctacacttggcatgaactactgggaaaggatccaaattttaacttaagccagcgaaattctacctcgagtttaagaatccaccttgagctgtaagttactacctgattacatcacacattgaacaaaatagtttcgaaaatctggctgaagcagtttaagctttaagatcatgtctaagaaaaaaaggctaaccaatacttcagaattcttacatgtaaactgagttctctcaaaaatggagatgaaagtactgttgaatagttcagtgcgactatttgtgagtaaaatgctattaataataccgtaattacaataaaataaaaatactggtacctttggccccattgtaacggccacagcatcggctaaaaggtctacaccttgaagcattaaggctcgggcatctgcaccaaattttacatctttggcataagcccgagtgagatgaggagccagtaccctggacaccggtctcatctggcgaaagactgtgggtaaccgaagcatttctggggatggaagcaaaaagatcatcagaactaccacccgtggtgcgctgcagaacaaacatgcccacctgtgcaacagagcaagcaacgtgagatgctgagcctggctgacctccgccagccactacgcctgaatgacggaaggcgccgcagcttcggaacatcagccactagcgcaagctaaagaggccgccccggccggcgcctgacctatagcaccagcacaaagcacatgcggctccttccccacggccacctatccctgccgccaaaaacgagttaatctttcaccgcgaaaacggccttgtgggcagacccactccaactgtggcccctgagaaaccaagtcagccggagagaggcaagttacaaatccaagtgaccagggaagttaaaagtattcctgacggtgcaaaaagccgctcagcaaagtgtctccatggatccacccaaggctactgtatcagagcaaccagcaaggccgcgatgctgggggcggcggcccggcccactcggcgcgagcccacgtgtccttctttccgaacgcccccagcaaggtcaagactggaggcgcggtatcccagctgcctgcgggggaaaaaagcggttccctcacgtacaccaccctccccggttccctgaagtcggccaggcgcaggttgcaccagcgggcctaagtggttacaatcccccaaattcaaaccccacgagttgtccctcccgcgcccagccgaggtccaggatccgcgtcgcacgtgatggaacccgcatggacccgcgaggcctggacccgcaggcctgggcctgcggtgcggcgcggtgcggaactccaggttgtcgccgcccgcaccctccagctggaccgcagaggaggaaggcccactcgggggtcgcaggagccggggggaggtggtgcgggaaggccgcgtacctgcggggcggcggcaaggcgtgcgctcggcgagacaggtcgtcggcggcgagtgagggacagagtgcagggcgcacaccgcaatgagcccgtgtcccctccctccgcctctactcccgccccgcggcaccgcgtgtgcaggcagctcccacccacttcccgtcagcccgggccctgcaatctgcacaccctgcgcgcgagccccgcccctccctacccgcgcagggtgtgctagcgcgctcagccctctccggccggcttagtctagttcccgggcctcgctcggttccagaactttccagaaaatgccgcgctccctacggctcaagggtcaaatcgcgtcatttccgggaggggacgaaggggtagttctttcacctcggctgggcgcctagaaaagcctagaaacagctccttttttcttccgcctccgagtcttcgcgtcagcgtcctgcgcagggcccttggggcgaatcgcggtgcgcgtcggggcgaccgccctccctccctgggaggggcgagggggctagcggcgaccgctggggcgagcgcgcctgcgcgctgggtgattttttcacgtgtcgccagggccggactgcgagtctctttgcggcgctacactagagcagagtacgagtctgaggcggagggagtaatggtgagtcccgcgtggccccgaggcctgcaggcccgggcctgtctgaggcgtacggggatccctgacgcccctcttttgttgggctgggcgggagggattggtggccactcagtgaccagcgcccgatggcaccttggagcggcaaggcccgcccgacccttttctcccccagggctctttgcacgcgcgtgtgctgccggtgtgtaaggcaggggggcgagaacccgggcgcacgcgcagcgtctcacctgcttctgcagggcctttgtggatgtgtaatatcttgggtaaaaatcatggtgccaggcagggagcttgacccagcgtttcctgaaaatttctggaaaaacctgaagaaggaaaacatttgaccttggaataaactaaggttgaccttaaagctggtctggttgctcaccggaggagcgacaacgacccctaacagacgtaaggaatcgggaattaaacttggaatattggttagtacattcaaatgcgcttccttaacgaataagctgaggtttggtgttaactttcaaagccaaaacgtgttgagatgtatagcacggtggcgttgcctgttgataatgtgattacatttagtttttgtttcaaaacatttctcttcctacaggcaggacaagcgtttagaaagtttcttccactctttgaccgagtattggttgaaaggagtgctgctgaaactgtaaccaaaggaggcattatgcttccagaaaaatctcaaggaaaagtattgcaagcaacagtagtcgctgttggatcgggttctaaaggaaaggtaaatgggagctgcagtggaactattttttatagtgtgcagtggagggaaaagaagtaattctggagtattaaaagtcgcttattaagtagagtttatgtcgttttcaagatcattaactgctttggttctaatctgtttcttaaagggaaatgactaatataaagttgcttattttatatgaccaatgctatgatgcttattttatgtgatagtttcagagtattaaaaattgtcctcaataggccgggtgcggtggctctcgcctgtaatctcagcactttgggaggccgaggtgtgcggatcacaaggtcaggagttcaagaccagcctgaccaacatggtgaaaccccgtctctactaaagatacaaaaattagccgggtgtggtggcatgcgcctgtaatcccagctactggggaggctgaggcaggagaatcatttgaaccctggaggcggaggttgcaaggagccgaggttgcaaggcgcccctgcattccagtatgggggacagggcgagattctgtctcaaaaaaaaaaaaaaaaaatcccctcaatagcaatttggtagcctagtgtgatcagtgtttgccttacattctaaatttttaataagacaaaagaggctgtgcgtggtggctcacacctgtaatccttgcattttgggaggccaaagcagg

SEQ ID NO: 3127 - DNA, 4001 bp, Homo sapiens
aaaaaaaatttagcatctacaagcacatacctaaggaattatggaagataagttaaactcttctctctacacttggcatgaactactgggaaaggatccaaattttaacttaagccagcgaaattctacctcgagtttaagaatccaccttgagctgtaagttactacctgattacatcacacattgaacaaaatagtttcgaaaatctggctgaagcagtttaagctttaagatcatgtctaagaaaaaaaggctaaccaatacttcagaattcttacatgtaaactgagttctctcaaaaatggagatgaaagtactgttgaatagttcagtgcgactatttgtgagtaaaatgctattaataataccgtaattacaataaaataaaaatactggtacctttggccccattgtaacggccacagcatcggctaaaaggtctacaccttgaagcattaaggctcgggcatctgcaccaaattttacatctttggcataagcccgagtgagatgaggagccagtaccctggacaccggtctcatctggcgaaagactgtgggtaaccgaagcatttctggggatggaagcaaaaagatcatcagaactaccacccgtggtgcgctgcagaacaaacatgcccacctgtgcaacagagcaagcaacgtgagatgctgagcctggctgacctccgccagccactacgcctgaatgacggaaggcgccgcagcttcggaacatcagccactagcgcaagctaaagaggccgccccggccggcgcctgacctatagcaccagcacaaagcacatgcggctccttccccacggccacctatccctgccgccaaaaacgagttaatctttcaccgcgaaaacggccttgtgggcagacccactccaactgtggcccctgagaaaccaagtcagccggagagaggcaagttacaaatccaagtgaccagggaagttaaaagtattcctgacggtgcaaaaagccgctcagcaaagtgtctccatggatccacccaaggctactgtatcagagcaaccagcaaggccgcgatgctgggggcggcggcccggcccactcggcgcgagcccacgtgtccttctttccgaacgcccccagcaaggtcaagactggaggcgcggtatcccagctgcctgcgggggaaaaaagcggttccctcacgtacaccaccctccccggttccctgaagtcggccaggcgcaggttgcaccagcgggcctaagtggttacaatcccccaaattcaaaccccacgagttgtccctcccgcgcccagccgaggtccaggatccgcgtcgcacgtgatggaacccgcatggacccgcgaggcctggacccgcaggcctgggcctgcggtgcggcgcggtgcggaactccaggttgtcgccgcccgcaccctccagctggaccgcagaggaggaaggcccactcgggggtcgcaggagccggggggaggtggtgcgggaaggccgcgtacctgcggggcggcggcaaggcgtgcgctcggcgagacaggtcgtcggcggcgagtgagggacagagtgcagggcgcacaccgcaatgagcccgtgtcccctccctccgcctctactcccgccccgcggcaccgcgtgtgcaggcagctcccacccacttcccgtcagcccgggccctgcaatctgcacaccctgcgcgcgagccccgcccctccctacccgcgcagggtgtgctagcgcgctcagccctctccggccggcttagtctagttcccgggcctcgctcggttccagaactttccagaaaatgccgcgctccctacggctcaagggtcaaatcgcgtcatttccgggaggggacgaaggggtagttctttcacctcggctgggcgcctagaaaagcctagaaacagctccttttttcttccgcctccgagtcttcgcgtcagcgtcctgcgcagggcccttggggcgaatcgcggtgcgcgtcggggcgaccgccctccctccctgggaggggcgagggggctagcggcgaccgctggggcgagcgcgcctgcgcgctgggtgattttttcacgtgtcgccagggccggactgcgagtctctttgcggcgctacactagagcagagtacgagtctgaggcggagggagtaatggtgagtcccgcgtggccccgaggcctgcaggcccgggcctgtctgaggcgtacggggatccctgacgcccctcttttgttgggctgggcgggagggattggtggccactcagtgaccagcgcccgatggcaccttggagcggcaaggcccgcccgacccttttctcccccagggctctttgcacgcgcgtgtgctgccggtgtgtaaggcaggggggcgagaacccgggcgcacgcgcagcgtctcacctgcttctgcagggcctttgtggatgtgtaatatcttgggtaaaaatcatggtgccaggcagggagcttgacccagcgtttcctgaaaatttctggaaaaacctgaagaaggaaaacatttgaccttggaataaactaaggttgaccttaaagctggtctggttgctcaccggaggagcgacaacgacccctaacagacgtaaggaatcgggaattaaacttggaatattggttagtacattcaaatgcgcttccttaacgaataagctgaggtttggtgttaactttcaaagccaaaacgtgttgagatgtatagcacggtggcgttgcctgttgataatgtgattacatttagtttttgtttcaaaacatttctcttcctacaggcaggacaagcgtttagaaagtttcttccactctttgaccgagtattggttgaaaggagtgctgctgaaactgtaaccaaaggaggcattatgcttccagaaaaatctcaaggaaaagtattgcaagcaacagtagtcgctgttggatcgggttctaaaggaaaggtaaatgggagctgcagtggaactattttttatagtgtgcagtggagggaaaagaagtaattctggagtattaaaagtcgcttattaagtagagtttatgtcgttttcaagatcattaactgctttggttctaatctgtttcttaaagggaaatgactaatataaagttgcttattttatatgaccaatgctatgatgcttattttatgtgatagtttcagagtattaaaaattgtcctcaataggccgggtgcggtggctctcgcctgtaatctcagcactttgggaggccgaggtgtgcggatcacaaggtcaggagttcaagaccagcctgaccaacatggtgaaaccccgtctctactaaagatacaaaaattagccgggtgtggtggcatgcgcctgtaatcccagctactggggaggctgaggcaggagaatcatttgaaccctggaggcggaggttgcaaggagccgaggttgcaaggcgcccctgcattccagtatgggggacagggcgagattctgtctcaaaaaaaaaaaaaaaaaatcccctcaatagcaatttggtagcctagtgtgatcagtgtttgccttacattctaaatttttaataagacaaaagaggctgtgcgtggtggctcacacctgtaatccttgcattttgggaggccaaagcaggaggatcgtttgagctcaggattcaaaatcaggagttcaaaatcagtctgggcaacataatgagacctcctgtctacaaaataaataaatacaaaagatgtgcttcaaggtaaaatgagggggcatttaagaattgagaggaaacttggactgttcgtttaacccctaacacattgaaattgccctaatcttaaccagttggtatacctggttgtatacctaccagaggaacaggttggtcagtcttgtccaatctgcagcctgggacagctctgaatgccgcctaacgcaaatccctaaactttcttaaaacctgatatttcttttgcaattttttttaagcttaccagctactgcta

SEQ ID NO: 3128 - DNA, 4001 bp, Homo sapiens
ttttgtagacaggaggtctcattatgttgcccagactgattttgaactcctgattttgaatcctgagctcaaacgatcctcctgctttggcctcccaaaatgcaaggattacaggtgtgagccaccacgcacagcctcttttgtcttattaaaaatttagaatgtaaggcaaacactgatcacactaggctaccaaattgctattgaggggattttttttttttttttttgagacagaatctcgccctgtcccccatactggaatgcaggggcgccttgcaacctcggctccttgcaacctccgcctccagggttcaaatgattctcctgcctcagcctccccagtagctgggattacaggcgcatgccaccacacccggctaatttttgtatctttagtagagacggggtttcaccatgttggtcaggctggtcttgaactcctgaccttgtgatccgcacacctcggcctcccaaagtgctgagattacaggcgagagccaccgcacccggcctattgaggacaatttttaatactctgaaactatcacataaaataagcatcatagcattggtcatataaaataagcaactttatattagtcatttccctttaagaaacagattagaaccaaagcagttaatgatcttgaaaacgacataaactctacttaataagcgacttttaatactccagaattacttcttttccctccactgcacactataaaaaatagttccactgcagctcccatttacctttcctttagaacccgatccaacagcgactactgttgcttgcaatacttttccttgagatttttctggaagcataatgcctcctttggttacagtttcagcagcactcctttcaaccaatactcggtcaaagagtggaagaaactttctaaacgcttgtcctgcctgtaggaagagaaatgttttgaaacaaaaactaaatgtaatcacattatcaacaggcaacgccaccgtgctatacatctcaacacgttttggctttgaaagttaacaccaaacctcagcttattcgttaaggaagcgcatttgaatgtactaaccaatattccaagtttaattcccgattccttacgtctgttaggggtcgttgtcgctcctccggtgagcaaccagaccagctttaaggtcaaccttagtttattccaaggtcaaatgttttccttcttcaggtttttccagaaattttcaggaaacgctgggtcaagctccctgcctggcaccatgatttttacccaagatattacacatccacaaaggccctgcagaagcaggtgagacgctgcgcgtgcgcccgggttctcgcccccctgccttacacaccggcagcacacgcgcgtgcaaagagccctgggggagaaaagggtcgggcgggccttgccgctccaaggtgccatcgggcgctggtcactgagtggccaccaatccctcccgcccagcccaacaaaagaggggcgtcagggatccccgtacgcctcagacaggcccgggcctgcaggcctcggggccacgcgggactcaccattactccctccgcctcagactcgtactctgctctagtgtagcgccgcaaagagactcgcagtccggccctggcgacacgtgaaaaaatcacccagcgcgcaggcgcgctcgccccagcggtcgccgctagccccctcgcccctcccagggagggagggcggtcgccccgacgcgcaccgcgattcgccccaagggccctgcgcaggacgctgacgcgaagactcggaggcggaagaaaaaaggagctgtttctaggcttttctaggcgcccagccgaggtgaaagaactaccccttcgtcccctcccggaaatgacgcgatttgacccttgagccgtagggagcgcggcattttctggaaagttctggaaccgagcgaggcccgggaactagactaagccggccggagagggctgagcgcgctagcacaccctgcgcgggtagggaggggcggggctcgcgcgcagggtgtgcagattgcagggcccgggctgacgggaagtgggtgggagctgcctgcacacgcggtgccgcggggcgggagtagaggcggagggaggggacacgggctcattgcggtgtgcgccctgcactctgtccctcactcgccgccgacgacctgtctcgccgagcgcacgccttgccgccgccccgcaggtacgcggccttcccgcaccacctccccccggctcctgcgacccccgagtgggccttcctcctctgcggtccagctggagggtgcgggcggcgacaacctggagttccgcaccgcgccgcaccgcaggcccaggcctgcgggtccaggcctcgcgggtccatgcgggttccatcacgtgcgacgcggatcctggacctcggctgggcgcgggagggacaactcgtggggtttgaatttgggggattgtaaccacttaggcccgctggtgcaacctgcgcctggccgacttcagggaaccggggagggtggtgtacgtgagggaaccgcttttttcccccgcaggcagctgggataccgcgcctccagtcttgaccttgctgggggcgttcggaaagaaggacacgtgggctcgcgccgagtgggccgggccgccgcccccagcatcgcggccttgctggttgctctgatacagtagccttgggtggatccatggagacactttgctgagcggctttttgcaccgtcaggaatacttttaacttccctggtcacttggatttgtaacttgcctctctccggctgacttggtttctcaggggccacagttggagtgggtctgcccacaaggccgttttcgcggtgaaagattaactcgtttttggcggcagggataggtggccgtggggaaggagccgcatgtgctttgtgctggtgctataggtcaggcgccggccggggcggcctctttagcttgcgctagtggctgatgttccgaagctgcggcgccttccgtcattcaggcgtagtggctggcggaggtcagccaggctcagcatctcacgttgcttgctctgttgcacaggtgggcatgtttgttctgcagcgcaccacgggtggtagttctgatgatctttttgcttccatccccagaaatgcttcggttacccacagtctttcgccagatgagaccggtgtccagggtactggctcctcatctcactcgggcttatgccaaagatgtaaaatttggtgcagatgcccgagccttaatgcttcaaggtgtagaccttttagccgatgctgtggccgttacaatggggccaaaggtaccagtatttttattttattgtaattacggtattattaatagcattttactcacaaatagtcgcactgaactattcaacagtactttcatctccatttttgagagaactcagtttacatgtaagaattctgaagtattggttagcctttttttcttagacatgatcttaaagcttaaactgcttcagccagattttcgaaactattttgttcaatgtgtgatgtaatcaggtagtaacttacagctcaaggtggattcttaaactcgaggtagaatttcgctggcttaagttaaaatttggatcctttcccagtagttcatgccaagtgtagagagaagagtttaacttatcttccataattccttaggtatgtgcttgtagatgctaaatttttttttggtttattgtagtaaaatgtacacaacataaaattaccattaagtgtgcactttggggacatcaattacatttatgttgtgcagtcatcaccaccatccatctccaaaactttttatatggaaaaattgtaactttgtactcattagacagtagcttcccattctctcctccaccccaagatgctagttttacccatcggttttctgctgttctcttgttccaaagcatatttaaaataagtctcatttaataggggtaatgttttgaggaggcctt

SEQ ID NO: 3129 - DNA, 4001 bp, Homo sapiens
ataatttatagataatatattcagaatctataaatatcactaacttgaatgactttttaaatgattttattagatagcttaggagggagaaaaatagtttacaaaaaatattttttgctctttaaaactgctgatcaaccatagagaatgatataaaacaagggactgtttacttgccgtatctttaaatagtccaagttcatcttttatttcaagaaaagtaaagattaaatgagtgtccattctctaatagtatatcatagttctgtggtttgatggcacaaacaaagtgaaatacttaccaaacattattgtcaagagggcaattggcatcacaaacaatccaaccagcaaatcagccaccgccaaggacattagaaagtaattagtagcatactgcagcttcttctccagtgaaacagccagaataacaagggtatttccaccaattgtgggtattatcaccatgagtatcagaagagctgcccagtgcagtttatttccctgttcctcaacaatctgtttcatttcctctggtattgattctgtctgtaatccagaccagttagaagagataacgtgaacaaaggtgctctgcaaaatgtgctcaggaattgtgctttgaagttcagacactctgtaagagagagccatttgctgtttttctgtgattcaatcccgttccgaacagtggtcagcatggttagtagctaagctgctcatctgtttttttaaggcattgtaaccatgccaaacactcaaaagccaaagttgacaccttcctttaaaaaaaaaaattcaagttctctaaaatgagcgcatacacacatctgtccatgtttgtaggtaagatatccaagtatttattattttctagaggcttaaatttaggaaagctcagtgaaagaaactgatagctgtgaaaaaaataggatatatatatatttttagtttctctctctctctttttctgccgtagttgtagagtcgtgtttgaacttgcatgccagagagttccccctagatacaaaatacatagactgcattattttattcatttctgaaagtggtaaaaacacttgaacttcatagcccttcccttcttagtaagtctgttgtgcatttgtgacaatgcagccaattctccaaatatactgtatttctgatgttgctcagttaatgaaacagaagacacattaattttttcaatggttataataaaaagttaggtgtttcctgacccttgaatgtctttttacctttacttacagaagaatagaaaagtcgaaacacaatagttcagaatagaacttttagtatgcgctggccacccacctagaaacactcaaagcccaacaagggtctaaataaatgttttaccagctagggatccttatatgtaattagctttgtcttatcaggtttgtgagtactgatataaatgtcattttagatttcctttagtttgagagaaggaaaaaaaaaggtattactaggatccaaataattgtgtttagtaatttcatctctcatggtatgtctttgcaacaattgtgttctaaatttaatcactaaatttgccaaattcaaaccagttctttttttgttttaagtagtgtttatttttttaaccttcccagttgccttgagaagaaagggaaaccaaaaggaagattagaccatttatttgttcatcaaatgtacaaatcacgtttttaaaaactctcctttagcattagtaaatttttcattttgatttttaaaccgctgaatagaaatgaaagattatgatagcagaattcttgaagattaaaaaaaaaaacctttagattaattccatatgtgtttattaaatgcttacctctggtttcgttgttattttgctgagcatgtcatcttatctgttcactagacttgcttgctgctgtgactgaaatcctcctcccattgacttattctgagcctccagcacaggcggttgaaagcagtgaaacaaatacgttgtatagctgcaagcatgccaaggaggttatttcctctttgatacattcatttttagagagtagcagcattcattgtaattcataaaaccactgttaagcatgttgaaccagttcatggcccttattcaagttatatttttaagagctctctttaatatttggggggactgtaataaacttgatcattttagcttcagatagttttgtttggggttaagcctgagctgtttttcacatttgagaaaaaataagatataatctagctattttagaggtttcattctttgaagattctgccgttttaaaagcctatagtgatttctacagttctgatttctagcagtgaaacaagattcttatctagcttttgtgcctttgctgtggaacaccattaatttgctctggttgcaaccttatatagaagagcacagaaaggcctgaattctacatgtatacataggttttagcagaaacttttttactgcttatttttaaacagatgatctctgggtttaggagtggttcacagctttttttccccatagactttacgttggagaaaatacaagtaatgaaaatacgtttttgccttatttcagaaaattggtgtttaaatcttaatagttatgctatttaagttttctgtaaccataagactagcttagtattagaacctcagcattctcaaggtttccttttaaaagatcattatagatgcatattttaaaattaattacttataaatcagtgatgacatttgtgcccttttcttgtttcaaatttgtattcctttgctcatgttgaatgttattggaaaatacttagttcattttagctctgctgagcacttcagattttattcagtatttgctgcttttttaaaaactcaaaatttactatattagaaaaaatacttgtgaagaattctagatgaaataatattcaagagaaatcagatgttttttaatgtaccagaatttctattcaggaatatgaaaatattttaaggcaaggtgcggtggctcattcctgtaattccagcactttggtagaccaagacaggtggattgcttgagtctagaagagaccagcttgggcaacatggcaaaaccccatctctacaaaaaaaaccacataaattagccaagggtggtggttcacacccgtagtcccagctactgggcggcggcggaggggttgagggttaggggtcaggggagacctgaggcaggaggattgcatgaacctgggggaggtcgaggctgcagtgagctgagatcacaccactgcgctccagcttggggtgacagaatgagatcttgtctccaagattaaaaaaaaaagaggaaaagaaattatttttaaatactgcttagttgtgagttacactttgacatctgtgcttatgaaggcaggtagggatctgcaaaacaagtaatgtcagattgaaaatagcagcaccattttatatccagtgaaaagacttgtatgaaataagcctttattgatttgtttatagataaaattttttaaatattaagtatattataaaaatgcagtcattgttgtattttgcctgtattaatcctttcactcacattcactcattttttgcctcaacttataaaaagtaagattggtactctgattttttttatttttgcttttttaagtctgtttaatgtctaaggaacgtaactagttagaacagctacttatttggcaatctcaagttatgggaagcatagctgagaatcaagaaaaaagcaaaataataataaataaataattatataaaaggatagttgagtctcagcaaataactaaacctgtgctctaaaaccctaagcactttaagtagaaagtagcctctaagtccccactccatatctttttactctttacacacatacacgcacacacacgcacagacgtatacacacacacaaaactttgcctctcccccttctttagtgaaaataacatttgtacatggtg

SEQ ID NO: 3130 - DNA, 4001 bp, Homo sapiens
cagggattcttggaaggaaggatgtctcactcaccaggttaaccaggggacctccagagtttccaaactgtaggacaaggagaaaacatgaaagagatctggggattctaagtctgggggcataccaggatgtaggtactttctccaaattctcttctttctcagcccatgaataagtggccacatttttgcagcctaagctctatataggctcatccaccatatatcagttggtgcttgtaccacacagcctctcccccctcccccatcatttgtcatttctctcctatcaggacgcacatcaatagctgcatcagtttgaatgtattccacattggtttgggggagtcccaggtctctggctggacgctgagcagagctaacaatgccggatgtgatcgtgttctgcagtgcaaagggacttcccatggcaacaacaaactccccttgccggacatcagctgagcgtcccagaggcagcgtggggagaggctcctaagggagaatgggtaaaagagacctgtcatctgaagatgcgagcaaataagcagctccaaccagacctggcctaccccagcccccaccttagtctgaatcctcagcgttgcgatgtctgccacgggatccacagctgtgaccacggcctcatacgtgtcgccgcttagcagtctcacacggactctgcgccgatcagccaccacatgggcgttggtgacaatgagcccatcggcagccaccacgaatcctgagccgttcgagatagggacctcgcggcccaagaaagggtgcctgaaatggagggaaagcacagataagaggaggctctgacccctcctacccgcccgccctccagcctgtggcttcagtgcctcccggtctacccccaccattaccggtccaggatctcgatatagaccacggcaggtgctgtcttctccaccacatctgcgatgaagttgtactgactccggggagaagcgggcggcgggctagggacggcggcgaggacggccggaggaccccgacccccgccccacaacaacaacagcactgcccccccagcgcccagcgccaccgccagccacgcgcgcgaacgggttccagagttctctgaggcctcccgggtcctggtatctggggtcaccgcagtcagttgtgcccggggacccggggtcccagacgtcaggcatgctcggggttcagtgaccccaacagacaaccgggcccagagactgggggtcccataagtcactcgggcccgggggtcagaagttcctgacgtcagcagggcccggaggtcaggggtcaaacggggtctcctcccccagcgaatgccccccaaagcccgccatgcccgaaggctccagcctgcaccccgccccgccctcggcgcagccatcagctccgccttggctgcctcctcgcccgccctactcagaggcggcacccaggacgcgagcaggcggacagtaggacgcggggcacgccggtacctgaagtccttcagaagtgcacgccgggaccaggattccgggaggccgactcctccctgccccacgaatgccgggaattgtggtctccgccggacgcgagttgtgagacggcccaaggggccgcggggtatgctgggaccgctagcccttccggcgcgcctcaggacttcgggtcccctcaccccgggcggatgcccaaagactccgccttcccaagagcccctgcggccgggcgcgaaaatggcggcggcggcgacggccgggcgctcctgaagcagcagttatggagcttccctcagggccggggccggagcggctctttgactcgcaccggtaagagacccggcgggaagagaccgatccccgcgtgctctcggccttcggcgcctgaccacttcgcctctcgcccccaggcttccgggtgactgcttcctactgctcgtgctgctgctctacgcgccagtcgggttctgcctcctcgtcctgcgcctctttctcgggatccacgtcttcctggtcagctgcgcgctgccagacagcgtccttcgcaggttccgacgcgggcgttcggggagtgtcagagctgggtctggcccgaggccacacagtcaccacctcctgtgtccccagattcgtagtgcggaccatgtgtgcggtgctagggctcgtggcccggcaggaggactccggactccgggatcacagtgtcagggtcctcatttccaaccatgtgacacctttcgaccacaacatagtcaatttgcttaccacctgtagcaccgtgagtgagagcgaggccgagagcgccacggggcggttccctggggcccagctgaaggcccccctgtccccactcgcgttccccatggaggatactgagccttacccctaaccccgatcctctacccaacatgtcagttttttttttcattttcctcaatatttttcttcttgctttctcttctcctggttcccagcctctactcaatagtccccccagctttgtgtgctggtctcggggcttcatggagatgaatgggcggggggagttggtggagtcactcaagagattctgtgcttccacgaggcttccccccactcctctgctgctattccctgaggaagaggccaccaatggccgggaggggctcctgcgcttcaggtgggtttagcacaggtatggggcgccagctgggtaggtggtcaagcttgtgggcccttgagtttttacaactttcttcggcccttagaccccatcatctccagttcatttcctttctgtccactttaagttctttctcctgaatcccttcattcttcaattatgtgcttgtagagtttgacagttgcctgttataaggcaggtgtgagctgctgactaggctggctggattcccatcctactttctccttcctcttctagttcctggccattttctatccaagatgtggtacaacctcttaccctgcaagttcagagacccctggtctctgtggtgagtgtgtgttgaacagggaatctctggggcttgaaggggaaatttcccatccctggccctggcttaggcctcatctcatgccctcccctcagacggtgtcagatgcctcctgggtctcagaactgctgtggtcacttttcgtccctttcacggtgtatcaagtaaggtattaactgtcctcacattttggtcgctggggagaggctcacctcaaggtcaaggaattagtggcctctgccctgtccatttgtagatctttatatcaaggttctaccacagaggcaacacaaagtatttacagtatttactattttcccacccaccatgcaaagaggtaccaaagtggggaatggtgacagcctctaccctgggtgcccacaacatagccctggattgtttctttgcaggtggcttcgtcctgttcatcgccaactaggggaagcgaatgaggagtttgcactccgtgtacaacaggtggtcgggtgcacagacagggtggaggcggggtccctgcttaggaggagagggaggaaagcttgagatcttgacacttccagtcttccaattctccctagctggtggccaaggaattgggccagacagggacacggctcactccagctgacaaagcagagcacatgaagcgacaaagacaccccagattgcgcccccagtcaggtatgtggtctctatacattacagcttttggggtttttttttttcggcctactgtgattcctcccctatttctgtgctagttagcctctccttctagttctctacttaccagaatttcttttttctttttttcctttttccacagcccagtcttctttccctccctcccctggtccttctcctgatgtgcaactggcaactctggctcagagagtcaaggaagttttgccccatgtgccattgggtgtcatccagagagacctgggtatgggaaagggtggccccacactgggagatgggcacagggaggaaaagtgggttgtgaaggaag

SEQ ID NO: 3131 - DNA, 4001 bp, Homo sapiens
agccttgttgctcacacaaagcctgtttggtggtctcttcacgtggacgcgcctaacaagagaccctgtcgcaaaacaaaaaccaccaaaaaccaaaacaaagtgcggtagaattgtgacaaggtgagtcttaagtcatggcagcacttcaaaaaaaggcaaagtagcttcctaccagtgtggtgtagcagtgaaactgcaagttctgcagtcatagcagctggacttggatctgtctgcccctgactagggaagaggccttggccatttccttgatttgtctgagtctacccagccatcagtgctcaaccctaaaatatctaattggtcagactgagtgaagagtaaatgttttctgttccttctcctatatactgattaggggaggcaagcaaaattaataaaggaggaatgttctgttcagaactatccttcatccataagacggatccctaagacattttccatccataagaactcaagtatcggaaaccattctcacctgaccagcctgtcagccagcgatgctccccatccaccctgctggaaggaaaactggaggaagaaaagcccattattactactaatgactgtaaccgggcatctcagcgagggcagttctgattggcaacttctgttttctcggcgctcccttcttggctttgattgcttcactccaggaggtcattttggggattacaggtaagtacacctggcagcactttagcagagggggatttttctctatcaaaagctaaacagcctgtattcccagcactttgggaggccaaggcgggcggatcacatgaggtctcgagttcgagaccagcctggtcaacatggcgaaaccccgtctctactaaaattacaaaaattagcccggtgtggtggcgcacgtctataatcccagctactcgggaggctgaggcaggagaaacgcttgaatccgggaggcggagcttgcagtgagccgagatcgcgctactgcactccagtctgggcgacagagcgagactccgtctcaaaaaaagaaaaaaagaaaaaaaaaaaaaagctaaacagaaatctaagttcaggaaataaagtcaaaggtcagtgaggaaatgaaggccacaccgcctcactgctttgctggttaccgagctgagggtgaacactttttcatacacattcccatggaattcggcagctctgactgccccatatgcctaaacataatgttaccagttactggcgtatacacaaaagcctggtgaagcaagtcctgtctgagaagaggacacacacaggaatggaatttctactccctccccgaagtaagaacctgcatttagaagaccgttcccttcatgggaggtgagatgatcttggatgaacggatggtccttttctacctaattcctgaaggcgttttacttccaaggtcaacccctaacggccccacctgtgcccgcagggaatggggcgagagagctcctggcgcctctgcccggagctggccgcggggcctcctgggacacagcgcgcggtcgcccgcggccgctaacccggacccggaggggaaaggccgctgcccaggagggcgctgaggggaagaccgcgcatctcgacccgggtgggaggcggcgcggggcgggcagcgcggccgggtcccctcgcgtctgtgcctggagcccgggctctcgcggacgccgtcgtgacctccgggacgccgcgggcccggaaggcgcagccactgggggacccgccactcctccggtgtctccacgggcgtggccaggcctccggcccagccgtctcgggcgccgaagaggacggcgaggagcctcggcctgctcggcagcgaccccgcagggaggccggggcgggaggccgagcgtcggggcggccgtacctgggtgatggagtccccgaagagcaacaagcgaggccagagcagggcactcccgcagcccgcggcctcgcacagcgccatggagcagccgggcggggcggggcggggccgccagccacgagaggcgcctgcgcagtggccgcccgtgggttgcgggagccgggctcgtgggcacccacgcagtcactttggtgacgcgcgaaggtcgttgccccttggagtccgtttgcaagaagctcggcctccgcgcttgctcacccacagcaaggctgcccccagggagtccggagcccgcgtcccgctgcgtggttcccggaagaaaagcggttgggggcccttctaagcccaccccgcgctccgcgggcgcaggtgcgttcggcaaagggcaggagtgtgacctcaggacgcgcggcgggaagcacagctggctctcggtggggcggagggctgctccaggcccccctggaagaggtcgtgggatgcgcgcgcggcctcctgcgcccagcgtcactctggagggcctgtaacacccacgaggacgcaggcactgcggaaaccctggcagtacctcgtggttctgcgaatgacaagggaaagcagctgcaccttcagtgcgcgcgcagccggccgcttttctttttcccgccgtggggtggatgcgcagatgcagaaccccgcggacacggagcactgactaacttccaagggattcacctgttaaaacgtggttgtaatgcaacgttcttacctcaactgtgcaatgaagttcggcagccgagctaaaaacgaacgggtgggaaggatgccttgaaatcacggagctgtagatgagtaacagaagggccaggggcgccggcgcagaggccgaccccgctccctggggcggggcgatgggcgtagagcatgactttctttaggttgctcgtcccaagctcgcttggatcacctgggggagctttacaactaagatccaacctagggccctcattccagccggactaactcacctcctggtggcaggacttgggcacaggtgcacttgtgatgcaccccacgtgattcccacgggtagcccagattgagagcccctgctagagcaagcaaaggtgcctggacttcatctttatcacaaggacttcattaaggccttcaagcagcagaggcttgaggccaggtctgttccaggaatcagctataggggaggagatggaggtggttgcaggaattcagaggggagagtagacttggactcgaacagcagcagtggagatgaagacagaaaagattcaagtgcaacttagaatccttattattaactcaaattggttaccccagaggagagggtaaccagcagcggttgctatcggcagatcttgatggtttcaatgggagctgcacatacatgcctggaagaagaatccaaaattctaaaataatgggcagttgatctagtagttagttctagaataatggacaaattaattagcaatttagcagtattcaggctgttgaaataaaggccatttgacattaaaagtaaacaggctcccccagagaaacgaatgcattttattttaggtaacaaaagtagagtcaagtattttttcaaagttcatatacaggcacagtctcagtgaactggcgtcagggcctcgtacagtctctgtgcagccagctccaccatttctcggagggattcatcgtcttcacttccctcttcacattctacagtctgaaagtgaggcacaaacaagactgttagaattaagtctataatgattatatagaagataaatgaatactctttaaaaaaaccatcatctcataaaaaattagccagctgtggtggcgtgtgcctgtggtcccagataagagtctgaggtgggaggatcactgagccgggaaggttgaggctgcagtgagctgtgactgcaccactgcactccagcctgggcggcactgcgagaccgggtctcaaactaaaaaaaagaacaatcatctgtgtgtgcagaggtcatggtgggactgattaccatgaaacagaacggccgccctacacacttgtgggcgtgcagtgcttcctgacagcagcacggtcctaattagt

SEQ ID NO: 3132 - DNA, 4001 bp, Homo sapiens
tccagttacagatatatttaaaactcacatatcccatctgttgttgttaaagaatataaaaagaataaaattttaaaggaagcgcagtgagtactgaaaaagctaaagtataaaagtacagaaaaaatgtaaatatagaatcacacaatgaaatcaccaagtttggcagtatagtagaacaagacagtatattatctattttgtatctaatattttgatatctggtcctagttccataactggtataaactttgttttatatttttatgatatttataataaaaatatggcatcctactttttccaccagttctcatatttgcaatttttcctctttggactggctgatctctgagcacccttctaactctaaaattaaactggtaattagaacactgccttccacatagctgtttcaacgactagataaacaatcattttgaactattaaataaagagatttcaaagaatactgggtatgataggcacagataacaaatactaaacgatttaaaattttggtcacataaaaatacatacataccattcggagatgtttactcggccagtaaatgtataattaactcctactaaaggatgaggcacctgtggctattccataaatactgatgtgaagatgattaaagtaatatcgtcttacagtacgtcgcctgagtcagaaccaaataaatcaatacataaatacttttgggaaaaatcaaaaccatggaaaaatgttaccttcccaacaatctattttacagagacccatagtttataacagcttttatgctgtgtgcatcaagatcatctattacacgaaaaatgattccaccccctctactggcaacgccccagcatcgcgggtgagctgccaggatggactccccgctttcccctctccgtcttccttagagcatcaggtatctgaccactgacatcacctgggcacctgaccagctgacgcgcgtttccaggagccatatctgtgccgtggggtcgggttgccggcctaaggagcaggatctgtgcgcggagcccctcgcgggcccgtgcattctgcagttcagctcaaactgcacatttactatgttttgtttttatccatcggttgccaattagtttctaaggaagacattcccattacaaaataatagcgaaataaaaataagcaccacgttaaaaagaggtcagcagggaagcacctgaaggctgttcgggtgatccgccgccgcctctattaggagcgacctccaccgccgagggaaatcacccaaacgagccccaggctgccgcgctccttcactacagcgagcgtggccgggaggcgcccttccgccgcaggggacccagccacgccagaaaccgctccttgcgggttttgcctggggggaggccggaagaaccccgagcagggcctcgcctggaagaaggccgcaggcagcggccggggtcccccagagaaccgaggaggccagcaaggccccgagaagccgcgcgcgcgcgcgtgtggccggagcctcccgccgcgcccccgcctcccggcgtcgccatgggaacccgggatttggtctccgggcctgaccgccgcctgagggggaataggggcggacaggaggcagcagaagcttaccggcgccgctcttccgcctcctcgggtcgcgttcggccgtacggtgatccgtcccggcacccgttccggccaccgcccgcgagccccgcgccgactcccggccctccggcagccagtgcccctccgcaccagtgcgtggaggtgtcaggctcccgctgcgggaggcgggagatttaaaccgcgcgacctggcgtccgcgttcgcccccctcgggcgccggcctgaccccgccaccggcccgactcgggatcggagcatctctcggtctgctcttgaatgaactcggggaccctctctattcctcctttcccgatttcctctttacttaataaagtgaaatgacaaacaccaaaccggtcagaacattacgaggagctgagtgtgagctctctgaggcgtggggaagtggaaggcattggcccggggccctcccggctccctccgagcacccccacccccggacctgccgggccttctggggcggccccttagcaccagtgctccttaggcggaaagcgttcgcccgctgtatttaactcccgtgttaaaggtttaaagaggtctaagttaacaaccgttcataaccaatctcaaatgcacatatccatatccataatgtttatgatgaatcttcaagagtaaaaggtaaaaccggatcctgaaagtctcaggaaaaaaacaaaaaggaaggcaaaactatttactactagtaggagataatttaataaattcaaacttcattctttttaaaggtgactccaaaacttaaaagaactttcctaaaacagcagaatacgaattattaattacaactgcgacacataggctagcaaagaattaaaaggttaacactcgaggtgataattaaaatctgtatgatgacaaagatggggtgagtctagaatttattttattttattttatttgagacggagtctcgctctgtcgcccaggccggagtacagtggcgcgatctcggctcactgcaagctccgcctcccgggttcacgccattctcctgcctcagcctcccgaatagctgggactacaggcgcctgccaccacgcctggctaagttttttgtatttttagtagagtcggggtttcaccgtgttagccaggatggtctcgatctcctgacctcgtgatccgcccgcctcggcctcccaaagtgctgagattacaggcatgagccaccgcgcccggccgaggttctggaatattaacagtacaaaatactcaccttaacctggaaattatacttttagaataggaaaagtggcaagctacagagggttaatttggactgaaaacattaaatgtctttagacttttaccctgagatatttggatttcaaggaataggcaaatacctgagattatgtgcaaaattttgtttgtttttttgaggagtctacagctttcctcagaagggtaaaaattagcgtttggcaaacatgagtgattgacctatttccttgggatggctttcctgaatcttaccaaatgaggcatttctcctaaggggcatactgctctctggctgtaacgatctacctgcctgtcttccccattaggtgccgagctgcttcaaagctgctcctcccttacgcatttctgcagccttagcacctagcacagtgcctaatacaaactaggtcctgaatgaatgttgaatccatcaatgaacgaaatgaaacaaagatagctaattcacaactgaaggatacattataaaatatctgaaaagaacagattatctttctcaccaaggaataaataaagtggcaagcgaaatgactttcaaatgttactatgccccatagtaaagttcttggggtattttagaaaatgtttgttccaacaagatgaagttttaagtcaagagaacagtaaactaatatcttcttcagctcaatctgaggccgactaaagtcctccaaggaacacacctggaagtcagaataatggctaccggccgggcctgttgcttttattcacttaactgggtaaaattacagaaagatacacagtatctccaagccattaatgaagtgtagtatttacacttcatataatcactttttcttcacaagtcgctaaggaaacacggtggcacagtgtaggaatagtatcagaaaataatgtagagctagctgctgatgcttctcctggacaggagtcaagtctctcatatttcataaatgcctgtggaatgaattctttctttagctgttggatacaatgtttaaatggcttgcactaggaagagcgtggtagttcaagcctataatcccagcactttgggagactgaggcaagcggagcacttgtggtcaggagtttgagaacagcctggccaacatggt

SEQ ID NO: 3133 - DNA, 4001 bp, Homo sapiens
gacatgtataaaatataatttaaaaaacacaaaacacagataccaactcatgatgttgagtacctgataacggatgggtgggatgagacttcagctttattggaaatgttttatttccttatctaaaaaaatactagaaagaaatacaacaaaatgttaacagttgttaatgtcggcctctgtaaatatagatattgtgttactttagtcttttttttaatctcaactaaattaaaaaaggaattttagtctttttttatctcaactaaattaaaaaaggaattttaaaaccctagtgttacatgcaagtgagtcaataatggcaaaataataatgagatacatagaaggtgactaaattttaatggtgaatactggatccaagtacaagtttgaaaattttgatttccgaaaaaaacacaaaacttaagtgatgaatgaaaaatagacaaaatggaagagggtaataagaatattattaaataacaaaatctacttcgaacgaggaaatctttccagttacagatatatttaaaactcacatatcccatctgttgttgttaaagaatataaaaagaataaaattttaaaggaagcgcagtgagtactgaaaaagctaaagtataaaagtacagaaaaaatgtaaatatagaatcacacaatgaaatcaccaagtttggcagtatagtagaacaagacagtatattatctattttgtatctaatattttgatatctggtcctagttccataactggtataaactttgttttatatttttatgatatttataataaaaatatggcatcctactttttccaccagttctcatatttgcaatttttcctctttggactggctgatctctgagcacccttctaactctaaaattaaactggtaattagaacactgccttccacatagctgtttcaacgactagataaacaatcattttgaactattaaataaagagatttcaaagaatactgggtatgataggcacagataacaaatactaaacgatttaaaattttggtcacataaaaatacatacataccattcggagatgtttactcggccagtaaatgtataattaactcctactaaaggatgaggcacctgtggctattccataaatactgatgtgaagatgattaaagtaatatcgtcttacagtacgtcgcctgagtcagaaccaaataaatcaatacataaatacttttgggaaaaatcaaaaccatggaaaaatgttaccttcccaacaatctattttacagagacccatagtttataacagcttttatgctgtgtgcatcaagatcatctattacacgaaaaatgattccaccccctctactggcaacgccccagcatcgcgggtgagctgccaggatggactccccgctttcccctctccgtcttccttagagcatcaggtatctgaccactgacatcacctgggcacctgaccagctgacgcgcgtttccaggagccatatctgtgccgtggggtcgggttgccggcctaaggagcaggatctgtgcgcggagcccctcgcgggcccgtgcattctgcagttcagctcaaactgcacatttactatgttttgtttttatccatcggttgccaattagtttctaaggaagacattcccattacaaaataatagcgaaataaaaataagcaccacgttaaaaagaggtcagcagggaagcacctgaaggctgttcgggtgatccgccgccgcctctattaggagcgacctccaccgccgagggaaatcacccaaacgagccccaggctgccgcgctccttcactacagcgagcgtggccgggaggcgcccttccgccgcaggggacccagccacgccagaaaccgctccttgcgggttttgcctggggggaggccggaagaaccccgagcagggcctcgcctggaagaaggccgcaggcagcggccggggtcccccagagaaccgaggaggccagcaaggccccgagaagccgcgcgcgcgcgcgtgtggccggagcctcccgccgcgcccccgcctcccggcgtcgccatgggaacccgggatttggtctccgggcctgaccgccgcctgagggggaataggggcggacaggaggcagcagaagcttaccggcgccgctcttccgcctcctcgggtcgcgttcggccgtacggtgatccgtcccggcacccgttccggccaccgcccgcgagccccgcgccgactcccggccctccggcagccagtgcccctccgcaccagtgcgtggaggtgtcaggctcccgctgcgggaggcgggagatttaaaccgcgcgacctggcgtccgcgttcgcccccctcgggcgccggcctgaccccgccaccggcccgactcgggatcggagcatctctcggtctgctcttgaatgaactcggggaccctctctattcctcctttcccgatttcctctttacttaataaagtgaaatgacaaacaccaaaccggtcagaacattacgaggagctgagtgtgagctctctgaggcgtggggaagtggaaggcattggcccggggccctcccggctccctccgagcacccccacccccggacctgccgggccttctggggcggccccttagcaccagtgctccttaggcggaaagcgttcgcccgctgtatttaactcccgtgttaaaggtttaaagaggtctaagttaacaaccgttcataaccaatctcaaatgcacatatccatatccataatgtttatgatgaatcttcaagagtaaaaggtaaaaccggatcctgaaagtctcaggaaaaaaacaaaaaggaaggcaaaactatttactactagtaggagataatttaataaattcaaacttcattctttttaaaggtgactccaaaacttaaaagaactttcctaaaacagcagaatacgaattattaattacaactgcgacacataggctagcaaagaattaaaaggttaacactcgaggtgataattaaaatctgtatgatgacaaagatggggtgagtctagaatttattttattttattttatttgagacggagtctcgctctgtcgcccaggccggagtacagtggcgcgatctcggctcactgcaagctccgcctcccgggttcacgccattctcctgcctcagcctcccgaatagctgggactacaggcgcctgccaccacgcctggctaagttttttgtatttttagtagagtcggggtttcaccgtgttagccaggatggtctcgatctcctgacctcgtgatccgcccgcctcggcctcccaaagtgctgagattacaggcatgagccaccgcgcccggccgaggttctggaatattaacagtacaaaatactcaccttaacctggaaattatacttttagaataggaaaagtggcaagctacagagggttaatttggactgaaaacattaaatgtctttagacttttaccctgagatatttggatttcaaggaataggcaaatacctgagattatgtgcaaaattttgtttgtttttttgaggagtctacagctttcctcagaagggtaaaaattagcgtttggcaaacatgagtgattgacctatttccttgggatggctttcctgaatcttaccaaatgaggcatttctcctaaggggcatactgctctctggctgtaacgatctacctgcctgtcttccccattaggtgccgagctgcttcaaagctgctcctcccttacgcatttctgcagccttagcacctagcacagtgcctaatacaaactaggtcctgaatgaatgttgaatccatcaatgaacgaaatgaaacaaagatagctaattcacaactgaaggatacattataaaatatctgaaaagaacagattatctttctcaccaaggaataaataaagtggcaagcgaaatgactttcaaatgttactatgccccatagtaaagttcttggggtattttagaaaatgt

SEQ ID NO: 3134 - DNA, 4001 bp, Homo sapiens
aatacaaaaattagccagccatggtggcaggctcctgtaatcccagctattcagaagctgaggcaggagaatcgcttgaacccgggaggcggaggttgcagtgagccaagatcgtgccactgcactccagcctgggcaacagagtgagactccatctcaaaaaaaaaaaatacagaaaagatagttctactaagatgaagtgactatgcttgattattttttccataggtctttgcaaggtttatgtactatttttatttttataataaaactgtttctcattcttaaaaaaatagtacaaatgtgggagaaagttcttgattccaaatattcatctaatggccagatttacactgaatataaaacatgtcacccacagatgacctaacaatgtaaaacaataccaaaaccttatatattcccacttctatgggaatatatctggaacaagttcctgttgcgttaaaacatacaacaccaataataataaagtcttcatttttacacatttgtcattgaatcctagaaatacttttcaacacaaatagtaaaagctcgttaaatttttatctatttccatatttgttttggcaatgaggtaagtttactttttgcaggatgaaaatacttgatcaagaccagtttaattagactcatatttttaagaatcccaccataatgattatattccaagcataacagaatccctgcttagaaatatttgttaagagttagctttaattagtatatatatgctgagttagtaaatctgcatttaaaaattcagacttgggctgggcacagtggcttacctgaggtcaggagttcgagaccagcctggccaacatggagaaaccctgtctctactaaaaatacaaaattagctgggaatggtggtacatgcctgtaatcccagctactcagggggctgaggcaggagaatcccttgaacctagaaggcagaggtggtggtgagccaagatcgccccattgcactccagcctgggcaaccagagcgaacctccatccaaaaaaaaaaaaaaaaacagactttttaattcatttatattacactcttctctattagcctaattactttaaaccatttattggtttaaaattgtttcatggcaattatttaaaataaaaaacagccaaaaaaggcattaggaaatatttcaataactctatcttttaataaaatagaaacaataactattatcttcatttgctatttgattttaattatttcagtgaggtataagacttcacatcaaagtactacaaaatagtatgacttgatatataatgagtatatggtctcaactgggaatgtaatcattaagacttagcttgaaaactatgcatgccagagaaactactttattcatattttatctaagttagtgaataccaattttgcaaattttcagtttgtgagagccgtgacctcctattcagagctctgattgacagatggatacaactaaacattctattatcaaatttgcatttatcctcataaactctccagtgtgaaaacctgttgcagttccccttggagccccaaataatggctggttatatgcaatacatagaatcctcaaatttacctcaagtttagcatccagttcagcatcagacgccaccaagtgctcatcctctttttttcctgttgctttgataaagacctgtttagttttccagtatttcttttgcattcttctgactactgactgattatcttctggtctgggttgcccaaaggaatccatggagtgactacaatgaacagactaaaattaaacttcttttaaaaattctcaataataggctgggcacggtggctcacgcctgtaattccacaactttgggaggctgaggcgagcggatcacgcggtcatgagatcgagaccatcctggctaacacggtgaaaccctgtctctactaaaaatacaaaaaaaaattagccgggcatggtggcgggcgcctgtagtcccagctactccggaggctgaggcagagaatggcgtgaacccgggaggcggagcttgcggtgagccgagatcgcgccactgcactccagcctgggagacaaagcgagactccgtctcaaaaacaaaaacaaaaaacaaacaaacaaaaaaaccaaaaaaaactcaataaatatgtttagctagccaatatttaatctgacaaatggaaaaaaggtactaaatgtaatttttttttagagtcagggtctcgttccatcgctcatgctggagtgtagtggtgcaatcatagttcagaataatgtgggctcaagcaatctcctgcctcagcctcatgcagcactgggattacaggtgcgaactaccacatctggcccctaatattaatgttctcagtcagacatgctaatacttgctttatatggtctaaatgtatgctataatttcaacttgcacaagaaacaggcaaaagattaattatatttatattaattttagttagatgacaaacgtaataaaacttacgattttgcagttatgtctagaaaaaattatattttatttgatatctatttatagatgtttattactttctaagttttgcttttgtaataaaactgcaaaataaacttgtacatacatctttacatactagtatcagttccttaggaaaatttcctatagttataatcgctatgtcaaacatccatttaatattttcagatatgcaaagattccaacacatactctttaaaaatcactcaaagaaatattttagtgtccaataaatcaacacaaataaagtccttaagtataagggaagatatgttataaaagaaatacagatggacattgtaaactgtaaacataaaaattaacatatgctaggtgcagtggctcatgcctgtaatcccaacactttgggaggccgaggtgggcagatgccgaggtgagtggatcatgaggtcaggagatcgagaccatcctggccaacatagtgaaaccctgtctctactaaaatacaaaaaattagccgggcatggtggcacgtacctgtaatcccagctactcaggaggctgaggcaggagaatcacttgaacccaggaggcggaggttgcagtgagccaagatcacgccactgcactccagcctgacaacagagcgagactccgtctcaaaaaaaataaaaaataaaaaataacctccaagaagttattcttaacaaggttaacatggctatataaggaaatgcagagtgaaaagtatttctttaaggatatgtaaaaagaataaatactaataacattttggatctaaagcccaaattattccaacaaactgtaagagtaggaacaaaagggaaatactaaagtatgtgactcattcgttatttccaggcacatcgatacatgctattgtatttttcatgttagtaaagaaatagaggttcactttcttttaatttgaagtaattactaattaaataaaaatagaatgtctaatttccaaattactgggggtaaaacaaaagagccagaaaaactttagcaaaagcaaaagaccgagtgggaaaaacaagagtaaggcatgtaacacacagtacaaaacaagaagatggaagaagaacaattatattatttagtatgatagatgcaaacttctttttaaatacaaagaatctcgaatcataaaaaacaaaaatcgaaatccaactatatgctatttgagatctacctaaaacaaaaggacacaaagataaaaataaagatatgagttaagatataccaggtaaatagaagcaaaatgaaattagaatagctatattaatatcagacaaagtagatttaaataaaaagcataaaatagaacaaggacaagctgtaaagtccacaaagtggccaattttccagatagcctctagattattatcctttggatatcctcccatattcctgggcagtatatattaatcaccatttaattgccaaacctcttaatatgttat

SEQ ID NO: 3135 - DNA, 4001 bp, Homo sapiens
tggaaacttaaaacaatcctacctaaggctggatctcaccttccacagaattgacaccgatgctactttaattctcctgagcataataccacaaccagaactgcccaaattggtttggcctagttgaatgatttttatcaatacaaacaaacccttccacgaatggtaccaacgttcttggaagaatatccaaaatctggaacatagactatatggtctgaatggtctggcctctactttcctttccagcctcaccttggaccaacttggaccagttggtcatcttggaccaagctcagcctcttccctctttgtgctcaggcacatctgtctgctttcttctagttccctaaccttacctcattccttcctgccacaggctctttgcacttgttccttccatggtatggaacgttcttccctaccttcataccgttctccccattgattgctaccttgtccttgaaatctccgctcaagtgccacttgcacaggaaagacttcaatgaaccctgctcctcagctacacctccacacccacccagtctagtcaagctccttgttacattccctcatataattgagttttgcctgtaattatcattaatcaatgggattatttgattaatatatctctctctaccatgcagttaccttccaaagaacaggggttgacctggttttgctcatccttgtacatacaccatctggcacagtacctgctaccaggcaggtgctcaatgctacatgagtaaatggatgaatgaagaatgaatataaattccaaagctgctcatgtcattcatgccgctaaaggacttcatgagattctagaaaaggcataaaccagcaagtagcccaaaactgtccttgtgctcattctacattcctcaatcctcttaactgcacttaactcactttgagccagcacaagatgaaacatttgatcaatttgatttcatttttttttcattttttgtaagaacagtaaggtctatttttttgccactgaaaaaatgtatccctagataggatcatacctactaaaagttctgccttcacttttagtttatttgattatttaagttatttaatattacttaactttccttttttcaacctcaagaatagggctcagtgtgaaagagaaaacaaaagtagtacaaattatatacagtaaaaagcagcagaaacacgtgtattaacttacattgtatgtagcattatttaaattgtccatatagagtctgctatatgccattcaagagaaggaatcagggactccagaatgatcttttttgtaaggtctacaggggctaggaagtatttttacattatcctttcctccttggctttttagggtgaactctgatacttagtgtcaataaaaactctatggtgccctggacatttcagataacagatcatccaggtaagattaaaatcaaaatccttcttttcaaagacttcccattttattttctaccacagaaagaattcccagtccaaatgccagagctatttaattttcattctgttgacacaagtcattttgcctttcatctttctctaagaacagtaagccactctgctagtttatccactgacaggtaactccaagcaggtaatttaaaaatttaatggtctgatgaaacatgtttttcatctcaagacacagtatcaaaggcagcaatgcaaactcaatgccatccacagtgacatgagtgacatggtgcccttggccatatcctgaaactattcctactttcaaaaaccaaaaccactgtcttttgggtgcgtaatttttctacctttgctttttcttaatgtttacttgaattataacttaataagaaatattcaatacaccacttacctgttaaaactttaatgcgcaagcagaagagaaagaaataccagaggcctgacttcatgtttgccagaaacagttaacagtcctcgcgttcagtgttcaaagctgacagtgaattcaggctctcggttgttttctatttgctggaaaggaagtgggttttctgggagtttatgtagtgtcacgcttaccatcaaatcaagggggtgtttcttctttgatgccaatggctatatgaaaggcattattgcttatgacatgagttaaacaatgcatggattattgatgattttgaagacagaggaaaacattacccttattctggttcctataaaacaagttaaagagattatgcctgtatttttcagaaccaccctacttctctgaatcaatagttatgggggttaacaggacctaaaaatactcacatgatgaataaaacatatattttgacacatttctatcttatgctaggtgctccagagataagaaagcctttgaaataggacaagaaacaaacaaaattattatagaaattgaagtgaaaagatctgaaagaagagcatcataggaatctgagaaatgatatttatgtggcattcattgtagattgcaatgtttcaaatgatggggtcagttttaaactaacttaaaccctgctcctcatattacagcagagtctgtaggaaccagggattcctcacctacggctcagtgagaccaagaatgtttaaaagcctgccgtggtctccccatccctgcagggaggtaaagtagacaataacaacaataacaataataattacatagataattatatgtatatgtacttaaatgttttatatgaaataatatatcttaatgcaaaatgtaaaaaattaaatgtaatatattttatatataaaatatacctatttttatatatgaatatagctaatattacatttatattatgttttatatgcatgtaaatggttactgtttgtatatatatttacattataactatagtttatacatacattaactcatttaatcttcttaatcatcccaatggtgaccactaatctcccattttacagatgaggaaaactgaggcacagacaggtaacgaacctggcccaagtcatatagtaagtgtcagtgctatgatttagagagtctggctccagagtcctcactcttaaccgaagcaggtagaaccaccaataccaaggcctgctgatccctccatccagaagtctgaacgcgcttccaagatgctagatccaggctggacttcccttagcctgcagaaatgacatttagatgagaagctgaaatcagctggccagggaaaccaaggtgtgagtccaaaaggtccaggctctgaaacagattccaggtttggggctttaggccagccactaggaatgccagaccacagccaaggggtctgcaaggtaaggaggaggctgatcctgcagggatccccctagctgctgaagcttcccctagctaccttctgtagggctcctgggtctcagcagtgggtgtgaaggaagctgtttgagggactgagctagcctgagaagtagagcctgggctgccaggacccctgggaccttgctaccccaatctcctcccttttcactgtactccccgtagcatcatgaggaaaggcttccagccccaccggcactgtgctagagtcctttcccagcacacaggcaggcagtggagaacaattgacttcttccaacctaggtgaggcctagctctggaactgagtatggggaactttaacttcacttgagaaaagctgtcataagttctagagctcagggctgttgcacagagaaaaatacaaagcagaaacctaataataaatatgcaatgaggacatagtgtgtgccagacacggggctccacgtgcattgtctgatcccgttctcaaacaactcagcgagggagagtctgttacttattctcatttcatagatgagaaaactgagagttagagagattcagtcatttgcccggagtcacagagctgatgagcaacggagcctgttcaaatccagacagtgaaactctggattccaaactcttaactaccccaccacactcacacacttatcctcattta

SEQ ID NO: 3136 - DNA, 4001 bp, Homo sapiens
cttgtgattttaacgttttcgctccccatggtgggaatagtatataaagaaaaccttccaactgcagaaagggcatttaaaagtctttttcataaataacgaatatcacagtccaagtaagagaacaccctgggaagatgatcattcttagttttccttccattttttttttctttttaaaaaggtccattcaacttgtcctccttgtgaaatggttgaaaaataagttcagcacttaaaagattccgtgaatttgttgttgttgttgttgtgcaaagaataaaagaaatcatgaacacctgcgaaagagtgggggagaaaggcatgtttaagagaatgtaacctaagggcagaggcgggcgactggcgccgggaggaagccacagtttgaacatttaaccaaacactcaaagattgggcaaaccctggcgtccagatgcaacacacacactcgcctcgacagcgcaaattaaacattaaaatagcagagactcaagggaaaaacttcccaacccaatctcctatttggatctccaacagcagtgctacaggcgccagtctgcttctcgtaacaattatttgattgaaaacagccctttagttaacagatagggaagtctgggatcccacatcacagggttgaaggcacagggtagcaatcctcaactagcccagagaatcccagaggactatagttttagggaaggaggatcactatggaatttgtggcggtaagattaattacagtggaggttagtacctcatagtaccagaggactcgtaggaagatccagggcattacatttgctacaaagccaatacacacgttcctcggccgccttcgtagtaagttattggcatcatttccttttaaaggaaaatgttctgtgatctcgagcacccaaagctacaagctccttcatgtctagtgagacaatgtagtacgggtaacaccgcgaagtaagcatgcatttaccaaatcagacattttatagatacacaagcaaaaacacatgcgcgcgcgcgcacacacaccgaggggcagtttacccacgggtggcacaagcaaacactcaccgcttattcagccacacagtgctttgctgtcatttgacattaactcagaagggaattcagaagcctggaaagaaagaggataaagagtacgaggttaagacaatgttaagtagaaagggtttttttttttttttttttttttttgtagtccacagaccagcaagttccattaaacacgtttatggtaacaattcagatttaaagacagacgcattaacatgtcagaacttactagcaatttcacgcacagctcaatctacagcagattctgaagaaaataaagttaaatagctcatacgaaagtcaccgtctgggctacggatctcctagtgacagcccagacgaccgcgggagtgtgcggcggcggggcggggaccccggagcaggtcttacctgcaaggacaggatgctgatatccgtgttgagggtggtcagcggcgtcctggacgcctggttctgcccgggtctctggtgatgcaggctgacaatagtgggatgcgagtccagggcgatctgcaggtccaagatgtagtcgatgacgtgctgcaggatttccatcttgctcaccttcttgttctgggggatgctgggcaccagctccttgagcttggagtagcagtcgttcatgttgtatagcaggctcatcgggtcgtccacaggggttttgctccgggagatgcccaggctgtggtccgacaggctgtttttcctaacggacctcacgggactgaaggctttcatgctgaccgcgagggaaggcgagaccgggagggagctggctgccctgaagctcaggccgccgctgccgcctgctgagctagctgcgcttggcaccgggctcggctcagaatgaagcccgagcccggcggggcggcttttatccgcactcgccggggccacacgctggagcttcccttcgtccccattggcggaaggtggcacgtctatcaagacgagcgggcgcttccattggtgggcgcgggcgcggggcgtgggcttggttcttccgcgttcgcagccaatccccgcggggtgggcggggcgcgagcccagctggggtggtaaatagagtacagtacagtaagtgcggggctggcggggggcggggggcggggagcggcgggcggggggcggggaggagggaggcgggaggagggagaggaggagggaggaggaagagaagggaagatgggggaggggaagggggaggggaagggggaggggaaggaggagggagaagggggcagaccctgggcgcctaaatatgcattcttaattctaattccaagcgcgcggcgggacccttgccctgggggtgttcccagaccaagccctacacaccttagagctgtcggcagctctaaaatcacagctacacgggcgagttcagcaccgcaggggggaagccacagttcactgcaacccatcggagggagagcgtgaggaaagatagaaagcatttcagaagaaagtgaaaacgcaaattaggttgtcactgaagagtcacgtttgtagagtgagttcgtctcttcagataaggaaaagttatgttaacacaaacaaaccacccacgcacgcattcgacgacaggcttagtgtgggcttttgcaacccggagcagcgcgggaggcattactgtaaactcaagaaaatgagtacttattgcaaaccatgcccaacctcaccggtcgctaaggagctctcacaggcagggcgctttcagggttccttttcaagaaggaggcagggctattataatgatcgtattaatcggaaataattaggagaatttgcatattgaaactacatttacatacactgcccttgaaaggctgccggtctgtgcccttccgtgtaggtggcaaagtaatgtgattaattatgcactaattgtgatttctggtgtcacattccaacacctagaggagttccaaagctttgtgacagataggtggccctagccattgatagacatcttcacactaaggaaaaaaaaatattctgtcatatgaggtttggaatcttttcagcactagtactgaatacgggttcaaggtttttttttttttttttggctgaaaatcttttaagaactcgttctttcagtctaagttttaaaaagtttgcagctatttacttaaataccttaattttcacataattgtagcttatctagaattctgttttgaccacagtgtgtcagtttcttgtttttgaaaatatttgctccagaaaacaatgaactagaaaactccaggaaaggcaatattcaaatcttatttactttctgcctcaatctctacctcctttgcatttcagaaagcggaaggggcaggcctagaagctgaaagaaaagctcgataatggggaaacagtgttttttccttcaattaatgattaatttctcagctggtggggccagcagtctctgaccgtcacgtgacagctatgcgccccatgacgcctctccagggaggcagagtgggtggcactgaggtggagctcaccttcctgaaattcagccccctcagtttggaggaaggaggtaaactgtttcctgtccagccagaagtttgcggagggccttccccaggccaggcaatgctgcctgcgactctgtccctgacagcgttggatgcaccgtatctcttctgatattaagtctggaagtgatttactatccgagtcctcccacagttcgagccttttgatgtactttgtgtgcatgtgtttctgtcacatacgtgccacagtggaacagattttgttttgacactattttggttcatgatgttatactttgactattttacaataatagccaatgtaaacaaacatctttgggattctcaaattattacttatgattcttggacattgcagctcttcgatactgacgcattcctagctttttccaaggacac

SEQ ID NO: 3137 - DNA, 4001 bp, Homo sapiens
gcaaggttggacgctttggaagaaatgaaactgtcccagcttgtccctagaggcagaagaagctctgagcctgctaaaagttatctattccttctaatgatgctctaatcgaaactcttttttaatccaacaacacagctgcaaattgcttttattctcttaaggactaaaaaagtcaagagaattgactttaaagaattattagataagaagcctaaaatagtctttcttgaaaaattgagctaaagtaatttggtctttaaataaaaatgtaatgattagtagacagtaagcgtctgtttcttgacaagcctggatgtatttccaatccccaggcccattttcacttcccaaattcgcaattctagaattcttcttactagtgtttaggagattcctttgggggaaccttctggaactgaactagactaaaagaaatgaacagaatggtgtggatgagtcaattacttcccatttgtaatgtcaagtataatttgtagtacagctgaaagcatatgattcagttcatgtttgattccactgtcacacctatccttgttttaaaacaaagcaaaaaaggaggcagtgaacttatctggttcctgataatacacttccatggccatgtccctatatagtatgatgcaacagtcatgacatggcaatttattcttgatggcaaatacagttaatagaggtcaaatattgtacctaaaatgtgaagactgatatctttttagttcactatttccttctcagttaaagcaactgtactctctgcagtaatctttctttatctcataatgcatacttcagacgcttcaggttttcctcacattacttagccatgaaatttttaccatcttttaactaaaacagtgaagctttattgttactaccatgtggaacataattgtatttcttctggatctgatttccatgggatgggcttgaggccccactggactgacttctccacctttgttgcccctcagattttgtctccaacccaatcccaacttcagaaggaagggctgttccaagaccagcaggcaccagctcatatgaagtagctgaatcctatctcctaacataattgtgcaattccagaaaataaacctggaataacaatacagagtagtttaatgaaaaaaaagagccatttaatattattttcatcaacctcaagtttttggccagattgttttttgccgagttcatgaactacaataatttctgggcaaaaaggatctcttgcagataagacactgtattaaaagaaacaaggaagctgttggaattcgttgttggaaatattcctcactcattcccttgcagtgcctcggcctgcccccaagaccagttaaacactgtactgccacatcaaagaaagtacagaagaagggggaaaatttgctaattctcaccttgacagtgaatagatttcttatcaccccagttcctcccagtcttgcagactcaactgaatgtagtttatcgcctaaaacaaaacaaggaataaaagtgttaacatacagaacactcacaggagaatttagctgtttttagtacctgccagacagcccagtttatccggtttaaagtacagtgctgagtgtactcggtgggacaaaggccaattttaggcccgcaggcactttccaaataaaggtcatgggagcacaatttatctctgcgtgtgcgagggcgtgcccccgcttcgccgcccgttagcaggtcttggggtttgcatgtccttgctcttggcctgcacccgtccttatggccgttgtgcaagagggctgcaatcaaggctggatcggtacctccttccaggtctccacgcccgcccctcccctcccctcccctcgctggtgctgggaccttttaaactccaggcacccggaactggcgggggtgtttcccccagccccctctcgccccgtgtggcctagcgacccctctgaaggccgctggagctccgcccctccacgccccctggcggacgcgagggatcggcttcaaggctattcctcgccgcctgagttgcctgcagacgcccgtctgcggcttacagccttctttgcatccagcccccagctgctgcacgttttcttcctcctacactccaggcttagtcttctacatgcattcttgcaacttccacccctcgattttccaacccaagtgcagacctgattttccccttgtcgttgcatccaacttcctcaccgcccagtttctccctcccaggcccaaaagcagaccttctgcatatccaagcatccagcatcccctccttcccttttcttttcccattctcaatacctggatttgttcccttctttgcacgcaggccttgactccctccacacccaagatctgcgcttttttcctttaccccattcctgccttctgcggaattagagccacccctccacagccagggaccggggccgccccttggagcctgaggttacctgccgggatgatatgctggcgaagagttggggcgccacagccgctcacaagctcagactcacaaccacagcctggcaatcccaaaccggactcccagtgcctccgcttctgaagtagactctgcagaaacccgggaccacagggtaggtccgagcttttcctcttcccggctttgtcccctcccaggccccgcctcctcagcccacctcccccagccccgcccccgacacgcctccaatcgccacacgccaattcccgtgggatgggcggagtcagcgagaggggcgtggccacagtcaaagatggagaatccatggtgccactttcccggtgatcccggtgggggaaggggttgccgcccggcagagattcagtcccgaatcccgacagcgaagagacttgtatgccacctgcaggccggggagcggggcgcgctggggctgcaccaccccgaactttgtaacaatctagagcaccacagagtgtttccaggtcggcacaaaagcgaacgggacagggcgccctgggcggcggcagcttggccggcccgctgcctagcgcgcccccgaggggcggtaatggaacgtacctttggctgaagaaagagtgctcccggccagcgcggggtcgcctagggggttccgcgctgcctaatgcaaaggatggaaaagttacagaagcaggtcctgacaccacctatgtctaggtctttagaaactccattgattgtttgcattagaagataatgaatgggattcttattattttcttttttaagacagggccttgctctgttgccctggctggagtgcagtggagcgatcaccgctcactgcagccttgacttcctgggctcaagagatcctcccacctcagccttccgagtagctgggattacaggtgcacacaatcacactcaactaatttttctttctttcttttcttttctttttcctttggtagagatgggtttcagcagcccaggctggtctcgaactcctggactcaagtgattggccctcctcggcctcccaaagtcctgggattacaagcgtgagccaccatgctcagttggcgggggattatctgtgatccaatgaagttggactagagatgtgaagccttagaaaacggtggattgaaaaaagaattttagtctcctccagagattatattttgtgtgttcattgctctcaaaaacatgaaaataaagagtattttatattgtgatttgtaggacaatagcatgcttgtatattgctgcccagaatttaatgctccaatatttatttatttatttatttatttatgagacagagtcttgccctgacaggctggtgcagtctcggctcactgcaacttccgcctcctgggttcaagtgattctcctctttcagcttcccaagtaactgggactacaggtgtgccaccatgctaagctaatttttgtatttagtagagacggtgttgcaccatgttggccaggttggtctcgaactcctgacctcaagtgatccgcc

SEQ ID NO: 3138 - DNA, 4001 bp, Homo sapiens
aagcatgtccctgtcatcttcttctggctgttcacaggcaagggtaagctgctagtgagtgggataggacaaactgtgcattgtcctaggaagacagcactttaaggatagggtgtgggggtagcatatacaaatcaatctgattctcagaaagtgcaaggttggacgctttggaagaaatgaaactgtcccagcttgtccctagaggcagaagaagctctgagcctgctaaaagttatctattccttctaatgatgctctaatcgaaactcttttttaatccaacaacacagctgcaaattgcttttattctcttaaggactaaaaaagtcaagagaattgactttaaagaattattagataagaagcctaaaatagtctttcttgaaaaattgagctaaagtaatttggtctttaaataaaaatgtaatgattagtagacagtaagcgtctgtttcttgacaagcctggatgtatttccaatccccaggcccattttcacttcccaaattcgcaattctagaattcttcttactagtgtttaggagattcctttgggggaaccttctggaactgaactagactaaaagaaatgaacagaatggtgtggatgagtcaattacttcccatttgtaatgtcaagtataatttgtagtacagctgaaagcatatgattcagttcatgtttgattccactgtcacacctatccttgttttaaaacaaagcaaaaaaggaggcagtgaacttatctggttcctgataatacacttccatggccatgtccctatatagtatgatgcaacagtcatgacatggcaatttattcttgatggcaaatacagttaatagaggtcaaatattgtacctaaaatgtgaagactgatatctttttagttcactatttccttctcagttaaagcaactgtactctctgcagtaatctttctttatctcataatgcatacttcagacgcttcaggttttcctcacattacttagccatgaaatttttaccatcttttaactaaaacagtgaagctttattgttactaccatgtggaacataattgtatttcttctggatctgatttccatgggatgggcttgaggccccactggactgacttctccacctttgttgcccctcagattttgtctccaacccaatcccaacttcagaaggaagggctgttccaagaccagcaggcaccagctcatatgaagtagctgaatcctatctcctaacataattgtgcaattccagaaaataaacctggaataacaatacagagtagtttaatgaaaaaaaagagccatttaatattattttcatcaacctcaagtttttggccagattgttttttgccgagttcatgaactacaataatttctgggcaaaaaggatctcttgcagataagacactgtattaaaagaaacaaggaagctgttggaattcgttgttggaaatattcctcactcattcccttgcagtgcctcggcctgcccccaagaccagttaaacactgtactgccacatcaaagaaagtacagaagaagggggaaaatttgctaattctcaccttgacagtgaatagatttcttatcaccccagttcctcccagtcttgcagactcaactgaatgtagtttatcgcctaaaacaaaacaaggaataaaagtgttaacatacagaacactcacaggagaatttagctgtttttagtacctgccagacagcccagtttatccggtttaaagtacagtgctgagtgtactcggtgggacaaaggccaattttaggcccgcaggcactttccaaataaaggtcatgggagcacaatttatctctgcgtgtgcgagggcgtgcccccgcttcgccgcccgttagcaggtcttggggtttgcatgtccttgctcttggcctgcacccgtccttatggccgttgtgcaagagggctgcaatcaaggctggatcggtacctccttccaggtctccacgcccgcccctcccctcccctcccctcgctggtgctgggaccttttaaactccaggcacccggaactggcgggggtgtttcccccagccccctctcgccccgtgtggcctagcgacccctctgaaggccgctggagctccgcccctccacgccccctggcggacgcgagggatcggcttcaaggctattcctcgccgcctgagttgcctgcagacgcccgtctgcggcttacagccttctttgcatccagcccccagctgctgcacgttttcttcctcctacactccaggcttagtcttctacatgcattcttgcaacttccacccctcgattttccaacccaagtgcagacctgattttccccttgtcgttgcatccaacttcctcaccgcccagtttctccctcccaggcccaaaagcagaccttctgcatatccaagcatccagcatcccctccttcccttttcttttcccattctcaatacctggatttgttcccttctttgcacgcaggccttgactccctccacacccaagatctgcgcttttttcctttaccccattcctgccttctgcggaattagagccacccctccacagccagggaccggggccgccccttggagcctgaggttacctgccgggatgatatgctggcgaagagttggggcgccacagccgctcacaagctcagactcacaaccacagcctggcaatcccaaaccggactcccagtgcctccgcttctgaagtagactctgcagaaacccgggaccacagggtaggtccgagcttttcctcttcccggctttgtcccctcccaggccccgcctcctcagcccacctcccccagccccgcccccgacacgcctccaatcgccacacgccaattcccgtgggatgggcggagtcagcgagaggggcgtggccacagtcaaagatggagaatccatggtgccactttcccggtgatcccggtgggggaaggggttgccgcccggcagagattcagtcccgaatcccgacagcgaagagacttgtatgccacctgcaggccggggagcggggcgcgctggggctgcaccaccccgaactttgtaacaatctagagcaccacagagtgtttccaggtcggcacaaaagcgaacgggacagggcgccctgggcggcggcagcttggccggcccgctgcctagcgcgcccccgaggggcggtaatggaacgtacctttggctgaagaaagagtgctcccggccagcgcggggtcgcctagggggttccgcgctgcctaatgcaaaggatggaaaagttacagaagcaggtcctgacaccacctatgtctaggtctttagaaactccattgattgtttgcattagaagataatgaatgggattcttattattttcttttttaagacagggccttgctctgttgccctggctggagtgcagtggagcgatcaccgctcactgcagccttgacttcctgggctcaagagatcctcccacctcagccttccgagtagctgggattacaggtgcacacaatcacactcaactaatttttctttctttcttttcttttctttttcctttggtagagatgggtttcagcagcccaggctggtctcgaactcctggactcaagtgattggccctcctcggcctcccaaagtcctgggattacaagcgtgagccaccatgctcagttggcgggggattatctgtgatccaatgaagttggactagagatgtgaagccttagaaaacggtggattgaaaaaagaattttagtctcctccagagattatattttgtgtgttcattgctctcaaaaacatgaaaataaagagtattttatattgtgatttgtaggacaatagcatgcttgtatattgctgcccagaatttaatgctccaatatttatttatttatttatttatttatgagacagagtcttgccctgacaggctggtgcagtctcggctcactgcaacttccg

SEQ ID NO: 3139 - DNA, 4001 bp, Homo sapiens
cagttaatagaggtcaaatattgtacctaaaatgtgaagactgatatctttttagttcactatttccttctcagttaaagcaactgtactctctgcagtaatctttctttatctcataatgcatacttcagacgcttcaggttttcctcacattacttagccatgaaatttttaccatcttttaactaaaacagtgaagctttattgttactaccatgtggaacataattgtatttcttctggatctgatttccatgggatgggcttgaggccccactggactgacttctccacctttgttgcccctcagattttgtctccaacccaatcccaacttcagaaggaagggctgttccaagaccagcaggcaccagctcatatgaagtagctgaatcctatctcctaacataattgtgcaattccagaaaataaacctggaataacaatacagagtagtttaatgaaaaaaaagagccatttaatattattttcatcaacctcaagtttttggccagattgttttttgccgagttcatgaactacaataatttctgggcaaaaaggatctcttgcagataagacactgtattaaaagaaacaaggaagctgttggaattcgttgttggaaatattcctcactcattcccttgcagtgcctcggcctgcccccaagaccagttaaacactgtactgccacatcaaagaaagtacagaagaagggggaaaatttgctaattctcaccttgacagtgaatagatttcttatcaccccagttcctcccagtcttgcagactcaactgaatgtagtttatcgcctaaaacaaaacaaggaataaaagtgttaacatacagaacactcacaggagaatttagctgtttttagtacctgccagacagcccagtttatccggtttaaagtacagtgctgagtgtactcggtgggacaaaggccaattttaggcccgcaggcactttccaaataaaggtcatgggagcacaatttatctctgcgtgtgcgagggcgtgcccccgcttcgccgcccgttagcaggtcttggggtttgcatgtccttgctcttggcctgcacccgtccttatggccgttgtgcaagagggctgcaatcaaggctggatcggtacctccttccaggtctccacgcccgcccctcccctcccctcccctcgctggtgctgggaccttttaaactccaggcacccggaactggcgggggtgtttcccccagccccctctcgccccgtgtggcctagcgacccctctgaaggccgctggagctccgcccctccacgccccctggcggacgcgagggatcggcttcaaggctattcctcgccgcctgagttgcctgcagacgcccgtctgcggcttacagccttctttgcatccagcccccagctgctgcacgttttcttcctcctacactccaggcttagtcttctacatgcattcttgcaacttccacccctcgattttccaacccaagtgcagacctgattttccccttgtcgttgcatccaacttcctcaccgcccagtttctccctcccaggcccaaaagcagaccttctgcatatccaagcatccagcatcccctccttcccttttcttttcccattctcaatacctggatttgttcccttctttgcacgcaggccttgactccctccacacccaagatctgcgcttttttcctttaccccattcctgccttctgcggaattagagccacccctccacagccagggaccggggccgccccttggagcctgaggttacctgccgggatgatatgctggcgaagagttggggcgccacagccgctcacaagctcagactcacaaccacagcctggcaatcccaaaccggactcccagtgcctccgcttctgaagtagactctgcagaaacccgggaccacagggtaggtccgagcttttcctcttcccggctttgtcccctcccaggccccgcctcctcagcccacctcccccagccccgcccccgacacgcctccaatcgccacacgccaattcccgtgggatgggcggagtcagcgagaggggcgtggccacagtcaaagatggagaatccatggtgccactttcccggtgatcccggtgggggaaggggttgccgcccggcagagattcagtcccgaatcccgacagcgaagagacttgtatgccacctgcaggccggggagcggggcgcgctggggctgcaccaccccgaactttgtaacaatctagagcaccacagagtgtttccaggtcggcacaaaagcgaacgggacagggcgccctgggcggcggcagcttggccggcccgctgcctagcgcgcccccgaggggcggtaatggaacgtacctttggctgaagaaagagtgctcccggccagcgcggggtcgcctagggggttccgcgctgcctaatgcaaaggatggaaaagttacagaagcaggtcctgacaccacctatgtctaggtctttagaaactccattgattgtttgcattagaagataatgaatgggattcttattattttcttttttaagacagggccttgctctgttgccctggctggagtgcagtggagcgatcaccgctcactgcagccttgacttcctgggctcaagagatcctcccacctcagccttccgagtagctgggattacaggtgcacacaatcacactcaactaatttttctttctttcttttcttttctttttcctttggtagagatgggtttcagcagcccaggctggtctcgaactcctggactcaagtgattggccctcctcggcctcccaaagtcctgggattacaagcgtgagccaccatgctcagttggcgggggattatctgtgatccaatgaagttggactagagatgtgaagccttagaaaacggtggattgaaaaaagaattttagtctcctccagagattatattttgtgtgttcattgctctcaaaaacatgaaaataaagagtattttatattgtgatttgtaggacaatagcatgcttgtatattgctgcccagaatttaatgctccaatatttatttatttatttatttatttatgagacagagtcttgccctgacaggctggtgcagtctcggctcactgcaacttccgcctcctgggttcaagtgattctcctctttcagcttcccaagtaactgggactacaggtgtgccaccatgctaagctaatttttgtatttagtagagacggtgttgcaccatgttggccaggttggtctcgaactcctgacctcaagtgatccgcctgcctcggcctcccaaagtgctggaattacaggcgtgagccaccgtgcccagcctccaaaatttattttaaaaaattatctctaacattgaattagtacattattctttgaagataaactgatctacgtggtactactcaaggtgcactttggacaccagagggcactggtatttttcccgagagaaaagaaaaaagcatacaccttgtcaacttggtttttgaggtggcttaagggatattggcagccacctccatttattcctgtagaactgtttagagaggtatatgagctttttgaagggggtctgaccctccacacctgtgggtatttctcatcaggtggagccgagagactgagaaaagaaataagacacagagacaaagtatatagaaagaacagtgggcccaggagactggcgctcaatgtgcaaggacccgcaccagcgctggtctctgagttccctcagtatttattgatcactatttttactatcttggcgaggggagtgtggcagggcaacagggtgatggtggggagaaggtcagcaggaaacatgtgagcaaaggaatctgtatcatgaataagttcaaggaaaggtactacgcctggatgtacacataggctagatttatgtttcactttacacaaacatctcagtgtagcaaagagtaacagagcagta

SEQ ID NO: 3140 - DNA, 4001 bp, Homo sapiens
ttttagtcatggctttatttgtctacatgtcttccaaaacaagacttttgacttacgagcctgaataagtcacattcaaacaggtcagcatttatacacatcacagtacatcttcacttatcaaaaaataattcatatcacattcaatgtaaagtcatcagtaaaattcgccctgtcaaaatgctaccttaagaaaaatgagtttcttcactaacatgaaaaactgaaactagcaacacattctttcaatgaattgtttctaaattttgattctcaaagaatgttgaaactttgattaaagaaaaagggtgtgtgtgtgtgtgtgtgtgtgtgtgtgtgtgtgattgcaatttacccatttgggctaagactaaatggcacaaagtgtaatgtagggcaaagattggaaaactttttctctaaaatgccagataataaatatttttggctttaagggcacacagtctccatccaattgcctttggagtagaaaagcagccacaagcaatatgtaaacaaacgagcatgactgtgttccaataaaactttatgaacactgaaaattaaaaattgaaaaatctgaagaccattcttagcctgtgggcctgaaaaaaacagtagcaggcttgatttagcccatgggccgtagtttactaacccctgctccatggaactacattaaataagaaaaacattcaacactatcacaagctaaattcttagctctgccactgtttttcctgggagaccttggacaaattatttaacctgcctcaggtttctcatctgtaaaatggagttaataacattaggagcctcagtgggttactctgaacatgaactgtagtaatacattttgaaaatgataccaactgcacatagtaagtgttcaataaaagttacctgttaatacacattacgattctagagttaactcctttttacttcagtgaaaacattagaaaagtagttcttttgtgtttaaatttttaaaattgtcttaaagtgcctagatgttgtcttctcaaaggaagaaactagatttgcccaaagaggtcaagcacatttggaaaggggcaaacgcacaaggaagcctgctttgcaaaatctgcctaaaaggctagctccatctgaacagacacctacccggtttctgtcttcaattgtcaacagttcctcctccatgcacttatccaagacgtctctaactagaagcttgtccaccagagtgggctgaaggaggttcagcagttggagatattcatcatgagcgttctcaaacgatggagagggcaagtccgtgagctcagggttcatgtagcgggcggccagagggctgccggttctccggagggcctccacgaattcccgagtccaaccaaggtgccagactcccttctccaaggtgctcagcagcagttcaactgcctgcatgttcccggaggtggcgactgtcctctgaatctgctccttcacctctgcaggcagaaaggtcaggtagtccagcacaggctccacctggatgtacattttcaccctggccctgaagcacgagatgagatagcggaaattctcgtctgtggaatacccattcgacatctttctttctcagagaagggagagggttctcccaagcagatggtgctgttgtctgcgggacaggtgaaatgtgcgtgccgctgtccgctgcccacttagagaagcagggtctaccgctctgtgcctgacaatgacgaggttgtccacagggctctcaggccggcgcgcggggctgcactcgcacctgggcaggtgggcaggcgggcaggtgggcagcggggcggcgcgcggggccgcggcaggcaggtgcggccggcaggcgcggcactttggactctgcggtgtgcgcctggggtcccggaccggggcgatcctgctgcacactcgggtaggagctttgagtccagctttctgtcaggcagttcttacagagtttgcctgactttggtttctgtttcgattctcttctcaggactttgtaaacgtaatctgcctggcggggagggagtttcctcagggagacgccaccttttggtcggggcgggtgaagagaggaggcctttggttaaggacaccgcgggaaacagaaaaggaaagcgaattctctctgacaccaagaccaacgctctagcaaagctcctccggcggatattttgttttcccagcaggttctgccttaacaataaggtcctttgtaggccaaaatgtgcagggcataaaagcatgtgatttgggactttccaaaggggaagtgaacagaaactgccacagacccggacgtgaacagggagttaccctcggctggtgaatgtaggcaggcctggctgagggtggtgagactgcgagggacaggtgagagatgaagctcagaagacatctttgcagagatgtggagaagacaggaggaagtccttcctaaaataaacctgacctcctgtgggttcccaaacactaacttgtttccctgggaatttggaggtgggttcgaaaaagtgagtaacaataaacagttaactttactgcctcatatttagattgctggtatttatgcagctttgaccaggacctggtaacagatgtggatggacttgaaccaccaactcagcttagaaggaagccaagacttaaagtttcctagatcccagcttgtaagttccctatattctttaatatacaactttcctttaataaaacaaaacaaaaaaatcccccaacaacttatttttgatatagctgccattcttttcttggattcaatacagcaagttttggctggagcagctaggaacttaattagcaactaatgtaccaacttgtagtaaacatcaacatttgtctatgtcatgagagaaaaaaaacatattcacactgaaaaatggcagcttcattttggtacagaagccacataaatgtgagtccttaaggttactactcattctgaaggcattctgtagccacatgtgactgtgggtggtaggcacatacgcaccataactagaatctcatggtccagaattatataaaggatggagagatcatttaggttatcaaagagacatatttaggaaaaataatctgttagcaaagtacattcaataaagtctgtgtaggccaggaaaacctgatagtgctttgaacaggataatagaagtacagagtcttggtgagtgtttactaggggcatacaaaatatccaaatgagcactttatggtaacatgtcttattttattctctaattatcttatgtagcaaggctttttctacccctgaaggattgtaagctgcttgaagaagggatatatttacatagtaactagtacactactcacaactggtgggctcttgatgacatctctcctgggagttgtatttgagttgaccatagcagctggcataatgttaaatacactgaaagttgaagtaaatgaaaccttgggcttgcaggtaggcctgatttatactgttcttttctgtttcttcacagaaccctactcctttttcacttaattttgggagatgaccttgtacccagatagaggataatccaattagatgtttctacaaaagcactcaaattattaattttaagtattgggtctatgaaaatatcttttaaggctgttgcaaaaacatactcctatcccccagctgccagtgggttttattcaacatgttaaagcacaaactaacaaaccaaaaaacattctttttcctggcacttatccttctgtttcttggtttcaaacatgggggaatgagaaggggttgctgactgaatatggggaaccagttaatgttattttcttcataccacttaattgttgctctggaagagaaaggatcaaatgtttggtatttgacctgttctcaaataataaacatttaaaccaaagatatttaaatatttggcattcaaattatatcattcattgtatcatctagtcatttaaaatatgtttat

SEQ ID NO: 3141 - DNA, 4001 bp, Homo sapiens
tgacctcgggtgatctgcctgcctcggcctcccaaagagcttggtttacaggcatgaaccactgcgcctggcctagaaccatgattaaatccatgtatgtgtaaatccataaaccataatcccaatttctttattaaggtaccccagtacatattacacactcagttatggaacatcttatttatttttaagacacagcctcactctgtcacccaggctggagtgcagtggtgtgatcacgtctcactgcagcctcgacctcctgggctcaggagatcctcccacttcagtgaccccagcagctgggcctacaggtgcttgccaccacacgaggctatttaaaaaaaattttttttttttggacaaagtctcactcttgtcccccaggctggagtgcagtggcacgatctcggctcactgcaacctccacctcccgggttcaagcgattctccttcctcagcctcctgagtagctgggattacaggcggctgctgccacgcccggctaatttttgcatttttagtagagatggggtttcaccatgttggccaggctggacttgaactcctgacctcaggtgatccgcccgcctcggcctcccaaagtacagggattacaggtgtgagccaccgcacctggtcaaaatttttttgtagaggtcttggaatcttgggctcaagtgatcctcccaccttggcctcccaaattgctgggattacaggtgtgagccactgggcctggccagacatcttattcttattagctttgtattattctgtcctttgaattttgaatgtcctttcctcttgtctatcaatttttcacactgcttttcagtttacaatgctcttttgtgtatattactctatataactcttccccaagtcccctaaagttgctattagtactcatgttttttcaaatgaagaagttggtgagtgctccgagacattgtataataaaggctaaagttagagatatcaggtcatttgtttaaagtactggtggccagtctgggcaacatggggaaacctcgtctctacaaaaaacaaaaacaaaaacaaacaaagaaacaaaaaattacccgggcgtgctagcgcacgtctgtaatcccagctacttgggaggctatggcaggaaaatcccttgaacccgggaggcggaggttgcagtgagatcgagccactgcactccagcctgggcaacagagcaaaactctgtctcaaatagttaaataaagtagtggttgacctgaaataaggacaaggtaagaaattttaaaaagaaaataagaaagtagtggtggagctaggacttaaattctggtgtgctaactccaaagcccaccctttcttcaccatgtttcagggctcctcccctagtgcccagcctctcctgaatcagaatacacggttcggtctttgcactcccccttcagggcttgcacctaaggcgcttatttaattatgggcacatgcatactcgctgcttacatgtgcacctcaccctctaatacgagcctcctgaagggagggacataagtcgggtggtttgggattcctacgaaccccagcatggggcctgtacacaactgatgtgaatgaaatgtaaggaaagctacaagtccttagccctgcatctcgcctcctggacgctgtatcgacaggccaagatccagatcatcgctatatcccttacagccttctgcacacagtaggaggtcaacatcattaaacttcagttcccccacttttcttggaacataaagcataagggggagggactggcacgcaattcctcacctgagggctcagcagggtcctcaggtgcttcaagtgcatgacgcacacctgtctttcagatgctcctagacagcgacaactcccgtggttacctggacaacccgccacgcagccgcagcgacaggcactgacgcttatgcgaccggagcgcaacacgcgtcgcaaggtcacacgtaactttgcggcgaagcaaacagaacgtgcgcaagcgcggtgagatctagggcgggcccttgagagggcttcatgaatgttctccttgaccaatcccgtcgccgcatgcaaactcaagaccaagccccgcccacaagccttcagccagccccaggtcctacgtcatagcggtccgtctcgctcttcgatgtacctgactttctgagtgcactctcttaatcctcacaactctggagggaagcagggcggtttccatgataggccttctgcagttgacggaattgtacccaaataggttacatgatttgcacgggatcgcaaggctaataacgatagctaacgatgaatactcagtatgtgtctgccaggtactgtgtaaagtattgtacgtgcatttatatcatttaatcccaaaaccaccttttgaaggggatagcgttattattagtctcattttacataacaggagactcagggcacttgctcaaactaacacagccagcgaaggacttggaactggagttcaacccagagttagtagctttaaacagcttttatgttccttctcaactcctagctcgctctctccatgccacgatactataacctgtcacattcccatcccaataaatgacatttattctcagaatctggaagatgagtgttttggaactagctgccaaagaaacgtaaggtaccctacttcctaattgggtaatggtgggttaaagactgctgtttacattggaatgtttttatggttcagtttgttgttgttgttgttttgagacagagtttcactcttgttgcccaggctggactgcaatggcgcgatcttggctcactgcaacctctgcctcccgggttcaagagattctcctgcctcagcctcccaagtagctgggattacaggcatgtgccaccacgcccgaccaattttgtatttttagtagagacagggtttctccatgttggtcaggctggtctcaaactcccgacctcaggtgatttgcccgccttggcctcccaaaatgctgggattacaggcgtgagccaccgttctcggcctgtggttcagttttgagggcagacctgacttggctcacccgataggttgtcttgtgatacctggggttagagattggttaagtagaaaagagactgacttgttgatctttggagtcccgttcagaatttttggcctatcttctaacataccagagagattgaaatgcagaaaggagttattcataagcctgctctgaaatgatccaaagttgggaagatctgtaactctccaggaagtgtaacatatgctctccagacagactgtgggtccagaagccttcccccacagtggtttgcaagtgtcaacaggtgtttgtctcatggccaccaaccaccccttagaaaataggaaagagcagaggacagcccctattttcacaggaaacaagtaggcctcagagctcaaatgagaattattttgacaggggagtcccaacccctcagttttattttcagaatcctcctctggatatggtggcagagcatgaatataaactcatttatgaattacagttattactgactttgactgactaaacagagacagagatgaaagggaatgcaaaagagggaagaacagacacaggaacacataggataggagcatgtggcaccaaggaatccatgagtgtagctgtcctttcattagtccccaagacactgcttagtccttttctgaccattagcccagggttgatggaggagtcagaagagtaagtggtgaggagctgtgctgtcgatgcaagcagtgaagataaaaaggctactaccctctcatatgatatgtattagtattcagtggtgcaggaacttatatctttctcttctctttttccccttctcacccaacaaagcaaaagaatctggggttagttttctatacctcttcttcctggccctatcctagggtggggtattatcacaccttgcaatgctcctgtcaagtaggtgatggt

SEQ ID NO: 3142 - DNA, 4001 bp, Homo sapiens
gcaccccgcagtgaaaggatttcgtgggggctttttccttttattgttactttctaagagaagcaggagggaagggttaacttccaggcaggctagggaaggaagcgagccgagggagaagaaagggactgagaggctccactcagaggaagccctaacttgctctgtactccagagcaaaatgtgctagagaaacagaagaaagatttcaactctgacccctaattccattctcaaggagaacagggaaaaaaacaatagccgaccaggagaagggaggcgggttggtgcatggggtggggggcttacgaagacctcagaagctaaaaagcaagcattcttcttttcactttttctttttaagtttgagaaacttaagactcacttgctttttcaacaacagcagcaggcagtggacacatttcaccactgtctccaagaggaaagaaaataattacagcttcctcccgaccactggggcaggaggctttcgtaattaaaaaaaaaaaaaagtaacctccttagagcctggttgtgtccctcaaataactttttgggagggatgagggcccctgaacaaagaatatcgggtcctcattctatcctacaggaaagggtccctcaatttaagataggggcgggggtggggggtggcaacgcatctctcctgcctttcgatctggggcccagatgcgaaaccgcacagcctggctgcccccgtccagggaatgcagccggcgatcgggcttaagttacattgattcagctgctaggagacccctcgcctaccaaatgcctcccttttatttttccattcaacgtggtagcaagagccctgctcgttccctatggagaaatagtagtggtggttttcatttttctcctaagcgactcatcctacaaagtaccaagtcctttctttccaactcacaaccccagtagaaggaagggccccttgggacgccggtgcctcctcctagctccctctcctcttccaaggttcctggtgtcactggcaccccgcagcctccgcctcccagcagcgatcccaccaggacccttgggtcctcaagcagtgccccaaataagattcgagttcctactcccatggatctgaccaccggcccccttctcagcaaatccctcctccagaatagaagtctgggtccgttccacgcgggtaaaactatggcagcagggatgcctttcctctccccattcatccccaccaaatgagtcgccagggctcttccacttgctctaactccagttcccctccccgggcctgacttccgcgtcccgctagcaacagtcccccttgatttggtccaaggtctcggctctgccgcccctaaaaccgtccgtaaggtccagccgcccgtcgggcttctccgctgccctccaagtttctcccaactacttgttccagaccgcgttacctgcaacctgctccgggctggcgccatactcggcgtcccggcgcttctcacaagtgccctcgcccatgaccagcgcctgcaggggcagctcggagcccgggtggggatagcagcgcagcccctggccgcagcgcggggtgtagacgccgcacgcctcgccctccagccgggcgcacaccgagcagcagccgcagcccggctcccggacgagctccgcgcatggcatgcgggcgcctccggccactgcggccaccgcggcgggcggcgcaaccggcgggggcccgcaggcggccaggcgctcgggtgtgcagggcgggcagcggaacagcacctccgcgcgcgccccgccgccgccgccactcgcgcccagtagcagcagcagcagcggcagcagcggcggcggcggcagcggcagcgcggggcagcccactctcggcagcatgctggcggtcggcagcgcggcgcggcgggcgagcgagcgagcgggcgggcgggcaggtggcacggccctgcgagcgcgggagccgcctcctccgcttcttcctcctccctcgccgccgcagccgggtcctaaagggccggcttctccccgccccctgccttctcccctcccccttttggagaccactcccttcccccccgacactccctcgcgccggcaagtgagtgcgcgcacgcccgctcgcccacctccgcgttggctgcgggctctgggggttccctgctcttcccgggccccgtccctccgcactcttctggcctgactatgactcctgaaggagaatacggataactcgcgggtttgggtaggaccggcgtggcggtggagaagagcgcgtgcttttgtctgctctcagttcagttcgcgaggacttcgtttgcgcgcttcccctgtggccggcactgggctaaccgctggggaacacaaaagacataaggctccgttttgaccttcaagtagatttcagtcggctcataccaactccttccatcctggggtatcacccaccactgacacgtggcttggaacaatgacttcttgttgggtgggtcctgcggagtttcagacccgtctagaccaagctagacccaaacagccccgaatggtcttagtgactattgcagttttccaaacctgggagctcgtgactacaacctatgagaaccctaagtgccccgcaaaacctgcccccttcgtctgcagaccccctcccttctccgcccgctaaaataatcccttagcaccctgggcccccacctacaaatctcgaggcacttgttgcaggacagatcccagaacactcagttgcaggggtcttggagaggtcagatcagctctccaggtgtgacagacccgctctggggtaaggccatttatggctgtcttcaataatgcagatggacaagcatgacctcctttcattgttctgtttgatttactgagtcatctacccaagctgcccccaacccccatcattccaggctggactcagccataatcaaccatctcctggggtgtgaccctaacaaagacccctgtcagagagattccttgggtgacaggtggaccattaagctgcctccaccgcaggtttcatctccctatacctcagcgcccctcttccccccagacccctccactctggctctttctgacttcaaggctcagagcctgtttgattcagttcaacagctagttaacccaatggccacctggctctgaaggtgacctagatgcctccaggaaggcaagtacctggtcttaagacgccaagctgggaagagttatcgggaaagactttggtaagataaaaaataaataaataaatgtttatcagaggctttgaagaaaagaaatattttggtagagaggtgatgtggtggttgaggaaaggggagtttcttgggtgagtcggagctgaaattgaagcttgtaattctaccagaggaaatgggcggttagcaagggcacaggcagagggaccacctgaagcaaaaacacagaaatggggccgggcgcggtggctcacacctgtaattccagcactttgggaggccgaggcaggtggatcacctgagatcaggagttcaagaccagcctggccaaccgtggccaacatggtgaaatcccatctctactaaaaatacaaaaaatagccaggcacggtgatgcacgcctgtagtcccagcaacttgggaggctgaggcaggagaatcgcttgaacccaggaggtggaagttgcagtgagccaagatcgcaccactgcactccagcctgggtgacagagtaagaatcagtctcaaaacacacacacacacacacacacacacacacagagagagagagagagagagagagagagagagagagagagagaaatgggaaaatgagtttggggatcagaaagtccacttcagccagagtgcaggatgcttgcagagagcagcaggggaggcaggaaatccagttgactgtggcgctttggcttaatatgctgggcagtaaggatacagcatccatgtttgagcagaggaagagatggacagagctggacttctgga

SEQ ID NO: 3143 - DNA, 4001 bp, Homo sapiens
cccttttgcctcccagccctatgtccacctttcatcctaggtaaaatctgaattggagagggggaaaaggaattagattcagaaacgaacaccaggcacagaataccaaacccttcctttctactcttccccacccccaccccgcacccccgcactcctaaagtatttttttcccttcctgggataaaataaaagtcattttgcagttaaatatgttttaccatctaccacaggcaatcatcttcaataaaaagcaatggttatgcacatgggaggggcttcagggctcccacccgaaaggcattagctaccaaggatgtggggtgtttgtggtgtgtgtgtaggggtggagggatagaaacgtctggaggcacgggggtggaggggccaagagggacaaaggtggaattagctcagaagataggtaatgcctctctctccaggccgcaattaaaataatattttaacaaaagagattttttttccaagttcagaaaaaaacctatgcggggcgcgaggggggtggaggagggagttgataatgtaacatacactctttcagactgtagatagggtaccaggggatttggaccttgtgaccgaataagagctcagaatcagtattcggacagagtagggggagggggcgggcaacgtgtgggtaggaggaaggagaaagagcgaaagctgggatagactcggctagacagttcccccgggtagcaggatcctccagggctccaattccggggtgcaaggaccctccccgactactcccgagctgcaccccagctcgaagccacttgctgcgcaaagcgcgcgggcccagccggtctcgtgtcccccgcccgtgcgccgcgtaactgactggcacactgagcgcgctcaccgatcttgacttgctcgcggtagctcttttcgttgaggcaaaccccgcggccgtgcagcagggcgtgcagcggcttctcctcgtcctgccgggggaggcagcgcagcccctgggcgcagcgctcggtgtagacgccgcacgactgcccctcggccagggcgcaggtcatgcagcagccgcagcccggctccttgaccagctcgcagcccagggggctgggggggcacatggagagggctttctcgtcgcagggctcgcagtgcacgaaggagcccaggctctgggccggccccgcataggcggccagcagcaggaggaccgcggtgagcaacaccatcttctcttagtcgccccctttacctcggggtggggcaggagagcgagagtgcagggataaaggggccaagagggcccccggagatttttttgtttttgtttttgttttaaaatttctggcaggtagagcaggtgccctcccccagacacttgcaaaaatgtagagagaggtggagggctggggtgcctgcgagcaggtcccagttgcaagaattaaagccttgcaacaggttgggggaagcagggcagcgccaggtgcacgcagtgagcggaggccggagaaaccctcaagcctgagcgggtcagaattataggggaaaaaaagccacaaaattgttcacccccaagcaaccaccgaaataatgagatcggatgcagtggagatggcgttgggggtgggagagaaaaatggatttatctttaaaatttttgcttaaaatctaaaatacaccccgctttctaaccctcagctgccagcggtgcgcggcgccgcagaacaggtaagaggcgttggctgcagccgagagggtgggagaaaatgttgaaatcaagaaattaaaaaacaaaaacaaaaacaaaaaaaccccaaaccctaacacctcttttctcccactttgccacctcctcttcgaaattcgcaggttctacgcgaagtccggagaagggtgaaaacggaggaggggtaatgaaaaggagcaaaaaagggaaaaagcccacactgctttgcagctctttcctagctcttttcccctgcagaagtttccaaagagactacggggctccgggagagcaggcgcttttaaatagccggcccctggctgccagccagtttgtagctgcaatttgagcttcccaacacccaactcaggcaaggatgccaaggagctttgcagtacaaactcacacggggtgggggtggggagaggccttctagacacaagggggctccccttcgctccctgaacagcgccctcctcccctctgaacagcgccctcctccccccggaatgtaagaaaggggcaagggggacaggctggggctaccgagaatggggaggaggtggaggggccagtggaagacagagttcttcggagcagggtgaacacaatgaggagagtaacttcgtctccccttccctcctatcctttaagtagtcaaggcacaggctgaagggagacgtattttcttattagccaactggatataccgtgcccaagaaatcttcctaagcttctgcaattgactgtatgctggtgtctgtttccatgtggggtgtgtgtgtgtgtgtgtttgggggacaggtagtgtagaatggccagtgatgtctggtgagctaaatttaaaaaagaagaaaaaattgaatttctcccctaaaagtctggagaagaggatttaatcagggggtttcagtactcatgatgaagaggtgaccagttgccttcagctgcgttggccagggaggttctctctctctttctctctctctgtgtgtgtgtgtgtatgtgtgtgtgttgtgtatctgcaggaatggacattcatacaacagcattattgagagcagtgagttgcagagatggacactttggaggaaatgctaagtctgaaaaccttgcatggtggcctaaagtgtccttgtgtgtggggttcttagagggaagaaaggtggattggagtgacacttccctctctgtcactttgcagaggtatttctattgggcagggccacatccctggagggagtgggtggcagagtagctggaggagaccttgtgataggttgacaggttagttggtgcttataggcacatcccaggaatatgagctgacagggccacaggacctgcttggaagaggtcctgaccaggaaccgaatcatgccactagaacctctttaataaaatgaaagaaaactaaggccttgaaataggaaggtggtggttttagctttttctgaaattgacctgagtgagccatgagcctcacaggcaagtcagagagaaatgaccaatgtcactgcccctgctgggtggacttggtgtgggctgttacaccttttacattgtgcttcctcccttgagaagtattctaactttcctttggagaaggggctgcatttcatgaagtttgccactagactgcacccttatctatgataagaattctttctggaggactgctttcaagaaaatattttttcttgctcgttcagttcaggagcatctcactttatgccgttaacacccccagatcctgatctctcttctcacttatctatttgccgaaaggcacattttaaaacaaggttaacgtctaaagttatgtctttgcctgtattgccaaagggggtttagccacgtggtggctgggagagggaggagcattgtgtgtaatgattaaaacaaaaaatagcagcaaggctcatcttaatttcttcttttctcagtctgagggcttggtaaggtaggaacaaatcaatattcaaaactttggtggaaatattttagaagtgagggaaatcatgtgttattttgtcatttgtgtcaagttcagactacaagagtggcagcagaatgtgtgcagtatgttctcttccctgctcctatttctttctgcacacccttagcagctcagcctgcctcaggcacactggtagcttttaagatgattgggggaaattgtggtactccttccaaagaaacatgagttgcctcgttccagtcaccctgtattctgagagagatggcctctagtgacacctctttttgtgtagccgac

SEQ ID NO: 3144 - DNA, 4001 bp, Homo sapiens
aggaactccataaaccaagcttctgatctcagggagccagctccaccatcctcctcacgtggagttggggtagagccgcgccctgggggaaggaccgaagcggtcatccttggttgctgcctcctggtgtgcctgggtcctgagagcccaagagactgtgcagctgactctgagaagaagctggggccagggccttggtctgaggggaaaggcccttccaccagtcctcgactctgagactctgagattcgaggcgccaacaagtgtgggcagcccaagtctcaacctacccccaccctgcagagcccgggcctcacagacccttggactcagccttcctaggagccaatagcagctacaacccagggcctcgcaggtcctcgctggtgcacagcctggctgggggtgcttactgcccagggagggagctccgcttgctccttcgtagaccctgccgtcaggcttctagccccgcacctatgcccgcctgcagccctggttccccgcctctctccctcactgccaccgccccctctcgggtccagagcccgggcgtgcgctgtcaatgattgcccagcccgtggcccggatccttatctgcattcctcggcgcccggcccggcccggccaccagccaaccttcggccccgacactggccggccagccccggcgccagggtgcatgctgagggccctgagtctagctgctcttcccaacggatctagaaagccaggggcctgctttcagggggaagcctcgggagaccccgaaggaagggggtgaaggtctctcccctcgcggacctggctgctgggaaggaatttgcgcctctaagcttgggtggagcgcgggtcctactccagcatgcagagactagcgtcagccctggtccctgcctccctcggcatctcagcccctcttttccactccttcccgtccccaccaccaagcccaggaatcccctaagctcagtcccagagcccgaaggccccaataacccacccttccaccgcagtagcacccctcagctctccggacagacacgtgggctcgctgggcaggttccttttcccacctccgcctcccgattcaactcttcctcgctgttcttaaccccagacccagccgggacgctgctcctggaaggggcagcccgtagaaccaagagcgcacagggaggaaaggccgtggtgaccctacgcacccagagattctttgcctcaggggtgccgaaaagtttcaaaatgaaaggggcacagctgtgcagaaggttaggccgggagggactgcgtgggtcctggaggcgcaggaggcagccgggtagaggtacctccgggtgcagcgtctggctgagctgccagtactttggggcagaggagccgccgccaacctgctgggctgtggggcttggcagcggggagctcttctagcagtctcctccgggcttggggatgccgacactcctgcctggacccctggccagcccatcttgggcaggaggcagcggggcttggcgagaggggcaggtgccagggagcgtgccagccagtcgagaaaatgtgccagggggtgggtagggccgggcaggtggccgtgcttcggtggcggcgcgctggtagggcggatcgcgctcacctgggtcatgaggcggtcggcgcctgtgttctcctcgtccttgaagatgatgtctggattgtaattgggggtgagctccttgaagcgctcggagctgcgagcgatcttgccttcatagcgtccgctggcgcccagggtcttctcgggcacattggggctgaactgcttgtaggcgagcggcacgagtttgcgtggcggtcgccggcggctgcccaccacccgacccggcccgcagccccatgccgccggcaccaccagcagcagcaacaggaccaggcagaagtgcagtcggggccggagccgggcgggagacatggccggggagcccgggggagcggcgggcgaggtctcctggtgggctgatgggcaggcgcgtcgacgggagcgctgcgggggctcaggcgtccgggtggctccggggggctccaggcgggggcgccatgggcggcgtggtgcggccagggccggcgggactcaagtgcggggcgggggcccagggcccgagctggtggcggcgcgctgtccccctcggcgcctcgactctgagctgccgggctcgccggccgccaataaataggccggcccgtttgttttggcaacgcggcggcggcggggggcggcgggcggcggggctgcgggccgccgggctgggctgggctggccgggccggcgggctgcagggccccgcggttagcaccccggcccggcggtcaggcggctcgggcggagcgggagctgctgccgtctgcggcgcagcccggggccgagtgagaggggaaatggaagagatccgggctcgggccccgcgcagaccgcaccctacccatgtccctgcctcctgtgcgctcgacagcgaacctgcagcaagggcagcacagcctcctccccctcgggcgggcggccccggcactagccagccctcgtcccgctcgcgcctccgccgcgcgtccgcccgcccgctgccctctgcgccccctgcgctgcccgagtttgccctccccgcctggacgcgccccaccccgccctggcctcgcctaccggctcttcgcggctctggggtgccccgccaggcgcaaacctcccggacaggagctgccacccccacggagaccgcaacccacggcgcggccggacgcgaggggcggggggcagtggccggaccgcacagccgcctacggtgtcccctgcggggaagcaaacccaaaaggcaggaggccactcataacctggtgccccaccctggcccgggcgacgcgccctttcagcttggtggagctgggttctgtatcaacctggtgcacatcccacagcctgcctgtcggtgtcaaactggggatggggagtctagccttttgaagagtcaaatagggggttttaagttggaaacactgttgaaagtgacaatatgaagttgcaaagggataggtcaatatgcagagaagggtagctaaaatggtgacgtcaacagaataccgaggaaccccgactgaccatgttaaagaggggcagcaaagatctcagtaacgggggcttggtatgaatgccaaaatgatgcaaagccaccggaactgctaaataattacttggttctatattacacatctaaaagagcagagaatatgtagaaacaactaggaacgtgaacatgtgttatgtgtttttatatgacattcgagaaagctgaatgaattaggatcccttctgccaaaacaagtaaaggcaagtgtgttaaaaagcaaacaaaaaacatcaccaccacaacaccaaactatatgatttgactgtaatagattctacaaatccaataaaggtagaaatgaaaagatgagaaataaaaagacttaaaaattctcactcaaatgctattaatacaataggtaccattttattggtacttatattcctgaacatggtagttattagatattattgtactatgtcttctacttgcattatctaatttaaactcgaaacggccaaaggagctattactgtccacattttacgaatgaagatattgaagttcagagaagatgaacaacttgctagtggctgaaaagcagggattgaagcccatgactctggcccagccccagtttttgcccatgcaggtgcattgtccctctgtgcaggaccagtccactcaacaccactgggttcggggctgaagtagctgttcacagatttactcacactctctggatcggttttataaacacaaattcaggattggatgagactcaagagagtgcttaatctaagcgcttgatattacagaaaaggaaactgaggcccacagaaagaaatttaggattgctccactaggagtggagtggtgcctgcaatgtggaaacaaaatggatcg

SEQ ID NO: 3145 - DNA, 4001 bp, Homo sapiens
agctaaattattcacaatgagccatttctgtattgatcgccaagtatatttagccctggctcctggaatttctccattacttactggaaaacaggcagcttcacttcttgtctccaaaaccacttcccttctccctcccctccccttcttcaccaccacactcccttaccccccccccaaaaaaaaacttttatttctttctttatggaataatcagatcaaattcccaactcagtcactacatagcacttaaatttcaacctgctgtactgttatcacattcttttaaattatgattacataaggctttaaagaaagagatccgtaaagtttaaaagaggagcagtttcttcggatattttacaaatgagcttatctctttaaaaatgtacacatttaacacacacatattaaaaagaaagaaacgtcagggagaagcgaaagaaggctgccccatcaatgaaatggttattaaccctcagagaaggaaagaaggaaaaagaaaaaggagaaagagaaacgaaatgtacatacaaaagaaattgtcctttgattaaaaaagattcatcaccatttccagctctgtcgggagatctcagcttcttctaacccctcaaagaggaggtgacaatgtcgggctgaagataaacggagggagaaagaaagaagttttttgtgtttcccccttctctctttccctcccttgccccctccaagccaagccccctgcagagttcaaggggaggaggaaggaaaagcactttacaggtgggtcattccaagcccaaatccagcaaacagatcggctgataaacaaaaccaagaaatgagagagaagaacacccccctcctcctcctcctcctcctcgtcctcctcctcctcctccttccacccctccccctcgtcccttagggatggtctagtaggaaaagtcactcaggaatggcaccacgtactttcaggaaagaggaaaaaaaagagagagagagaggtcagtcagtgctatagcaatgcgattaacaagagaaaaaacttgatccaccggttccttaagaatcgaccaaaagctaagacaagaaaactgaaagaaaagggggggggggcgggtagaggggagggacagtcaggcagaacccagctaggaacccaggccaacttcacaggactgtttttggcccttggcaaaaaagaaaaaaaataaataaatcttaattccatctctttcgcccatactagaacctgtcaaagtgatttaactgctgcctgtttacatgtgtcataccagggtttttggtttttttttttttttaattccaacaggatctggatattaccttctatctggacagcttcaatttattccagcctacccaatctttcttcttggaattcaagttaaaacaaagcaaaacaagtccaaattcatgacagctatagagatgagaactgattaatcgattaacatcccagaaacagattacaaggaggggacgataaattaaggcagaggacatcatcttcaacccgattccctgagcgtcctttacaaaaatcattaccctaatcagaaccacaatccatccctcccagagaaaaatacctatattattattattattactggttaacagcaacaagtcatttgatcacatcacagtgcaaaacgagatgctatataattacacttaactttgaaaacactcccccctttgcaaatcatacacatatttatatataatctatgaatcagaagacaaaacaagagctgttcttcaccacgcaaaagccaagcggagatttacctcagcagtgcatgcagtaaaataatcccatcacccttttgtttgtgtttactgttaatgtgtcctctgtctttctttctttcctgtgcctaacgtgtgtttgtgcactgcagttggtggtggaaactaaggcagtggatctgtagctaagggtaatcctgtttttacttcctccatcttcagcgaggagcagggttagcccgggacagctggtcaaaccccgagaaaccgatccggtggagcccgagcacatctcccccgccggccgggctcgcgcagacgcccgcgggcggagggcgggctggcggcggctgcggcggcggcggcggcgggcggctggcggcgggcagcggagccccgggcgcgggcgagcggacgtgcgtgcgcgcgcgtgcgtgtgtgcggggcccgagcgcctgtgcgtgtgtgtatgagagcgcgtgtgcgcgcgcgcgcgggctggcgggcgcgtgtgcgcgtgtctgcgcgctaagccgctcggcgcgctcggcaatcgattacaggacaagtgctgccccggaggctccgcgacgcgcgcactccctcgcgcccacccgcgcgcccggccgcgtcgcccccagcccgttggtccccggactgcggaccccgcccccgacgggggccaggtaacccgcttccgagtgtgccacggcgacccccatctcccctccccgtgtcataataaatctcacgttttctgccggctggaggcttggagcggtgaggtgacgttcatttcggccgcgtgaagttttctttcaaactgggattggtggggaggccgggggaagggagcggggcggcgatcttggcgccctgcgcggagtccgggagccgcgtcccggccgagtcggggagtgtgcgtggagcctcccacctactggtctccgccggcaactctgcggccccatttcggaaagcgcaccgcattgaccgggacctgaagcgggataagaggggtcctggggaatagactgagaaagacattcatgtctgagatgaagctcaactattactattttgaaagtgctttaacagtgcaagtttaaaaactaaagtgttgacttgctttttctcccccggggcatgtgccacgtcttccaaagtcaaaggaacggatgagtacaaaaagttgctacccttgaagtgttacctatcactatcaaccacagcttgtttatttggaaagaacttaagtgaaccgtcaagagaaaaacaaatgcatattctttctacaaatagtagcatttagtatctttcctgaccacatttgcgaaaagagggaatagagacttctataattaaagggaaaaggaaaatgaaaggagctgaaaatagtgaactgtgtagtctggatggctgaaatttgaaaacacatgaaattatcaggactgccaaacggtgttcctgagaaaccatatcacagattgtgaagaaaatcaatgctagaagagtcggaacaggcaccgtactcttactcctttgaagaatcccagaaatagttgttgaggttttttttttctgctgagaaaaaaagatatattggaaattaagtcatcaacagtaccttaagcaccactctgtaggtaattttggatagtgtcttttctttacattttgatatagggaaggaattaattcacatcgacacaaacgaagtaatggataccatataacttgtgtgatactgtagcttttataatgaattacttcttgaaagttttttttcctatacaatgtattattaaacaattgtaacgatagtctctttttgtttaactatagaaaatggtagatagtgtggtacagcaaacaagattaacaaattttcgttggagagaaattatttgggctcaggcttgcaataacattatgatgattttaagaaaaattgcagttcctgtgagttatatattgataaggcagatttttaaacacttagttgctaaaattagttttcctaaagtcgtatttgggaaagtctgagtagagaaccagtaagtcactctaatcatcccaacagagagcaaatattttagtcttaaattacctcaaaaaatctgtatgtcgtttataatatgtaaatgcacaatatgtaaaggataacataagttctcgaaattgtcataagtccttcctaaaaactgaacctaagtgtttaggtatctgtactgtta

SEQ ID NO: 3146 - DNA, 4001 bp, Homo sapiens
aaattataaaaagtaggaaagtgttgaactgctagctactattgatttaagtacactacttaacttagtatgtttctatatttccttcttatttcacttcagtgctgtcattttctcaaactcattcaaaggtgaaattgtgaacagagagaaaaaagagtacagaattctcaataaagtttcataatccaggaattaaaacacaggtaatacaaaggcaactttattaccaataacaaatcaatgaaaactaatacttacacgttatatagccatcaatagcctctgtttccatagtcaaagtgcaatgctgcaaaacaaaagattatacccttaatacaatgattcctttcagtatctgccattaaattcttaacttatttgaagctccaagcagttagtccatgttgctgctgccacctgtgcccagaaacatacacagtgtactgtatgtgctcatttgcaagtcactgaactctttctgcaaatgatctgattcctgctggagataggataggaaagataagtgtgctgtgagatgggctagagcaaaaagggaatgactctcttaatcaaaatttattgggtttaagaaaaaatagggggtatagctcaaatgtgtcagctttaactgggatttaagtgttttaccattcactacttcccacaatcacactgcagtttgaggacttccccagtatacagatagctctattcacaattgttgcaagttggttcatcatgttctaatagggagggggaggacaaacaaacataagaaaacaaaacaaaacaaaaaacttagtgcccaacggtgtcttgaagatttctacagcagttggccaactccctgacttgtattgacattttaacctaccccaagttctgtgtaagcacctgttcaatgtaaccttaatttcctgccagaccatgcttggacacaaatgccaagcctacttaatacagtctgattttgaaaatttcataaactttggttgtgctagagagaatcatttaaaaaaaaaaaaaactttgggcaattattctcatgcacaaacgccacacaacagaacataattctcagaaacaaaagtaaactgtatgagatgacaccccctagctttgattcacataatgaaaagatcgataatctaactgtattctgtggggaaaaaagtttaagaattgacaagtcctgagaagatttttacttttttttccccctttggccttggtcctttttgcctttagtttcaaaactctcactgcaccagcagctaaattattcacaatgagccatttctgtattgatcgccaagtatatttagccctggctcctggaatttctccattacttactggaaaacaggcagcttcacttcttgtctccaaaaccacttcccttctccctcccctccccttcttcaccaccacactcccttaccccccccccaaaaaaaaacttttatttctttctttatggaataatcagatcaaattcccaactcagtcactacatagcacttaaatttcaacctgctgtactgttatcacattcttttaaattatgattacataaggctttaaagaaagagatccgtaaagtttaaaagaggagcagtttcttcggatattttacaaatgagcttatctctttaaaaatgtacacatttaacacacacatattaaaaagaaagaaacgtcagggagaagcgaaagaaggctgccccatcaatgaaatggttattaaccctcagagaaggaaagaaggaaaaagaaaaaggagaaagagaaacgaaatgtacatacaaaagaaattgtcctttgattaaaaaagattcatcaccatttccagctctgtcgggagatctcagcttcttctaacccctcaaagaggaggtgacaatgtcgggctgaagataaacggagggagaaagaaagaagttttttgtgtttcccccttctctctttccctcccttgccccctccaagccaagccccctgcagagttcaaggggaggaggaaggaaaagcactttacaggtgggtcattccaagcccaaatccagcaaacagatcggctgataaacaaaaccaagaaatgagagagaagaacacccccctcctcctcctcctcctcctcgtcctcctcctcctcctccttccacccctccccctcgtcccttagggatggtctagtaggaaaagtcactcaggaatggcaccacgtactttcaggaaagaggaaaaaaaagagagagagagaggtcagtcagtgctatagcaatgcgattaacaagagaaaaaacttgatccaccggttccttaagaatcgaccaaaagctaagacaagaaaactgaaagaaaagggggggggggcgggtagaggggagggacagtcaggcagaacccagctaggaacccaggccaacttcacaggactgtttttggcccttggcaaaaaagaaaaaaaataaataaatcttaattccatctctttcgcccatactagaacctgtcaaagtgatttaactgctgcctgtttacatgtgtcataccagggtttttggtttttttttttttttaattccaacaggatctggatattaccttctatctggacagcttcaatttattccagcctacccaatctttcttcttggaattcaagttaaaacaaagcaaaacaagtccaaattcatgacagctatagagatgagaactgattaatcgattaacatcccagaaacagattacaaggaggggacgataaattaaggcagaggacatcatcttcaacccgattccctgagcgtcctttacaaaaatcattaccctaatcagaaccacaatccatccctcccagagaaaaatacctatattattattattattactggttaacagcaacaagtcatttgatcacatcacagtgcaaaacgagatgctatataattacacttaactttgaaaacactcccccctttgcaaatcatacacatatttatatataatctatgaatcagaagacaaaacaagagctgttcttcaccacgcaaaagccaagcggagatttacctcagcagtgcatgcagtaaaataatcccatcacccttttgtttgtgtttactgttaatgtgtcctctgtctttctttctttcctgtgcctaacgtgtgtttgtgcactgcagttggtggtggaaactaaggcagtggatctgtagctaagggtaatcctgtttttacttcctccatcttcagcgaggagcagggttagcccgggacagctggtcaaaccccgagaaaccgatccggtggagcccgagcacatctcccccgccggccgggctcgcgcagacgcccgcgggcggagggcgggctggcggcggctgcggcggcggcggcggcgggcggctggcggcgggcagcggagccccgggcgcgggcgagcggacgtgcgtgcgcgcgcgtgcgtgtgtgcggggcccgagcgcctgtgcgtgtgtgtatgagagcgcgtgtgcgcgcgcgcgcgggctggcgggcgcgtgtgcgcgtgtctgcgcgctaagccgctcggcgcgctcggcaatcgattacaggacaagtgctgccccggaggctccgcgacgcgcgcactccctcgcgcccacccgcgcgcccggccgcgtcgcccccagcccgttggtccccggactgcggaccccgcccccgacgggggccaggtaacccgcttccgagtgtgccacggcgacccccatctcccctccccgtgtcataataaatctcacgttttctgccggctggaggcttggagcggtgaggtgacgttcatttcggccgcgtgaagttttctttcaaactgggattggtggggaggccgggggaagggagcggggcggcgatcttggcgccctgcgcggagtccgggagccgcgtcccggccgagtcggggagtgtgcgtggagcctcccacctactggtctccgccggcaactctg

SEQ ID NO: 3147 - DNA, 4001 bp, Homo sapiens
ccttgtttatgggtcccaccctgagaaactgacctttctctaaaagtaattcacagaaacacataatgtacagggaaagagccatttcaaagctctttctaatgaggaacctgagatttgaggaagtgaaatggccagcctcagattacagctattcacaaggacacacatgaatcaatgtagatgcctcaatataaatcactcattagcaacacatacaatcgagcaactcctgagacaaaatgcctggatgaaaatcataacaccagtttttttttaatataatttttcttctacagtgttccatgcatagtcgttttactcagcctgtgagatgataaaacaaccaaatgcaaagaggagaaaatgatcttggggcataacatacacacacacacacacgcttaaactctaacaaacaaaataatttgtgtggaatctggcttctcatctgtaaggccaagaaaatcaatgccacctcatagtccttgtcacacaagtgtctgttgttagccttatgcttccccccaaatctgcctatgcctgtgctacctgggccaccctccccacttatcccagatgccaggtccctagagtcctttcaacttggctcagtatttgccttctcaaggaagctctccaactgcaacagccccaaatggcacatgcctatgtccaagcccgtctccatcactctgcaggtgtttccatcactcctggactagctcccactctctggtgaggtccctgaaggcagggaccctgccttttcttttttttcttttttttttttgagatagagtctcactctgtcgcccaggctggagtgcagtggcacaatctctgctcactgcaacctctgcctcccaggttcaagggattctcctgcctcagcctcccgagtagctgggattacagatgcatgccaccatgcctggctaattttctgtatttttagtagagacggggtttcaccatgttagccaggatggtctcgatctcctgacctcatgatccgcccacctcagcctcccaagtgctgggatttagaccctgccttttcaatccacattcctaggccttagccttagttctcagcctttggatgtatatttgtgcagggagagggaaaacactgtccccagaacctgcacaaacccaattccccaaatttacccctcctagcccatccaaggccctgaggttgagaggtgtgctcccaatagcagcactgtgtatgacacaaaatcagtatttgcaaagggtcttgagaatgaagcaagggaagtcagtgaaatgaatacaataatcttggatctctgtatctggctgcaattgacacctcattaatttgtctgataactgcgatgcaaggtgctgggcattttaacttcccaaggctgggcagaaaaaagacaaaggctctggaatcagaaaaactgtaggtgtggatctgggatctactacttagtagctggatactcttgggtaaatgacggaattcctcctcccttttattaaagcataataatagttcctatttcatgtggcccttaggaggattaagtgaaaataagatatctaaaaattttctacagtgtcaggcacacagtaagcacttaaaaaatgacaactattgttatcatttatttcagtcgttctcacctctccagaaaataattggggatgtcttaatttctaaaactatactttcagagaaagacaggatgctgtctcatcaattattcacacgtattcacacacacactatctctctctctctcttaattgatcttgttttgagaatccctccccggatggtggtcttcccttcctctggggggtggggaggggatgcgggtggcagcggagcccacccttaccttcagagaggcgtccccgaggctggggcgggggcggcagctcctccttcacgccaggtcgcgactgcggaggccaagttcagaaagtaggtgagaagcagcgatctccgcctcctgactaccgtggaaagtgaaagagaggtgtgattaaagagataaggcacccagagagggctacaaaaaaaaaaaaaaagaagaagaaggaaaaaaagtaggaacagaaagaagaatgtcaggcgtctggcagctcctggctgctaaccccggccggtggaggctgcaggtgggcactgcccgcggtcgggcgaagctccgggtccgggagtgtagcggtctggggcgctctcagtctggggcgctccctggcgtagaatcctccctgactcggaggtcccggtctggggaccctccggtccgggtgctcctcgcagccgtgctccaggaccggctcctccacccagacgccccgcgtggagttaccggagctactggatcgcggggtccaaaggttgctgctggaaaacccagcgccttgcccttttcccgcggacggcgtgggccccaggcgtctggcgcttcctgcccagccgcgcggcgcgggtcccgggaaaacccgggctgtagccgggtgacctgcggggccggaagggggcgcgcccgggccgctcgcaagcaccctgcaggccgcggttcacagcagaggatgccaggagggaggaccgctggccgcagcggccgcccggctcttcagaggaagaggaggggagggctgagggtggaagaggggtccccgggggatgccgaaggtgagaggggctccgcgtctcaagtacacaaatgcgccccaggctttttgctttcccagaaggatgggagttcactatagggaagtaatagagaggggtgcaattgttgaagttttaattttttttaaggaggccaaaggggaatgtgtgtttctagatttttattttgtggcagaactgttatttaaccaaaggaaaagggaaacccatagccgacaggcaaaatgttcaattggacaatgattttaattctttttacccaatttagataattcaccacataataaataaaaatatgtaattatctcaataaatgcaaataaaagcatctggcaaaattcaacaccctttctgaattaataacgatcagaaaaccgagagtagaaatgatctttcttaatctgataaagaacatctataagaaacctacaggtgacctcataatagtgaaacattttactttttcctaagattagtaatgagataaggattttggctcccacctgggacaactgctttgcaacaagtgaagaaataaaaataaaattagaaagcataaagattgagaagaaagaattaaaactactggttttaacagagagcataattatatgtagaccaacttttgaaatctacaaaaaaaaaaactactggaaatattaagtttatcaagatcatggaatataaaaatcaatagcaattctatatattagagatggaaacttgaaaagtgaagtttgttaaaaatgccatttaccatagcatttaaaaatcaaaataccaaagtataaattcattggataatatatgagatatctcctgtgaaaactacaaaatattgctaacagagatgaaacatctaagtaataaagggatataccacgtttacggattggaagacttaagacatctattctccacactgtatatttttagactctatatattacagaatctatatatttaatacaattcaatccaaatcccaggaaaatttttcaaagaaattaagaagctgtttctaaaattcatatgaaaatgcaaataatctaggattgtccggacagagacggagttttgctcttcttgcccaggctggagtgagtgcaatgacgcgatctcggctcactgcaacctccgcctcccgggttcaagcgattctcctgcctcagccgcccgagtagctgggattacaggcatgcactatcacgcctggctacttttgtatttttagtagagacagggtttctccgtgttggtcaggctggttttgaactctcgacctcaggtgatccacccatttcagcctccc

SEQ ID NO: 3148 - DNA, 4001 bp, Homo sapiens
cttacctgcaaaataaaatgtctggactgtatcagtagttcctccaccttagaatgagggaatcagaatttctgatgtttaagtcgggatatttgtaatttttaaaaaagctccctgacttgtaaatcataagatcagatggttgctaagatcctcccagctctaccatcccgcaatttatgtctaaatgtccaagcctatagcaaattagttaccacgatgcccagcagtctccagcactcaggaatgtccgccaaccttgagatgacagatactgcctactgatgcacccacccaccaactggcctcagacctccagctgcctggggctgattgcaggctgcagctatcactctgggacagtgtttctcaaatcatcttgattataagaatcacccgaaacccttattacaaatgcagatttttgggcttcctgaggacttattaaatcagattctcaaggagaagaacaatggaacctacattataaacaagtgtcagagccaccacgctcatctgggagacacttttgggaaaccctgctcagggataagcatagagcttggggaggtgggttagtgctgagttacagtagctgttgccagcattgtaggcaactgaccaacatgagcccaagaccattctggaagtctcatttatgtgggacaacacacccacactgtgtggcttgcttgttaatatctaccttttgaaggccatctaatgtctaagtgatgtcttccatgctgccgtcactaaaatgcttcaccgaatcggaaggagccaccaaaatgcagagtacatcatttattgagcactgggcaacttaagccaaagcaagcttcagactctgcttatgggaataaaataatgtggcactcatttactttctgtaaagtgaagcggggtgctgtctttctcatattacagatggacaaccaaggctcacattgcttggaatggcagtgcccattctcaatgataatcacatacctggtaagtattagaagggggattcatatccaggtgtagagggtctcaaagcttctgatttccccatcaccatatgttgtccttcacagaaggaattgagagcccaacagcgctgggagaatctacagaatcgcttctttatcaattttccagatgcgttttttgagaatcacatatgttttttcagaggatgaagatttccctttcagttggtcaaggctacaccttcagctgtctctggcagaaataatgaactaaactttacccacaaaactttttggtgagaaacgggggagagagaggaaagtgctggagaaagcagtgtcaacagggatctgagacccagggagagaaatgtcaccatcaaaggcagacttaaactactttacacagagaacacctgcagacagagatttggtctcgtgtaatagtgacagtatttaatttaactaatatcattatgattctcagatgctccatggtggctttagaccccattgtctagggataacagaaaatgaagctgtagtacctgccatcaaagatgttacagttaagtttaaatgggcattcaaatttggcaaatatcttgaatctctctgctcttagcccttcctgtaaaatgctcaaagcactttaaacgggtttattttataaccatcagtttttttaagtgaagactccgtatatatggagatgtaaattttgttagtaaataacccattttgttattctaaaatatttcttgaaaagtaattgtattagcaactcattttttaaattatttaagctattctcccaacttatgttttctggttaggaaatctagtgaaaaaaaagaagtactgctctcttacctttatttcctgctcttaagacataaaaaaaagaggaaggaacttcaagtccttatttcagtaactgccagcttttgtatctgaacgaaaatatgtgaaaatatccattttcaaagggttctactatatttcttcctatccagagagatacctggagaagacacaatagccacgttacaccagctcaaaaataaaggattataactggaggaaaaaggaaaaccttattttgtaaatgaccatggacattgtgaaatggatggtcatacagaggaaaatcaaataaactacctctttcagtaggaagtgctctgaagaagaagcatctcaaactcttctctgaccaacctccttgatgagataaagtttgtggttgggtttagttgaaagagtgagtaagctggtttcctttacaggaatttcctgtaaagaatattaactttcaactcaatttctcaactgtgggttttggttttcttcttgtaaaactaatctctaaaagtgtgacctttgagataaacactaaagcctattttgtgattaactttctaattttgaaaaagaaaaattatgtctccaacaccaattttataaagcaataatttattaatacataaaggaaaatacatttaaagtctaaagttacttgagtttttatgttcctattgagagatagtctcagaatataacatataattgaaaactccattgttcctttgatagagcaactgaaaccatttaatacttcaaaaactctgagaccacaatagttgtaatgagttttgtctagaaaccatcttggtgaagtctagataacatcctccgtcaagagtctagtattctaataaaggtaaagctggcacagctgagcacatcaaagctccaggctgcttctacacatatgtagagaataacatgaaatacaaatgaaaactaaatttactttggtatgaaagcaaaataagtgtttacctgaggtgagggtaggaggatacaagaagaattagtaactgcagacaggaaggagccccaaaaatgtatccaccactggtcatgagtctacctaggattccaagaggatgtgagggtttgttccaagcctattccaacagtggtaacaaggagcagtgaaacagacactccaggcatgtgatgcttcaggtttacaatgtcatgtggcaacaggcccagtagtaagaacaagggcaggagacccgggaagttttggagaaatgaggttgaatgaatgaaaaaggctaataataaggtgttgtttttggtaagtgttcaataaccattgaatggaactatattcaagtgaattggggtgtggaagctgtccttgtgaagtttcagagatcttgatgcagacctcaaaactgaatctaaagttattgtataagccatgcttgcattgctataaagaaatatccgagaccaggtaatttctaagaaaagtggtttaattggctcatggttctgcaggccacacagaaagcagagcggcatcttttcctggggaagccttaggaagcttccaatcatggcagaaggcaaaaggggagcagtcacatcacatggtgaaagcaggtgtgagaaacgggtggatgcaacacacttttaaactaccagatctcactcgctatcgtgtggacaacaccaaagggatggtgccaaaccatcatgagaaacctgaccccatggtcagatcacctcccaccacgccccacctccaacactggaaattacaatttaacgtgagatttgtgcaggaactaatatacaaactatttcagctatttagttgcctcctaaagtgaatttgatcactttaatagagtttgaacagggcttacaggagatggaaagtcttgctgtagacattgtggagctagtctctaaaaatggctgccatcaattcttccaccaactcctcaccttttcccatttacttccatgtgcattttgtttctcacatcaagagataaaatgtgttttctctgtccttgaatctagcctggctttatggttcacttttgatgaaaagaacacagtggaagtgacactgttgccagttgcagaccagtttttaaaagatcttcagcttccgattcctcttttgggagccagacaccaggtaacaagcccaaa

SEQ ID NO: 3149 - DNA, 4001 bp, Homo sapiens
aatggaccagtaaaacccattcttatatcagggcatgtgatctcaacagaggctgtgtctaagttgatgctgatattcatgtagggctcagcagacctcaaaaataatttttctaaaatggcggtctccctgccaatgtaatctcagtttaacatgctgaatgcttagtttttctgggtcttctctgaacctgctctgacttcaggactagtacacatctctacaacctctgccggcctgcccccatgctggccactgttatgcctagctggattctggtgagccttgaaaccctcattaaatcacaagagataaatcttattccttacctgtaacagttcttcaggtcttcaaacatgtctggaactttggccatcttgacttctgcaacagagaacaccagccaccatcagctcagccagcctctaatccagatatctgtgaggggagcccctcctctttgtgcttcctgaaaactttgttgaatgacttagtccacattcagcattttctccatcttctagctcctttgaattagtttgctatgtacctgtctcctttattagatcgtaaacttcttttagaatgttttatttatgttggtattccttatgtgcccaacctaatgtattgccagaacaggcattcaatcaatgaaagtttgaagaggttacaaaaacaccacaagaataaggtatttgccttacacagaggtaagagagagacagagttggaaattttcaattttctcctaataattttggatagtagagattccctcccatgagaagcctcagttgtattcacccatgccctcataggaaactagttctgctgtccctcagtataacgaatcagtccttatcagcaaaatgagagaatcattttctgaaatctgactgtaattctaggtcacataccaaaccagggagggacaagaaaagaaaggagaggctgtagctttagagaaggcaatgtgagagaaaacagccaaagagaaaaacaacaacagaaaatactttaatagccagagatgtgaggacaatacctttgctgactcaaacgccaatgaaatgactccctctctggctggcagcttaagcctgagtcagtcttcttcgccttttgtaattgtcttaagtaggcgtggctacgtggctacaagtgcgtcgtcaaaacggggaatttacagggaagaattcagttttgtatttttctatgttcattcaactcgatactggctaaaatagtgaaagatggcatagctgatattattgttgtttgcagatattccagaagttattgatttggttcatttattcacccctttgctttataagatgacaaacatgtagtcttagaaaaagggaagcgcgggaaacttatcaagtttctaggaggaagggagaaatcgtgaaatccgaagtcaaggggctagatttggagaggaatttattaataataatagttctaatagtagctgtagttgtgttctggctgaatttgttgattgtgctccagggtgaattggcagaatacttggcagctcctggcaacttttgagggaaaatgagccatcttttctgaagagggaagtttgcttgattaaggcataaatcacctcagagtttggggtgacaagctcctggttagggcagggtagagaagagaacagtggtatttgagcacaaagaagtcttgatcctcttactcttctgaatattgtcaacacatttcctatagaggggatggagcttcaggagagaactctccaccctggccctgttacagtaaagtagccctctaccaaggaccagagagaagcctggtcttctgtaggatatgcccaaggtgtgtcttctgtagaagaaggtgtgtgcaagccccgggaggtatgcgtaaggcctcagccagaagccagtggctaagtttgggaatggagattgggagaaaggaaggcatggatttttacatatgagccttcaatggtgttgcctggttactattattaaagaatttctcagcttttataattcctgtggccagcctagttcaggtggtagaacaccagactcttagcaaatgaatgttttgggttcccagttggagtttaagccatgtatattttaaatagaggaaatgaactaggtgtgatggcatgcccctgtagtcccagctattcaggaggctgaggcaggacaatcacttgaggcccagagttttagtccagtgtgggcaacatagtgaagcccccatctctaaaaaataataaacgcaaaaaagcatggatctgggaggaaagcagcttgtgtgagttggataaagtattccctctgttcctgtttaattgtaaataatggggttggttaggtgtcataaggtctattgcaggtgcaaaatctcttattctgatttaatgccagtctaattctcctggtcatagacctggtgctataatagttataacaggagccacagaaataaccacacttggatgtaagcaatgtaagtgtagcaccagactagggtagaagcttgggtgtctaaggatgaatcctgaagcaacagtgatgccagccaactggctacatttctgcttaccttggttcctctttaggcaacacagaaatgttaatcctgattaaccctctcctcctgagaatcttgtgagggctattgctaaggaacaattgcaaagcacattgtgaatgtgagctgctatggagatgcaactaaacaaaaataatgacaatgctaatgatggcttcagtcactcaagaacctgtatagtcatcattataatgcctcagttcaccaaagaaaatatagttcttatgaaaatactggcttgaaagcttcaacagggataacattttcaggtgaaggccaccattgaaagcctgaagatatttagcttctgggagcaatgcataccatctctttggtaatccaggaaaaaaaccctggttccaccaacataggcaatacctatcctggtcccatcctcactcctctgttgtaaataattccccaaaggtggttgttgaatttttcaaagagaacttggttgagaaacagctaacttgggttagaatatcacccaaccttttccttcacatgatcttcttgtaaattgatttttaaaggaaaactagggtgggtgaggttcagagagaggtgggtccttgcattgttttggggagcccgcttttctgggactgtgaacaacagtcacctcttctagggaagggacagtggaacgtactgggcagggctctactgggtagatagtggaacatactgggcaggcctgtggtgtgtgcgttgggagccatcctgtgacagggactttgggtggcttcaggcacccacctctcgactctgaggaggcctcaggaaacccttaatgagtcactgtcatctaaatcatttaggaaaaaaaaattattgtgcacttatcctatgccatgggttttgctaggaatcagcagtttttccccatgatccacaaaatcagatatgcaaggtgagatgatctatgttggtgggtgactggatatgttttataagattggagcttgtgggtccaaagaatcactgtgatgcgtttcatgtgacaattgttttatagtttacctgcactatctcactgcctcctcactgcacctacaagaattagctgatactatcctctttcacagctgaggacccttgaagaggttaagtgaccaacccaagatcacaagactgatgaaaccagtgcttgaactcaagcttctgattccgagtccaatcttctctttccactgcataaagatactcgagtctcttatcaccaccaacaccaagtgatggcttataaagatcatccttagggtctttccccctcaaacgtgctatcattcagtaactctaggatccttgttaaaaaaaaaaaaaaaacgggggttgcggagaagggattgaaatatctcctctccctgtcttcacctcctctgatg

SEQ ID NO: 3150 - DNA, 4001 bp, Homo sapiens
ctgcctcccaacctgcacaactgacctagctaggctgatggctgggccacctaggaaggctactgagcatcatataaaacagaagggacagcaggaatataacatggctctttgtaaggatgagtctgaaaaatgaccatttgctgcccaaatgcccttagctacaactgaaaatatttcagaactggaggttgcaggatgctggaatctcagagatcatccagctcagccctttatttttcagatgaggtccaaagcgggtaaaatgacttgtcaaggtcaaacagcaagtgaatggttttctttcaagtctcaattcatctttttgtttatatcatctatgtcttgttgttataagcttcaccccaggtagcaaaaaactattctactcaaaaggggtagacatatgttagttctcaagatcatctcttggtttcagagtttaactcaagtgattggcataggctgaatccatctcttaaaaggataatcaaatttatgttgaagacttggttgtcttcctactatgaaatgggaaacattatcactactcctcccctgtcaccaccaagtgtggccaccaccaccaacgttagtgagtgactgtggtgatatgatgaccaagtggccaggtcagcaagtggtgcagcctgtgtctcactggaagaggttaaagtctttctaaaacaaaataccatggcatcaaagtggcccagaactcccttctttgagctttccctgtgttagagcccttccttgggttgggagttaaacccatagtcttaccttcatctgtttagggccatcagcttcaaagaacaagtcatcctcattgccactgtaataaaaacagggacatgtctcaattatgtcttctaaacaggtttatttttccttccctgtgtacaagacttgactgttcataagaaactgcaaacagcctgcctctcaaagctgcctgaaacacctggcaagtttcacagtgatatgcgcagaacagtccagaaggcagattctaggcctggcaggtgggcaccctgggtgctccctgttggatcttgaggcctaacctctagcccagcagagtcagctaaaatctgagctctccctctccctccaagccacactttgcaaagggattccttgtattgtgggcttggagtcttttctccccatttgcctctgcaggaagcccttgcaacaacacatctggatagcctccaggtcccaaggctggagggacttgtaatgggaaagtagtctttaaatcagatttacttggcaccctgtttgccactgaaagaggcaatttaggggaaaaatctggtctccaagcacagataacactctactcttgaaagaggagacctgctcatgttactggtctcagcgtctccactgacctgtaataagccatcatttcactggcgagctcaggtacttctgccatggctgcttcagacacctgtgtaaaaaggagaaaatgagtgacttccccatgacggctacgttcatgtgtgatttctctcagcatccagtgcatggcagtcatgcaaagaaatgatctctgagtaaatgaatgaatgtgtgaaagagaagtcctttgggtctagagaaaagcatttgctaaaccaaaccccaactagcaatgtattggctaggagagctggagcagaggctttgacactaacctttagggtgtcagctgttagataagcagtatccattcccagaatatttcccgagtcataagcattatattacacctggcatttttgcaaaaagctgagagagggaggcagagagggaaggagagggagagacagagaaagaaagagagagagagagagaatatgcatacacacaaagaggcagagagacagagagactcccttagcacctagttgtaaggaagattaaagtcatacttgagcaatgaagattggctgaagagaatcccagagcagcctgttgtgccttgtgcctcgaagaggtttggtatctgccagtttctccctcgctgtttttatggctttcaaaagcagaagtaggaggctgagaaatttctctgttgaatacctgatttcacaatcaagttaaaggaaaggggaaaagagtattggtggaagcttcttaggggaggggactaataaactgagataattctctggttcatggaagggcaaggagtagcaaactatgacacattttgcaaatgtatcaccatgcaaatatgcattgttttcctgacaatcgttgtgcagttgatgtccacattaaaatactggattttcccacgttagaagaatgtttaaatttagtatatgtgggacaaagtggaagacacacagatttatacatgcacatacttttcttcattcacttctttgtacttaagtttaggaatcttcccacttacagatggataaatgggtacaatgaagggccaatagccctccctgtctgtattgagggtgtgggtctctaccttgggtgctgttctctgcctcaggagctctctgtcaattgcaggagcctctgaggagaaaattgacctttcttggctggggcagagaacatacggtatgcagggttcaggctcctgacggagttggggcaaccctggagataagctcacacaaccctgcaagaccaggtgctgttaccctagccaatctcatggatgaaccagatcaatgccagatgagctctgcctaaaatgattttttggtgaactctgaaaagtggaatattgtttctgtaagaatatccatctgagactctatctcttggtaataccaaccaagagttatcagtttctctttaaccgagacaccagcaaagtgcctgctccagggtactgcccaggggagccctccatttgtagaatgaatgagagtccaggttatgaacagtgcctggagtgtaggaacaccctcctttgcctctttgacaggtctgcatcataacactttttttttttttttgagacagagtctcactctgtcgcccaggctggagtgcagtggcacgatctcggccccctgcaagttccgcctcccgggttcacaccattctcctgcctcagcctccccagcagctgggactacaggcacctgccgccacgcccggctaattttttgtatttttagtagagacagggtttcaccatgttagccaggatggtctcgatctcctgaccttgtgatctgcccgcctcggcctcccaaagtgttgggattacaggcgtgagccaccgtgtccagcctgtaacacttcttatagcactgagttgaaaccttgctcctcctggttcctccaggaaactgaaatctttttgagccaagtctagcacagtgcctggcatgtacattcaggtggtagagtttgctgcttgaatgggtgaatgggaatttgacagcatttttattcaaattagtatgtgccaggtatcgtgctcgctctgcattatccaagggagtgagcctctgtgcaagtatttgagacacgagggaaataggttctactgtgggaaaaagagcatttcatggacttgctctccaagcagccttctgatttttaatttggctcccagtatcttgatatcaggagtcagtcacaagaactccatctttagtaagttatattttccacaggaaatctaaaagctgttcaacatgttagtttcctgtgaatttgataagccataatccattcctaacactgagccctcctgaaatttggtgtctggtcctgcagatagctaaaagccctgtctgggtggcctaggggactcctctgttttgcctccacaggatccactttgcaaattaaccactggttctcccgttgtaggaactgccaccttcctcagagcctgtctttcttccttccttccttccttcctctttctttttctttctctctctctttctttcttttcttttctttctttctttctttctttctttctttctttctttctttcttcctttctttct

SEQ ID NO: 3151 - DNA, 4001 bp, Homo sapiens
atgacagtgctgatggcccattccctttatgcaccactggcccccaagcccttccacttccatgctctgaatcaccaccttgagcatttgggcgattttctctccttcacaggtggtaagaggggaatggtcactcccaagagcaggtaaagaccaggccagccttaaagcaaggaaggtctcctgtgttcttgcttttcagaggctgtgcttcctgccttctcatggcttggggaggccttcagaggagaacggagagccaatgccctctgacagaggggtaaagaaaatgttcctggcttcctgagaaatttcttagtgaggctcagatgactttgggatacagtggaccttatcttaaattttttgggcctgccctaattgtttataaatgtttattctctttagtacagagattgagtgtatactgaagtgtgatttgcttttcagatattttaaaggcttcaaagtcatgcagggtattagctcagtcacctagttggtttcaaagatgcctgtcagctgctgtcagggctggagagctctcattaaccttttagggcagaacctctggacaaattccaccacctccaggggatttttctatctcaataacagctaacgataatacccttagctaatgactgtacatatttaaagcaggttcacttgtacaataaaaataaacttccggaaagatcctgggcgtgttatctggcattccccttgccaccttgacaacccagatgtgacaactcacatgccagcagcattctatttggagaccagaacccagattagatgccctgaagtgctgacatctgctttgtcatttatgtgcttcctatgtatgtgtcttgcttcccagccaggctgtcacctccttgagaccaggactgctccccacccaccttgtccaggacacagccctggacattacagggtccatgggaggggcagaggaaatgcatcccagagtcctctttgatttttcttatgcctcacctccttcctgaaaggagcttatgacaaaatcacagacaacaaagtagtaaaagataaggaaggatgcaaatctcaaatgagatgaaatgtaagtaagtgttagaagcccacactgggagtaaaggccacagggaccaccatcaagatgctgtcattgagattcaaaactttctgacatttcagagaggcggatggagcagcacagaggacatgaagtctgattcctggctctgccttttggtagctgtgtgacatgggggaagttatttaccctctttgagcctcagcttccagatctgtaaaatgggtttaataacactccacttacagactttttggaacagagatgaggcagtagattggctggcatcttgcagacgttcaggaaagagctgttgctactgtggtgatgatgaagcttaattatggggcacttgcaatttctaaggtgagaaggagcctcatcctctgactcagcattcctttcctcttcccaccctgaccccctggcttggaaagcagggacatgccaggacaacttacatgtagtatcttgccatggggagggaacacattcctgcaatcagtggtgtctggtcctcactgatggggaggagagaagggcagttagaaaaggaggctgggtgaagccagaggcagacgtgctggggcttagaaccactcagccaagggctgcacgggttccccaggccattcgtctataattggcctgccagaatccaccaaggcttccaccagcccagcaggctccaggcagctctgcctctccctgactgaggctatccgggagcaagtccagccaccaggggtgtgagcctgggatgtgtgtgcttgcgctggttctgagaaactggaaaacagattcccccaaatagctgagccacaacaattcccagccctgagagtggggtggagtgtgctgtagcctccctcacagttggaggataagcccagctcaaacccagtcccactgccctgttggccaacagggcaccacacccccgcccccataactagccaagggttagataactagagcccagagtgaaagaagagagcacaactagaaggggtctccagcagcagtgaggctggtggggtctccccagagagttggaaaacatcattcctagtgactagaagtgcttggccaagactgccgaaaacagcccatccaaactcccccattctgttccagatggaaaatggcacagtgaagatagtggccctgtataaatgccaggccacacagcctcacatgactctgctccttcccgatgggttatcctgtcctagagctcttccctaaaatgaacacccattggaaaggccagtccagaatttagcatggaaataaacccagagctaatcaggagttggaaattagctcaggaaagtaacgcaagtatgactagggctgaggtttaccgagtagatctgattctcaccaaataagaagggaatagagaagaaaaaatataagaaagcagaaaatgagagaagagaaaggaagaaggcaggtggaagaaagtaatagggctcagggaggaatagagagatgctgagggaccctggggaggcaggtgagaaggaacaggtgggtgctgaggatacggcttccaaccacctcagctctcaagttccagaaacagggctgtagccaaggtggcttttagtactgggtctgtcactgtcactttggacaagtcattttctgtccccaggccttggggtatgactttgagacttagagtgaaggataatagggactaacaagtgcaaattctggagggatgttggtgctgtgaatgaaagtcttaaagcattctgtatactttgtgattgcatgtgtttcccttactcttaggaaaaataacggattgcccaaatgtttacttacaaaaatgttcactgcataattttttacaatagcaagaagttgaaaaaaatctgaattttcagtaataggtaattggctaagaaattatagcaaaattcaataaataaggatgtatgtgtttgttaaagatgatattatagaagcttgttttaggacataaaaattttcaaaatatattaggtgaaaaatgcagattataaatcaagtgtacactgtaattctatttaaatccacacatagagacacatacatagaaatgttactcgtgttgttgcaccacttacctatggctttatgagtaattttttaaacatatcaacattttcctataatgaacatgaatttcctttgtagtatcaagtaagtttcaacattttttaaatgaagtgttcagttaaagtcattggctcctaaatgtgcctgcccatctgcatcacctgggggactctgtataattactatttcctgggccgaaggttctaattcagtaggacttggagtgattccagcaatcagccatgctgcttgggaactggtgtactttcattccattcttcacacttattaataaatatataaaccacctgcagttcttgttaaaataacagattctggtttttcaggcctggggtggggcctgagactgtacatttcaaatatgcaaccaggtgatgtcaatgctgctggttcctcctggccagcactttgagtcctaaaggactagacaatcccccagtacagataactcaacagcatcatggcctcaatgcaagcccacttgatgatgggctccccttggccaaaccactggggcttctttggttgtagcagcaggacagtgggcagtgtggtagctgtgcccagatctaggtggggcaacaaagtggagggccctgggtgaaggtggatagcaagctgatgactcccactctgggtcagtgtcagctcaaagagctggaagaaattcaatgctggtccagtccagctggatcccatgggccctagaaacctcccattctggcacagccaaaatgtacagtgtctttcccaaaggctcccctattcggctccctcc

SEQ ID NO: 3152 - DNA, 4001 bp, Homo sapiens
tgcacagtatctatgtgggatgttctgtccaagaccaatattaacttctgtggagcaagatccagagattcttttgattcctttgatatttagtcattgcctccttggaacccttgacattgaatgactcccttcacacctctttctcccactgtagatttcacctccttctggggccacccctaaggctaacaaggtcctaagcacttctatttcacatcatattaagctgcaattcattgacttctacagctgcaatgattatcttgggctaatggctcccaaatgtagactgcacatcccactttacctcctgcagcctacaggacagcccactttggacatcctgctgatatccaaccaaatatatttaaggttaagttaattatcttctcctcccagcccacacattcctcccaatttcatttctctcactgtcataatattcctctcaccagtgatattcaaaacctgagactcattgacaatatctcctacttctcctgactcagtgtctaacttatcaagtccctacaggttatttctttaaaatataactttgtgtttttaattgccattactactgtacttgtattcccggtttttctgcctttcattcattccaacctatgtgaggaatgtggacccacgttctaaagatttttttcaccacatccctgcccagctctagaatctacagtgactgactgttttgtcaccgtctggcactgattttcttgtgtgatagcatctcacttctccatggacactaaaccacacctcctggcgacataattcctttcttatcttctcagtggacgtactcacaggtgtcccattgttctccctgcctcaaaagtcatcccttctcattgtcatccattcagatcttttgatattaagatcactggagatagtatcagtatagatgggttcagtatctagttctatcaaattaattaccagtgtagagttacagcttagacatacagggttatgtcttttaacctccaaccctcagtttcagcactatacattcatgggattagattatgtggttatgaaggttctttctaggccaaactatttataattccatgactcagagtttaatgaatctttcccttactattgtaactctactctgaactcctattaaattttactgtattatttattgttgtacataaagatatttgtttcccttataaaagtttataagatcttgaagtcatgaagcatggcttacagctcacttgaagctctctccaaccaccctaattgaactaccctggtccttgtggccaggacatagaaacacacagagcagactttgaatagaaaggctgagtcctagacctagctctgctaccaatttattttgccaccttttatccctgggccttcaacttatcaacattggatggaaagattgagtaaggtatctttcaaaactgttttaagtttcacaataaaattttatgcagaattctaatgattgtaaaaaggataaagggcagctgctttgctgacacaggaagcaatggagactttggaaccctgctagtatttctcttgcctacaaagaagacactgaggagctaccaaggagcacaaaaaaaaaaaaaacgaaaacaaaaaatctcttaagcttccaccaaacacggtttgaataccattggcccagatggtttcttttgagattactttctaaagtcagttgttctaagtagttcagaaatcttgatttggcttaacctattccttctcctcaaatctctttatgtgctcctaaatgtttttgatgtcccatcatgtcatatgaggggactaccttgttacctagacagcttgccaggaggagtgaagggatagagggcataccagagatattgacaggagagagtagaaaagaaagaaaagagagagagaatattgcctgtccatcactgacctgcagatcctgagttcctggaaccctgatccctggagactccaactgatttctccagggcattgcgctgtgtttataccgtctggtacaggtgggtcaggcctgcaccaatctctataattggctgcaggacatgaaggaagaagagcctgggcatttcacaatgtctttggtacagcatgaataataagatggtgggaacattaaggagcatttgttgaagggggagagagtcatccataaagccttggcagaaataaggtatggggcccctgctctgtactgactgtcgttgactatgttattagtgggtttgcagccagataaacagtgctggggtcagacatctttggtgccccgtggggctccatcctaggcttgaagaggtggtgaatacaagagaaagtatgtctggcaagcccaaggacagaacaaattctgatgccggaatccaggctgtggccagacagccagaataagagaaggggctgatagcactgtgagtgtgactctgtttggaaagacgagaagggagtctctgcttttcagtgggtttaattagttggtaccagcttgatgggacagaacatctagggaaacccaactgcaaagatattgacctcagattcaccctgagactgagcagacatcatgtgccatggactgctaggaaatatgatagtgtgagtagagcacagaggaaagaacactcaggtctctaattgacattacttgactcagtccatccatccatccatccacccggccacccatctgtccatctatctacccatctgtccattcttccatccatccatcatccatccaaccatccatccacccatgtgcccatccatccacccttctgtccaccctttcatccatccattcatccatccatccatccatccatccatccatccctccattacaagcgtggagaagcttaggtgtaatgttctctggaaactaacaaccttattataattctccctctttggtcatttgcaaagttccaccaagggcttcttgaggaagtgggataggtgggtctaagactcagatgcctgcaggatgagaaatgagaaaagatgggcagaaatgggaccagatttctgctttctaaggccagtgatcattcttcttccactctcccaatctctcacccttctatgggaaggcttaaagcatgagttactatgtcaggcaaccaatgagtgtttacccagcatttacactgctgtgtgacacagacattcaatacacagtccttgttgttaagtagtttcacagtctagctgaggaactaagtcataaacacttgaaaagataattaagaagaccagactctctaagctgtgggccaaggacatgttggaaacaatagtggcagataagctccttgggcaaaaaaaaaatcttagaattgaaaggactttaggccaggcatggtggctcatgcctgtatcccaacactttgggaggctaaggcaggcagatcccttgaggtcaggagttcaaaccagcctggccaacatggtgaaacctcgtgtctactaaaaatagaaaaattagccaggcatggtggcatgcacctgtaggcccagctacttaggaggctgaggcaggggaatcactggaacctgggaggcagaggttgcagtgggccaagatggcaccactgtactccagcctgggcgacagagtgaaactccatctcatagacatggaatcatagtttccctccaattggagaaatctgtgctatggcatccctgagaaattggttaattaggctctgccttaacatctccagggtcagggaccacacaacctcttgaagaaaccctatcaatgtttgtggtccttgtggttaaaatatgggggtcatataggaaaaacagcctccacataatttgcacccattggttctgcttgtgtgttctggaattacacagaacaagcacattcttctacttggcaagcctttaagtgcttgaagagggctccctgtgcattgcttttttcaggataatacctcccacat

SEQ ID NO: 3153 - DNA, 4001 bp, Homo sapiens
gctgagtggtgtcctctaggtagccagtgcatccacacccttgtacaaaggggcggatttcaaagaccccccttttgaagagagactgctgacatcctatgtcttaccaagaagactcatgtccataaggggacagaggttttcacttgtcgtattcaccgctgtctccccaccactcaccacagtgcctggcacatagtagatagtcaataaatctttaataaattagtgaatctactattaagcagtgtttcaacaatggtgagaggttgactcaaaagatgtcacaggtttcagaaccataaaaaaaaaacttgatgtcacattatgacatacaagcagggcctattagaaatgggggtgctgctctgggcctgccaaggtcatgtgagaattcagatcaaatatcctttcctgaacagcatggaggccacatgagagtggacgggtgcaggagacgcttcacacacagcagcttggcagctagccagagactgaaaataaatcagagttccacacccctgccccagcaaaccccattctcaaaggctctacctttctgtctagcataaacgttaacatcggatatgaatacagaatattaaatgaaatatcaaatgagatatcacacaataaattagaagggattgagaaagaaaacaatgccaatagccgcttggtaaactggatggcaaaaaggacagtgaacgtccccatgccacctctggctttcctcagctcatcaatagtcatggagttctgtttcatacattcaatgtccagaagcctggcaccaaaccgcagcgactgagacatccatcacattcccgtgacgaatggacccttgctccatgacctcaagagcccaagttcatggtgtcccttgcctcagttcctagaatgtaaagctaaatcacaggaatgtggccatctgagaagctaccctgccccaaagataaggcagtggagagacagcccagcaggagccagcatctgcgtgccttcccagcggccttccttcctcccggcagtgcagaggagaaagccctggcaggcaggacgagtgggagggaagacagaggggggctgcatgcagaggtcttaccctccttcaggacatcatcctccaacaagttggtcacctaaacttctgcttcccccgctgtaaaacaggggtgatgacagcaccctcctcacaagactgtagggagggtaaaagaccagttgctgtcaagggcttataaactgtaaagtgctgggcatgactgttgtaaataatgagtgtcttctcagcgcctacttgcttgtagctacattccctagcaccatcctttatctggaggggcaacaagttaccctccccagtgtggttaaggcctcagcccttaccttgttaaggagactgacggtcctgagcctaacctctaagagggacgctcctgaacctgtagaacgtagccggatagaaaacctgaaagccattcacacgggaagtcacacacctacctagaacccccctccagaacaactggcaagttccttcaaacgacctgaacaacgttaactcttgctccacacaagaaacacacacacgcagacctcaccgccatccccttcttacacaacacactctgacaaccaagtgcaacttagggaggacgctcacggcgtcctgcagagcgggggactcgaaggtgtcaaggctgtggtccgtctcacccctacctagtccccggatgctccagcttccccgtacctggacggacggccgtggagggtgatgggatcccagccccgggcggaacccggctcagctcagaggggcgagagccctaggagccgagcgaggagtgcttcggtgcgcgggcgcgcgattgtcacattcctgccgctccctggggcgcgcggggcaggccggcgcccccaccgcccggcccggccgctctccggctcctcccggccggcgccgcgcgctccgagtcggctccggccgccggccacaagctgcgcccgccctcgcggccgggaactgccgggcgcggctctggctctagccccgccgctgcgggggcggggaacgggcggagacggctcggctgggccagtccgcgggctgcgagcgagctggccgggtgtcccaactctccacccggaggagcaggcgcggctggacagacccctgcggacaccgccctgccccgggtagcccgcaggggtcccgccggttccaaagcattggagagctgccgggcgctctcgagtcgcggcccggctcctccagggctgcggcggctccactagagttagttgagacaactcacctagccactacgacctggctctactacccccatggagcctggctgcgacccgcgaattgagttggcgactccagggcatcagatcccgaagcaaacgctcgccagagcgacctctggagcttggtgcctggccaggggctctctccgactggctttgtgcactaatttctttgtacctccgtttcctcttctgtgaaaaagggatcataagagcactcatctcatggagtggttgaaaacagttttttaaaaaaaatgagctaatacatataaaatagtgccaggcccagagctgatactactcacgcgttatctgctggtttcattgttgctgttacgcgcccggatgaaaaaagcaatttaagtgtcatactataaaatcttgataccacacttgggggcagacagggtttttaaatttttaaacttaaaacccacttatgcccaccagctcactttgccaatgagaattcacacccaggggaatggaaggatggccaaggtcatgcagcgaacgaacgcctggcaggatcacaccttgggctccttgcagggagaggaggggagggcgcagtggtcgagtctgcagctccctcgggctttccccctccacttcgctagtcttcagcaagtgactggcccctccagcttgtttggaggtcttcatgggccatcctccaagaagagttttaataaatgatgatagcttccttccttctagtacacaccgccccttcctgcatccctttcagactgggcaggctcttgttctcgtaacccacccctggatatgcctcttcagaaactcaagaattgaggtaacctgagcctcagctgcccccggacaaatccaggctggaggaaaagatgaaggaatgagcagcagaagctcatctgccctaaaagctgtcttgcaacctggcatgatgacaatttctcattcttaaacaatctgtttccagaagcttttatggttccttttcctcgagaaagcaggcttacatcagaggccagtgacgtagcattaagagaattccttaacaatcccagctctcaatattcctttatacagcagaaggtctcacagccttgactccactcagaatcaccggaggacatgacactcctgtgttcagatcagtcacgtcagagtctctggggctgaggcccaaaaggcagtgtttttaaagctcccaggtaattccagtgcagctggggttgcaagcagttgttcctctaagctcccacagtgatgccattactgtgaatcctccaactgaaggctgcttcaaccacgtgtccaaatggcagttctgaaagctacagcaggtgggcctggctccatgctgtggaaccagcccagaagcactatgatggtgaacataaattcgtccttccattttcataatgaaggtttttaagcagtttacaagtagaaagtgaaattgatttgtgcaaccatgtagaaataaaatccgtaatttttgtcttttttaagtgttgtccccgttcagccactcctacccagtgtcctgctagacatgcaggcctctagacccaggtgggactctcaaacacccgcccaacacagaaatggaattggaagacctcctctttctcaccttattaccactgttctatctgggaccttcaagtcaccttctccctcactcagccatc

SEQ ID NO: 3154 - DNA, 4001 bp, Homo sapiens
ctatattctatttggcttagcaatattatttctagtttatcctaaacagataattgcccaagtaaacagtgctatatgtaaagtgtacgaatttttttctttttttttttttttggtgacacagagtcttgctctgtcacccaggctggagtgcaatggcacaatctcggctcactgcaacctccacctcccgggttcaagcagttctcctgcttcagcctccctagtagctaggattacaggcacaggccaccatgcccagctaatttttttgtatttttactagagacggggttttgccgtgtcagccagggtggtctcgaactcctgacctcagctgattccccccacttcggcctcccaaagtgctgggattacaggcataagctaccacacccggccaagtacaatgattttacacattatttgcaattttgaaaaatatggaccaattctaagggcccattgtggaggatgtatagtccaggtgcttcctcggaagatggcccttggcagccactggtctaggagaggacaccggcaccatggggttcaaccagggtggatctcacacctccttcttggcacattaaggcatggcatttctccctcttccctcacaagaggttgtaaagcctggtgccactacaaaaaccattttgccaccataaagggaaagaatcttcaaacaaaaccaacacacagaggaggggacatacagggaaatgccaaatattatgctagtagtatggaacccactcagaagccactctttctttgaacttcagttacatgagatggtaaatttatgtaagccagtttgggccactttctgatactttcagccaaaagccacatgataaagccatcaccagggaactgaataaatacattatgacacaatcttacaataaaatgccatgcaagtgatttattcaagaataaaataccatgcaatggatttttcaagaaagtatgccctatatacagtgccacaaatagatgtccattagaagtcgttaagagagaaaagtgttaaggaatgatatgtgtgatatcaccctatttagttaaaaaggcaaattgagctacagatagagatataaatttgatataaattagaatcagaagggaagagggagcttttatttcttcctttacatacttctgattttttgaggttttaaataagtatcccttactttatatatataagtatacaaatatatttcagctttggacctctgaagtactcttggtagcatcattttaaaaatcatgatataacacataatgatgcctagtcttcaaatatcttagtgtttttttttacataagatcaatttacataaccttatccttatttaacttttaatcctttttgacagttccatgtctatcttgaaaaagaatgtgtcttaatctctagaagtaaaaataaataagagctacctcttagatacacaccttccccaagccaccccaaccctcaagcctgagattcccacctagaaaataaagacagccatggtatatcttcatgagtgtcatgagggaggggtgaacacaggtgttcaaagtttccagcacagggcctgggacaaaatgactcttcagtggtagtttttgttgctattcaatgtcctcagagtaaaggggccccttctggaaatttatttttgcttggaggttcggtgaaccttaccctggctttctatctcttcaaacaccctagaagcagaaagaattccatggggccaactctgggccttcccactctgaaaacgacacagtcacaaactacaggcccaaggaagccagggcgggccctttaaaaccttaccctcattgactcaagcagcttgagaaggagccttggcagtcctctggccactgtaatcatctttcacattagtcgagacaaatgccttggaattttccttaaactgggtgtcacctcccatttttgatatgaaaagatacaagtgaagagctgccaatgggtggagtcttgggccgggtccccggatacgtcaggctactttcattttccagatatgggagaagagaaaagtaggccaggccagggctgcagtgtccccaagaggtcagcagctccaggctctgagccttgcttctgggctgccttccagccccactccattccagtttgcagtaatgaatgttatacacacactcatacacacacacacacacacacgcacacacacatacacacacacatgcacactgattttttttaggagccgtcaatgaagttttaagttgttgacaattattgttggtcatcaggccagcaattcttctgagtgaagtgttgaacaaggctgggcctcagagctacacagatgtatggcttcctgaaagccatacatctgtgtgtgcctgggtaacttgagaaatagtactatgcatgtgataagtgtgccacaaagacttagaaagatagaaaactcctcacagatttttcacttaaggaggtaatgtcctcttgaaaatgttattaagtacaaattaaacaaatgttcaaggtgcacctacctgacacaccaggggcgcctgacaaatatttctggaatgacagaatgattctttgctctgtggtctgaagcaaatgacttgccttggttgggtcccagtctcctttctgtgaatagaggtaatcacacctcctccatgggtggtgaaggctgaggaaaaacgctttgtccaggagggttgtgctgcgaataggagagcaggtttgggggaggtggctaaccttggcacccacctgggctcgcagaagccagtgggaggtatgagataaactgcccagggacctcctcagccacccttacatcttatctgccctgtagccacgtcctcccctgcagtcaggctgcttatcaggggctgacaccaggcgcagccaactttgtgctttgattcttgccaggtttcttctgtggaaggggtttccagcccccgcacccccttagccaaagtttgccctttaaagtcaatctccggtcacacatctccagtaagccttcaaacctcactccagagccgactctctcctccatcctcccctatgccttctgcccccacactaaggcagcaggttgcattcgccgggcactgccctgacaggagggcaagcacaggatggagtcgagaaaccagcatagtcaccaagctgatttttcaaaatgtgaatcttaaaaaccttgacttttaagtctgccacttgagagagaagaattttggttttatttttgcttttatttgttggaactctagaacatatccttatatatcaagagcctggagcataacgttatgccataaaccagagagttcctgttcaagggaagtacacgtttgaaccagcacataacacaatgaacactgagggaagatgactagggttggggcagaaatggaagttagggagtagggggcatgagaaaacgaggaaattgtgttgatttccaggctccagccagagactgtaaaccttggattgaagcccactccacgatggagcctgtggatgggcaacaagggggttggcagtgggtaggggagggagggatacctgggaagatgggcttgagggaagtctcaaggttcaaatcaccccagcaagctacagaagggttttggaaagttcctgggctattcctacaaagcacgtgccccacggacccatgcagggcccatgcaggacacacagaaatcaacagcacaaggtgcagtgaccaggtccatatcactaagcagctccaattgtgggcagcaatgagagaagagaggaaaagaagaaaggcaaagaatcttgagctctttcaaacccttaagtaaccatatgtaggactgagaggacctgagtgaccctgagatggtgtattagtctgttctcacactgctcataaagacatacccaagactgggtaatttatcaaggaaagaggtttaatggactcacagttcca

SEQ ID NO: 3155 - DNA, 4001 bp, Homo sapiens
agagagaactcagggcaatgtagggtcttgacaaagatcttacagcagagttgtgggtgggggtagaggagtcctgaagggctctaagaagagcaaaggcccccaaaagggaatgcaattaaagagaaggagcttcaaacagcaagagcaaactgtgtgccatgatttaagagagacagagagaggaacagagatagggagaaacagagacatagagagaagtagagacagaaagagagaaacagagacagagagagagagagaaacaggcagacagagagaaacaaagacagacagagagatctgggagtcaggacacctgagtctgtttctgttggagcctcaggcaactttcctgatttctccagaactcaggtgtctgatctgggccaccttcctcactcatgaccttcttcccctgtgtgagggtgaccttaagtcctgagtgcttgatactacttggattcatcgactgtactcctcatcacccttgaccttactatttgcaggtggaaatggagaccctgagcaggtgagctgtcacgcagctcatcccaggcaagctggactcagaacccaggccagttcgcctctggggacacaccgcagccctaaccacactctactacctctcccagaaaaccacccgagagccaggcattagagaatccacagtgactttagaatatcaagcttttcacaccagaaaatctcatgaggcttctaaggaagaaagccctccattcagtgcacatcccacgtgcagcctcatgcggtagaaacgggtctcagtggtccgctatcttgtgttagattccactgcgattttacttgtggcctagaatcatggaaggtccttagaaaccccctgatccagcccctcttttgacagatagaaaaactgaggcccagaaatatcaagtaatgcttccagccaccttcacacaggtgaagaaggtcatgggcaaggaaggtcacccggatcaggttcctgaggtctggagaaatccggagagtcgcctgagcctccaccagaaatggactcaggtgtcccgactcccagatttctctcttctgtctccgtctctctctctctgtctctgtgtttctctctgtctttctctctctgtctctatgtctctccctctgtcttggtctctgtctctgtctgcctttctctgtctctccccatctctgtctctctgcctctctctgtctctctgcctctctctgtctccctctatctctgtctgtttctctgcctctctgtctctctccatctctgtctctctgcctctctctgtctctctccatctctgtctctctgcctctctctgtctctctccatctctgtctctctgcctctctctgtctctctgtctgtctccgtctctctacctctctctgtgtctctgtgtctctctgcctctctctgtctctgtctttctttgtctctctgtctctgtctctctgcctctgtctctgtctttctctgtctctctctgtctccctgcctctctctgtctctgtctttctctgtctctctctgtctctgtctctctgcctctgtctctctctgtctctctgcctctgcctgtctctctgcctctttctgtctctgtttctctgcctctttctgtctctctgcctgtctctccatctctctctcttctctctgccttcccccctgcctctctctctgcctctctttgcctttccctctctctctgcctccctctctctctctctctctctctttctctctctctctccctctctctctttctctctctctctccaaagcctcttacctgcagctctgcattctctcaccttgttgctgctcacctggggaaggctgccaggccagactttcacctccagcaggagctcagcagtaaagcagggatttataccctcttgggagctgggatttcctaaccgggtggtgtcacccgctcacactgggtggcagcggacacaccttttcctcctcacggggagcacccccaggctgcagtgctgggtctgagtacatgatcacccagatggggaagtggccaaggaaacgccgcataagtttccctatttttctgtgactcgctaaaaattacgtacttccagccgagaggtggttttaaagtgatgggcgttttgcccaactgtggccccattaaagagaaaaagatgcttttgatctttagccagtggaagagttggttttccatccaaggaacgcttttaggatctaagaaaggttaagtttttgttttgttttgttttcagagtcctgtatgatttttaactgttaagtgaaggagggggttggttatctaattccttattctagattgtggagtttgcagaactgaatagtttgtcttctgaaagtgggaatccagcatcaagtcatgtctgtacaaaaccaatgtctcctaaaccccctaaccagcccgaaggtgttgttggttgctcctctctcccatgcaagtcgccaccgtggagttagagaggatgaagccgagtcagggtgcacccggtttgctcagagcccgcggatctgagaactcatggtcctgggccttccttcatatgaacaggaggccaaatgggagcgtaaaaccttggccacagcctctctggaaagccaggctccagggctagaaccctcttatcatcccctgcgacctctcgcctatgtgctcactcatgttgcatcgtttaggaagaggtgtaatttggaatccctttgttggtggttggaaaggaagaatgcttttcaaaatgtactttaaaacccatggcattaaccttcataacactgtctgcctggtttatgcagatcttcattttcttacaagtaaagaggcaggtatagaaactcctttagagaaatcttagggaattcatacccagaacaaatggctaagtcagaagggcccatgggccctagttttatccttttgctaacaaaggatggtaactctcgaaagtcaaatctcaactggttaaataaaatcttagaaaaatacaatgttagagctaggtagaaacttagagatggtcaaatttgtcttccagtttaaaaagaagagaaaactgaagtccagacatttgaggatggggagcaaggtgagtaagctgtattgatttaatggtgtgtataacttcacaatggatggattcttatggaaactgtttggaaactgtgaatgccccaaaatggagtttgttgagcaaagggtaaatgttacattatatcatgtttattctttttaaggaccattagaaggtgaaatatttggggcttttcccattattttgatgaggcaagattgaagaacaaagcacaaattttgagtcaagcctagtaagtttcaagggtgggaattcatcccagtaggaaaatctcaccaaataccatcatcatcccaggatacagaacacgccaataattgagcccctgtctccaccctcgctctgtgctcaactaaacacatcacccccagctgacctgcctcaattaggattcggttcattaaataacacaggaagcccacagcttaattcagccaaagagaggaagcaaaaccatgccatctgctcttggccatgctggagttaactgctgatcttgtgatctataaggaggaatttacataacctcacttctttctatgggaaaacttgatcatagagtcacaagaattgcttacatagtcttttcaagaactaatgctcagacccaacagacacccaagagtaagtccccaggcctgccggagcctcatggagccatggctactttacccctccgccccgcttcatggcccatgctgcactgtgtccaccaccaatagcacatttgaatggctcgatttctccaccaactgatgggaaacccacaagcacagaatgttctgtaccatcgtgaaatcctctgaggtttgaggtgaaagtcacccaggatgtttattgcaaagattgaagcaatgattcct

SEQ ID NO: 3156 - DNA, 4001 bp, Homo sapiens
atgcggccacatctccaaacacagaggcacccaagtagaaaagtaacttggaatcaatctcctcacctaaacaacgcattcaagaacagagagaatcccagatcctgctggggatcccgtaacattcaagtcagcagtcacagcagcatatctacagggcgcagagataaaagttcccagagtgtggaacaaaaaaaataaggacaatgatgaggtctgacatcattaagtgttgactgctggctgagtaatgcactaaacacttacacccatttaaccttcagaaaccaccctctaaacatgatattattactaatatgctggtcacctctttgtaagcaagaaactcaagatttaaagacatagatgagttgcttaaggtcatgcaacaagtaagtgtaagagcagggattaaatgcagatctgcattagtccagagctttctgtctccaaacctctgcatggaatagccaaaattagatgattatgtccacaatggtattcaggaacaatggcatgtgaatagtttggcctcaggatctagtaggagaactgttatagccagacagaaacatgcctccgatttccttatgcctggaagaaattaaaggaaaaactgacattcagtggataaagctttgggggccagttctgctatgtttacctctgcaccctctgttgaagtagccttcagagagaagaagaatggagccaccaagcagaggatcaaagcaggcacccgcaacaaacttgaacttacatcagtcattcactccccacccctccagaaacaatggccctcactcaagagggccttctcatatcctcatatccacccctctcatgtccgttctctattttcttcttgcagatgggtatgaccctgcttcctcaccccttttggccagcagcttcttgcttcatttgttttgtttttttccttcatctccatctgagtagattacactgctggattttgtggatttcagaaagaataactccagaatatgagcactctgtgtgtatactataaagctcccatcctttcttaccctcaaccaggtcttttccaacacgttggaccaaagtcccatattacacaaacaagatttcaagggatttcatcaatctgtaccatgattttcccattggtaatactacttttctcacaagcaaaattgataacaatgattattattgttataatgttatatatattacattatatattatattataggcccttcatttgcataaggcaccaaaacacaattaaactcctttaaatttaattcagctaaagtttttcttttaacagaagattgtttggaaagctaagtcttccctctgtcattgagtgaatgttttcctcaatataaatataatattatatatattatatttaatatataataatgttataacattataacaataatgttatatatattatatatataatatttaatatataatatatattatatataatatatataaatatattatatataatatatattatatataatattatatataatatatattatatataatattatatataatatatattatataataaaatatataacatatatgatatattatatattatattatataatatatattatataattatattatatattacaattatataatatatattatataattgtattatatataatatataattgttataatgttataacaattatatattatatatattatatattattataacatataatgttataataatataacaatgaatattattgttataatgacctaaattcgtatgtgaaaattttgttccctttgagataaaagtatttttgaaaaataccccaaagccacttaccctcattgggttgtacttgagttctttcttcctcaactttctgcccacagtttcacaactcagaaagccaatttctcttacagctttatagctttactaaatacaacagccagcctctctttaaaaacctcccattttctttatcagttaagagacaggaaccaggttactgataagctgaacccgatgatcacactgttaacaaatgttaactgcagttttcaccacattctccctatttgaaagatctttaatgaagttctatttccaatttttaccttatctctatagatagttacattttgtcttaactatattttgccttcttcatgagtgactttctcagcaaaacctccctaacaccatgtaggtggcaggtcactcatttcccttaacgcgagttggtagttgtaacttccctatagtcacatttctagaacaagagtacccatttctgcagcaagttgcttatttggtgtttctttcttttttttttttttttttttttgaggcaaagcctcactgtgtcacccaggctggagtgcagtggcacaatatcagctcactctgcagcaagttttgtaactgatgcctcgttggcaatgtttttgaaaactttgacacatctcgtgtgcttaagtgtacaccaggctctgtgtgcagtaatttggtatgtgctatcccacgcaatcctcagaagctgacaggagcttcagagaggagaattaccttacccaaggtagcagccagtacaagggaaatccaggatccaaagtgtctatacctgggctttttccacatgcccgagatggcctatctcaggtggttgtaatagagatttatggacatgtgctgcaattattagaattctggataaactaaccttaattatctatgcaatttctaaaaatattggtgactttcaaataatcaggatgtgccatctgccagagtcttccctaatataatagagcatgagatttagggagagcacagcctagttttcctcttcccagctgcttgactttgggcaaattctctaacctctctctcgtgtgaagggtattgttgtcaatattaaatcagtaacctatggaggatgctatccatattgatgaaatactagtgattttctgctctatcatatacccatcctatcacacccagcacaattgtgtttaaaataaaaacaaaccttctggcagggcatggtagctcacgcctgtaatcccaacatcctggccaacatggtgaaaccccgtctctactaaaatacaaaaatttgctgcgtgtgatggtgcacacctctaatccaagctactcaggaggctgaggcacgagaattgcttgaacccgggagtcaaaggttgcagtgagccaagactgcaccacggtgctccagccttggtgacacagcgaaactctgtctcaaaaacaaacaaacaaacaaaaaaacccttcaaaatgtatttgaaaagatggaatgattcataatatgtaccatatctagacaccatgtttatgtcaagagactaacaaaacctgggtagcacctgaccttcaatctttaacatcactgacgctcgttttggtttgggtgcagagctaagatgtcttctctgtgtgaatacaacctcacctcccccacccccacctcaacacacagacaaatgaacagctgtgtgtactctcctttttttgtggatttgtgtcaagacgctcgtcccaccaagtgagctagatcacctcttctccttacctagagtcaccatacataaaagatgaaaatctacatcgaggagataatggtagactcatttgcgtactacgcagtctttaggtggactatgacttcataagatcatcaatcatttattctccactgctagagaaccacagaaaatatgcctaagtaatacacaaaacaatacttatcaatgtccccaatattgtgtcaggcactgtgagaggtgcaagagaagatgagactcattcctgaccttgaggaactaaactaaagatcatgggaaaagagaggtggggacagggatgtaggattttacaaatctgcaaatttaagattttttggttttttttttgagatggagtttcactcttgttg

SEQ ID NO: 3157 - DNA, 4001 bp, Homo sapiens
atccaaatagctcagaatgagctagacctcaacctgatagtattcctagaagtttatccaaatcacttttattcaaatcattttataaatttaactgttccagaaaggactagggaaggaatgaaagcaagggcagctcaggcaatcaaccactgaagaaaggggagcagggtgaaagaagatgggagccttctgcataataccttctgacaatacaggtataaataccagaatcagcaactgcagctggtagaaacttcagaagttggcctgaggcaaacacacgatttctttcctgagtgggaatacttttgtttgtttgtgagtaataccaatccacggtgtaactaggttttccttgtctaggacatcttacaattaaagcctcattttccaggccccatgattgtttacctgcaaataaaagatataaagacaatcctgaaatgatcaaatgaaaagatcataattcttatactctcaatattttcttctaggattaaatttagaagccggtcatatactgtgataccttgggaaagaataagtaactgttaagatctcttatgaaatgttaatgaattaatttggagctaaatcccccacagttatccaatggaaaagcagccttatctatctaaacaaactgtgtgtcagtcaataaacatccacaacacttcccatgtgcaggcaccacattaaattctgctgcatttgaatatgcaaagccaaactgatgatatattcattacaaagaatttcttctgatagatttgtaatgaaaaatgattgtacaaaagcaatatatttttcagtttacaattcaactggaacaactggaagcaaactgcttaaaacaaggtaaatgttcttgaaattatttaatttataaaaatttaaattatacttagaaggcaatacttactaaactttgctgctgtggaatacatgagaattgtgagaattgctaagatccaaaaccccattctgtttatcaatcaagagcaagtattggtaactcgttgttgagattactccagatgagtcactggcatacgacagtgaaggtcaccacacatgaggcagttggtgatactcttcaagactgagttgggaagagtagcctatatctcaactgaaaaataagttagacaaaaccataaacagaatttttatcagccatgatttttactttctcagcaccacccaggagaatgaatcagtcaacacatatttattaagtgcaaagagatgtaacagcaggtttcagatatgcaagcattgcacttattcctatggaagttttgggtcatatagctttcacaatgatcatgctatttcacagttatcatgctacttcgcagttatatttcaccagtctcatgagaatgtcctgaaagaaactaaattaagaaggaaagaatatgagtttctatttttgaaaaaaaaaccataaaattcagtagactttagaaaataaaatgtatcatgtgaaaccacagacatccacacaggctggtagcagcatgctcacaaaaataactcacaaacagacacatgtgcaagtagtcatcacaaagcaactaaggagtagcaaaatcagaactagactaaagcattagccaagtaattgtcctattctcaaccccaaaccctcaaacttttgttcctgactcagcttgttcccaggagtcaccaaaggctttctaagagtagttgaaggtctatgaataataataaatacattaattttttctttcagaaaaataatcatttactttcttacttcttttcttaaaatataaggggaagaatagaaccaacatagaaatttactaacataaagataaacacaatcatgaattatgaagacttttcttattacaaattttagataagtaattgatgcttacccaaactgaaagacagaggggatgaacttggagtcagtgacggagctaagaatagtttccagtctttgtaggtccctcctcatagactactcactctcttctattttaaaggggagacactcctcccatcctgaaatttgatttgtggccaaatctatgacttgttcaaaaatgctggtgcatcatgtactaagaattcttgatgttgacaaataaatatttaaacataaaaacaacattgagtaatcccttgagaggaaataattgaatcatttcctcctattttagaatcaacttctcaggctgattaataactaatgcttattgcctgtaccccgatattgggacactttcagttctaaatggtcttgacatcggggacctggaggctgcctttccagatattccttgactcctcatttggcagacaccactcaggaaagctccgccagccttggcagcattggtgccaggagtttcaaaagcaaaggtgggggagaggaaatgcgaagtaagcagcactttctggaacttagaaattctctgtctaggttccagaatgtgactccaccccatcccaaaacagatttcagctccttggatttaagtcccagtaggcctctctgcctggatgaagaaaaaaaaaaaggagcttttctagagtgcatagagtgcagagaaagagaaggagagtgtgactaagaagcttccctcaaggggagtgacaaagaaaaccataaccctgaactctagggctccaggtaaaacaaacttgaaaagcaaaatttgattttagctatgcatagttgcgatgaccctatcatgagtaaactcaacctacgtttataagtcatcacatctcagaaggattcaggaactaattccagacccatataataatataatgataatagctaacttttctttagaatgtcctctatgccagacacagtctaagtgatttacatgtattaattccttcattctcacactcacccaatgtggcaggcgctattattatgatgcccattttacagacaaggacactgaggcacagagagattaagcaacttgcccatgtcacttcacattaaggggtgaagtcagaatttgaactcaagaaggctggctctgaagactagactaatcacagaatccaactgccactgcttgtggaaggttcagaaaggagtagctgcaaaagggagagttatcagtacgttttttgagccagcgtctttgctccccatgggggctgggactactcttgaatctcttatctgtcaggggtttagtcagcctttcagcctgtggagtggctctgagaggaagagatacacagtcctttgaccgcggggagattgaccatgagatgttcgccgtaaattagaggaattaggtctgcacattattattcttgacctacttgtggaagtccgttttatcaggatattattgcagtttgggtgtgagatcacagccaggagccagcgagtctgcaatgctgcctgcgattccccaagtgctgaataggtttgttcaataaaataacacaaactcggaattcttttacatttggtatcccaaaacatctttttaaaacatgtattaagttggagcattcattcttaaactaggccacgtaagcattagtttctcagtttaaaaaataaagcttccatcaattttaacatcataatgatgaaattctgcaggagtatttattaaagttgaactcttcctataaaataattcagttgttcatttgacaattaagacctttcattcaaagtacaatactctgtggtacttatcattaacatcactcaaattttatagttacaaataaaaacccaaggataagactgtttaagtaatttgacaaagttcacccagttgtggctggggttgaaaccagacttgctgaacttcaaagtcaagcttttctccccccaatgtcaactaaaaaaagagaacattctctataccagagattaggctggtaaagcttttctttttataatttggactgggttattaaaataagctagtctataatttcttctttgaaaagaactaaattatttt

SEQ ID NO: 3158 - DNA, 4001 bp, Homo sapiens
tgaaattttatttgggagtttcttgagtctggaagtttcctaaaaatagcctgctgattataaagtataattccaagttctttaaatgtatccataaaacagaatttactccgttccctcctcacaaacctccccatcgggagtgatttccctctttcccttctattctacgacccttagttcttttcatccacagagttctttactctgtactcacctacagagtaaatcaacccttcttgtcttttctgtttctgctctgccacccagttattttactctgtcttgagtaaaaggtatttcatcccaaaacgattgtttaagaaaaaaaatttggttcacttttaaagttcatttctaccaaatttccttttttttttttttttgagacggagtctctctctgtcgcccaggctggagtgcagaggctcaatctcggctcactgcaagctccgcctcccgagttcacgccattctcctgcctcagcctcttgagtagctgggactacaggcgcccgccaccgcgcccggctaatttttttaatgtatttttagtagagacggggtttcaccgtgttagccaggatggtctagatctcctgacctcgtgatccgcccgccttggcctcccaaagtactgggattacaggcatgagccactgcgcccggccataccaaatttcttagaagaaatttgttctattgacggtttccttgctttcaccttgtgtcataaaataacgctttatcttataaaatagcctgtagtaattccatttgagcattgttactcaagtcttcacttggaatttgcctaactccttcccctccccgaagtcacctccaagctcaaaggcgacattcagggctgagcatccgagcacgtggagctggttctctgtttcctcttccgcggaactccgcctggcggtctggggaggggaaggagccgcgctcgggctgacgcgatccccgggggctcccaatgacaggccaggagcctgtggactcgggcagcctctgggaacggaggacacacggaacgtacctgctgtgacagacagtggaagggcgatggacaacccgcagagcagcaaggaccacatccccaaaccgggctgcaaggaagggagaagagggtgggaggggaggacgcagtagggcgggcccgaggcgccggcgtgggcgacctcggaatctcaaagacaaccgcccaggccgctgaccttccctttttcctggggagccctccgactttggccccacgtttccccaaagactgcccttcccctgtctccttcgtctgggcgcccgaccaggatccagggcagggagctcgccccgccgcagaggaggatgggcgaggagtaggcggcggcggcggtggggaccgcgtgggagctgcttctgccacctgacagcgaagcaggctggtgtccagagcccccgtgagggccagggcgccccccagcgcagcctgcggcctgggttccagacgtgggaccccaaccccgctcgcggcgcacggagcctcccctgcgcgcctgtgtcctcgggatccacccgagcctggcggtctaaacagaaaccccaaacacccgctcactggggagcagccagggcaggcctacctggcaagggccagcgggaaaggagaaaggaaggcagggagccgctggagctgaaaatagccgcgagctccactcctcgacccagagacggagtcggctcccccatggtcacctagccggtcgggggccggcctggggggcctgatccctggcctgcggtggcacacattgttgccacgtcttttcctgcacacctctcctactgtcagggccccacccatgcctggctcagccagactcccggcccggtgtctacctgcctgcaggattgaagcgcgcaggacctcgtggagagtggaaaatatgacagggacacgagccctgtcatgccacttccatgcctaggtatttccccgccaccgtgggcggggcagacctgccttccccagtggagcgtaggaaggaatgtgacatcacactaggaagtggcttgaaagtctttgagcctgattttctggcatctaagtccttcatcaccaggagtgtctgcttaagtctattccaagttgaacgtctaaatgaattattcattcctttccaaatcctatttgagcagttactgcatgctctgcattggcctatgtggaatgaccccaaagtggaagccatcccaaatggcttctaaggagaattatgaatctgcctgagtcgtgctcattaacttctgtaaggcaggaatcccatggtgttcaagtacttcagagcctgaagactgttcctgtctaaaacttcccgataaggtgatgtcaacagggacctgttgccctagccatcaggagacaccccagagtcatcccacagggcactgagttgtaggaaaaggttcaaaatgtaatctccattcaatagattactggtcaagctcttcccaacggtctttgaaagatcagagacagtgagacaaaagcaaccataggagcagagatgcaataattgtgctaatagcaaagcttcctgtgataggctgaaggtcagtggtttgtagatttctacactcttaaaaagtattgaggattccaaagtgcttttgtctatgtaggttatgcctgtcaatattactacattagaagttaaagggagaatttttaaacgtttactttcttatttaagtgacaataaacccattacatgttaacgcaaatatcatacaatttatgaaaaataactctactttctaaaacaggcttattgagaaaagcggcattgttctacatagatgcagatctctttgatgtctggcttactagaagatgactggattctcatacttgcttctgcaatcagtgtcatgatataatatgtcatatagcttctgaaaaggtccaccatacactaatgagagaatgagaataaaaaaggaatataaggtcttaatattacgatgaacatagttttgatttcacagatctttttgaagggtctctcagggacccatagggctcccactctttgaggacctctttcttaagctataaatagagattattatttatttcccctactatcagcagtaaacgaggttcctctgtatatgtatattcttcagcgtttatgtcctcatccaaaacaaaacaaaagtgttactatttttataaaagtcatatgatttgcattcagaattatttctatgagcagtgttgaaaggtatttctaaatctttatgctatcttttttcattttcactttatgaatagatgcatttgtgtcctatcttatttcttagcctgaggactagtatatatgccaagtttaatgggtattgttgccccaaaatgtatgaagttaagacaggccatcccagtcccctgcagtgcctctcactggacacttctgacattgcactttgctactaattctgagaatctgaaatttaacttcctgggatggtctctatgccaaatgtgtttcctgatacgtggaaaatgaacacttggctttgaaggcagaactgattccgggtattgtaaacttagcaattaaaaataacaggaaaccataatatttactgcaggttctcaattaccttgaaaaaaaaaaacttaaatgtattcatctccttcgaacatttaagtttttccaaatttatattttgctcttataaacggtgctgctgcaaagattctggtaatgtccttttgtgcgagtatttcagaggccatttagtgaacggaattgcagaatcattgggtaggtacatcctcaattgtattagaaaagccctaatttttttccatagctatgtcctttagaggaaaagaatttcattgcttcatgttcttaccaatatttggtaatgtcagacttttaaattttgccagttttgctgctctgatgtaaaagctatcctgtgattttattttatatacattt

SEQ ID NO: 3159 - DNA, 4001 bp, Homo sapiens
tcttcttggcaccctgttctgtgctgggcaaacattgatacctcccatactcctggccttagatggagaatgtggttcctctacccagggaacatggtgtcttcactaagcttattgcacttttttcccgaattcaatccaattcaagttaacacacatttatttagcacctattgtgtgtcagttcaaaatattttgggatgaaccagttttaagcacagagatttatttcttcacaatgtattggtatctggttctaagagtggttccagcatcctactttacacatttgaaaaacacataagaccatgggctaacattgtagcacaacccaccagggaccattgtacccactgggggacaggggaggatctgctgcccccggaataactgcttgtggttgacaaagcaattcccctctccatgatttcattaagtctctgtgcccccatagcatagtgtagtggtttgaagacagaatgtctgcagtcaatccacctcctcctcttatactagctgtctggccatgggcaaattatctaatctctctatatccatttcctcttctgaaaatgtgagcaataatagcccttcctcatagggttattgagagggttcagtgggataaaccatgtaaagtgctcagcaaggcgcctagcttgtaacgtgtccatgacccattaagagctgacacttccactgtgcttactacaagctaagagttgtccagcttcctctagacctcctcttaacacccagaaaggagtgcaaggaaagtaagacccagaaaggagaatggcctgctcattagaggcctattttatttcattttatttatctttacatatttttttttagagagagcgtctctctctattgcccagactggagtgcagtggtgtgatctccattcactgcaacctctacctcccgggttccagcaattctcctgccttagctacccaagtagctaagattgcagacatgcaccaccatgcccagctaatttttgtatttttaatagagacagggtttcaccatgttggccaggcaggccttgaactcttgacctcaagagatccacccaccttggcctcccaaaatgctgggattacaggtgtgagccaccacgcccagcctcaggggccaattttaaattagaaacttaaaattagagtctacataccaatgatcctgagagtttttttctttgccccacacaaatcctaaccggaggttgcaaactggcagcttataatttaaatattttatctgcttgctttattgtctggtttaatcagaatactatatataatgaaatcagaatatcggactcttctggaaaagcgagaagttctggccacctgagcctgcattctcttgtgacaactggtggaactgactgtgccaagcccttaattctccacagtccccacccttccttatcaatcaaccctcagaccttgtggctcagtgccacattctattagtatttctcattgagctcacactgttctttctctcatttaacagggctatttcaccaatttccctattctatcaacagtggaaaatgaccctcacactccaaggactccatgacttctgtcacagcagttacacctctctgttcacctgctgccccagcaggcactaggcttgcagcccctgcctcagagtgcctgcatggtctcccatggatgcctccccgtgcccagatcccccagacaggcctggagctccatgcgcttgacattttcctggacgcttgctcaccagagcctgaaagcatttgataaacaccaattgtagacattttcctctctcatttctcaggtgaaaaaatgagagtggaaggagcttacctaaagccatggggagggcctcataggacaggaggtcttctgaggtcttccagactctaactcaactgagctgctgcccataaagtagcacccgggcagtacctgggccacagtccctcccagggtggagctgcccctccttccagagcacctcagagagtacaaggaggagcccagcctcccctcccacacactcacagagggttggccagcatgaggagatgggccggctgatggctgacttgatgccaagcaggcccagtttccaggagggtgactcaggctagcagaaaccaaactggttcttatctgcgtaagatgggaggtcacatgcagagaactgagctgggccttcgtgcttaccccaaccccgactgccgccagctcatgcatgtgtgcacacattcattcaaaacatatgtgttggcttaatcctgtgtgccaggcactcttccaggcattgggaacaagccagacaaggtccccaacgctctaacaaaggaaaacagacaagaaacaagttagcaaataaaataacttcatagggcatattgctatagggaaaatccaaagcaggatatgcttttgagggacctaggagtgggtggctattttagggaaagtggccagggaagccctctctgagagggtgacataagagtggagacctgagcaatgtcaaggaaggggaagaatattccaggtggagggaacagcaagggcaaaggccttgtttgagcactacgtggaagccatgtcttagggaataacagggtccatcccgcttccagttacccccatgccctatacctggcctctgccgtgacattgtccacaaggccagatactctctccctgctttctctagaagcacctgatgttctgaacacccctcctcctttttgccgttgggagcgaacctgcttgtagcttcatgtctctgcattctgccatcagggagcagacaactcacaaatgcttaaagccatccaagttgatggggagcagtggcaagagacccctgggcaggacgaagtcccgggtctagtccccaggtctgcagccaaccagttgtgtgtgtgtgggcacaccacttctgcccttcagacctcattttgacagctgcaaaatggacctgatgctatctgccctatcttagacttagggctcaccggaagcatgaatgacacgcagtacataaaatgctctgtaaatcacatgcatttacacaggcccttgctgcaggtaatgccttcatacacatatgaaatagagaggaaggagcagaccagcctactggctgccaccaatcttgccacctacaatctgtccctcctgacagggaagaaccctctcatttgcagaagggctcataattcataaacttctcaacagggatctggtaagggccttcaatttcctctaaccctgcagacctggactcattcccagggtctcttcattcaactcacagggcctgaatgggggtgggaggggcagggagccggccacaggaaagccccccaccccccgccccgcctgggtgctcccgaccgcagggacttcccatggggccttcacttcctgttctcttccgccttggctcaccaagatgtaatgccaaggtgtgtaaggtttggctggaaattttcgaagcagcttttgtagagaaattcctgctgactaaagaatcagaaactagatttgtaaacctggaaacttcgtaaatgtcaactttgtaaacctagaaagttgggcattggggcagcctgggaacctgccaggatagcctgatgtgtcatcatggtgttgtacttttctgttatgacaacaggaggaggacacattaaggtgggctctggtggccagaggttcaaatcccagcaccatgaactatagctgtgggatcctgggccacatctataaaatgagagtaagataagactcttgcccacctcacaaggtgcttgtgaagactgggctaacaactgtaaagtgcttggcatgtggttggcattatttaagtattagccattactatcagaggaaatagattggatttcttccctggggagctaggggcctagctggtcatgagagagaaaactaggcttccagtcagggccaggggactac

SEQ ID NO: 3160 - DNA, 4001 bp, Homo sapiens
gactcagctgtagtgcacagccaccatgtgcccagccttgtgcttggcaccttcctgtgtcccccagaacttgtcaaatttgcatccagctcttccaggggtatagtattttagtatacccacggcatgcatggatgagaagactgaggctgacaatggttaagaggcaggcccaaccctcacagctggtgagcagtgagcccacatttgactcccctccttacttgcttcccatctgagattcccagggaaggcacttctgtttcagcaaagcatgctgtagagcagcaacatccaaaagaactttctgggatgcaaaaatgttctgtagctgcactgcccaatagggtggccactaaccacatgtggctattgacctctttaaatgtggatagtgtgaccaagggtctggattttaaattttcttctattttcattcatttaagtataaatttaaatagccacctgagactagtggctaccatagcacctaggtagaagtttcaagagacggaacaccttgcagctaactcgctctgagtctgagaccagaagggtctttccctagagcctttcctccattagctggtgacctgctcagagtcctgcaggagcagctacccttgggaacaacccggcttcctctctacctcagccagtgacctgattctgggtcccaatcctttcttcttggtaaagggcctctctggttgagagcaggactcaaagctgtgagacgtaataaacagagctctggccagcctgacctgggacctgtgcctcacctcttcacctgtgaagtgtggctaactgtacccacctcatcaggtggctctgaagagcccacatgctcgacgaggggtggccaggcaaaccaaagtgctttgcatatggcagcattggcctgtttgtgattatcctagtttctagatttagcctcagtctggagggataaacatcacctgctggggcctccaggaggatctcctggagcttctagctgatcagagcagggagaggcaacctagggaagcagacagtccccatatctggaagggagagacttgtcactcatacacccacagagcccgacttgcagcctcggcccagacaaacataaaggtcagagtgggggagaagtcaccccaacatgatttcactgctggaatgtcacactgcagagggcatgcacaagcagtcctgtcatttctatcagcatcacatctttacaatagtgatggtctcacaaagccgattccattttcaaatcataatggttttcaggctctttacaatgcacggaatactgttacgctattatctgtgcatttaattttcacaacaaccctgtaaggcacacaaggagttatcgtgactctcatgtcacagatgtcacagacggggaaaccaaggtccctggagagtgggaccctccgacatgtcagcacagacaggccttgcccatatcagtctgggccttcgggctgtgcccctggtgcccctctctgcttctctgtcagcacattcaactaggcctgaatcgcagtcccactccttggcatgcatctattactcactgggttcctgagtctctgggaaagtaagacagccctccggtcgcactatccacatctgggatattttgaaacacaagtcctgaagcccatgcatgtaacagcctctttcttgaataatggacatcctctccagcccaaacccagttctcaggccctctggggcctggcagcccctggcagctgtgatatgtttccagtctccagctgatccaccctcaccttctcctccttggggtagccttacctgaaggcttgcatcttgctggattttctcccagagggtcggcagatcgtctctgaatggaacaggaagaggaggagagtgattaggtgactgcggaggcctctgcagatttccattctgtgactgcagcaaggcagtggactgccattgcgggcccagagttgtggtttataaagaaatagtcactcacccaagctaggcgtctgccaccctgccccactgcgagaagcggaaataccctcctcgcatttccaaaaagagaaacccttgctgttgtcactttcaaccccactaagtgtcgcaatggagtgttgtaactgattccctcccctttttcccctgtgcaatttccccaaaattaagatttctatttccccttcattgagttcctgggaagaagagcacaatggaaaccaaactccctactgttcctgacaggtacccagagtctgtttgttgactttttaaaaaacagatttgagcagaaaggccgttttttcataataaaatgatagggctccctgcacatgggacagtctcatgtcactttgtgttctttgaaaaatggacagccttggactccggaccatagattggcaaacattctgtaaaggacgagatagtaaatattttaggttttgtgcgccacgattactcagctcagctgtctgtttcacaaaaggacgttggcaatccataaatcaataagcctagctgtgttccactacaactttctttgcaaaagcggggaatggaccggatttggcctgagtctgctgacccctgatgtaaagtgagtccttctgagaggtgctttgaaatcaactcttttcccactatcttacatctttaaagttatggtctcgggacgatgacataaactcagcatttggacaggaatgggtctaaattcaacctctgccacttgccttgtgccacccgtgtgaccttgaacaaatcatttcattagttgagcctctgtctcttcactctcagaatgagggtgatcatgtcttcttcacaaatggatggaaggaaggaagggaaagagggagggagggagggaggaagcaggtgtaggaaggaagaggagaacttctggcccataatgggctctgatacacattaacttccttacttacaatattctagacccggggcctggaacattaggaaaaaggtaagcatgctcctattttatgggtaggaaaaagttgaagagaatttctgcatgatctacaggatggacagtgctggtgcagaagcatacgttgcagtgttttagagctggacgggagcttggcaatcatcctgtcccaacctggcattgttttcaagaagactcagaaagatttagacaaaaaagggatctgtccaaggtcacacagcttgctgatggcaaaagtatgcagagaaatccaggtcttctgacctccagccccgggctttattaacaaatgcttcagaaactttaaaccctaatattcatcacactctgggaagaggcaaataagtaggcaggttaatatacatcacccccttcagctagtcctcacaaaaacaaacaaataaacaaaaaaaatgtctccttggccctcaaaggaagacactatttctcaaacgtgtttcaaaaatgatggctgggctgggcacggtggctcacacctgtaatcccagcacttggggaggctgaggtgggcggatcacctgaggtcaggagttcaagaccaacctgaccaacatggtgaaactccgtctctactgaaaatgcaaaaattagcagggatggtggcatgtgcctgtaatcccagctactcgggaggctgaggcaggaggatcacttgaacccaggagatggaggtcgcagtgagccaagatcacgccaccgcactccagcctaggcaacagagtaagactccatctccaaaacaaaaacaaacaaaaaagtatgaatgactcactcaaggtgatgcagcttgtgagggcagcacaggaatacagacaaaatgtcaaaatatttactactacagcagttgatcttgatgagtctattttcaaccaacaaatcagaatctttctctcaaccaacacatcttccaaccaacaaatcagaatcaaacactttgtgtccagagagttaatccttcaaaggaggaagactatgaatgaatttcccaaag

SEQ ID NO: 3161 - DNA, 4001 bp, Homo sapiens
acaggctcgggttggttgtacaaatccattatatccttttcctgaagggtgcgaaggagacaccagcaagaaacataactgtttgaatgtttcacattctttacacactgatattccacgtccaaggatagcattccctactcattgaagcagcttggagacctctgtttcatattatgggattgaaaatcatataaattaaattcttttaagattatggttgaaactcaggctacaaattttaatggtttttaatgtgaggctctgaaaaatgtgttgacatgaaagtttttgagaatacaaagcattgattgggccattatttgttgttcagaaacagaaacttaaagaatatttatgtaacagttactgtaaatttcaaattaaaacagttattttctgtcaggtttctgcaccttcagcactattgacattttaggcaagatgattctttgttttcagggtctgtcctgtataataatataggatgtttagtagcatccctgtcatctacccgataaatgcaagtatcacacccccatcccaggttgtcacaaccaaaacatctccagacattgacaaatgtccctggagcaatatcacccctggctgaaaaacactgttttatatcttgtcatcaagttgagtgtctgcttatgcttgtttactgaaaagggtcaagagagttcctgtagtacacagaggcctgctataattatctttttttaataatggaaaattgcgattattgaagtgtttattacagagaattatgtttgttcatttaaagttgcaatgtattttttgccaaaaagatgttttaataagttcgtctactttgtgataattaactgctaaaatgtccttgctgattttactctgtgtgtgtgttctattgaagttagacatcatccttgccaaattattaatatttttgtaaattaaaataataagtcattttagtaggtttgtttcaaaatgtccctgcaatttttcttagtctttcataacatataccaaccccaaggaaaccaaaaataaaaatgcatgagcataataagtacattgtcttttaaaagatcctgaaatctgagtttccatcaaataaatggcaggacctgtcttccacactcaccttcagctgcagtgtgggctggtccccgactttagcacacatcaggcagagattgagtccattcaggcccaggtagatggggttccctctgtctttctcaagggtctccacatgtcggcatgagattaaggcaatagtgactgggaacacgatgtgaaaagtggtgttcagctgccatttccagggtggtacctctgagccagagttttaagggaatctgctaactgacactcacagtgcactcatagaatggtcacctcaccacccaccacctaaccgggacacccatcctatgtttggggaacactttccattagaaaagtcagtctttcatggattcaaaaactggtcctcccatagattaccctcttttgtcctactcttactccttgaagtttctcagaatacgtcttccactgtttttcataggctgacccttcagtctcccttaagccttctctctcttctctgacttcatgaccatagtcccagaacaaccttatgctcaccctctattcattattgtctgtgagatgctcctctctgtagatatgcccggttaacaagcccactgtggaataacatctgagcaccaaacacacaacagcactggccaaaggagctgcctttcacagaccgtggctactcacctggagacatacggtccttcctcgggactgctatgagcgtctggtcctgaagaacccacacccgatgattgatatcctgaatgctcccctgctgaggtgtgtcaattttcaatgctgttgagaaagtcaaaatgtaaattagtaagaatgagagcacagaatatcacccccttgtcaatttttcgcccttccacgaggatctttacctttttccattgtggtggtgttgtttcagaactgccaaggataggagtccttttatgtgcagaccgaccccaagagaggacctgagtcagtcccaagccacagtttaaccctgggtcagatgaaagactggcggccagcccagcagtgaccccagtcagaatctatactcccagaactcacccagcacccttactttgttggatgcagtctacctccagcagaagcagctgcacctatgaatcctgcccaggcctagacccaggaactctaatatgacaaagagtgccaaggccaaagacctggaagcaaaaaaaatcagaggtcaccagactttccagcataggccacactgataatctgttacgaaggaccctgtatccctaccattatgaacaatggcttctactgcacttgggttttctgacaggctgtaacagggcccaggccttttatccacatgggcaaggaaggaagttctgcctcactaagtctggcactgcccaacactcaggatattttctagttcctgatgccagaggatttagtgactctttatgtgaacagcatggttaagacttctccaagcaacctgaaacatgagggcatgctaaacttttaagagcaggaaatatagtcacagatactgagttgagaaacattacgggacttcttccgggtcaatgactcatctctgatgccacaaaatgaaacgatggaattattcctaagagtgggagccctcagtaagtgcaaggtagactgaggagggataggtctcttaagacctctgtagcttctaatcactcctggtccacaggaactatattcttggtcaatttcagaccagaagcccactcactccagtgaccctcctccagcttctcagagccactgtgcatgctgcttctccatggaagaagggagtattactgtagcaaagccagctcctgagcactctagccacctcaatggactctagatcactatctctagtataggtagcgtgatagtaaattttaagtgtcaatttgactggtttaaggaatacttaaagaactggtaatacattagtttggggtaagtctatgagggtgtttccaaagaagattggtgtgtaagtcagtgtactagtggggaacatctaccctcaacgtaggtgggatccatccaactggccgggggcatggatggcatggaaaagacagagaaaaggtgattttctgtctctcctggagctggggcattctctcctgcctttggacattataactccagactttggactccaggacttaatatcagcatctccctgggttctcaggctttctatcccaaagtgagaattacaccagtggcttcctagttctgaggctttaggacttgaactgagcatgttacctgcatcccagggtctccagcttgcaggtggtctgtcatgggatttctcagcctccaaaattgcatgagttcattcccctaataaatcccctttcatacaagaggtcatcaaaaagttcatggaaaatgcatattatgaaaaaaactatgcatggattttgaattattttgcaccaaaataaactcctactaacttgttataaggtgtttgaacaggatctagtttgaggcactaagaaaggtaagacatcagtttgaaaagagcccctataagatcaacatgaattcttctaaaattgaagcaagaacaaaaatcaaatttatggtgaaacttgggtggaagaatggtgaaatcattgatggcttataaaaagtttgtggggacaatgacccaaagaaatcagcagtttacaatggataactcattttaagaagtgagacaatattgaaaatagcacctgcagcagcagaccatccacatcactttgcaaggaaaaaactaatctttttgtgccctagttgaagaggactgaatattaacagcagaaatgatagccaatatcatagacatcttaattggttcagcttacacaattatgactaaaaaactt

SEQ ID NO: 3162 - DNA, 4001 bp, Homo sapiens
cgctactcgggtgagggctgcagatccttgtggaaagagacagaaaaagaggaagagagcttgaattggaggccgtgcctctcagcgtggcctcccgatccttgaatcggaggccgtgcctctcagcctggcctcctgatccttgaatcggaggccgtgcctctcagcgtggcctcccgatccttgaatcggaggccgtgcctctcatcgtggcctcccgacctagcctggtggagagcgccccctgccggtagatcctggcccggcacactgagagcggcaggccccgccggaggggccagcgcaggaccggggagaatggagctcagccagtgcctagccctgggtttatttccagtttcctgctggagagcaatggtcaaactacacagtccggcggaggcgagtccgcaggctctggaagcctctgaggcacagacgaggaaagcgcctgaatgtggatctggggtacagaagttgccggtggctctggccctgttcatgggactcagtcagcagaaactgtgggtgtgacacacaccggagcctcacctgccctgtggactgcccacactctctctcagagcctcacctgccctgtggactgcccacgcgctctctcagatcccggcctgtgcacctggcccttccccagcctcccaggcagagggtgccacggggctgagggcaggcaacaaagccactggcctctggctcagcacccagctgcagccctgtggatcctggcccacagcctccccatgacttcactggcatccagggtttctcgaaagcgctatgagccaagtggtacccttcccctctgatgtggctgggttggagagggagtcctggatgcagctggaggtccccttctgctcacggctccctggaggctgtgtctgtgcatgcacaccatcactcctactccaggaaggactttcacggatgtcctcagctaccaaaagtcactccagggagtgataaattccgtccaacccaaagtgtgccacactctgctatggggcactcctttgtctctgcaccaactctgttggtttctattatcttctctccctctctccttttttttttttttgagacagagtcttgctctgttgcccaggatgaagtgcagtgacatgatctcaggtcactgcaactttcacctcctgggattcaagtgattctcgtgcctcagcctcccaagtagctgggattacaggtgtgcaccactatgcccaactagtttttgtatttttagtagagacggggtttcttcatgtttgccaggctggtcttgaactcctggcctcaagtgttctgcccgcctctacctcccaaggtactgggattacaggtgcgagccactgcacctggctggtttctattatcttcttagaaagcctgttggtcctttgtgcagactccttcattcccccagcctcgagctctgccttctattccaaatgtgtgaatttataagcattacacagcttatttttcatattggggaatgggtgtgaattagtatgaagtcaagctgcaagagtaccaataccaggtccatctcttactagttttgtgaccttaggtgacttagcctctctaattttcgttttgtcttatcagttaaatgggaataagcatagcacttaccttagaggactgatgtgggaatgaggcaacataatagctatattgcttttatcactgtacctgacagagtgaatgtgtaacaaacgttaacctttcttgtcagcaaatttaaaacctcacagcatattctgcactcattacgccagtctgttggagctgagtccatgcctttttctctctgcgttgggaaagccatgctagctacatgcatttttggtcatgaaccagtcttagatttaagtcaatgtaaatttggcctttgccgtgttcttaatgtcttctttacatacctaggaaaagtgaaggagaggtgagaaagacagagtggggaggaacccgtgtctgtgggtttgtgctagatgccaacctggctcttcacatcctctgtctcatccagtcaagcagccacactgagtcccccagcatgagaacagcttccacagagcaggagattctgggtctgaaatgaggagagagctccagtcccaccagtgccctagagcatacctcagaatgctcctttctcctggtgggatccgtggagtctgcctgctcttccaaggatgcctcagccttttaagtaaggcctagggaggggccctgaaactaccaggacctgaggagaagcaggattctcagcgtgatttcacaccaccctaagccgccgggaatacttgctgctcattatctctctattggagtctcatggaacacattgtgggaagtgctatagaattctagggacatagtgggcaccaagtgaatatcagttactttaattattactaaatttatctccctaacaggaatttactatcttaccataataaactctgcttacattctcatataggtgaatacacctgccctaagtcatctctacagcaagagcagaggccacatctacctccagggttattgccattctcacaaaggtgaggataagtcaccacagggaacattgcttctctgcaggctgtgacactttccagggcatataaagcccatgaagaactgagatgtttgctgagaagagagcatacccaccgaagacagtggaaaatgaaaaaacaacaggagtagaaacttcccaatagtgatgtcaaactgtattagttactaattgctgtgtaacagcaaacctagcgacctaaaacaaacaaaaaaattatttaacaaagacagagtcgggaataagaaaactggcttggctggagggttcggctcagggtgtctgattaggttgtaggaaagatgtcagccaaggtttcagtcatctgaaggcttgactgggactgaaggatctgtttgtaagattgctcactcagaccattggcaggaaaccacagtttctcaccatgtgggcttctatataggggtgcttgaatatccttattagatggcagctggcttcatccaggtgagtgttctaagagcaaggaggaaactgcaatgccttttatgacctggtctcagaagtgacatgctgccatgttcaccatgtaacatactcattagaaaaaagtcactaagtccagtccatactcaagagaagggcagttaaacttcctctctgtatcagtctgttctcacactgctaataaagacatacctgagactgagtaatttgtaaaggaaagagattgaattgactcacagttccacatggctgaggtggcatcacaatcatgatggaagatgaaggaagagcaaagtcacatcttacatggcaggagggaagagagcttgtgtaggggaatgcccctttataaaaccatcaggtctcatgagacttattcactagaatgagaatagcacaggaaagacctgccctgatgattcagttacctcccactgggtcccttccatgacatatgggaattatgggagcaacaactcaagatgagctttgggtggggacacagccaaactatatcattccacccctggctcctcgcaaatcacatgtcctcacatttcaaaaccaatcatgccttcccaacagtcccccagggtcttaacgcatttcagcattaactcaaaattccacagtccaaagtctcatctgagacaaggcaagtctcttctgcctatgagctgtaaaatcaaaagcaagttagttacttcctaaatacaataggagtacaggcatttggtaagtacagctattccaaatgggagaaattggccaaaacaaaggggctacaggccccatgcaagttcaaaatccagcggggcagtcaaatcttaacgcttcaaaattacctcctttgagtctctgtctcacatccaggtcatgcttatgcaagaggtgggttcccatagtctttggaagctccact

SEQ ID NO: 3163 - DNA, 4001 bp, Homo sapiens
agcaacagtgactgtaaagataagaggagagatggtatcagtttccttttgaagtcagaaagattatttgatttagcagggcagtatcctcaagtggatctggaagagagctgaagagtgtaatcccaactagacccaccaaatggccaacccccatattcattcattcattcattcattcataccatgtgccaatcactgccctagtaaatgagcaaacacagagagctaagcagacaacagagtatgctcttgagattctcacgcctctgcttgagcacatggagatggggagctcctacatcaagcagcccctctgattcttggagagcttggtcccttttgcaagtttttcccaatgtgatgctgaaacctgcctttctgtggtattcacccatttagtcattttaggacaccctgaagtcatgcagaacaagctactagtcttccataagacagggcttcagatgactgacagcagctttcctattcccttggaggctcctccaccatctctggcttcttcatcttagtggaacccaaagttctccctgacttctcttcccaattaggtgtgaaattctccccactcctggtgggccccattgtaaagtcacacttttacaaaaggctgatgccagcttcccagccacagcagtgcaaacagtggggaaggcacagggtgaccactcacctggggtcacactgtcacttcgtggaactgccacaaggttctgaccctgaagggtccacacttgctgattcaaatcattaatagtcccagtaataggtttacacactgattttgggatagagaaaaaaatgaagaaatattataatcaaggctgctttactagacccaggagaaaagtatctaacccaggccattttgtaaggaaggtgtggggtttgcatccccaaactgacagcactcacatcacccatcagcctagcctttctttctagtgaagttgtgagctctggtgaggaaggcaagggctaccaagggaagtcactggtttaagagggcaaactatcaagacagagggcaatgagcagtctcacagaacctgtgtgccaaggcccagctaccctcttttgtgcctactctgtgcttggccccggtgctggggactggagctggatcagtgactaagcaatagctcccaccctccagaagcccagggcccagtggtaggtgggcagcaccaggtgggaagggcagtgtacagagaggagcagagaaggctggggcttccacaggagatagcgtgagtgcagagggcctaagcctccagagccccatcccaacagcatttgattcacttgattgatagacggcccttcctccaccatcagcgtctcctggagtgcctctcatagtgtggttgtctcagcacctgtgaaagcagacatagaacagatgaaccacaagagatgtttccaagaccttccaggacactagctccacaggccctcattctagacagggagctgggaaacctggcctgacacgaagctctgggcagaagttctgagccacatctgggacgaaacttgaaggaagcatcagcaaagggagaacaggtagaattttcctccacctggagatccagatagtatggtagtgtctcccctaggagttcgaaggccaggcataaaatttgaccttaaataacccacaggcacctgatgccctgactcctcttctctgaagcctccaccccttcatcggcattgtttttgcctaggagcaggggagggtcccatgccagggccactctgccaggatcccagcaactccccagtaagaagcagccacacataggacaaagcacagagccagcctgatgtggcccttcccttcattaagcccaaagcacagatgagaggaaaggctccagagggagggagaagaggttttccagctattgactatacctggcaagaaagggtctttatctacagtccaggggactgaatcgtggctccagcagcttccaaggtcagtgatgggttctaatggagcctggatcatttatctggatgagcagagaaggaggctccagcttcctgggtggggcatgagaaacgtatgacatgaaagaaaaccagctcctcctaccagaagatcctgtgaggctcggaggaagaaatcacagaattagcacaagtatcacctgtccgggctcgctgagaaataagtgttgagccaatccgcacaaaatcaaccacaaggaaatgaggttgatgacagatcctaggtttctcataaaggggaaactaagggaatttcccagagttcagctctcctgtcatgtcattctagagctagaactggaaatgccaggcactctcatgtcagggactccatctcctgggactgggagccttgccctctgcagtcaggctaaaggcatcctgtaagagcaaaattagccacacgtctcaggcaaggtccctgtggcatttctcaactaccccacctaaggccacacctgaatggaaagccaggcagtagagctcccctacctaacactctttcagctccatccacatggggagccacagggactatgcagactggtcttttaactgaggcaatcctagtttcaggtaccctcaaaatgcagtggactccagaactgcctaaggaagtaaagaggtgggcagcgatttctcccaaatctgagccccagatgccagcttatcccccaccctctgccctaggttcctgatcagtggtaatagttatttttatatcttgtttatacaccccatcctatctgctgtagccaagcctaaaaatttactgaggtataagttaactactagagtgaagtgagttttaggagacagacttgaagcactaacagcttcaggtttacccatctataaggaagaaaagcacaaagaatgagacagaaccttccagataagctcatccatgagcccctcttcccagccctgcaaagagtctcctgactcaacgtctcttacttttcaccctaatctcctttctggccttggaagaacacagtcctttcctgccatggccccaattctatcacttttggcttccagtgtttctgtgaccctaggaaagagtgtggtaatgccaggtgcacttttgttcaaagtcaacctgagccagtgccacctcacttgagtctccattgccctgttaaaaatcccctccattacacatcagtcaacataactcctttcttgggatgttcaccacaaaacagcatctaaaattcccatcatttgaccccccaaatcccttaagcctgaatttccaactgggatccctctgaaagcagaatccatgctaggaattgcaaacaaagggaattgaataaaaggaactagatacacgtgtgttggaaagccaaagaagattaagggattgctgtggtatctcagatagtaacaactacaggaaggaaacaaaagggaacaaaagaacctaggtctcaaaggagcgcttttgtaggacttatccccagatatgagtcggaggtgaggcgttctctgccaaattgatgctcagacctctgaaaagagagtacagtctggtcaatgcttggagcatgaaggtggaggggaggggtcaagaagaggatgctcagaggactcacaggacacagctctaacagctgaattttctttggttcaaaagcctgtgggtacagctagaacttcccacgcccagatgaaggttgcaaaaactataaaagagggtgacatgtgtcctcttcagcctccgccctcattccacttggtcctgacccttcaatagattccaagcactcagagaatccagcccttcctagaattcccagcactcagcatccatcctgaagtccctagtttaactgttagtgtgaataagtatcagagaaattggagggagtaggagtgatgatgataaaaggggagaactgaatcactggggttgatcagtaaagagcagagatcacatctactgaagaaat

SEQ ID NO: 3164 - DNA, 4001 bp, Homo sapiens
tgagaggtgtagtattttatttgcctttgcttagagcctggtttgtgctgccccaatgcctgggctctgtaggcctatgctaatctgtatgactattctaagccctcttcaggccccctcccctgagagtgtatagagaccaaggaaagtgggtcatgtttcatcaccaacctttaatgaccttccctgcatgcagccctccagctagaagctggttattatgcagataaagcaccttcaatgccgagtccttcattctgaaacatcaggaaggggtgaggactacattaggaggagggtggacactccagcatgccctggatccagagaaccccctgatctcaggcattttgtctctctttcttcctactgtgccagaagtaacagcacagccttgtctcccagccctgctgggctcatgccctacaaggaggatgaccccacagtctcccactggagtctgtggtttgctccttcaccctattcaaccttttctgccccaacccatctcctgctggaagagaagctgcacggtgagtcagagccctaggttcttgccccatctctgcctccaatgctgctgagtcgcaggagacaactctctcgcccactctgggcctgagcctccccattgctacactaagatgatgggttggataacatccaggcctcttccacgttaaagcctgattcttcaattcttcaagatacatgtatttctatttggtcatatattccttactaagtgaggagtttctttaaatttaaatttcttttatttaacttttcaaagttgtttctcatctttgaactcagttgatttcctggcatcctatgaggtggaagatgtatcctaaagtgggtttctccaaaagttatatgggggaaaaggatgcagtgtaaaaattgggtcgatgcatggctaaatacaattcaacaagttgccttacttcagaaaacctcagagtcactcatatgctgagctgggctgtggttctcttatgagaggatgtagaaagcagaattccctgcatttacttgatcagagagctccactgtgtaaagcatctcctggatgcctctgtgggactcctctaatcgagtcccatagaacacatcatgggaagtgctttattagactgagagaaaggaccactctcatcctctgttgtaaagcccagaacacggcagagtgtctggcttggtacatgccagtgggtggacagactgactgatggtaatggtttttgttttattattatccccaaagagtagcagggaggcaggggcacagagtgggtgagcttacatccattcactgtgatgggggacaatggcggagctctgagcagggatcctggcccccgttcccaccttggatagacttggctggagctctagactgggaggttcacttatccccctcagcatcagggaccccttgtgagatggcctgccccagtcctgcccctatttgaaaaaggctgggaaaactctaagagcagtgaggtgctggtcacaatttcccagctgcaatggcagcccctcccttcctccctcctgctcagagctggacaacgggtctatccagaactcacttcctccggaggacaccaccaaaccagggcctcatacactcaccggaagcacagcgccccactcaggaccatcttgagctccacagggtgtagactcccctattttggaataaacaacagaaaatcatggagagagaggctgagttggctggggtctggggagcaagcagctgcaccgagctccccagcatgtgaacagcctccacggagcagattctgggtctggggtcaggagagagctccggtaccaccagcgccccagagcatacctcagaatgttcctttctcctggcgggagctgtggagtctgcctgttcctccaaggatgcctcagccttttaagtaaggcctagggaggggccctgaaactgccaggacctgaggaggagcaggattcccagcgtgatttcacatcaccctaagtcgccagaagcacttgctgctcattatctgtcgtggggagggaagcttctggagacagtttccttccagaaatattgaagaacttccttgaggctttccagctctttgtgagcactaggcttttgcatctcaggggctttcagaccctaagagtcagtgcccatggcagctcaagggaagcgcgactttctttcctccctgcctccctccctttcttccttctttccatctttcattcactcactccctcccttttcccttcctttcttccctccctctttccttcctttccttctttcccttcccatttcctcccttcctcccctattccctttcttccttacctttttcactccttccttcactccttcccttctccctccttccttcctctgtctttcctgcctgccattgccaggcctacaggagatgttagaggtgggactctcctgcttagggaatgttcagcctacatgttcattgtagaaaaacctgaaaatccagatcagccacaagaaaaaatgtgaatacttgtcttttctgagtgcatcatcagaaaaccaatgacaacactatttcctccacacacatacacatgtaactatagacagctttcatacaacagattcacaaaacctatactttttccaacctcattttttcatgtggcaaaatagcaaaatatctttccatactaaatatgaataatgacatgcttcaatagctgtatagtatttaactgtatcactgtaacattatttattgaaacctatccactgttatttgtcttttatatatttttctctctttttttgctattgaaaaccatgttgtgacaaacatctttgtattaacatctttgctcatgtatctggttatttctttagaaagtaaaatctagctcatgccatctataattctgtaagtgatctttcttgaatacctaattgataagataatacttaattgtgaaacagttaatgcagtttaaatacctccatgcactctctgtgatggatctgaaataaaggtaagggtcagtgcacaaaaaacaatttaattatatcttgaataacacagataactatttattaataatttattgttaaagcatacactttttttttaagttttatttttcttttttcttttattattattattatactttaagttttaggatacatgtgtacaatgtgcaggtttgttacatatgtgtacatgttaaagcgtacattttaaagaaatggtattcagacatatgagccaagaggtcctacaagtgttcaagaataaataaaatatcaagttgttcaaaacacagaaaataatctacgattttcataatgccactaatatgatagacacttttcagaaaaataaaattaatgtagaaactgccttgtacaaaattattaaattacaaattgaccaaatggaatgacagtagaaataagatgaaatgagacaagcctggccaacgtggcaaaaccccatctctactgaaaacacaaaaattagccgggttggtggtgcacatttgtaatccaagctactcaggaggctgaggtgtgagaattgcttgaacctgggaggtggaggttgcagtgagccaagattgagccactgtactccagcctggatgacagagagagctagactctgcctcaataaataaataaataataagtaaaatgaaactatgactgtgtatactgtcaatattatatgaaaacattatcaaacaggcctcaccaacaataagttctctctggacctatccctttgcttgacttactaattaggtctcagactctgtgaaattagccatgaactaagagaacattgataaattacacattattcctgtctgatagaaaagataactccaaagggtgcagttttattgcctcacaagtcataaagctgtctttaaaacgtaacttagccaacctatttcagcctttatttcttgactga

SEQ ID NO: 3165 - DNA, 4001 bp, Homo sapiens
ctccttcaccctattcaaccttttctgccccaacccatctcctgctggaagagaagctgcacggtgagtcagagccctaggttcttgccccatctctgcctccaatgctgctgagtcgcaggagacaactctctcgcccactctgggcctgagcctccccattgctacactaagatgatgggttggataacatccaggcctcttccacgttaaagcctgattcttcaattcttcaagatacatgtatttctatttggtcatatattccttactaagtgaggagtttctttaaatttaaatttcttttatttaacttttcaaagttgtttctcatctttgaactcagttgatttcctggcatcctatgaggtggaagatgtatcctaaagtgggtttctccaaaagttatatgggggaaaaggatgcagtgtaaaaattgggtcgatgcatggctaaatacaattcaacaagttgccttacttcagaaaacctcagagtcactcatatgctgagctgggctgtggttctcttatgagaggatgtagaaagcagaattccctgcatttacttgatcagagagctccactgtgtaaagcatctcctggatgcctctgtgggactcctctaatcgagtcccatagaacacatcatgggaagtgctttattagactgagagaaaggaccactctcatcctctgttgtaaagcccagaacacggcagagtgtctggcttggtacatgccagtgggtggacagactgactgatggtaatggtttttgttttattattatccccaaagagtagcagggaggcaggggcacagagtgggtgagcttacatccattcactgtgatgggggacaatggcggagctctgagcagggatcctggcccccgttcccaccttggatagacttggctggagctctagactgggaggttcacttatccccctcagcatcagggaccccttgtgagatggcctgccccagtcctgcccctatttgaaaaaggctgggaaaactctaagagcagtgaggtgctggtcacaatttcccagctgcaatggcagcccctcccttcctccctcctgctcagagctggacaacgggtctatccagaactcacttcctccggaggacaccaccaaaccagggcctcatacactcaccggaagcacagcgccccactcaggaccatcttgagctccacagggtgtagactcccctattttggaataaacaacagaaaatcatggagagagaggctgagttggctggggtctggggagcaagcagctgcaccgagctccccagcatgtgaacagcctccacggagcagattctgggtctggggtcaggagagagctccggtaccaccagcgccccagagcatacctcagaatgttcctttctcctggcgggagctgtggagtctgcctgttcctccaaggatgcctcagccttttaagtaaggcctagggaggggccctgaaactgccaggacctgaggaggagcaggattcccagcgtgatttcacatcaccctaagtcgccagaagcacttgctgctcattatctgtcgtggggagggaagcttctggagacagtttccttccagaaatattgaagaacttccttgaggctttccagctctttgtgagcactaggcttttgcatctcaggggctttcagaccctaagagtcagtgcccatggcagctcaagggaagcgcgactttctttcctccctgcctccctccctttcttccttctttccatctttcattcactcactccctcccttttcccttcctttcttccctccctctttccttcctttccttctttcccttcccatttcctcccttcctcccctattccctttcttccttacctttttcactccttccttcactccttcccttctccctccttccttcctctgtctttcctgcctgccattgccaggcctacaggagatgttagaggtgggactctcctgcttagggaatgttcagcctacatgttcattgtagaaaaacctgaaaatccagatcagccacaagaaaaaatgtgaatacttgtcttttctgagtgcatcatcagaaaaccaatgacaacactatttcctccacacacatacacatgtaactatagacagctttcatacaacagattcacaaaacctatactttttccaacctcattttttcatgtggcaaaatagcaaaatatctttccatactaaatatgaataatgacatgcttcaatagctgtatagtatttaactgtatcactgtaacattatttattgaaacctatccactgttatttgtcttttatatatttttctctctttttttgctattgaaaaccatgttgtgacaaacatctttgtattaacatctttgctcatgtatctggttatttctttagaaagtaaaatctagctcatgccatctataattctgtaagtgatctttcttgaatacctaattgataagataatacttaattgtgaaacagttaatgcagtttaaatacctccatgcactctctgtgatggatctgaaataaaggtaagggtcagtgcacaaaaaacaatttaattatatcttgaataacacagataactatttattaataatttattgttaaagcatacactttttttttaagttttatttttcttttttcttttattattattattatactttaagttttaggatacatgtgtacaatgtgcaggtttgttacatatgtgtacatgttaaagcgtacattttaaagaaatggtattcagacatatgagccaagaggtcctacaagtgttcaagaataaataaaatatcaagttgttcaaaacacagaaaataatctacgattttcataatgccactaatatgatagacacttttcagaaaaataaaattaatgtagaaactgccttgtacaaaattattaaattacaaattgaccaaatggaatgacagtagaaataagatgaaatgagacaagcctggccaacgtggcaaaaccccatctctactgaaaacacaaaaattagccgggttggtggtgcacatttgtaatccaagctactcaggaggctgaggtgtgagaattgcttgaacctgggaggtggaggttgcagtgagccaagattgagccactgtactccagcctggatgacagagagagctagactctgcctcaataaataaataaataataagtaaaatgaaactatgactgtgtatactgtcaatattatatgaaaacattatcaaacaggcctcaccaacaataagttctctctggacctatccctttgcttgacttactaattaggtctcagactctgtgaaattagccatgaactaagagaacattgataaattacacattattcctgtctgatagaaaagataactccaaagggtgcagttttattgcctcacaagtcataaagctgtctttaaaacgtaacttagccaacctatttcagcctttatttcttgactgacggtataagcctccattccctgaattatcttttgataatcagctttataatcttgctgattccctcacttatgaaaaatagtaaatctttgacacatgctcactatatgtgtgtatgagagtcaagttttgaacttctgaaaaataaactttggcactacctaaagacaatgctgccaattcgcaaaccatgtgtggctgttttaaaatatgtccataaattcttggaaacttcatctttaagaaggtgatatggtttggctctgttcccacccaaatttcatcttgaattgtagcttctataattcccacgtgtcatggaaggaacccagtgggaggtaattgaatcatgggggcaggtctttcttgtgctggtctcatgatagtgaataagtctcacaagatctgatggttttatacaggggaatttccccacacaagctctcctgcctgccactatgtaagacatga

SEQ ID NO: 3166 - DNA, 4001 bp, Homo sapiens
gctctcagactttcaaggtgcgtcacgataacctggaagtcttgttaaagcagcccctagagcctcagcgccctgagtttctgaggcaggaggtctgtggtggggcctgggaatgtgtattcctaacacttctaggcgctgatgctgctgacgtttgaggaccagacttggagaaccacttccgccagatttgaaggagatcccagccctgacaaggagaagtcaggacaggcccgacagagaggcttgtgtgcgtggttccacctggagtggacacagtgcagatccaaagccagcaatggtgtaactacaacaaaactaaaacatcaaaggtaactgcagcagcagcggtggagaagtgacagcagcctcccccaactgtgccaggcacccttacacacctggtcccatttggtcctctctgccattgtactagtgaggctcagtattcccacatgaacctgcactagagctggggctcaggctgaggcctcctgactctgtcctgagaagaggaggtgatgggagccttaagcctgagtcaggcagacagacgttatagtacctttaaatttccacatctgtcacttattacctgtgtcacctagggcagggaatctccactgtctgtctcggtttccacacctgaacagtggcaatgttaacagtttcctattagggtgttgtggtgttcaaatggcagcatgagaggaaggttcaggctctgaaggcgccgccctgagcccttagtggtgtgggtgtccctgcacccccactggccccatggctgtttgtcctcagtgctgggaggaggtctgtgtctccagtctcttggctatggtcagaagaggcacctggaaggttcccaggcacaaactcttccttgccctgtgcctcttagcaggtgagcatcacctgcccctccccgggctcatctttcccagagttatctcctaatgggatttgcttccacaaaggaaagacttcagccccatccagcacccttaggtgtccccattctacaattctcccaccctgtaagaggacccaatggctccatcccccatccccaccctcgcacctcagccacccccatcacctcaccccgaggccttacttgtgtgaacaaaattcatggtggggaggcttgggcctggttccagggggcttccagccgggtctgcagtcagacgcagtgaggttagcatatgcaattcggattttccaaggatttaggggtatcaaagaccatttaattccctcttctgtgtatgtgctgagaaatactagagcagcatgatagtaatgacattaaatcatagcttccctcttcagaaacatagaatagagatgaactggatcacgggtttggcctctggcatgtcacaggcctctcccgtcacacctcagtagacaatcatttgggtcaaaagcctcctcctattgtcccccatgggcaacacccaaatgtgttcctcatggaatactcagatgccctgtgcctgggtcatttgttcagcccagccttagagagctgcttctcatcggaggcttctcttccacttgggaatgttgggagggaagaggtgcattttgaagcatatgcaaccatccagttggcaaacaggatgctaaagccccaaatctgtaggtgaggacgatccttttatctactacctgatgtgcctggacactgaagcaaagcttccttttcccttccagaatttctcttgtctagttatttgtccagggaaatttgaaagctcacttactgtgcaagtcagcaggaaacaactgggtctgtgcacagcacctagcaaagttctgctctaggaattacactttggccctgaggtagatttctacaagaaccttaccttctaagcagcactggggttcatctttttcccagtcctcagagcccattttcactcctgagttctcccccacaaaggacattttcaacgttgagtttattactcaacagaaaatggaatgaagtccaagacctaaggagatagaaaggggaccagttatggcatcttctcaccccaggacaccttgctgcatgtctctagtgctgaacagaccactggccttgctctgtagtttgaaatgctcgctgcaaccagaaaggcaccaaggggccagaccatgctctcctgtctatcacgccttcaaagcagaatttcccaaaccttgagtcacagtgctaacacacggggtgcaatagcatttttgtggatcttggcattttacaaaaataaaataaaaaagttaaaagtgcattgctctagtcttggggctggcacactatggcctttggccaaatccggtccctgactgtttttttaaataaagttttattgaaacacagccatgctcttgtttacatattgtctctggctgcttcgaggctacaatagcatggttaactagttgagagatcatctggcaagcaaagcctaaaatacttaccatctgacaccttctatagaagtttgctgagtctctgcagtagcctaatctttgcctaacaaaaagcagttgctctgcaacctcttttcatgaaaacctaagccaccaaatgtcccaggaggctcaatccctaatatcttagggtaggattgactcacgtgacttgcttcattgggaggggttggaggagatatatttatatatataaattctgcacaccctatctcagttgaccgagagctttcaacatcagcccaggccaacataggacagaagtggagcaaaaattggtattcccatcttaccgataaaaaatcaaaagttaagtgatttgttcagaatcatatcacttctaagattgcagagataggcagtttgtgtacaaatccaatcctttgagaaaggtttaggagtgagacaaagggaactaaattgttcatgcaaaaaataaaaatgacaaggaagggcttcaggactcaacaataaggacggtgagcaggagcaggtgggtagagctgatgggtctttaggaacagggatatctgctatttgattttaacctgtttgtggtttggcagtatccctgaatacatgaagcacaactgcctttgtcatgttggggtaaatcaaaggacacaaaaaattggaggcgcttgacagagaatttggcagccagaacatcagagcaagagatgtctggcagaaacgtaggtatccaaagacatataaagatactgtggtgctgctgaaggacagaaggatgctcacaggctggaggacctggggccatccctcgggggtactcatgaaatctgctgcctgtattaagataaatgcagggagctttcacagaattccctaaagaagcagtgcatctggccatctgaagtccatctctttgcactcaaaatctgttcccaaggaccaatattttctagactctaaagtcagtcttctgagccttcagagaagggactagcatttccagggttggtggatttcctaagctagtgtctgcctggccctccagcaatgccctacttgttagtggaagccctcctgggagagagcaggctgctactggggctgagagcaaggtgttctgggcaggtctcagagatcatatttagaaattcagatgtgcttccagtggggataaaaagcaagggtctagatggccagatgctactctacttccccatccatcctgttggccttgaaagccagtgcaggaggaccacctacctgggccagggatcctcgtggtctgtggctctgtcttggactcctggagctctgtttgccttcagttctcaggatcctttacttgaaggagctaggtctggtactcatttgtaatcaacagtttgtgagtggttatgcaaatacaacacaagtattcctttggccaataataaatagcatcctcagttatcagtgatcactcatttcctgctattttccatgccaacggtataaacaaattcctgtgggggtagtgccactctgctaaggactgtgcc

SEQ ID NO: 3167 - DNA, 4001 bp, Homo sapiens
cagtactttgtgatcctggtcatgaatgctgaatttcttcgggtttaagttcttcacctttggacctagatcaatatcaccagatatcaacacttcacattgaaaatggaagactcagccctttcttccccacgtccaagggccccagccctagctctccaccctgcctgtgggctcagacatcacagccactgaatatttcttccactcccaggctttctatcttgctgggacaagcaattaagctttctgtgcaagcaaatgggttccagatttggacagatagattcaaatcccagctctgctgtaggacagaggacaagttactaagtctctccaaacctcaatgtcctcatctgtgaaatgaaagtaatagcagcacctacttgagagaggagttatgagaactaaaatgcttactcaaataagtagcacttagcctgagcaaagaaaatgtctggcgtataaaaaggactttttataatcattgtttttcttaactctcttttttgcaccctctgactggaggcatcattccctcagcagtgcctagagtggaacagatccctgcactggccaggctaagggagcggtgatggaagagttgggagggttggaggcaggaagcccccaggagcccagcacggtgcaaggctgagctggagctttagtggctcctttgaaaagccacaaatcttgcacctggccctggaggaacaacttctagcagcaggaccagccacaacagtgctcagagggttcttagggcgtgggctcctagcaactcatttgggccaggcctgcctagagtagggtcttaaaagggaacgttccctcctggcctctgattggacaggtgaccctcacctctgcaaagagctcaggcacttgtttgataaagaacaggggcccccaggctgggccagtgactgtcaagaatgggtgggtggctggaaaatggcaaatgtgacaatatgaaaacacagtaaccaccacactatgtgaagctataatatgggtatctgtggtaggcaattctaatgtagagaataagtctaaggtgtcattcttttcccatgccataagcacatggcctctgcctgggtttctcactgtagaatgtcctcctggtctcctcatgcccaaagagtggggaggactcctcctgtaacaccggctttcctgtcatctccctgcagccctcctcagccccctctgcacagggtagcttcctctctggtgctgcagcgctctgcactcgtcagtggtacctgcacacaggtattggcatccttggctcgctgccctatagcactgtaagctccccaggagcaggcttcctatctgactcacccgtgatcctccacctcccaccctgtagtgccccaagcatcgtggacactctcagtgtctatggaagagatgactggccccaggcaagatcctaagtaactccccagtgatatggggtcagatgagatccatggttatcagccctgccttacatcagaatctcctcaggagcttttctgggcccatcccaggcagtctgagttcatggagcaggtgcaggttgactgagagtcaccgagctagctgaactctaagcttttccatttcccacactttaatgtgcaagaaatcacctgcaaactatggttcagtaggtgtgggtggtgccaagcctctgtctttctgatgcactcccagagctgtgggtgctgctggtctgaagacaccctttgagtggcatggcctaaggctgtgactctcacccctggtgcacactgggaatcacctggtgggtggcattttaagaccatggatacctgggcctcacactcctgagattctcattcagttagtccagggtgagactggaaaatgctctttttaagaagctacttttctagcaccatcattttactttgtacctcttaagcgcttcttaaagctgttctttcctttggtttctgtttccctcctatcacagcctgacataggatctcagcgtctcacatgcagactagttcactatcctcttaagtggtgttctcgctcatgatccttgaccccaaatctttctcaaggccactctgaaggtgtgagtggtcttaaggtgctggcagttgttttctatagggaagttgtactccaacagcagcagtaacatcagtgccagcgccagctttagggcactagtaactttctgtagggcagtagctctcagactttcaaggtgcgtcacgataacctggaagtcttgttaaagcagcccctagagcctcagcgccctgagtttctgaggcaggaggtctgtggtggggcctgggaatgtgtattcctaacacttctaggcgctgatgctgctgacgtttgaggaccagacttggagaaccacttccgccagatttgaaggagatcccagccctgacaaggagaagtcaggacaggcccgacagagaggcttgtgtgcgtggttccacctggagtggacacagtgcagatccaaagccagcaatggtgtaactacaacaaaactaaaacatcaaaggtaactgcagcagcagcggtggagaagtgacagcagcctcccccaactgtgccaggcacccttacacacctggtcccatttggtcctctctgccattgtactagtgaggctcagtattcccacatgaacctgcactagagctggggctcaggctgaggcctcctgactctgtcctgagaagaggaggtgatgggagccttaagcctgagtcaggcagacagacgttatagtacctttaaatttccacatctgtcacttattacctgtgtcacctagggcagggaatctccactgtctgtctcggtttccacacctgaacagtggcaatgttaacagtttcctattagggtgttgtggtgttcaaatggcagcatgagaggaaggttcaggctctgaaggcgccgccctgagcccttagtggtgtgggtgtccctgcacccccactggccccatggctgtttgtcctcagtgctgggaggaggtctgtgtctccagtctcttggctatggtcagaagaggcacctggaaggttcccaggcacaaactcttccttgccctgtgcctcttagcaggtgagcatcacctgcccctccccgggctcatctttcccagagttatctcctaatgggatttgcttccacaaaggaaagacttcagccccatccagcacccttaggtgtccccattctacaattctcccaccctgtaagaggacccaatggctccatcccccatccccaccctcgcacctcagccacccccatcacctcaccccgaggccttacttgtgtgaacaaaattcatggtggggaggcttgggcctggttccagggggcttccagccgggtctgcagtcagacgcagtgaggttagcatatgcaattcggattttccaaggatttaggggtatcaaagaccatttaattccctcttctgtgtatgtgctgagaaatactagagcagcatgatagtaatgacattaaatcatagcttccctcttcagaaacatagaatagagatgaactggatcacgggtttggcctctggcatgtcacaggcctctcccgtcacacctcagtagacaatcatttgggtcaaaagcctcctcctattgtcccccatgggcaacacccaaatgtgttcctcatggaatactcagatgccctgtgcctgggtcatttgttcagcccagccttagagagctgcttctcatcggaggcttctcttccacttgggaatgttgggagggaagaggtgcattttgaagcatatgcaaccatccagttggcaaacaggatgctaaagccccaaatctgtaggtgaggacgatccttttatctactacctgatgtgcctggacactgaagcaaagcttccttttcccttccagaatttctcttgtctagttatttgtccagggaaatttgaaagctcacttactgtgcaa

SEQ ID NO: 3168 - DNA, 4001 bp, Homo sapiens
cctaattaattgcaggtaaaaagcaatggagattttaagactcataggtttacacgcacactggtgaatccaaatgctgtcccaaatatattcagatagaaattatactccattgacaagagaaaaaagactgctacacaaatccaatttttacccacagctaaaaccgtggttattttgaaaatgaatggctgagtcaagttcaaagactccaggaccagttactgagatgctctgtaccatcagaacggtcagtgggggcagggcacggtggctcacacctgtaatcccagcaatttgggaggccgaggcgggcggatcacctgaggtcaggagttcaagaccaccctacccaacatggtgaaaccccgtctctactaaaaatataaaaattagccgggtgtggtggtcggcgcctgtaatctcagctagtagggaggcctaggcaggagaattgtttgaacccggaggttgcagtgagctcagatctcaccattgcactccagcctgggcgacaagagtgagactccgtctcaaaaagtaaaataaaataaaatgttttctcgcccagaattactgcaaatcacaagcctgaacatccttggaagctcaattcaaacactgcctccttccccagtctctcggtgcccgacaatccctcctcaagagtcctcagcatttcccacagtcattaacttttgccagttttaattaccgtaattagtacccttcagaaagcagctcttagaaagcgaaggctgggccttactcacctccgtctaccctacaacagcagctcccaaaccactggtctccagcccccgctgggttggcctggggatttagtaacagattcggaaaccccactctcagggattcggatttactggggctgaggtgggcctggaaatctgaacgtcttaagttttccaggttttctgcccccaagttaaattttgtaataaggccctaaactacaacatcaagctggaagtcttgcatatgaaatattcacgcgttttgacagatgaaacccggagactgtaacccacaggacgcagggattaacacaggccctgtttcaagctgctaggatgctgagctcaaaccacagcccacagggactcccactggcaggggccagcgcttaggagatgagcggaccccttaacttcaaggagagggggaacttcccgtggaccagaaaaaaaaaaaaaaaactactgttaattatcacaaaatcacaggatgacagaggaggcatcctgtcttccaggcttcaaaaacacgaaggattaagatggtgattaattcaatctccagtgcaaataaaaacgccaagcccctgaacttgcaccggcccggaacgcggccgttccacagcccgcgggtgaagtgcggcccggaagccgcgggcgggcgacgcgcaaggcagcccaggccgcgggtggaatcggggcgcgggggcccgcggtgccgccgggcgttcagagccggtccctcgggtcggcccacgcggtcgcgccggcgcctttcaccgccacgcagaggggccgtggccacgacggctcggccctttccttcctgcgtagcgaaaatggcggagcggcctctccgagctccgcgagcgaccgggcctccgacagggccgccagtgggccggacggggcctggccaggcaggagcaggccccgtgcagcccgcgccgcccgccgcctcccagcgcgggcgccgcctcagccgccccgggcctcaggccgcccccatcccgcctgctctcccttccctggccggcccggcggcaacgccgcttaccggcagccgggcgcggcgagcgctcgggctccggcaggtccccgaagaggtccatggcggaggctgggtggaggcggcagcagcgacagacactcagcccgcgagcagcggccgggctccacaccccgggcgggcggcagcagcgggcgggcgacgggcaggggcggccggcgccgtcagtcacctgcagggagagtcccggacgccaccaatcggcgcgcggcgtggcccggccgccccagagggctgcgcgcgggctgggcggggcggctgggggcggggcggtgcgcatgcgcgtgggcccctcccgcgccccgactgcgagccgggcggacggcgccgtctgggccccgcggtgtttcccgccttggcgaaccccgggcccctcctgcttttccttggctgggggtgtccgatttctgtcaagtttcgttgagttcctgtccaagaagccctgtccagagagaaacgtctgagctcaagggcagcccctgatgcctgggaaggctttctggagctcttgccatctcttcggctcgtcctttcaccacggcgtgcctggtttctggcctgttttagagactgagaaaccgaggcttggatggagcggccctgggcgtcaggacggaaacctcaaaagatgccggagggaaaggaggcattccctgacttgtctgcacccactggtgtctgtggggagcggagaagaggggctcctccttaatggtgtccccctccatgcctgtaaagagaaaggcggccactgacatcggggagctggcctggttctgcagccaggacttggggttggtctggcacaaacagctaggcctgggtgttctctttgaatgtgaacaatttcataaaacaccaacatcaggccgtgatacagatcaagagaaaaaaacagaccactgtgtaatcaagtgtgaacacagacaaaacaggaacactgtccaagccacaaaagtgaccacattcccctcgtcttggccaataagagtgattgctgcttctttaccattacatgtttagcctttgtctcgtcctcctgccgtctagataagcttcatcaagatatccaatcatggaatcctcctcttcctgacatccaatccggagcaaaggcccgtttccataaatgtttccccaaatcaactaacacaaacccaaatcttacacctccgttccaacatcgtttacccaagttccccaggttatgtggtctccctccatgcaaagagttttcagcccagttcattctggggcagatgtatttctgacgctctctggctgtaggacatggagggagcccaacaaggcttcatgcctctcatctgcgtggcttctcactagcaaccgtttgagatattcatgctgcctcctccattacagcagaaacactcaagtaacaatgcttgtaaccgttaaagaaagaggaaataaatacaaaaagcggctcaacattaaaaggtttatttcagagaataaacctgagaggggattctggccaatttcgatcaggagcgctctctcttacagactaagcattctctcttacagactaaggatatttaagggttttggaagtgggggaacgtttattgcagggttggaatgtctctggtcggaggggaggctattggaggagaggttatttcagggttagcatgtttctggttgaagagaggtttatcttagggttggaatatttctggttatgctgacattagccgttaggctgatgttttggggtaggatttaggtggttttttaatcaaggggaacttagaaaggtggtgtttgtccaagatggcaatgctcctgctctatcaatccagtctctatagttatgaaaaggacaaggggcagcgcattttttctggctacttcctgctgggggagtgagcagagagttctttggtttcagattgattgtaggagtaacgctgtctgtagatgtttttgggtaattgtctgtgagatggccatgatcctgctggttaaaaatctttgaaaaaggtggccaggcgcggtggctcacgcgtgtaatcccagcactttgggaggccaaggcgggtgggtcacgaggtcaggagatcgagaccatcctggctaacatggtgaaaccccgtctctactaaaaatacaaaaaaaaaaaaaaaatagccaggcatggtggcggg

SEQ ID NO: 3169 - DNA, 4001 bp, Homo sapiens
aatttcaagaagcttagacatcttgattcagagctataaaagggttcattttttattaccaagttttaattagttttcttaattcccaaatgggatcccaaaaagttgactctgaattaactgaaaaggaggtcatccaggtgggcctggtctaatcacataagccttttaaatctgggtctagagaggaaagaccaaagtaaaagaaatttggaagtcagagaggcaagctcctggtagcctgcacgaaagcaaacatcaatgttatgaatggcctctagaggccttgaggcaaggaactgtaggcaggctgtagaagctgggagcagtggctggcaagaggcagcaagaaaagaagtacttcagtcctgtaactgcaagggactgaattctgccaacaaactgcatgagcctggaagaggaccctgatctccaaatgagaaccacagcatggctaatactttgcagccttatgtgacctggagcggagaacacagatcatccgtgcccagacttctatcctacagaacccgtaaggtcattcatgggtgttgttttaagctgctaaatttgtggtatttgttacgcagcaatagaaaactaacacaggttcgttccactttcctatggaaggggctgcttctgttacctagcagcaaataggaagagaagcgaacttgaaaaaacaaagcttgacttttatgatctctaactcactattcctagggattctgttcaattactgcttgagtcacagtacttggtttgctatctacattttgccaaaatatcaacttcctgaaaatcatgagcagtggaaacaggctttttaattttcaattttagaaagtaactttggcaattacgcaaaactagaagtaactgggtatttaggctccttgaatgtcaaagtagtcccagcgcctggagacacagatccctgccctaatctcagaaatgagccacaaggtcatgactcctgtctttccttgaagaccaggagtttcagctccacaaatgaaaatctttcgcttttgtttggattaagaataactcagaagtgttctcagctgcgaaaagaaaggcactccctcccagataattacaaccttgacccctaaaatgtggactctcgctagaagtccaggcacctccttattaaggatgcaacaagccgccgctccgctcgtcctgacgggaactgtagttctcgcccgtcgaccttcagcactgaaaacctatcgcgcgcccaaccggcgacccagacgccagcagccaggattggtcctggacgggggcagcgcggccctgattggactacatgcccacgaagccgcgcctcccgctactctccacaccccaccccgctgctgcaataacctcaagtcatcccagtccggcgaactccctggtggctgcctagctgcccgcccgggcctctcccgacgagggtggccctgaggctcgcctttgtcctggaggctaggcagcgaccaaggctcccccgtttttcgctgacggttctagttcagcctcctcacgcgcctccgggagccccagtgctcacctgggcggcggcggtcacacccgataactgacaggcccgcagcatctcggtcaagcggacggcgctgctggtggactcgagctgccgcggcggcgcgagttaagtggaggcgtgcttgcgtgtgtgcgtgcccgcgtccgcgcccggcgcaccggaagcacagcggacgccactgcgcacgcgcggccccttctaccgtccccgactccgcggctcttagagggtgggctgtgtcccggctgcggaaacgccaactccaggcgattggcgcgaaggaggcgaaaagggcggattccctttccgggtcgcgcccgggctgcaggtccttatccggaaggggttactaggtgaacactgccggagggagagcgctctgaaatccattcttcagccgcacgtggaaaatggacagctgtgactcttaaagagaattaaagcaacaaagcatctcagcctgctctatgagctggatatttcgtaggaaggagccgatttggcgaaagttacgtaaacaatggaattgtctcagtttgcgcctttgtttcgtttgacagccctccagggagtcatagtgattgctggagacggtgaactaacactgtggggacccttgtgctaaacgtgtcaagtggcacaacaaggataggaacacgggtcctttggactccacagcttctgctccttccagattaagccacactgctttctccaagttgttactgtagtaacatcattttggctgcagtttgtggatgggttggaagatgggaagtcaatgcagaagcaccgttgaaagtattccactgggcagggcgcggtggctcacgcttgtaatcccagtacttcgggaggccgaagcgggaggatcgcttgagcccagaggttcgataccaggctgggcaacacagtgagacctcgtctctatatagaaaaataaacaaacaaaaaatttaaaaagaaaagtagggccaggagctatgactcacgcctgtaatcccagcactttgggaggccaaggcgggtggatcgcctgaggtcaggaattcgagaccagcctggccaaaatagtgaaaccccgtctttactaaaaatacaaaaaattagctgggcatggtggcgggtgcctgtaatcccagctactcgggaggctgaggcaggagaattgcttgagcccgggaggcggaggttgcagtgagccgagatcacgccattgcactccagcctgggcaacaagagcgaaactctgtctcaaaaaacaaaagtattccattgattctgtaatcaaaataaaacacgttaaatattaagcatggtattaatactccatgtatactccagaattaatatgttcgtattaatactattagcatcttattgcaatatcgtggaaactaacttttctatcttctattggatttgcaaagtattccaagtcttaactgggtaatttattacaatatgtattctctctagaggtagactgcgctatgacttgtagcatggagagatggacttgaaaattatctgaaagcaatagttatgtttgtatatgttctatgttctatggtttttaggggactacagtaattacatatgtttcatatctctttcacttagcttccagagcagtctcccgttttctttagtaattttagcaattgaattgctgcctccctgcccactgctgtcatgcccagtggtgccggtgtgatgacttttctaacacccttgtctttgaacttcttaatgccagtgaacgctttcatcctgcttcagtcatgtggtgcccgtgtgatgacttttctaacacccttggctttgaatttgtcaatgccagtgaatgttttcatcctgcttcagtcatgtacgtcacagccacaacttgcgcctgaacatcattagcaacctctctagcttcaagatctcaaacctcaaaattagcctcccaacccctcataacctacgtggagagtcctcactctccacttggaagttgtcaatatttttgctttaaaatgttatcaggcaggccaggcgctgtggctcacacctgtaatcccagcactttgggaggctgacgcgggcggatcacctgaggtcaggaattcgagaccagcctggccaacatggtgaaaccccgtctctactaaaaatacaaaaattagctaggcttggtggtgcgcgcctgtaatcccagctatgtgggaagctgaagaaggagaatcacttgaacctgggaagcagaggttgcagtgagccaagatcacaccactgcactccagcctgggggacaaagcgaaactccgtctcaaaaaaaaaaaatttgttaccaggggctgggtgtggtggctcatatcccggcattttggcagactgaggtgggaggatcacttgagcccaggagtttgagacctgcctgagcaaaagagtgaga

SEQ ID NO: 3170 - DNA, 4001 bp, Homo sapiens
agtcagtgaggcactcccatgtgtgccatgtaagtgggacagggcacactcagggagagccctgcaatgccatctgtgcagtgacaagggcatgggggacagttccaggagcagtttcctctgatgggatggtgcccggtgtgtctgaggaaggactggagacctgccagctcagtgttggggagggctaccttgtatagttaccttcacctccagcatcatcaaactccagggacccctgtaaggccagagcctctcggcgtaactcagtgggaatcaggcggttttctgcagagggaagagagaggggctgagtgagtcacaagcatggagacctcagctcatccaatacaccacagcttattagcctgcacatgcttgaaataaaaatacctcagccctttctgagcttggataaagcatggatagaggtgacaaaactttctacaggccaacccccataaacagtggttactaggacttcattttctttagtctcatgacttgaggactttctaaaatatcttaatgtactgtattgcttttataatcaggtagaaatctaaacatcgattttttttttttttgagacggagtctcgctctgtcacccaggcagagcagtgcagtggtgccatctcggctcactgcaagctccgcttcctgggttcacgccattctcctgcctcaggctggcgagtagctgggactacaggagcccgccacggcgcccggctaattttttatatttttagtagagacggggtttcaccgtgttagccaggatggtctcgatctcctgacctcgtgatccacccgcttcggcctcccaaagtgctgggattacaggcgtgagccacagcgctcggccttaaaaattacttttgaaaagaaatatagactgttctgtacgtatgatggtggaccagagacctttaagctctcagacagcaaaaccgttggtcacgatgcccacagcgcttcgaaggcatggcttcagcgggccctggaccacaggctgcctaccgcagagcacagcgctccaggtgcgcactcggggccagcactgttccccacggagctcagaggaactcctgcagggaggatgggcagcgcagtctgcagcaccagcgctatccagatagtctttagagagaatttctttttttttttttttttgagacggagtcttgcttttttgcccaggctggagtgcagtggcaggatctcggctcactgcaacctccgcctcccgggttcaagcgattctcctgcctcagcctcctgagtagctgggattacaggcgcgtgccaccacggccggctaatttttgtatgtttagtagagacgagatttcaccatgttggtcaggctcgaactcctgacctcatgatccgcccgcctcggcctcccaaagtgctgggattacagcagtgagccaccgctctaaagagaatttctacaggacaagataaagtctttaaaacttgggacgaacttgacacactgcacacagcgggcaagctgcaaaacccgggtactgcaacgtcagtgacaagtaattaataccatcacacggaagaaacactctcaaaaccaacaggagaacccaatgggcaaggaaaacggccggcaagcatttggaaagacgctcggatattcgaacacaaatgcgtgccggggtggtttaccacgcagacgcccgcggggccgatgccttaccttccagcgcgcgccgcagccgctccttcctctcctgggctgagcgctgcgcctcctcccgggccttgcggtacaggtactcgcggcgcaggcgggcctcgcggcgcagctgtgggaacagcaggcccagtcactcactactcgctcccgagccccggaaccccggagccccggagccgctgagcctccaagtccccagagccacatccccagcacttcacgcgccccggacctccgaaacaggagctcattctcctaccatcttgagtgccgcttccacgtgggtccgggagaatctgtgggctcctccagcgcgacacagtcctcacttccgccctcaaccaagatggtcccttagacgcttcactggtgcctgcagctgtggggaatgccctatgttaagatggcgaatagggcggggacatctcaaggcgattggccattccggcagggcgttctccttgggataaccgatagactggatacagaatgtcacacgtgacttaggaccgcagctaataaatatgtccgcccaggcttctccatcctcgtcctccccccaccaccgccgtgcagaatgcagttttcagatgacgaaccgctaaaacaatcataattagcggctggaaacagttcaactgtaaaaaccgcacaccgactgaaggttgcttgccggctcctttccaaattaactttaaaaccactcttccctcaaccaaaatggtttctgtagagcttcgccttcttccatcgccacaacagtggcgcgacttctaagattcggcagcttccggaaggactcagaaccacctataaccctagccgacagttcagcaggctgatccacttgggggctaattggagaaaccagttgattggttgcttccgtgctgcttctctaagggcgcttgcccttaaagaagctgacccagaggccttggtgctgccggcgtggggatccccagatgggaacgccccttgatggaggatctcgtgtgcctattggctgtcctgccaaactgcggagggtgacaaggaagaaggtggctccagatctggaggtgtgtccatggcggcgcttgacctgcgagcggagctggattcgctggtcctgcagctgcttggggacctggaggagctggaggggaaacgaacggtgttgaacgcccgggtggaggaggtaggcgcctggggcgggcaggagggtacacgggcgtaaactgagtctcaccgctttcctctccctgcagggctggctctcgctcgccaaggctcgctacgcgatgggcgccaagtcggtagggcccctgcagtatgcttcccacatggagccccaggtctgcctccacgccaggtgaggaagcttccatgctgggctgggtgggcgggcgggcgcgttctaggcccgggctgccaaagctccatcctcccttctcgtccttcagcgaggcccaggagggactccagaagttcaaggtggtgagagctggtgtccacgccccagaggaggtggggcctcgcgaagcaggtgagccccctcttccttctgcagaaccccttcccagtgtcaaagacaaaatgcaaattatggagatgatttaaattaggtttttgcgataagagagagcatcccagagcagaagaacagaatgtttttgtagggtggttttgccttagacttttataggaagtagagaaattgttggtgagttgctttacactgggaatagatttacaatcacatacatttcagtcagctgaacagaaaatatttatctgtgtgtctagctagtttcagagggacaaacttctaatcccagttaatcatcctgagacaaagaatggggagttggaacgtctatgtctggtctgttggcatgttcaggtacaatgggtaagatcagtgtcacaggcaaacagggtcatcagtgggtcttacaggagtcacgggaaagagtggacaaacagtctcatctgaatcacaaggggaaaggctgtgttttgtggtaagctgtttcctggaaccccaaagttggaattttccaaccaacagtgttttatagaatcatgagctcagatcaagctcaacattgtcaccaagatgataaaggtcagggagtaagatcccagcctcctccaacctttctttcctcaggtctgcggaggcgcaagggccccactaagaccccagaaccggagtcctctgaggcccctcaggaccccctgaactggtttggaatcctagttcctcacagtctacgtcaggctcaagcaagctt

SEQ ID NO: 3171 - DNA, 4001 bp, Homo sapiens
atcttccaaggctcaagccaaaatcccctgggtcctccttgatcttcccctactttacccagaaatccagtgcattgagcagtgtagccacgctgcccacgcgactttatgcaaggatagaaatgtttcctctctcggatgggcgtggtggctcatacctgtaatcccagcactttgggagatcaagacaggcaaatcagttgaggtcaggagttcaagaccagcctggccaacatggtgaaaccctgtctctactaaaaatacaaaaattatccaggcgtggtggtgcacagctacagtcccagctactcgagaggctagggcatgagaattgcttgaacctgggaggtggaggttgcagtgtgctgagatcataccctccaacctgggcaacagggtgagactccatttcaaaaaaaatcaaaaaaagaaaaagaaaagaaatgttctctctgagctgcccaagacagtggtggccatagggagctactgagcactggaaatgggactaacgccattcaatttttaattttacttaaatagtccctgtggctagcgcaaccattccccacagtctgccaggaggacccccgtgctgctttcgcgtctgctttgttaccccctagaccaggccaacctccgccccctgcacagctgacacaggctcctaaggggggctgcctcctccagtcttggccaccctcccatctgctgttcacagttaccaggcaatcattttaaacctaactctatcttatgcatctgatgcttccagccccagtgttttcccagctcccctagaggacagaggcacagcctcccggctggcacagcctcccagacacacacaaagtcaaccctccttgggaggccagcccactggctgggcaccaggatagagaaggcctcccctccagcgtgctccccagcttgactcttctacccagggaaccccccactactcagacccccaagagacagcggagcacatgggcagaatcgggcgtccctctagggcagcggtctccagctccaggccacggctcactcgccactgtctcagcccctgggcgggtgccaggccgaagaccatgaggatccccagtgcagcgcccccacaagggccctccagagccacccggcacaaccccaaacaccgcgaccccaaagctgtgcccatcccgggccgacgtcaggggtcccgcgtggggtctgcccctctacgagcgggagaccctgagcaggctgctcggcagcgctggaccttccctggtgtgtaaagtgagggaaagcaccgtccgctcagccgctgggggcgccgacctgctgccacctggaaacagcacagcccgcccaccagggccgactcggcaccgccctccccgcctccgcgccgcagtccccagtgccggggagagacgccccgcggcccgcacgccctccccagccgcggtcacacaagaggccggcgcacacgggcgcacagccaggcggaggcccagaccccggagcccccaaggcccggagccccgcagcgggcgccagctcctcctgcagacgggacagggacgggcgggacctggcggggccggggccggagctgggggcggagatgaggcggggcctgggtaggggcgggacctaatatgtgggcggggtcgaggccgcaagccccgcccagcatcgccaggccccgccccgccgtgacgcacctggaattggcgcgacccagccggcgggaccccccgcgcccgccccccgcgccctcccctcccttgcggccctgccccgccccgtccgcgcgccccccgtcgcgcccggccgcgcccgccgccctcccgagcccacggggtctgcatgcggtgcccggcgcgcggggggctgcggcacggaggactccgcgtgggcggcgggcgcggggcccgtggggcgcgcttactgtccagatagtgctccaagtacatggcggtcgccatcttcgtccgcggccgcgctcggggtctgcgcgggcgggcggtgccgcgggaggcgggggcggggcggtgccagcgcgctcactattcatgagtcgcgcgcgctgattggtcgcgcccgggggcggggtcggacacgcctttcagcttccggcgggcggcgggctgcggggcccgggcggaggttgtggcagcggcgtcgggcagcgagcaggacccagggccgcagcggatcggaggccgaggaggagcaggggttcccggccccaccgcccggcgtgcggcccagggcacccaggtgggcgtctcccctccgcacctgtcagcgacccctgggccaccaaacgcaaacacgtggtcccggggacctcacgcccgtcctgacggcgcccacgcgacccctgctcccggccgggtcccggacaggccgccacgaggccctcccttcccgaaggctccttgggacctgtctggctcagcgcctttcccccggaccccgagcccccggggcctcagcccggcctgagccgagggccggcaccgcgtggcccgggcgagctgcccctccctcagggcctgggccctggcgcccttcccccgccaacgccgccccttccctccgaggaaagcggccgccccgcccagcaccagtgagggcactggctcctttgctgccacctctcgaggcaggcaggacccgcaccatctggatgccttggccgaaaaggcacgtgcggcagtatgatatagttaataagatggcgtgcaaaggtgtgccgtaagatgcatgcaaaaatactggagaaggccggcgcgctggcgcacgcctgtaatcccatcactttgggaggccgaggcgggcggatcacttgagggcaggaatttgagaccagcctggccaacgtgttgaaaccccgactctactaaaaatacaaaaaaaaaaaaaaattagccaagcgtggtggcgcacgcctgtagtcccagctactccggaggctgagcccgggaggcggaggttgtagtgagctgagatcgcgtctgcactccagcctgggcgacagagcaagactctgtcttcaaaaaaaaaaaagaaaattttaagaaaaaaaaaatactggagaaacataattaaaatatgtttcagactcggcacggtggctcacgcctgtaatcccaacactttgggaggccgaggcgggcggatcacttgagggcaggaatttgagaccagcctggccaacgtggcgaaatcatgtctctactaaaaatacaaaaattacccgggcgtggtggcgggcgcctgtactcccagctactcggagactgaggcaggaaaattacttgaacttgggagagggaggttgcagtgagaagagatcatgtaactgcactgcagcttgggtgacaagagcaagactccgtctcaaaataataataatacaaaaactagccgggcatggtggcaagtacctgtaatcccagatactcgggaggctgaaacaggagaatcgcttgagcttgggaggcggaggttgcagtgagccgagattgcaccactgcactccagcctggccagcagagcaagattccatctcaaaaataaaataaaatagggcaggcgcggtggctcactcctgtaattccagcactttgggaggccaaggcgggaggatcacgaggtcaggagattgagaccatcctgcctaacacggtgaaaccccatctctactaaaactacaaaaaaattagctgggcatggtggcgggcgcctgtaatcccagctactcgggcggccgaggcaggagaatggcgtgaacccgggaggctgagcttgcggtgagccgagatcgtgccattgcactccagcctgggcgacagagcaacactccgtcccaaaaaaaaaaaaaaaaaaaaaaaacttagccgggcataatggctggtgcctgtaatcccagctacccaggaggctgaggaaggagaatcacttgaacctggtacgtggaggttgcagtgagccgagatcgtgcc

SEQ ID NO: 3172 - DNA, 4001 bp, Homo sapiens
atcacggctcactgcagcgtctacctcctgggctcaagcaatcctcccacctcagcctcctgagtaactgagaccacaggcgtgtgctaccacacctagctaacttttgtgggttttgtagagacagggtctcgctatgttgcccaggctgatctcaaactcctgagctcaagcaatctgcctgccttcaccttccaaagtgctgggattataggcgtgagccatcacacccagccatattaccattttttttttttttttgagatggagtctagctctgtcgcccaggctggagtgcagtggcgccatctcggctcactgcaacctctgccttccgctccgcctcccacgttcaagcaattctcctgcctcagcttcccgagtagctggtgccaccatgcctggctaattttttgtatttttagtagagacggggttcaccatgttagccaggatagtctcgatctcttgaccttgtgatcctcctgccttggcctcccaaagtgctgggagtacagacgtgagccaccgcgcccggcctatattactctttatatctttggcatgtcaggaatattgtaggataaattctttaaaataattccatttttaaaagacaggtttacaccaaaaaaaaaaaaaaaagaagaaggagggaaaggcaagtgggaaagggaagaaaatggagaacaaggaagagggggaagagaaggaggagggctgtaactcagaacagagggcagtcctttcaagaatgtgtagttagcatcctcacactgacacactcatagactatactaatcatcctggagcagcactcgttcatggactggcaattggaactatactgttacatggcttctctcattatctagtcacaattggtccattttgcagataaggaaactgaggcttagagaggtgaaatgacgttcaacgactaagtggccaggcttggattttgcctgatcccaaagccatccttctccccactgtgctgcgaacggactgaagtgagggaggcaggggtcctctctaagagaaaggtggaccagatgacaagaaagcccacccacaggagggcttatccattcagtcagtggaacaagggggcacatatatgttgagacaggaactcaagagaagatagactagttttccagaaaagtttcccaactaatcttttgcctgtatctctgatagcttctcagtgtcagctacctgggagtaaagaaacagggtttggagcagcgagcagaggcagagataggaggaaaggtggcaggaaggggctcaagcccaaatatctccatctttagagacccccggtctcccagcgcatacttcccaaatgcctcccacctgccatgcactctaggtacagcctctcacttaatcctgagaggtgggcattagcccattttacagatggggagacagaagcataaggaagtttagtaactggcctattgctgcaaagcaactgagtagcaggactaggattcaaacccaggtccgcctggcctgcaaacccatgctgtgccttgctttttctcaaagtcatcctgccggttcccccaccctcgttacctgtggctgggaaaaggatggcttgggagacatcctcctcttcctcgggctcagagcccctgtgtgtgaagccccccagggcatgtcttcggggcagccgcctgactccagggtccccaccttccctggtcaccgcggggggccccaaggcatccaagaacagggccctcaccttggccagaacaagttcccgggccagctccagcccctggcagctgtgcccaccctgtggggtcagcagcaagaagagcagtaggtgcagcaccatagctcacctggccctgctagtggggaactcacaccctgccccgtgccccttctgccagggtctgcccagggcctttccactctcccctccccatcccacacccaccctcttctacccttctcatccagtcttccccagtcctttccacgccccacagtccgagttgcccctgcccgtggcattgagacctcctatctctgacgcagatgtctgtggccatgagccttatctcccactcccgccagggatgtgggggaggggctgggaaggatttcgcctcaagcgacctgactcacacatgcaaacatacaacaccttctccctacacacacacacactcacacacacactcacacacacactcacacacacacaaattctcacacacacacactctctcacacacacacacacagacacatccagaggtgacatcaggtgggacaggagcctgggagctgtagccggccagccccagaaagtgttatttgtcagggagacaaagtgcatcacccctcagaccttctggggcccctttcaataagcagctgctggccggccagcccttgggggcagggctggaaccggggctagaaccggggctagggccgggggcaggtggtcctgcctgctctatacttagaccagtggagccagtctgggctcttgtcctccagctgtgtcatcagagaatatttttgggattggcagctgcaggcgcctctgccactcaggcccaagcctggcgggcggctggggacctggcggctggaggtgggagggaggagggggaagaggcccaagctgtgggagggggctgggaagagaggctcctaagagcaggaagccaggcagcgggcaggggaggctgcggggccactcgctggagaggcaaacaggaaggactgccccctgagcgccaggcttcgggcccgggaatcgccgccgccgccgccgcagagctgcagctcggggccgagggtaaggaggcgagccgggagcgggaggcccgggagagctccgcgggtccccgcgcccagtccccagccgcgccccgaccccgccgccccgggcctcggctcgccctccgcacccccccctgcccccccaccgttcgccgctgcaggcggtcggccgccgcgatgaaggcgagctcgggggatcaggggagccccccgtgcttcctgcgcttcccgcggcctgtgcgggtggtaagtggcgccgaggccgagctcaagtgcgtggtcctgggggagccgccgcctgtagtggtgtgggagaagggcgggcagcagctggcggcctcggaacgcctgagcttcccggcggacggcgcggagcacggcctgctgctgaccgccgcactgcccaccgacgcgggggtctacgtgtgccgcgcccgcaacgcggccggcgaggcctacgcggcggccgccgtcaccgtgctggagccgccggcctccgaccccgagctgcagcccgccgagcgcccgctgccatcgccggggtccggggagggcgccccggtcttcctcacggggcctcgatcccagtgggtgctgcggggggcggaggtggtgctgacgtgccgggcggggggcctccccgagcccacactgtactgggagaaggacgggatggccctggacgaagtgtgggacagcagccacttcgcgctccagccgggccgcgccgaggacggccccggcgcgagcctggcactgcgcatcctggcggctcggctgccggattccggcgtctacgtgtgccacgcccgcaacgcgcacggccacgcgcaggcgggggcgctgctccaggtgcaccagccccccgagagcccgcccgcggaccccgacgaggcccccgcgccggtggtggagccgctcaagtgcgcgcctaagaccttctgggtgaacgagggcaagcacgccaagttccgctgctacgtgatgggcaagcccgagcccgagatcgaatggcactgggagggccgcccgctgctcccggaccgccgccgcctcatgtaccgcgaccgcgacggcggcttcgtgctcaaggtgctttactgccaggccaaggatcgtgggctctacgtctgcgccgcgcgcaactcggcgggccagacgctcagtgccgtgcagct

SEQ ID NO: 3173 - DNA, 4001 bp, Homo sapiens
ctcaggcctcgcctggctcctctaataacactgacatctgactttgaaatgggggaaactgcagccttaaaagctggtcttggacgagctgcctgtgacctgaatctgttatttataagtcaaagagctggctccgtgaaacggaccagaaatataacagcccccgctgtcattttgtgccaccgggaccaaaaggcctcctcgaccttccagaatcacatttctaactctgggccccaaagcaccttttaatccgagccctctaattgcatggcgagctttccctgactcactttagtggacagctaaaacggcaatgcatttctttctaagcacaaaccagccccgattgtctctgcttttctccacacccggccatgcaaaacttttcatcccttttcatccccgggctgcctgctgcctggtggggtggggggcatttgcagccaggggcacaaccgctccccccaccgaggctccccgcttgcccccgccctaactgcaccggggcttccccctctgcgaccttctccgcagtcccctcggcacaaatggggccgagctccaggcacaaaagccagcctggctcattcaagtcctgaaaaggacagcggagtcgaaagcacttgcagcattttggcgcgggcacatttttctccttcttttaaagttccgaaagatttttctctccctgatttttatatttagacagtgttagagatttgcaatctggggccgggggggggggcggattccagaaaggagccataccctttgttaactacgactctgcctctcgggcgaggggtctgctgcagctgccaggcaagccgagaggcacggggctgtccccgaaccgcggctttctctgtgtaaatgatggacctgttgagaagcctgccttccgcccgattccggtgcccacacaatcggaagagaggttgcctagctctccccagcgaggcttcagcaatcctggcaagcccacgccgccggtgatggaagcggccccaggggcctctcacgcaggcacacacacacacagacacacacacagatacacacacactctctctctcctccggcccacgtatatcaacaagcacacacatctccatccacactgctaagcctacactccgatcgtgggaaacaaaaacattaagcaatcaccaagcaagtgcccgcagagccagggccgcgcgcatctgccgggagggggacgcgcgcccagaggcgctggggcccgattccggagagcaggggtggagggccaggcgatcggcggcggggggttgaggcagcaggcaagggtctgcggcctgggggaagaggactgcaacccgggcggagcgcgcagggccacggccgaaggagctctgccgggagtccaggctgccccagggcgcgcgggctgcggtggcggcggtggcagccggagctagcaaggagagggagagcgggagcgagcggggaccgcggcagacagccggagggccggacccacctgtctcggcgaagctgatgatttcggaaacgcgctcctggccgtcggcgcccgggctggcgtggccgtcgaggtgcgggatctccacgcggccgtcctcgcgcaccttgcccgcgtgcagcttgcgcagggccgtgaccatggcggccttaggcacggcgtgcgtgatgttgggccggccccgcatctgcaggcggctcaagatgtgccgcttcaccgcctccaggaagtcgccgtccactcggccgagctcctctggccgccggaagccgccgcacgacgtacaggtgtcctgcgagccacccggggatccgggtggcgggggtggcggcggcgcggcaggcgtcggcgggggcgtgggtgagccccaggcctcaggccccagccagccggccgccagcagcagaaggcaggcggcccccagcgcccgaccgggcagcccgtccatggtgcgccgctggcgacgagggcgcccgccgcgaggcgagccgagtcgagccgagcgcagggccgggctccgggctccgggcgcgccgccccgccccgcccccgcccgcgcccgcgcccgcccgggcctccgcccgcccgcccgccgggagggctgccgccggctcgcagggggagggggccggccgggcctcgggggttcccgcgcggcagggaaggggcgccgagggccccgggggcccgaggggcgcgccgggcggggcggaggtcgcgggtcactgccgcacgggcgtctcggggcgcctcggcatctgcagccttctccccatcctttccgcgtcgggggccccgcagccccggttcgggtgaagcgaaagcagcgtcagtgggagcggcggttcggccggcggctggggaaggtggcgaaagagcgggtccacgcaacttggctgagacggaagcgaaggcgctggagccccccggagcggagccgggcgcggcttggcgcggcgctgcggcgggcgctgcggcggggccccgcgctcgcacctgagcgcctcgccctcactgcctcgcgccaggaagggccgccggcggcggagacgggcaggtcgtcctcgccgcgggccggcgggcagtggcgcggagcaagcttggtgcccgggagagccggccgcgcgggcccgctcacaggcggcgccgagccctcggccgcgggccctgcagtcctcccggcgcgtcacacggcaaagttgtctccaggatccctgggcgccgcatccacgggcgggcggccgcagcgcgcttcgccggggcctctgctccgcccgcctcctcgcagcctccctccttccctccgcctgcctgcgcggcccggccgggcgcggggcgccgggcgaggaaggcgagggggaggcagggcccttctcgctcctgtctcttctgcctgccgcggcggcggcgaggtcggctcgagcgccgaaaagtctcgcagcgtccccgggtgcagtgccctcgctcgcgctcgtactggcacccgccgcagggccgggagagagcgggcgggcggcggcggcgtccccgcgccgggccgcggcacggagtgcggagctcgccgaggaggagttcttctctttggtctctcttcttttactctccccgttttttctcccaagggggaaaaaagccgcacaatctccgtatgtgcgcgcgcgttgagatagacgttggcagaaaaaagggggggagggagggtgtcgtcctgcccgtgcgagaggagacggtccgtacctccccgctcgagcttcccggggtggggggaggaggagaaagcggaatctgttcaggttggggctgcccgctccccgcgctcacccctgcttcccaccgcttttttcctttctgccttcccgagaaggaggggcgagccggccctctcccctcccctcctctcccctcccaccccccgcaatgccgggctacttttgctacctcgaaactttcccaccacgtgggcgccccggacccttgcccagctgggcggccggcggcaccgacgggttccaggcgctggacccaggcgctcctcccggcccactcccgcctccccgccgccgcgcaggccctgcctctgtcccagctgccgccctccccaaccagcagaggcgactcccgccgccgtggccgcccccggccctcccggggcgctccctcgcggccgagcctggcgaggcgagcggggtgcggcgcggcctgggatgccagaggcaggctccgccggcggctgccgctctggggctgcagtgccctcacccagctccccgggccgccgtcgcactggccgaggcgtggaccctgcgagctggagggcgggaaggcagtagccactggaggcctggccagcggctgcgtctgctgggccaggaggaacgccccgattgtgcgggatcccaggcgcgcggcccggaggccactgagcctcagggcttgaggggctggcagggtctacagtaccccacccccacccccacccccagggaattcccac

SEQ ID NO: 3174 - DNA, 4001 bp, Homo sapiens
ctgttgttatttttaatcttatctcaatagagagtatcaggtggataactgctcaagccaaaatcccaggcttagccttgatatattttctctccattcccctccccacaagtatctacttccaaaatatagccataattcatctgattttctccatctccaccactttcgtcttggttaaagcaaccactgcctctcagctgattacttcaacagcttcctagttgttctccatacttctatctcttgtctccacgaagattcattctctacaaagatgccaaagtaatctattgaaatgtaaaccaagtatgtcacttctctgcgtacagcccttcagtggcttgtccactttttcttctcctttgctagacatgttccagtctcaaggtctgtgcgcctgctggtctctgctcaaaagctcttctggtattgcaaatgttatctcttcaaagaagccttctctaactaccctaatgtctctcttccatcatttctatctgtttgtttacgccactttctatttcatcacccttttctttttgtcataaaccatatagctttttgaaattatttacttatttacttcccagccccccaacacacacactagaatactagctccaggagaacagaaactttgtcttttctctactatcgatatccccaatgccacgcaaagtgcgtgggtcgtggagagttctcaatactgtatacatttggtgagtgaataaacaatgaaccaacatacctgtcgagcagtaagcagccgctcattgatctccttcttgaggtctccattgtcatccagctcccccttctccagggcatccagccacctctgttcctcctcttcctcctgaccccctaaccctcctgataggtcccgaagtggagagggagagagattactgtcttcatctgggaaggaagttggagaaagaaaaacagaattgttcagatggggcaccctaatttggctgagttaatactgggacatggaaaatcctaacccatttcagaaccaaccttctttctttaggcgggtataataagaaacccagtttccccacctccagatcctcacccagccaggcacggtactgctcaagggggactccttccataggttcctcttcattatccacaaccataaggggagagggtgagcgaggcccctctgggatcacagtgaaggtaggaacactgcagagaagcaacactactctttaaaatgagcaagcgtctcctcctcctactccgtagctacacccaactttccccaccctcttagactcttgctgcctaaatctggaccctgaagtcacagtgtccattcggtcttctagaaagcccagtcggcttctaactactatctctgctcctaaagttccccttataaaactatgaccctcttggcctcacctcttggtccccaggacttgtcccccaagcttgattttgagtttgagctgaggcttggcaggggacggctgcgtgggcccggcgtcttcttcctgatggtgtttcttcttgtgtttcttcttgtgcttcttgtgttttttcttgtgcactccatggccatgggcacccgccaggctcaactccagggcttctcctgtggaaggaaagcctgtcgacagtgtttggccggagggtggcaggggaagccctgaataacctaagcccctactggatcccacccttcccgcagtactcgctgttaccataacaacagcaccgcctttctccttgccacctgtggccgaagtaccctggactctccgaggagcaagaacgggacttcttttctaacacgacctaaattgcttgatctattcgcgcttacccggctcaggggcctccatagccccagaggtgctcccacgccgccacagcttactcatgaggtcctgcgaggaaaggggactagaaatggttgggacacacgcagacacgccttttccgccccgcggaaaaactggagccagcaaaacaaccagttacttccggttcatggcaaccatccttgtgcggggcacgcttcgcgtccaaaatcgtccctgagaaacgaggatccttccaacgaacgttccggtccctctgaggtcgggacagcccaaatgggcagggctttcccctggctccgcctccccacgctagctttcagaactcagcgcggatgagtcaattattgaacacaagtttggtgaatgtatacactagaccaagtgcgggaagctagtctaagaggatgcaaagatgaatatgaacaccgcccctgtccttgaggaactcacagttgggtggaggaatacataaactatattgatgacaaaatggccgaaatggttaaacagcacgagtgccctaagagcagatgcagtttaggtatttaaacttcaattttcataagtagggaaatgaataaatgaattacggtgcagctgtacaatgcggaacaccatattgctaagaaaagttgagttgtaagtaattaatgagattgacacagaatttaaacaatctaagtgtcctgatgaattggtgtatccatacagtgggatgttaagcagcttggaaaagaaatgaggcgccccagaaggctatctaggaaattggtaagagtcatttgctgatgagcatctagagaacaagggtggatggcgacctatttttttatgattataccctcttgtgccttttgaattttgtataaaacgtgtatattttacctcattttaaaaaagacataaaaacaggtaggtttgtatgtgctgatacacgaaataagaaaagtaaatttcccatcctggctaatacgatgaaaccccgtctctactaaaaatacaaaaaaaaaaaaaaaaattagccggcgtgatggcacgcgcctgtagtcccagctactcgggaggctgaggcaggagaatcgcttgaacccgggaggtggaggtcgcagtgagccgagatcgcgccactgcactccagcctggtcgacagagcgggactccgtctcaaaaaaaagaaaaaaaaaaaaaagtaaatttcaagattatgtgatctgatttttaaaagcataatatactagcaaatacatagaaaaaattgaggaatgtatacctgttaatgttggttaactgtagaagttggggttgaggaactttcactatttaggtatgtaatgtattttcttacagccaatatatatcacgtttataattagaaaataacacctatatacatatatctaaatatatatgagtgtctgagcaaggtaacagcagtgaaaagtctcttacatttcagtgataaaattatcaagaatcaatgagcaattatattggggaatccaggattaagtcatgtagtatgtgattatgaaaagggattttggagtcagacaagcctattatcaaatcccagtttcaccatttattagctatgcaaccttgggcctaaaattatttaagctctctgaacctgagaatccagctctataagatggaatacagtaggatccaccgctatgagggctctttcaaggaataaaggaaatcaagaactcatgatacttagggtggcagcaggcacaggcacaggcacatagtagatgcttcagtaagcaaataataataactgactcataggtttctagcctaagtatttagcgggaaggtggtattttcagtaaggaagataacataggaagagaagcaagttaagaagggaattatttagttttgcccaaggcgactttgaagtgcctgtgggaatgcctgggtggaggtggaatagctgagaggagaaaccaaggatgaaagtgtgagtggggatgtcatcagcgtaatactggaggcccccaagtgatgggagtagatgagacacccagaaagagtaagtagataagaggaaaagaaccaggaacagaaccaagtgagcacctgtcctgcacagccaggcagaggggccagacagggttgagaaggtcaggaaaggcagaa

SEQ ID NO: 3175 - DNA, 4001 bp, Homo sapiens
tatgcatataaaatatatacatacacatatatttttttttcgtttaaatgttatacatacacacacacacacacacacacacacacacacaccccaaaaccaaagtagttttgctaggttccgagggctcttccacagacccttctgagttgtagcaataacaagtttaggtttccttaaaatctccattactctatttctaggtcgaatacaagaatgtcacataaaactaaacagtgattatcagaataaatgaactactgatccttaaactgtagaccttgtttcgggagctgccctgcccacttcctctccctcctcccaatcccggaggcttccaagccatctgacaaccacgtctcccccttgggatctgttccggtgttggttttaccggacagtgaccaaaaaggaggggaaactcctacatctggggactgctccagaaaccctgcctgatcctgcccctctcactgacagtctcctcgctgctccctacatcttcctctccgccggagctgtccagaagggggattttggacccaaaggaatcgggatgaaagggggtgggtactcaagctgaaaataacacccccagttggtggggtaagggctaaaaaaggcaatagggaaagattgtccggcagaaacaccacctgagtttacctcctccttcccaccccaaaaacccagtcactaactaataaagctaagaaaagccccttgcaaacttttccaaaccggaagagaaggccctctccccaacctggggggctctagggggaaggggctggagttagcagccccgaatgggctcgcggggagttgggtggggcgcgggcgaggggtgcaggggcggagtaccttcttcaatggacaggaactggcaaagagtttcaaaatagccgagtgcgctcccccacgccctggggggtcccgggcgctaggaccagggctccccggagagacagcggcccccagttcgggcctaaaaggaaactttctgggccgcggctgcacctgactcctcaccgcccctccacccgaccccacgcccgccaggccgcccgccccgccccgccccggcctggccgtccggagcgcggaggagggggataaataaattcaactcttaccggaatctgggggccgtctgcgagagacccgggggaaggggagccgggcgcccattccccactccccactcctaggccctgacgcccctgtcccggcagcccgggcctgccgccccgcgggaaagcctccgggccggcgcgggattcggcccagcagcgccgccgtcccacccggagaccccgggggactcgagggggcgcgcggaggcccggggtgcgggggcagggcgcggctgccgtggggcctaccggcccgaggcctaccggcgcccccccctcccgccgcacacccccacctggcccgcgcaggccgctccgctcgccccactccggctccggctggacccctgcccgcccgccgtcgccgcccgcgggcgccccggaggccctcaggcccccggcctccaccacccgggcgccggccccactcaccctttcattctccgcccggggcctggcgtgggccggcgaatccccggcctcacgtaagcgcgctcgccgcccgcccagcctgcgcggcccagcccgccgccctacgggagcccggggatgtgggccgggcctggggccgcctctgcttacctttcagctgcttttttttttctccttcccccctgttccctcggctgggctgacagatcagagtgagaggcgctggcaatggactaggaagctcggctgccgctgctactgctcccccctgggctccggcgagagcctttccctgtcaagcaagaggggtgaggatcatatttttattttggaaactaaaaagtgctcccagggtcggtgattattaaggggaaatccctgaatatactctccagccaagaaggcagggctgccggggctgtacaagaagaggcagcagcctcctacagcaccactacaggcactgcgaggacataacaccagagagctgctcctctgccctccgaaacgacaactttcctaccatcttggaggcagagcaaaggggggccagggggaaaagtgcacccgctcccgataaagtacaaatttttacttctcatctctggaaaaaagtccacaccggccgtctacacccgcgcctgggggagaaagcagggaagaaacggggggtgcatgagaaacgttttcatttgctccagggggaaaaatgtttctgcatcttctgatggaaagaaatctttacaagacacaggttttccggtggttattgttttttattttctgtttttaatttttttcatgttagtgacagtgatattttaatatttttttaagccagtaataatttttctccattacagggctaagttctgtggctggtggtcagtttgtaaatttatacttaaagagacttaatagtaacttcatttatttgtctggttatgttattgtatatataaatatttatgttttcatatattgcatataaaaatttgtgttacatgttactctcagaacagattgctgtaagacaattgtaaaaaaacatgtctttcgtctgtttctcaaagcaatgtaaataaaacctatggactgtccagaaaggcatgatacagtgtgtcattttccacagtgcagataaaggcagctatcactggggatttaaaaacggcccctgtttctggaaattctgttatgctgcccatacagaaaggatacagtaaaactggaaagagattttaaagacagccttagatttttcttgaggtaaaatagcttattaagaattatatccgggcatttaatttttttatttatttagattctttaaactctagctagatctttggtgcattacacatgttgctatctgctttttgtgtcacagaattgagaaatgtggctatttttgttagttatgttagttcagaacttccaatgtgctgccagcctgtatgatagactttttgtatattgcagtggatgtcatgaatttacttttttaaatgagcaaagcttactagataaatgggatcagagttaaacaatgctgttagcacagaggtgagagggacaaagggtacccatttacatcgattccaatagaacgcttattggaggataaattgcagagacatttttctatttttgtgaagaaagagaaaaataatagaaaaagaaccgactatctttgtatgttctactggggatgatgatttaaatcttgtattaaaagttatttttctaacacatgttgactaacctggcaggaatgaatttgttatattagtgccctgaatcagtagaatatttaatttctttgtaaaatttattacacaacatttagaaataacttccaaatttagaaattgtcctgatttaaaagtgagttcatgtaatgcatatatcggatatttattagtttctagctgaaccttatctttatcatataactttgaatatagtacttacctaaatattctggattttctttttttttttttttttttttttgagacggagtcttgctctttcgcccaggctggagtgcagtggcccgatctcagctcactgcaagctccgcctcctgggttcacgccattctcctgcctcagcctcccgagtagctgggactacaggcgcccgccaccacgcccggctaattttttctatttttagtagagacggggtttcactgtgttagctaggatggtctggatctcctgacctcgtgatccgcccgcctcggcctcccaaagtgctgggattacaggtgtgagccaccgcgcccggcctattctggattttcttctgtggttttcttcctctttgtttggtggaaaaagttaagtaaaattaactgattctcatcatcttggaaacctcaattgtgaagctatgttctatttacaatattttttttaaacattt

SEQ ID NO: 3176 - DNA, 4001 bp, Homo sapiens
actgttattagagacagaattaaaaagcaaaataaatatataataacctttataacttttgtctcacaggccttctatgtcaaacaagaaattatcttttcatttttttcaggactataacaaggaaagctataatttaaatctataataaggtatatcattttaaagggcattagtcaaagctgcaatttccaagcaagcggtggtttagtccaaaagcttgaaaagtggtagcttattctacacaaaaagtacagtgtaactctatgtatttgacataattctcttcatgactaagctgacttcaaaagtagtataaaaatccataaaaacttaaaaataaagtaggctctacataagaatggaaacaaatatctgtattgaaaaaatgaattcttccattgcctttattttttcccttatgttctctattttaaaaggtaagaatgagatcacttagctaattcaccaatcaagagtagttcagtggattactttcatccttatactattatcaagttgagcagggctgatccttatcaacttttctggcttcaaagctaggaatcagtgtaaaagggctaaaaaatcttttactcaacagatgggatccacttaagtggtctgtccatacttttaacccactgttcttttgaagtgaacaccatcatacagtgggcaaacttctgcttattcaacactttaaaaatacctttaaaatgagaaatctccaaaaaacaagccgtggtttcttataagtgtttttcacagatgtactaaagtaagcgtttcctttcacactctttgcgcctaaccgtctacatgatagggccaaacccaggttaaatatttttttccagctaccactctggacacaccaactaattatgcacacctcacaaaaccacctttcaaaatgcagagagaattaacagcaaggaagtaaagatttttctaaatatagtcccatcatatttatttcacactcatcaagtaggtcactggaggtagctggcagctagggacactcagatgcatctctcaaagccaaggctgagaccaaggggtcactgacagctgcgccatctacctgttgcagctgggccactgctctggacaactgtcagatcagcttcttcgtcctacaaatactaatgactggatttttaaaatcgttgtttgccaccctttcttcccgccccccaaccccatcgggccgctcgggcagggccaagggcgccgcgggactcacgagctcccctccgcgctggctgcagcggcgatgccgggcatgcctggccgggcccggccgggggcggcctcgctgccggggcagggacctcgcaggccggcgcgcagaggcgaggaaccctcccggcgccatcgactcacctacccgcggagaggcgacggcgcgcgccgctcaccagcccgggccccagatccaaggaggaggggcagcggcgcggggaccctgtggtgggtgtcgtaaggaggaaaacgtgttacctaagccggggatgaggacagagcaggaggcagcagcctttccctcgagaaacggaagcggcggggagcaggaggaggaggaggcgcggcccgggcgcgaggttaggcgaggggcgctgggcgtgcggccgcaggcgcggccagaggacgagggttggggaggacggcggaggtcacgcgagcgaaggcgaagccccggcgacgcacggccccgcttggctcggcaccggatccgagcttggcctcagccaggccgccgcccccggctttcccgcgggaccgcggcgtggaaacgcgcgctgccgcctcggggctcccgggacgcgcgggccccccacgcctgcccgagccgggcgtccgcgacgtcacaagtggagcgcgatgattcagagggagggccaggaagggaagggctctggggtcagcttggccacggctgctgtttccttgtcgccgcccacgaattcacttttaaatcttcctcctccattcatctgtactctcataggggactgcgggtttgacagatgggttggcagctgtgaagatggacttcctgccagtggtatccgggtcccactgttctaatggaaatgtcaggtgtactggatgttcctcaagacacagcagtgtctctgggccttgcctcttaaggagtgggcctcgggccacctggacaggaagcgcatcaagggtggggaacttatctctctccagcctttggtgctgtgatactcagtgtaccttaaggatggtttgggttgaacctaggtaggaatgggtgttggtgggcggggtgggggtggggggaatagaaaccttaaaagggcaacacaaagttttgaatagaagaggccaagcagcctcgcccagaagctgatgtttgtgaatgtactgggccttctaaagcggcgcttcacacaccttttcacttcttggcacaggtaggaaaggatgatattacaagggtcaaaatgggggtaaacagaagaggctgctcctgcagaaggcttcctgcagaagcccttgcacttggagggctgggaagacccatgctgtatctgcatccctgtcattcgtttcacggcatccagttgggaagctctgcttaaagctttgtctggcacgttttcttagctacatttttccactccagctgagactgcctcactgagttgtcaacacttggtcttcttcagcagtgaggaaccaacaagacaggaggctgggtcaatactcaacttggcaaactccaggaaatggtgcttaaaacgtttggcttcttgaatggaattcatggtactgctcccagcctgcacctgggttctccaacttgagacaatttctccccgcatccccccacccttccctggctttcactcactagcaagtgggctgcttctactttctttctcacattcatttcttaggtccattctcagagcggttaggattactgtttaattagcctcataatcatatctatgatggcaaaatcaagaaacaatttaaacatgattcttaaaagtaaggagataaataccagagacatagaaggtgaaagaatttgcctctaggaagcaggaatttaaatttggggaagacagggtggagcaagggatataaatctagtccatttttcttttcttttcttttcttttttttttatttttaagatagagtctcactctgtcgcccaggctggagtgcagtggcatgatcttggctcactgcaacctctgcctccttcgttcaagcgattctcccacctcagcctccctagtaactgggattacaagtgactgccactatgcccagctaattttgtatttttagtagagacgaggtttcaccatgttggccaggctggtctcgaactcctgacctcaggggatccgcccagctcagcctcccaaagtgctaggattccaggcgtgagccactgcacctggcggaatctagtccattttccactttgctaccacacatctgcagggtttcttgcttgcttaaaagctttcattggctcccaatctctgataatatcaagagcaagttcctgaacaactcattcaagacccatcacccctcgcatctgtcaactctgccccttgaatattacacctcattttactacaccacatctagttccctgaatatgcaaacagatttcatacatttgcacctttatacatgttattgcttttgcctgggagagtattctcttgctgctataataatagctaatgacactgtgctaagtactttctgtgatttataactgttaattcttacatcaaccctatggtaaatgttactgttatctccattttataaacaagaaaactaagacttaaagagtttaagtgatttgcagaaatatgtagtatttggtgaggctaaatttgaacccagcaatctgactccaggactaacataatattacctattcatccttctaaaatgtttcccagacactaaatttgaacagg

SEQ ID NO: 3177 - DNA, 4001 bp, Homo sapiens
tttaaaaaacgctaatattcagtttaacagcaatactacaaaatatccagttttgaaaacagggaggcactataatatctgcccttggttctgaatctagttgggaaacaagacttacccaagcagattaaacaccctgagacagaataatctaaatgaaaaaagtagctacatgatgagtaaggtggccaggtaagcagactaattctataaggagctcagtagaaacacaatgtttctttctctttgaatttgtccacatccatttctttaagccttttcttcaagccaaactctaccaagcagctctggcttcacaggcgtgtttactagacatcacagggaatgaggcaccgagaggcccgttcacatgcaacgccacccctgggacagacagcatcacggcctcctggcaccactcctgcaacagaccaaccacactgcccttcttacatgggccccatcattcatctttcttcaaagaaaacagtacattagcagtcgacacttcagcaaagaacccccaaaacaaatgccctagcctagatccaaaaacaaaatttccgttaaagaaagtgtgtttttcaaccaaagaaaaattaggctcaattctaggacaacctatagcaagcaattctacgtgcactggccaacgccaacagcagctagattccaaaacaaactcagcaaaaaaggctctgctctcaccttttagagataagaaccagagtcagcaagcggcagaaccatgattcacaccgaagtcaacccactctgtcctcaaccccactggcttccccatggtccacacaacccactgtgaacagatggaccagtcagaatttctctgcaacacccaaatcgccaccccacccccattcccttggtttaaatgccctgaggggcaggcgacaaatcaaattccactcttaggcaggttcccaacacaagacacattcagtggcaaagcaaaagagaagatgggctctaccacatataggtctttcttacccagaggaacattttcatggtctgtcattacggatgaactcggggcaggaagaacccatcattatgtaatgtcagagggcaggcgacaggggaagggaagcgagaccatcaacattcccttccttcgcccacaaagacacaaatttacctctgacattttgaacgtctgtcttctggggcctacccattcctggctggcttttcaagagacagccacagatccctgcacatttctcaggcctcaattaattgactagcaaagccagagagaaataaaatatagaaagcaaagatgctagaaatgttgtcggggtctaaaggcaggcagaaaatggaagagtttcgaggatggagaccagatttcccacacggagatgcatgtttactttcacccggttatgtttccaccccaaacacggcaaggcctccagcttcaggagcccgtagacccagccctggagccgcatcgggcaggcaccgcgtctgcgtcccgcggccacgcgcccgctcggcacccggctccctgctggggcggccgcgtcttcacggggctgggggtcggccgggctcggattgttctcaaaagacgccaccgcaggtggaccactggcaccgttaggcagtgcaatttccatgaaaaccgcgggcgccgtccacatccgccccagcggggacctggacgcgcccccgcgcccgctgtccgtccccggccccggcccccgcggcggccgcgtcgcctcctgcccggcccggcccacctacctggcgctccccggcccccggcgccagccgccccgctgtcccgccgggctgcgcgccagagccccgcagcagcagcagcgccgccgcctggctgtgaagtcgcgggctgcgggcccggcctcaggtgctggtcctcctgccccggcccacggagcccgacccggcggcaaaccagcagcgaaccctccacgcgcgccgcagccctagccagccgccgccgctctagacgccgggcgcagccccgccctggccccgcccccttgtcgcgcatgcgcgctgagggcccggcccgcgccctgcgacccccgccccactaccagcccgagctgggtccgccctctgagacagtagggccggtgaccgagctgctcgcgccaattcctactgctaggttcccacaagatcccaccctatcctgtgactgcttcacctgcaaggagttcttgaacttctggacttgactgagcgatggcatcttcaccctgtcatccactgaggcatctgaggccctgacggatccccaagggaaagtttcctggaggagccgcgacccggggatgcgcccccaaccttttgccctccggacaagagcacttcctgaagtgcagacgtactcactccccaggagatgtttaggaaactgaacattccaaccagacaagcaaaaaattaaaatcttaattctttgaaaatacagacttgcaaaaaaaagaaaattgctaacctctaagtgtatgtccttccggacctgttctggcctgtgtgcataagtgtgcactaacagacttgcaacagcatcagtccttacactttgccccaagtttctatttttccatagacaaaaacaataatcagaagttttggaagaaaattttcactttgactttaaaacagcatttctccttgagcaagggcaaatactggactgaatgtatccttatctttgagtcttcacattttatccgaaaaaaaaattcttaaaatgattttaattcaataaaccagaatacttctcaggcagagcatttaaacatataatttgcttcaaaaacaaaagagattaaccagttaggaatggaaattaagaattctctgaactcatttagaattatgtctgatcctcctcatgtcaccaaaatacagacaatagtctggaataaaaataaacaaatataaaacgagttttttggggagcctgaggcaggagcatcgattgagcagaggaatttgaggctgcagtgtcagcctgggagacagagcaacaccctgtatctctaaaaaaaaaaaaaaaaaaaagaaaagaaaagaaaagaaaaaagaaaaagaaaatgtcctagttttaaatttttatttctttactttttattttatttctcttctgaaaagtaacttagtaataaaacagttccctcttattatttctccagctaaatggaaagaaatattgacagaaccttgactccacagtacaaagttaaagccaagaaaatcaaatttgtagaaatgcaaaaatatttttgcattttttttaattactgtgaccaattagtttgcttggaacagccccagtttacatctttttgcagcaaaattattaatagggccctctttcactctcaaatgtattcctgttcaaacaataaattttatggccatgctgtttatttatttatttttgggatggagtttcgctctttttgcctaggctggaatgcaatggcgcgatctcggctcaccgcaacctctgcctcccaggttcaagcaattctcctgcctcagcctcccaagtagctgggattacaggcatgtgccaccaccctggctaaatttgtatttttagtagagacagggtttctccatgttggtcaggctggtcttgaactcctgacctcaggtgatccacccgcctcggcctcccaaggtgctggaattacaggcgtgagccaccacgcctggcagtcataatcaagctaagaaagttgttaaacactaacttttaaaaaagaaaaaaaaattaaatttataaagatttaaaaatagatatcagtctaatttcagtattcattcatttagtacagtaacactgaatgaggatcagcttccaataacatctgtcacttgactgttatgtaattctggataatcttcaaagatcaatcacattttcagtgtggcaaagaatgaggccctaattccaccgtagaatgaaaattatcaagagaaaaggg

SEQ ID NO: 3178 - DNA, 4001 bp, Homo sapiens
actgtcagcacaggccagcgaccagctgcgagcctggcttggtttccagtgccccagctgaccctgtaaacactgtggctccccttgcttctttctccagccctgcaaggctacatgcctgccccgctggactgggagcaggagaggttgggccacaggctgctggtctcagctgcagcctctgggggcagatggccgtggctttgactgttgtcactcacttaacctgccagggcctcagatttctcatctgcaaagtggggcttttaacaggaccttcactttaggttgtggtgaggatgaaatgggctaacaaatgcttagcacgacaggtcccagctgtgagtcagtattcaaaacaggtctgggttcatcacccaattcccctcctgcctggagaagcacaaggccctggctgctcgggggaacatttctgccagcccagggatgctacttgagatgttcaggtggacacacatttccctgactacactccggcactgcctgaggccccggcaaaatgattagaccaagagctgcagggcaaggcccccctatgattagaccgagagctgcagggcaagggcctccttcagacgctggacaggaagggggttttagaaaggaaccttcagcaagtggctggttcctccattgttagcacagctggtacattcagtaacatccccaaccgggcagtgggaggagttgatggtgacagagacccaaattgagggggtggggggtgggcagcggtcacagccaagtgctcaggagagagaagaggctgctcgctggtggtaatggtgacttcctctgctctcaggcccctgaaagcagcttctgactgaatggaaagtcctttcttgattaaactcaccccatattcttggctcgccaaacaacagcttcctccaggggcccgaagcctgggtgctccaggaagggtcccccttgccacctttgctcttctcagggtttctgagctgggcatctttgagctgatctctaacacacccacctccacagagccctgagcttcctcctggctccaaaagcccaaactcccttctctcggtccccagactccaaggaagccacaaggtccatacagctcatgggaagctggggtgtaacatcaggcctcagagtggttctgacagctccaaggctgcaaaacctgccatgagaccagctctctgaactccaaggacaaggtccatgacagggtggcggggaagtgtgcatgtcagatcactctgtcctgtgacataagaacaacccatctcaaagctgggccccctctaagcccctctgtcatatctgtgcccggggagggagcaggttgtactcacagcacgcagagcgcgtatgcccgggagatggactcgctggcacgcacgaggaagctcccgtccttgcctgtcctggaaagcagctcctccgccttggagcgggtgatgttgccatggttccagcaggggaccatggtgggcgtgggcctcctcggccgggccggcaggcacccccaggacccacacaccaccgaggggagcggaggcccctccactgcaacctgccgcccgttgcctcttggtggcctcggctgctgccaccagcttaactgactgacttcctgtttcaggcgctcagtgagggaaaggaaactgagctgcggagaacttcctcattacagaaaccaagcaagagagagagagagaaagagagagaggggggggccctggccgtccaccgtcccctacaccctgccacggctgccgcggctctcttgccagccctctccttcctggcaactggtcgcagcgtacaattgaagtgtccagtggcagctgaagtccccctgggtggaatgaccggctctggagacgtcaggagagttgtggccacttctgaagaagcatggcctagcaggcatgggtgggccagagaagtggttcttctgcggccgtgctgacacccacgtgggatgccatgccctagacaggcccccgagccttctgctctccctcagggcttttcagcacccaccctgaacctccaaaacacccaagggggcacagcttctcaactgggactacggcctgcccaggacagagcaaacttgagggggaggggacagtcgagccccacccctcccctttagagactcccagcggcctgggtgctgggagaccttggctgccaccagccgagggcgccaaggtccaagtgatggctctgtgaccccattaccctcattcccaggggcgggtgggtgctgcacgggcagcacagctctgatccctgcagtccagcttggagacacacaaagggagcttggaggggatgtgggccgtttacagcgggaacataggctgggtttttccctgggcttctccaggatgctggggaaacaagctcggagaggagaaccccaaagccccacagggcaggctggccgcctggccaaggacaacactgggtgctgagtcctgcgtctcagcagtcggggtggccggtcggactgcaccgcctccaagactgggcatggccacatatgcccaccactcaaagaggagctgcctctccagggaccgccatccaggaccagtcatttctgagggctctgcggtggacacccatccctcagcccccagacctgggcaccttccgtccttgggtccggcccaccaaggccgaaggggcacgtgttgacccgctgcacaaagagtgcccccaccatcccacatccaggccttggcctccaggacatgacaacagactccctccaggaaggggcaccagccaggcagcgccaccacattcaagctgtgggaacctggtcaagtttcttctctctctcggccttggtttcttcttgtctaacttgaaggacgtagctcgtaaaagagctcacatgtgcccaggggctcaacatgtgtcacactgatggttgtcccagaacagggcccccagcacctccccgctgagcaacacacatggcaggcgagtctgtagggcagacaaagcactcccagtcaaggacctctggccaggctgggagccaggcgtggggatagagtggtgatgggaactggcctccatgctccggcccttccgcagcacgccacctctgcagcagcccagtgtggaggcctctcattccccacccacgcctccactcagcacctgtccaccccctccttatggggtcatctcctatgctcccattgtgtaccttcacacccttctcacttccctgctggcctccaccaacatccatgaagtcctggaccacgccaccaggaggatccatttgcaatactggtccctttacacctccacccactcatctctagagacccctaccatgccaagactgccctacttagagagcttcccccaaacccccagccccccacctctcacacctctattcccacggtccttgccattccacagagtgagatcccctggcacacacgccacacgggcactcttccctcatttttaaggcccatcccaactttgcttccttttccacccaattgcctgatctatccagcatggtcagctggcttgtcccccacccttctgccctccacattcaggaaatcccagtatctagatcagagctgcccttttggtgggtggattttttttttttgtaggtctccagtcaatataaataattttaacgtattacaaaattcacaaactcatgtgagggatagtgatttatcaatgaagacttcaaataatggctagagagtggccaggcacagtggctaacacctgtaatcccagcactttgggaggctgaggggagtggatcacctgaggtcaggagtttgagaccagcctggccaacatggtgaaaccctgtctctactaaaaaaaaaaaaaaaaaaaatcaggtgggtgtggtacgtgcctataatcgcagctacagctactttggaggctgagcaggataatcacttgaacccaggaggcgaaga

SEQ ID NO: 3179 - DNA, 4001 bp, Homo sapiens
caggttaaaaaagagttataagtgattatgagcttcgtgaataaaaatcaaggttcatgttggccactgaaacaacttagaggcaacaagcatttgaaaacaaacacacatacaaaatcttctagtaaccttaagaacctgttgcattgtaacaactgcaacaccccctaaaaccaaatgacaagaccattcctcttccaatgattagccgtaaaagaagtatttttactccctcagataaccctgtttcttcaggtgcttaggtcacgtaagctactaaataataaagttaaattactacctcacatatttttcatcatatgctctcttaattagaatagcattcttgaaatagaataagcactaacattagaaaaaaacagacttaaatcaatgcaacagtttaatgctccctaaataaaaacacatctacatgtatcatgggctagagacgttaaaaatttctaggaagaaaagcaatatttgccttataaacactgcaactctttcctctcaacattaaaacccaaacatagaaaccagtaagttagctgcatttacagccccttacaggttttaaatgtcacatctcagtgcctaaaaaagttactccatcgtttcgagataagtttctgagaacaaagaaaactctttaaactactgaactgcattttattctttccttttccgtgtgaccatctgcaaaagcaacagttgtcagttaaacagaatcaacctctttcccgagtggacatgattcacagcttggtcactgtacagcagatgtgaactgagaactacgacataacacaatgacaaaacacagtactgagcacaaagtacagggaaagaatgaaagacagaaaacaggaagagcacacgtctgatttttgttttctttggggcccccattagtagcattcccttcatccatcttcattcagtggttcactatcagggccaaacccaaaagttacaaaacaccatctagctactgtctggctgcttttattttttctgcaccaggacgggagcacgcattcccctgcagtcctcagctccaccgcaatactgataccaaacagtttcagtggcccagctgccaagcctaaccattcctttttaaagcatttcttcatcaatcctacaaaacagcaagttcttcatggtatattttcctagagcatctagctaatatcatactttaacaactttttccaacgttaactggacatgggtcattatcacttaagtgttagcgccattgcccgcgcccactcccataatccacactgctttccttctccatattgccaatccccactaagcaaccctaaaatctagtaattatcatcaaatccacttctaggccctggcaagaattatttggctttaccgaaacacctattccataggtaaccaattccagtcaaaaatgccagagtattactcctcaacccaatgccctatctccttagtggattataaacttactacgacaacctgtcttctttggatccaatccccgcccaagtctgagtcttctctcccaggctacaagcccccaagtcctggcagctctatgcttgacagctcgctgacctccacctcatcagaccattgggtcgcccttctcgccgtcctccagccttcttcccgctcagacactcatccactgtccggggagcctcgacccctcctataccccctccccgatcccgcagtccccttctggaccttgcggacccctctcaggtaagcggagccccttgccctgcaggcccatcagtggtcctggctccccgcacctgccaccagggttcccaggctgcaaaaacacaagtagttcttcttcccaagggccaccctcctcctcaggccgctttcctcagcaccacgtcacccgcgcttcgccgggagacccccaactcacccccgcctccgccatcttctgggaccagcccccgtaccccctaccgcctcttcctcctccactcccacaactccgcccgagctccactgcgcctgtgcggccaacgaggccgcgcgcaggcgatcggggcagaagagcttccggttcctgctgtcaataagacgtggacctgcgagccggggcaaaagggcttccggtctgcgggaaactggaggctagcggtgggcgtggaccgtcgaggtgactggcggttgtcggatctgctgttgtttgctgaccaggcagccgtaggtaatgacggatgcccagaccctgtgggcggagtaaaggaatcatgcactgatacacgcacactcaccgaggggcgcgtccgtctgcgtgcccctcatctcgtagccgaaaggagcgcgttccggggcaggcctccgggtacttcccgcagaggaccgggctttatactctttgctccttttcctcccctagtaagtcataacttattttgggagaagggcatagttatttgtctctcgtctccatgctacagcactttatgtgcttttcattcaaaatcgttcctcgaggacgaccaagtaatgtgatttgggggacagttttcataggaagggctttataagtttacaccaacataaagaaaacttaaaaaccttataaccgcttatttttcagaagtattatttttcatttaatctaaaaccatacttttagaacatgaaaccaagccaaacagatctttgcagattgtgcaagcgaacttttttttttgaatgaaagtggtgccatcaatgcaaaagcaagcccatataagtgccgaaaggtactcgtcataaggaggagttgcttccctattctgaatttttatttatttttatttatttatttatttgagacggagtctctctctgtcacccaggctggagtgcactggcatgatctcggctcactgcaacctctgcctcccgggttcaagtgattcttctgcctcagcctccccagtagctgggactacaggtacatgccaccatgtctgcctactttttgtatttttagtagagatggagtttcatcatattggccaggctggtctcaaactcctgacctcgtgattcgcccgcctcatcctcccaaagtgctgggattacaggcgtgagctgccccctgaatttgttttttttaagcaactctttttaaaaagagagaaaaaataatctctcttgagtgtattagttattgagctattccatttggaggtggcttaacccaaaacgtgtatggatgtggtaagattacaatggacttgaatgttctagatgaaatctgggccgagagtaattgcataatagttttccaaaggactgtcagatggtaaactcctttcatttactttgaactgataaacgataagatggatttttgttttttgacctttttatctacatttacttctgaaaattgaaaaagaatctgaattccaacaaaatgtttctaggcaagtatttgcatgatgcttctctaacatttcctatatcttagtgttttctctaatgttttctgtagctttcaaatttcactcctgtaagtttttacactaccagtaagaaagatctgggccaattatacagaatggacgatgatttttaaaagaatagagaaagcattcagaaaagagacaataatttgaaaatgttctgacatcatgtatttccttaaagcaatacaagtcctgtatgtccagttcatgtctactccaaccgagcttttttcagacacttagaaattgccttcaagaaaatccttatggaacattgtaacctagaggggcatttattttcgtttaaatatgtattaattgcaagtagtgacagaacctaaaaagcaaaaaccatatagcaccagttccaaggttcctatatctaatgcagttactcctactgcagtacaaggaggaatataaaatccctaggagaaatacaaaaggccattgtcttctttgaccagatttgaggaaagttttcatggaagatgtggtctttcagtgggcgttgagggt

SEQ ID NO: 3180 - DNA, 4001 bp, Homo sapiens
actgcacctccagacatttgccttccctcctcccaacactcccaggctttgaatcccatttcatctgatgctgtcaccactgcccctcagtcaccatcatcttccatctaccatgatcgttccaggccacctccagagcacccacccactgaatagcatcttgatgctgccttcctacctgttccattgttaagtgctgagttcctctacctaaggccagcaccccctggatcccatgtcctctcactaccaacgatgtcacccacttctccctcctcctcctatatcattctgggccattcccttccacacacaaacattctattgttttctgtcttggagccatgtcctctgcctctagctgccaacatatttcctttcctctgcagcaaaactcctttaaagagttagctatgctcaccatctatagtttctctccccctacattcacttgagtaagtctttctatctcatcataccactgaatcagctcctgtcaaggtcactggtgaactccacactgccaaatcaacagtcagttctcagttctaccccaacttgtctcaggagcacttgatggaggagaaagaagttacttctcctggaaacactattatttcttccactcgcttcttcctcatggatcatgtctttgattcctttgccaggtctcctcttcccccagccttactgtggatgatcccaggatcagtccttacacctctttattaatattcattctatgtctcacaaagaccatcacaggctgacagtgagcaagtttatatttcagacatgggtctcgctcctgaacccaagatctgaatattttaattgcctatttcatctccacgtgatgtccaatgggcacttccaactcaatacgtcttaaacagaactcttgatcttccccatttccaaaccctggcaagcctttaacctctctgctcttatttccttgcctagaatacagggcacgtaatagcaacagtgcaggctggagctacagtgcccggcttggcactgttcacttgctgtgtgaactacttcacctcttcatccccaagttccctcatctgtaaaatggaaataacaatattaacagcccctacgttacagggttgctgtgaagcggttagaacagtgtctacagggtcagcgctgtaatacctgttggaaattattcttacgaagaccaaatgaggtaactttgtgcaagtgctgtgtaaacgacacagtgctaggcacacacttctttcagtaccaatgccactcgagtctgtgaaaagcaaatgtcaataatgctttcccaagatctttctagacttaaatttcaggacctaggtgtttccacaaagcaccgtatttgttaccgtgaaagattaacaaaaaaagcagacaaaatggcatagtgcttctcagcaatagcccctaagggcttggcaggtatacggaagactgggagctcatccccatggggtggtgggacgcgtaggggagggggagatctaagtgtatgattttccttgctcacaagaagcagatactctatcccgaggcatatttgaatttcctaaaaggaaaaaaagtgggggagaggagggaagttgagaggggaggagaaaagaaaagaaaaaagaaaataagagaagcagaaagcaagccaccttctggcttggggaagcccactccatggctgtggctgggagcccatcacttacgcgttcgacattgctggctactttccctcttttcctcgccctccgggaagctcttccgttgctctctgaaggacggtggcagcaggggtcagggcactaccaggagctacagaggatttgggtggggggtcttctggagggagaaaccaggactgcgagaatcttctgcttcgggcaggaaaaggtgaggccgggtttgcttcgcaggcacggagcgcgcaggcgcagagaggtgtttcactccttcccgtcgcgacccagagactcgcgaacctcacttcggccactcaggtgggcgcgacgcggccctagcaacggaaacgccgcgcctgcgcattgccttccgcctgccccctccccccccccgccccccgcattccgcgcctgcgccaccgcgggaggcctgggtgggcgcagctgtgggagccggtcggagtccgagcgctccgtcgcggggcccggccgcttggcgagcctgctccgggccccagcacttagcctgtggtcctccaggccgtcttcccgctttcctgctggccccattttcatccactgtcagctctgcggccttgggcaaggcccttaatgatggtggtcttcagttttcccatctgtaaactgggtataacagtcgttcgttcagaactttactgggcatctattctgggccaagtgcagacttagattctgggcacccaagacttaggcagacgcgcccttcggagacttaatgagtatgaactaaggcgcgggtgcgttgtaaatgtaaaatgcagtgtggatgctattaacagttatccgtaagtcgctatgagtgttggctttcattgctcttctttcttcgactttagtaactgttgaggtttatttgcacattttagaccctgcagctcctattggaacgccaggtttaatgctgtcaaaggcgtggagaggacatccaggtaaaaattataatcaggatcacaaaacctctcccccaccattactaatgaaatgcgcaaaagcatagtaaaagccagccctccgcaccgccttcaaataatggagcaaattatttctcagacgagaaattgagtacaaccttgtaccgtaaacttcaaaaactcagtgaaatagcagcttgccgtggagaatggtgtccagcctcatctccaccctcccaaagcccttcagggggcagagaccaagtagacacaacaccaagaattctcattaatgctttttgatgcaaagaatacacacactgaaaagaaggggtatgaaagggtgagccgaacgaggaaacacctggggaaatccggccagataaaaccatcctgagtggaggtcaatccctaccgctcccaggacctgagcagggacaggagaaatctccagggcttgcctttttctaggtccctacattgaattgaggcaaagattcaaagtcaaagggcatgttgtcacaggaatagggcacactcgtgacaagagtgggaggatggtggtaaaggagcttatcaaaatctcagaagagagcacagagcctggaagttgtgtggattcaagggagcagtccttatcctaaatgtgtactcaggttccagaaaagcagagaaaagtgcagtatctcagctctggaactcagatacagtgagaagacagtcaaagagaattcgcccacattatatttgaacaaacagaacattttcaaagagcaacacgtgttaaataggaataagacagaaagaagcagcatatccactgtctaaaaccaagactttcataaaagtagaagaaaagaaaggattataacataggccagacaagtgaaagaaagtctggagaaaatctaaccaaataaataaaagcagaaaaatcttttttgtttgtttgttttgagatggagtctccccctgtcacccaggctggagtgcagtgtgtgatctcggctcacggcaacctccacctcccgggttcaagcaattctcctgcctcagcctcccacgtagctgggattacaggcgcctaccaccatgctcagctaattttttgtatttttagtagagacagggtttcaccatgttagtcaggctggtctggaactcctgacctcaggagatctgcccgcctcggcctcccaaaattctgggattactggcgtgagccatcgcgccctgccaaaacagaaaaatctttacttgtgctccatgctatagaataagctaataagaacattaaggtaataaaataagaactgggagaaaatataaaacaatggaatgagaaaggaaggaa

SEQ ID NO: 3181 - DNA, 4001 bp, Homo sapiens
gacatactaacaggtgtgacaactgttgacataaaacagaaccatgctcaagttgctttgtgagcttaataggatttggggcccaaacctgccaggacaacattcaagaggaaaatgacaggctaattttgtttagaactcggatctgaaactccacttagaaaacagactgcagctccagatcaaaagaattgttccctctaacccaggagggttgactgcaggagtgcttttcagttcaacacagaggaaagcataactccagacagcaacagtccagcaaaaccccagcttgtttcatagatgccaagaagatgctcagtaaattgtaacttgcagcacaggcctgattaaaaatgccctccccacacaccaacaaaaaaagaatgacgacttcttcaaagtgccaaaaaccagtgacccaatggaccttcagtggagaaatgctagaaatatgcccccaaaattagcagtaaaaaaggacaaggggatacgtaagtaattaatataaaccattttttaacaccactgcttataaatggcatgactgcaaaatccaaggaaatcagtaacaaaaatacatcaattagtacagcaagggccaggcgtggtggctcacgcctgtaatcccagcactgggtgactgaggtgggtggatcatttgaggtcaggagttccagaccagcctggctaacatggtgaaaacccacctctactaaaaatacaaaaattagctgggcatggtggcaggcgcctgtaatcccagctatttgggaggctgagacaggagaattgcttgaatgtggaggcagaggttgcagtgagccgagatctcaccactgcactccagcaaaaaaaaaaaaaaaaaaaaaaaaaaaaaaaatacagcaaaattgcaatactttaatgcagagaaaaaaaatgaaagcagaaacccattcacagcaccaataaagaacaataaatatttaagaattcacatggtggaagccacatgaaatctagctaaaggaaattctagaatgctaggtacagatcagtgcaagcagaagtcactatctgctcctgtctaaagagacaaaccctgtctctactaaaatcacaaaaattagccgggtgtggtggcatgcgcctgtaatcccagctactcaagaggctgagatgggagactcacttgaacccgggaggcggaggttgcagtgagccgagattgcaccactgcactccagcctgggaaacagagcgagactccatctcaaaaaaaagaaaagaaaagctataaagacagaagactttcaagacatacatacagatttaatatggccaagaattcagtaacaatagactaaagactataaataaatctagtaataacttttaaatatgggagtggaacagacagtaaaagttaaaaggcatcttatacttccaacattggccacaccaacaagcattaagtttgtacaataccctgaagaggctgcctccgtgaagttcaggtggggtgatctgaaccccacaaagacccaaagtcaacaacagcaagagatctcgggttgaagaggctcctgcttccaccagggggaaaccacagccgacctgatggggcagagcacagccagattttctggatgtctagacctgctgtgggcagaaccatccaggggagcccagtcgctccaggtcagagccctcattggcttcagttgggtcagagaagcaggacttttccagggcctcacggagctgacccataactggaatttttggtcaaagacagtcctggtggcttgagccttccgggtcctgccatttctttcttccccaactgcagtctgtctggggaatccctgtctgggggagaccaggcaaagattcccggctgacaggaaaatgagcagctttgaaagcacacggatccctgcatcattacctgttttcctcagcgctgagagacggcgtcatctccttccaccagaccctcttccctcgagactgtctctggcttcctgctccccagctgtcctgatgcctctccacgtgaccacaccccctcccacactggaccgccagggacctgggcaccatgcctcggccacgccagcctggggagcccccactttgcgctcagcccatctggccttgcgccccacctcctcgccctgcagcctcaagcctctttctgcttgagcccagccatgaaggtcaaatgagacaagagaggcggcaagatgatttttcataagagcattgatgagagagaattcacacagcatagaattcactcttttcaagtgtacaattcagtggttttcagcatagttgtgcaactaccaccattatctaactccagaacattttcatcactgggaaagaaacccacacccgtgaagcagtcactccccattccccactcctccctgcccttggcaacccctaacctaatttccatctctttttgcctattctggacacttcacagaagtgaaattacacggcggtgggggggggcgttcagtgctgagctcctttccctcggtgcggtgtcctcaaaattcatccacactgtcgcatactttgtacttcatttctttctattgctaagtttcctttgtacagatacaccacattttgtttatccattcgccagcccattgacacttgggttgtttccgccttctttgctgctgtgagtaatgctgctagaagcattcctgtgcgagtttctgcgtggaaatatgtctttattttccctgggtagggcaaggtggttttcaaaggtaaaagtgctctacatttaaaatagaaaccagtgtcctgagcagctcatccctggaggtcactcaatctcttcatgcttacgcctccttcactggcaaacctggatgatgagaccaactctggacacctccagggactactgtgggatggtgatgtggtttggctgtgtcccgacccaaatctcatcttaaattttagttccataatccccacgtgttgtaagagggacccagtgggaggtaactgaatcatggggacagttacctccatgctgttctcatgatagtgagttctcacgagatcggacgattttatcaggggcttttctccccactttgctctgcaattttccttgctgccgccatgtgaagaagggcatgtttgacttcacctgctgtcatgattgtaagtttcctaaggacttcccagtcctgcagaactgttagtcaattaaacctctttcctttataaatcacccagtctcgggtatgtctttattagcagtgtgagaacagactaatacagatggaacaacaggtgtgaaagtgttcctggaattttaaatgcactttgcaaacagaaggtaatattttatccatgagactacttaacagtttttgaaagtatatgattggtttcagacttgagcatatgacttagagatatgacagattttgaagtcaggaggcttgtggatgaagactgaatatgacagttaaaaagaccagactgttatttctacagcttggcagttttcctataacggagtgggtaggggagggaaacacttgaatattcacttgaatatatgcacttccgtgggaactcaaaatattgcacaatgggaattcttttcaagttattttgcacaagataaaaccttctgaatcttccaatcttaactagtttgctgtcttcttccccaaatactccccctgccttcttgctctacggaaggcctgtctctgctcagaagccctctcagtagaggctcctgttacccccagagccctctgtctctggctgtggggctgggtcaaggggaccccttctcttcactgcacctccagacatttgccttccctcctcccaacactcccaggctttgaatcccatttcatctgatgctgtcaccactgcccctcagtcaccatcatcttccatctaccatgatcgttccaggccacctccagagcacccacccactgaatagcatcttg

SEQ ID NO: 3182 - DNA, 4001 bp, Homo sapiens
tgggattgatgatctgctgtggggcagatacgctcttggggctcatgggcatatagtctccactgccctttcggccactgggcactggggccacccctggggacatgggcatgtagccatcatccgtgtggagggtggagctgtctgggcggtggtgccccccccgacgctccaaggggtgcatttccagaccctcctctgggtaggagcgggtgggcacgaaggcggagtgcctgtgtcccggcagtcggcctccactgccacctcctggtgggtaggcaggcatcatctctgtgtactcctcaatggaagccactgaggactgggacggggtcttctggtgggtaatggtaggggatgtgcctgccgagtgagttctctttcggaaccgattatccagatctgcagcactggctgcttcatccccagccaaggctggactcgtgcccaagcctgttcctggggtgcagcggtggccattgccaccccgagacaaaatgtagtgaccgttgggggcggtcagggtggagggccccttgccacccatgcagatatagttgcttagctcctcctcaccgcgggctggtggggtgtggcccagggaatccggagtgacactgcggaaggaactccggaaatcgcagggactggagccatactcatccgaggagatgaaaccgccatcgctgggggaaccagacaccgaagcactagatcgccgtgggaagagacaatccgaggtggagccatggccactggtgctactggacgacagactgaccgggctggtggccgaaggcgagcagcgggaagccggcatggggatggagcggctgtggttgagcggggggtgcagccgggcgctgccccgatgccggtgggcgtgggttctgttggtgctgggactcacagggctgccgtccaccgaggctgggcgggacatggtgccttcgccgtcactggaggcgcggacacggaaggagcctggcttcccgcccaccatgctggccggggaggtggcggtgatgctctcagtgcgtgatcggcgggtcagccccacctggctgggcgggggattgttgagatggtgccggcgcagggggacgctgatggggttagagcagttggacgaggactggctcttgctgcgagggcggaactcatcactcatggcccgcatggcctccaggatggtctcgtgcatgttctgggccaccacagagtcatccacctgcatccagaactccccgggccccgtcacggcagaacggcccacctcgatgaagaagaagttttccgagtggccacagcgcctgatgttcatcagctgcagcaccacggccgctgcctccgagttcagcttcacgaagctgatggtcttgctggtcaggcaaaggcggtagataccaatcaggttctttgtctgacccaggcccttgggcttcaggatcacttgccagacctctttgaatgcgggtcctgggggcacgtcaccgtagctcaagtcctccccagcctcaccaaggccggagctgccgctgcagctgcccccaccacctcccgccccgagggccgcagctccgtcgtggtggcccttagcacggttgtgcagctgtaggagagcctggtaccagctgtcttgctcggcctcgctgtccgccgcgatggcaaagtgctcgtcccgggtgtagagagccaccaggtgcttgttcttggagtcagcccgcttgttgatgttgaagcagctctcaagggggatcgagcgtttgggggcgctcgacttgtgccgccacttcttctcgttctcgtagtactcgaggcgcgccgggcccccagcctcgctggccgcgcgcagtacgaagaagcgtttgtgcatgctcttgggtttgcgcaggtagcccaccttgcgcacgtccgagaagccatcgctctccggagggctcgccatgctgccaccgccaccaccaacgctgagcagagggaggctccgaaaaacaaccgggtggggggcggaggctcctcgccgcggcccggcacatgcaaacagggctggaggcagcagaaaccccgactctgaaatccacgccgccccccgcgccggggaggggcagctgaaggaggacgcagctgctgagcccaggagagagcccgaccggagttttcgggcgcttcacgcccggcggggaggcagtgcgtccggggtgagggcagccccgatcctccgagagccaagtctcctctcagccgccgccgccaccaggaaggagcgaagatgcatctctcgtcgccccggctggagtccggcacagggaggcgacagtcgggggtccctgcggtgcccctccaggagcgcgcgcgcgcgcgcgccttccctcctgagttcccctctggaagcagcgattcccgaggcaaattaaatatccttgggcagggggaggcgggttgccaagtcccaacgttgcacggggttctccctcctccttcgcctcctcccaccccccaaccgtcccagccgccaccagccgcccaaataccagctcagtcgcagagaccgcggcgctgcggctgttgctgttgctgctgctgctgctgctgctgctgccgccgcccgcgggcgcgtcctctgcagcccccatccgggcccatctcggcgggtggagaaagtggcttttccatgcgaaacgataccgggcagccactgcagctggggaccggccggagggacagactcatccctgcccctcgctccaggcggctggggaggaggggaggggacaagggcgagaggggatgggggaggtttgggaagggttcggggaagacgcctgttcctcgggaggcgctgccgctgcagttacttctcccctcctccctcctcctcctcctcctcggagagttgccgagagccccaaccaaaacaagcggcggcgtctggctctgcgcgccggccccctccgaccgcgccgccgtctcactcggaggagaaaaacacgtgacggagcctccgcgctcggcagccgggcagccgccgccgggaggctcccgcccgggtctctacattccgggccgagcccgccccgcgcccgcccctctccgccccccagccgtgctgcagcggcgcccgcgccgaccccggcgcagcgctaggacagcgcccctgcgcggccgccagctccggcgcagcgcctccctacacgcgcgccaaccggggcgcccccggcccgcaggaatccccgcggcgggcgcaggcgggggtgtttgggtggctacccgaaagcacgaggggagtctgggaaaacgggagggggcgagctcgggaagacgcaggagtgagggtggggggccacgggggggcactgcggctacagagccccgagtgggaggccggggggaggcgggggcgccggagctgggctgcctcttacctatcaggtaagactgacccacgggagggaggtttctagtcaaggctgtttcccccaggaaatttaaaagctagatttcggcttcagggcgataggccatggtgaggggatctgtattttttaaggtttttctaaaggacttctgggccagccttccaccttgggatccccagatttgctgccgtgaggtacctggaaggaacagagggacgcccaagggcagtgactgggggcagttatggtcactacaaaaggagaacagggatccccaggaagtgtctcacgtccggcgctgtggaattagttgctgatcaagtagggagaaaatgtaaatatcaccttttctcctgctccccttgcccatccgtgtgacggggggactcacacctaaggctgagggcatgggggaggggaaatgagaggtcccttatcatattccgaagtctatccgtgactttaaaaagctgttagggaccttcagagggttcataaggccaaaaccctactgtgcaaatattggctgaaatgtttgtttcacacacagctcccacacccattgaaccaccctataagttt

SEQ ID NO: 3183 - DNA, 4001 bp, Homo sapiens
gttttggatgacggttttgggaatggaaaattatactacattaacgatgaagatgccaattttccttttcttttagattgtatattgtaagtaaaactatcacttttttttttaggcctttaggttaaacgacgggatatgggatcaattccaattgctattcctgatatgctccttagcctgttctttaagagggttgataggtcaaagatggaaataaaattctcaagtcttggcttagctggatcctgtccttaatacgctgagagagtctaaaatgtgctttacacacggagagacggggagagatgaagagaaggtatcataagaaatttctctagcatagttgtcagagtactgcaatcattgccataaggaaaagggagaacgatattaacagaaagggaatcccttttatattaaggaggcaagatgagatggagttgaaactgaaaactttatgctctttaaaccagaagtaacaggcaacgtgaatctttccaggacttgccctatggtggggtccacatggggggtcgggaggtcactaactcctggtcccatacccaactcacccagctggagctgttcgcacgtctggccgggattctttccgatcctgcatctgtaaatcgccccgggattgatcactgaagcgttggcgagccagttggcagtgggcgcacccactaggagcctaaagcgagacacgtgcacgtgcgctcagacgtgagctgtgctgcccactgagctccctgtcgccacagatgtgcagtccgcagcagggcagcttccccacctcctcctccgcccaccacccccgactcgaagctccaagaccttgcaccataacgcacccggggcgctgccgccccaagataagttagtttccctggcagatttccagcgagctggctctcgcagcgtttccctcctgcctccttgggagggaggaaagtttgaatcgggcagggaatccctagggcgccattctcacgccgctctgagctgctgagggcgcatcagtccaactctactcaccatcggttcgccccgtggctgtgcagcacgaccgagtagccgaacagcgtgttgtgggggccctggtaaagcagcgcgctctcagtgtccacgttgtaggggcggccggtcgggacccccaggcacagcaacagcatcaccgtctcccggacggcggcccttcgggggccgggttcgcgcctcgcttcccaagccatgcgctctcggtggggaacattcaacactaaacggccactaccccaaagttgcacgggatgcgacggttggccaacggggaagaacgccccaagagatgaggcgcagcgtgtccggcgccagcgggctaaaggaaggagagagggaagaggaggggaagtcggcccaccgcgggcggagcgttcgggccggcctgggatgccgcgcactcgcccggccccactcccggtttctgccgccagccgggagcttcgggtgctcgcgctgcttctccgggtacgggccgctgggtggggtcccgggcgtggtgcggaggcgcagggccgggctccgtctctgcctacgcgcggctgcagggggcgctggggaacctcggctgcgcaggactcgcgtcctggcccgggcctcccagcccgcagagcgcgggatggctctgggctcagcaagagcggacctgatggggcacgggcttccccttttaacggtggttggggcctagaagcggagctgtgtgaccccaaactgcgcgcccctcgctgtgaccgcccagcccggcgtggcccaaatgccagccacaaactcggggagtgggactgcggcggggagccgtccagttctttcgttgatagttaaacactgtgtcttgtttttcaggtgtaggcaaccactagataaattatcaagagccacagattaaaaacaaaaaaccaaacaaaaagactcgccgaaggcccctggggaacattttagtgacaaagacgttatggctattctcttcaagacccacatctcagcacccttctatacccacttccttcctccccacacttcctctgcagcccgggctgcatgcgtgagcaggctagcagcagcctctcaggctgaacggcaggcggtttaggctgtggctgaccccaacagagaggttgggttaaggaagcactgtgacttgattcactttaaccgattcggattgctccagctggtaattgatgatccccccttttcacgcacccactcagttgccacgggacacacctgcttttaggggtgtaaaccccagtgtggggtcagggtcctaatgagcctctgaaatgtgccggagacccacaacgcaacacacctgaactgggtagtgagtctcattctaatgcaatccaggtgtgccctgccttttttttttttttccttcagcaaccagagagacagccataggtgattattagactgatattttcaggagatgaaagtctagttttttattgttgctatatgtaaaaagaaaagaaaagtctgcatcaaagagtgtgtctgtgtgctaaaaccatgctggaataaataacacatctgacactaatgacagatacacaattaaaatgcttattcatttattcagcacattcatggagcaggcacttgactaggaccacaggattccaccaagagtaaggcaggactgatacaaagtttcaaaaaatgttcgctccaatggtagatagaaaaatttgtactaactagagaaagatccaggtaaggacacttaaagagagatttgaaggaccaggaatcttgaatcaggctaagaatgggatgagcaataaggagggctccagaggagccaggtagaagaactgagagagcttgcctggctagagtatttagccactccacacacaggttggtgtgatatgaggctgacttagggaagcaggaatacatggtgaacctcatgagccaggttaggaattttaaatctatgttgggactgacaggaagttgaagaatttgtctcggtcagctctgggtttcagaagtgtgaatgcaagactgaacacagaaaacctaattttggaagcccctgcagcaataagtagagataggataatcccaaggggaagtatttctctttcttgaaagagaatggtgctaccattcatggagaaaaaaacactgagaaatgaagttatatgcatgtatgtgtgcatgcagatgggggcatggatgggttaagttttagccatgtggagtttgagatgtttatggaatgacaggatattctagccaaactcaatgcaattattttcagtctgtcaacagacaaaacatgaggaatattaactttctcttactctatactggaaaaagtcaatacagtgtgtgataaatctattgtaaaaatgaaatggcttccagaaagctaacaatcagggcccatggctgtttctttctgtagtagtgctgagtgtgtttctttcttagtagatctacatgctgattttaacccagttccacaatgagcttacagtgtcgttattctgaactatgcaatccttcttgtttacagctacaaaacctccagttgaggccaaggaagtaggtatgttgaagccattctgacaccctccagaaactggcaaagccagatcttctgatctgaacccctaccagtttctttccctcccttcaccaaaatcttttacaatgaaagccactcaacacaattcgtttcatagcgtagttttggtgacaagcagtcagtggagtggttggtaaggcaggacttttttccatagtatggttatagttatgattcactacctttcaagaaatagccaccctacattacctcacgttagttagctgaatttccttcctccagggcttggaaaacagctcgcttttcctaatgttagcaggaataaagtgtgtttcatgttgctttaaaaaaaactgaagatactgctatctctctgatcaatgcttct

SEQ ID NO: 3184 - DNA, 4001 bp, Homo sapiens
agtcacgtttcgcaaatctccactgccaggatatttcttgtcccagtactttcccttcacactttttgcttgaacaagtatttcaaggaagccaccggtttcagtggggctctggtgcagagagagaatgcccaggagaatgaattccctctgctggcccacaatcatttctgcactaacaagctcaaattctacacaccaagtattccgagacaataaacgtcatctattaactgagttaacaggaacctttcatttcagatttacagcttaacaacaattatttctgagagaaagcagagtataagcagctggccaggcatatagcctcagaccaccctcctagagcctccccacccccagctaatttctgtgcttcacctagcaggtgttatcagaaaaaaaaaaaaactgactaaaattcaggggctgcaacattcacgaattccaaagttgttaaccgctgaaatcaagaggtttcctccagttctaaaatcccattcgcctctcctaaacacaaaatctcttcactgtggctgcactttgctttctccggtctgttggtcctggaaggtccttagttcaactcaaggcctgggtggggaggggagaccttttgttgctacagcctatttttcagtagcacagatgaagaatgcaaccccatagcgattaaggcgactaagcgccaaaataccctctccggcttaaatagccgatcatgtgggaaccaaacactgtttaagaaataaaaggagaggccagtagtgccggtctcctctttctcctgggaggtttaccgctacggtggggggttgtcccttacaaaccttgtttgcaaagtccaggctcagatcggacattttgctttaaccccttggctgtgcccgcccaacgcaggagccgagcgggtctcgggtgcggccgagtactttgggggctgggcacatcactcagacttgttttctcagctgatctagtccagcgaacaggtgtttggttaattcccgcccccacccccatctttttttttttttttttcaaaggcatgtaaaagtatctcctaaggagcgcccccgccttgctgagaaagtcatgcaggacacatggaaagtggctttccaacttgtgcggggcgcgccagtctgcgggggagacggggtgcaccgtgagtttgggaaaggcctagaccatcctggaactacgctccctgcaaacccacagcagcgctgcggtgaccctgaacgccaccccagccccaaacacacacgtgaagctcagcaaagcgtgccacctgccggggtcccagcaaacacgcccggagggaagaaccggcggaaagcactttgtttaaaacagaaaaaaaagtaaactctcccggggcccagcctagccctcgggttctcctccttcccgagctgaatggagggaggcgccgcgcggggcgggtcagggcggggagccgagcgcgctgggcgctgggtgcgcctcggccggcccgggcgcgacccacgggccaactactccccggggccggcgggaacagggcgcgccctcgcctcaactcgcgcgcaggccggcgccccagtgggggtgggaagggtctgggaactcacagccgcttgtcctcgggctgcagttgccagtgcatggccagcgagaagccgaagaggctcccggggtctccatatttccggatcacgttgtcctcccgagtgtccaagttgaaggctgcgccgagccgggacaggagccccgccgacaggtagagcaagcacagctgcccggcggcggccatgggcggacgcacggggaggggagcggggacctgcagcggccgccctgcgctccgggctgggtccgaggctgccgcgctgctgctaccgcagccaccttcgcctcctctcgccgctgcgcccggccccacccccgggacgggtcgcgctctccgtccggccgctccccctcgcgggcagctcgcgaccgctgaatgagcccgttgttctctggagactcgcaggcgttttatcaagtgacgaggacgccggccccgcccctccccaccctctcgcccctccttgcgcgcccgcggcccggcgcaccgcccgcaccttacccgccggctctggcgtctccagctgcccggtacctgcccggaagccacgacgtgggagccccggaggcgagctcgcggcgaagcagccccactgcgccgccctctgtggacagaattgtggttgccgagtagcacagagcgagggagactttactacccgttataaagagaagtgcaggtgatgcaccgggcctcatggcctgagcagcctgttcttgcagatgtgggcccacgtgcagatgcatacgtcattcattcatttctacaggtgtttatggagcgcttaaggcgtgcccaacacttggggactacagctgtgtagactgttctgggtcctcaaacacctaacaaccctcaaaaatgatcacagcgcacaccttgatagtgctgtataatgtacacaacccagccattacctcaattcatcctaacagtcctatgaggtaggtgtttctttttgcagatcagaaaaccgaagttccgccttgtccccagatcacctaggattttgcccaggtgaccaggagagcttgtggaagaagtcacgcaagtcaaggatgggttgtttaaagtggcgccaggagctcaggcgacgatgccgttctttcctagccccggactttcagaactagttgtggggagaactgctgggccaagagacagctccgagttctgtgtaggtggcatgaaggctcctgcctccaggacatgaggcggggctccagtgaggtgttggccctaggggcaaccttatcctgcaggggttcttaacccgaggagaggtaattaattcaagagtactgtgaacttggatgagaaaaaatttacgtcttaattttcaccaacctctgacatttagcacgttttgccattatgaacgtagacaacaaactacagtagcagtaggataagtatttatgacttagtaatcactagaaaccataggtttttacatcacatcacagttgttgcaagtatctcaaataacagtagttattagacaatcagccagatattatatgtcaataatgaagcatatatattgctctagcacaaatttttaaaaacattttgttagctacatttcaatattattggctttttttgtaacctcttgtggtttcttttatgtatttaaaacccttattctgagaagaaccccatggttttcagcagcctgccaaaggggtcccatggcatgaaaaggttgggacgtgctggcctgaagccttctggaatgccttggggagccctctttggaatctgacatccctgcattggaaatacaagcagggtgcagccccaggaaagagcaggagctgtgtgtgcataggggtaggggtggcctcttcttcacctcaaggagtattcaagagaacagcatgtgccactcagaaaagctgcgtgaacatcatcaagggtccccacaggtggtagcagctgtcagagtaagtccgtcagtatattaggggtgtgtaccacttcctttccaatcagtaactccagtcaattatagtccaaagtggggtgcagtggtttaaattcagtagatgattttggagagcacacagttttaacaaatatatcttgataaggttgagaaactattggagacaatctagtaaactaagaagtacttgcaacgtgatttttcatgcaaataagttgcaagttagccttttcccttcgtgtaaaatatgtactattccagagagatggggtccagactattataggcatagtataatgaacctcactgcagagtgtactcagccaggagctggtgatttggctgtaatggttactgaaatattctgaattggttgataaaagctgctgcccttagttcctcacaggcaaccatccctgccctgcccattttcct

SEQ ID NO: 3185 - DNA, 4001 bp, Homo sapiens
caaaaaaaaaatcaaatgaaatcaatgaaaagaaaattgtgcatcaaaatttacctgttgcatcaaattcaattggctggcaccggcgggtagaagaccagtcacatttgaggacctgccctccttccacaatcccaggctgggtggtgtttgctttgggagctcccacgagaagaaacatccggctaaaatacaaaagcggcagaccaaagtttaaatgaaacaaagtgtaagcaatatcttctgatttatgaggagcaatcattctcttgatattatctataaatattttttaaaaccatttgctattcactgagggcataatcttcattattcatttggtagtctcttgcatgcatacattatttgatatagtttatttttcctgataactttataaggcaagttcagggttacattcatttaggaatttatgcaggtcaatcatacactttaaatatgtacagtttattgtatgtcacatatctcagtaaagctcttaaaaatgtatgctgcctagaggcaggaaagttttgttttggtgttctggtgtgtgtgtgtgtgcatgtgcgtgtgtgagagaattactatgcattttctatattctgaatgttgagcaaaaaaaaaaatattctaagtaaattattccaaagtataattataaatatgattttcccatttagaaaaattatcttgcattagaaatattgctgtaatttttattttattctattttttttttttaagagacacagttttgctttgtcacccaggctggagtgcagtggtacaatcataactcactgcaacctccaactcctggctcaagcgatcctcctacctcagcctcctgagcaggtagaactacaggcatatgccaccatgctaagctaattttttttttaaattttctgtaggggtggggtctcgccacattgcctaggcttaattttttttaatagttgactatttaataaaaaatttcttatcacaagattaatctaatcaattcttggtcaaagattaggaccactattcaatttctttgtcattaaggtaaaataaaccaaagacacaataatcaggagtaaaatttttaattttaaagagatgttttcttttgttgttttctattcattcataaaagatatgaagtgagtgcttcctctacataaagcaaggtcctaagtgctagagataccagatgactaaaacaaccttggtttctgcctttttttttttttttgagacagagtcttgctcttgccacccaggctagaatgcaatggcatgatcttggctcactgtatcctccacctccccagttcaagcgattctcctgcctcagtctcctgagtaactgtgattacagccgcccaccaccacgcctggctaatttttatatttttagtagagacagggtttcaccatattggtcaggctggtctctaactcctgacctcaggtgatctgcctgccttggcctcccaaagtgctgggattacaggcgtgagccactgtgcttggctgattcctgctcttaatggaggaatttagcttacattcccttagaggcaagaaactagccaataaataaattactattacaagtcctaccaagtaagcaaacaattagctgagagagatttttgggaatagggagaggagaccttctttagacagagcagttatctctaaggatgagaggggaaagatttcctctaggtaaaggaaagtctctctaaggaaatcatctttaaagaatggggaagaaagttctcttttagataaagtagacagagaagttatttctaaggaactcaccacaacattaagatgtacaggatcagaaggagggtgcctaggagcatttgtgtattgaggatggaggggagtggggggtggggatgagggaagtggaatgaagagatggagggaatatgtgaggcagaggtagaaagaccctggcaagaaagaattgaatctccaggagctacaaagaaaggtatggctgaaggaggggacaagccgggagtggcacaagataaggtcaaggagcctggcaataactaagtcaaatagggccttttggccatggttaaactttgtattttatcccaaggttcatttgaagccactgagttttttaagaagaatgaaatcatctactaaagaaaactaaatgttatgccctatggggaaagcattaagggagagggagaaaaaaatggaacaaggaaagcaaaggactggccgcagctcagggagcaggtgagtgtgatctgcagtaagagggtgggtggaaagataggtgacagatggaaaaaaacatctggagtacaacagcaatcgctggaggcctgaatatgagagaaaagacattcaagaatgccacctagatttccttcttgagtgcattgatgggagaaaagcctagagagcagagaagcagaaggcagattaagtacttacaggagttcaagactagcctaggcaacatagtaagacccccatctctacaaagaataaaacaattcactgggtgtggtggcatgcgcctgtggtcccaactttgggggtggagctggggtcctgagacaggaggatggcttgagcccaggaggttgaggctgcagtgagctgtgattacaagtgctacaaagtaagcaaacagcctgggtgaaacaatgagtccctgtctcaagaaataaaataaaattagtatttacagaaaaaccatgaattcaattattaatatgtttgtttgagatatctgtgagtcatccagttgtagtctgaagccctgcctgagacagtatgctgtatcagaacacagttggggttattcagccaggggaagcgtcgaaagaggaggggcaatgagtgagttctcagggacaacaacatttaggagtcaagaagagaaagaagataaagtaaaaaagatttttgtctttaatctcaagaaactgattgaaatataggaggaaataaagcaggatacaggcagacaaaaacagtcctaaaatgctatcaccataatcattttgtttcattaaatactaagtcacttaaattattctggcaaaggaaacatttacaattgcttttcacctttttgtgaaattagaacgaatgtacatcttaaatatggaatgcattcacttgaacttttaaaatcaatttcttattctgggtagtagctgccaaatctcatctacagtagacaaaagctggctgtacgaattgcagggttacaaagaatcctgctttctgacacttatcttaaaaatccacaaattcaaaataaagacgtaactcccaaccaaaccacgccctatttaatagagctccatgcagtcatatctggcatcagtaaaacaccaatgttggctctctcccatcacggcaaaatgattctgggtagaaaatgaacttagttttcattcagcaaaagtctttcataagaaaaaaagaggttgggcacagtggctcatgcctgcaatcccaacactttgggcggctgaggcagacagatcacttgaggtcaggagtttgagaccaacatggcaaaaccccatctctactaaaaatataaaaattagccaggcgtggtggcatgagcctgtaatcccagctactcgggaggctgaggcaggagaatcacttgaacctgggaggtggagattgcagtgagccaagattgcgccactgcagtccagcctgggcaacagaggaaaactctgtctcaaaaaaaaaaaaaaaaaaatgctatgagtaagagagtccccacctcccataactaagagagcagctcgtcatcaaaaccccatcggttctttttctagagcagagttggttaacacagtgaaactctgtgtgtgtgtgtgtgtgtgtgtgtgtgtgtgtgtataaattataatatgtaaatttattacatatacaattttttttctacgggtctaaaatttgaccccaaaatcacacaactaccccttttc

SEQ ID NO: 3186 - DNA, 4001 bp, Homo sapiens
ggagcaactaaaatgttctgtctcatgaaggtatacacttgaaagtatctggaaacaaaaatgtttaaagataacgtttggtattcacccctgtggttaaaaacaataaataaaaagataatgctgactaaaatgactaaatggaatgtgaaattggtaaatgttgcctaaataatgattatttttatcatgttggaaaatctgtgctccaggtctcacagaaagcactgtaactgctaacaacaaataaaactaagcttgctacataaaataatgtctccactaacaaagtttccattaactgcatctaatctatgtattgctgcaaaggttgttaccaaaatgaatgatactcagtaacattcagaaaaacactaagactaaattctgctgagtgtcctaacagtcatagaaaaccattgagaccaccctcaaattaggcatgtgtgtagtagaagatggtcctatccacgtactaaccgtcaaaattttcctccacttcaccccgaagggatatcttatacagaaaatatggaaacaaaaatatgttgttacaaggtctaagcgtttagaaggcaccctaagaacagtttctctcttgaaaacaagatttaaacatcattaaaaaaacagtcaacattcattaaaacagtactcctaacgctaacatgggggtggggtggtgagaatgatgtcagcattcagtaaagtcggagacaatttctaacacaataatggcaataactgttataaatcctgacggcccttgcaacgcggaacgttggcaacttgaaaacataactgaattattaaatactgcagtattcaaatgacctgcagcgagtgaaaactcagcaaacacccttgttccttctgaacaatgacctaaatagtgaatcactataaaaagaacagatgacacattcaattcatctgttcaacctcaaatgtgcaaatgtctgacagtcccagagataagacacaatgaattcaataggacagtatggtcattttaagtcatcagaatgtctgcaaaaggagtaaggagaaacagaatcagacagaggcggaaagagtgggggagggcttgtttagggagactgaaaaggacgggcgttaagcctgtaaagcagaaaaaggctaccaagaagcctaactggtagaggagaaaaagaagttcggggatgatattgaccaaatcctcgacactggcacaggaggcggggagtccggcaagaccagcctttgttgatttcccactttccccgatttttaagcacaggtctgcttcaaagctctcccgctgcccctaaccaattttaagaggtgagaagcggggtgtaactgggtgatgggtaccaaagggagttcatttccccaaatatttcctccacccaggatataaaccactctgagaggtaggatgggtgagacagacagacgccgggatctctcggaaatcaatcccaatggagaaacgctgggtgggtgcgcgcggtgggggagggggccggctccagttccaagtgcggccacttacgaagacgcgctgggcacgaagaaatccacggcgaagccgaagtaacttccctcggggccagagtactcggcaggactgtccacgtctaggttgaaggcgcggcacagaggtagcaggagtcccgagagaagaagcgggaggccgcggggaccgaggcgcagccgtcgccgcggcggaaaagccatcgccgaagtgcgcgcgggacgccaagccgggagcggtagccacctccccccgccccagcgaggcgcccagtgcccgcggcccgccgcctgcgcgcgcccaaacttgccggccgctctcttctcggctagcccgggacagctccggggcaggcaagagggctgagcttcggagcgaccgccagggacgaggggcgcagagcgcgcggggcggggacagcagcgcagacggtcctttgcttccctccggctccgccgctccacgcagcgtctgaggctggggactgccggggtgagcgccgcacctcaggcctgagagccgcggcggcactgggaggagacctggaaggaggaggagccggcccgggaggctgctgtggagctggaggaggaagtgggggaggagaggcgcccttctacaggggagagctcagcgtacttccgtgagtgcagtcgccgcctgtcccgagacctgggcgtctgtgcaggggcccccagctcctgagcctgggtcagcggcagcgctcctggacgaaggcctcaggctgagcacctgaggaggcgtgggggcgggggcggggagatacggtccagcgtcccaatctacccgcgtccacgggagtagcaagggcacccacgttcccttgtcccgccgggaacttccgtgcgactgttgtttaaaaatgaggaaagctttttatcagtttctcgtgtttctgctgcttagcctggcaggctctcacgaacgaaaccctgttaattaatggtcgttaattacactccattccacaaacactgaacttaattacggatttccagaaagccagcatagcctcttgcaagtgaggtatgtaaagcttaacttagtagtcaaagaaaggattcgcagggcaaagaattggcagtgatcgttttaaatcaagtcagaataatcgaagccttattcccagtttgttagctgcggttgtatgatttagaaacactgatttgttgatttaggatgtttggatagacataatttcagagctggaagaaggaccgcacaccggtgaaataaggccccgcgtgcttgtttgccactggtgtgtttcatcaagccttgacaacactggactgagagagagggccttgaggacaggaaccttgacctttttcttagtgttcttatttctagcaccttgccaagcagatagtagtcgatcaataaaatgtccaatcagtgaatgaatagcagacgaaatgagcaaagtgcccagagaagtgactcttccatatttcaagtgtttcatgtgctacagaatctgttgaacaaggtgaagtttaagtgcattgtgtggacttacaacttacaagtaagtactggaacagtaatttctgttttcccaaagtaactattaaaactcaatcataatatacattaataactatcaaataatcctgtgaaaggatatgtatataaatgaaagtgaaatgcctaattcgaatttgtaatatttattggaccaggtccaggtgctcatgctggcaatctcagcactttgggagactgaggcaggaggattgcttgagaccgggagttccaggggaacatagggagacctcatctctacaaaaatttaaaaattagctgggagtgtggtgcatgcctgtagtcccagctatgccggaggctaaggcaggtagatagatcgcttaggctcaggagttccaggttatgataagtcatgagcctgccactgcactccagcctgagtgacagaacaagaccctgtgtttaaaaaaaaaaaaggccgggcgaggtggctcatgcctgtagtcctagcactttgggaggctgaggccggcaaattgcctgagctcgggagttcgagaccagcctgggcaacacagtgaaatcccgtctctactaaaatacaaaaaattagccgggcgtggcggcatgcgcctgcagtcccagctactcaggaggctgaggcaggagaattgcttgaacccggaaggcggaggctgcagtaagctgagatggtgccactgcactccagcctgggccacagagtgagactccatctcaaaaaaaaaatgcattaaatatttccatttttaaatttgactaaaagatatgcagcaaaacctttggcatgttttacaaggcatggtctagcatctgcctgaaagaaattactgattgagagaagaaatcctacacaaatccttacacataaatgcaaatacagcttatttctcaccttctttcctaatacaccaaagaggctattgat

SEQ ID NO: 3187 - DNA, 4001 bp, Homo sapiens
gtctctactaaaaatacaaaaaattggctgtgcgtggtggtgggcgcctgtagtcccagctactcaggagcctgaggcaggagaatggcgtgaacccgggaggcggagcttgcagtgagccgagatcgcgccactgcactccagcctggacgaaagagcgagactccgtctcaaaaaaaaaaaaaaaaaattattcatgcatcaaaatgaggccaatgatcctgattggcgattggatgctccgcaggctcatcaaatgcaaagatgtctcaagctgaacccatcatcctcccctccagatctgctcctctcctctcctctccctgtcaggagattctattattgctggaggaagccagaaaatcatgatttccttgctgtccttcaggccccacatccaatctggcaccaagacccactgtataccccacctgaagagctctctgagccagctctccaccagggcccccgtcatcctaaaccatgggcacagacactatttttttagaaactgatgaatgtgatggatcctcaccctataaaaatgcacatccatacaaagtttggcatgaatttaaggaattcacaaacccaaggatatttcgtggataagggaccttgtcctactggattccctaacactttaaatctacccccacactgcagccaaaacgattaaaatgatttctttcaaacatgaatctaatgccactagcctgctgaaaatctttcactggttctccaaagtcagagaccaaagtcaacgttcttcagcacgacacgccaggtcctccaggacccagctcctaatcacctttccacttccatcctccacaacccgggcacagttcattgatctcagcaaggcaaagctgctcctggttctcagcgcgatgctccacgcgcccctgctttgcaccgcccgggacgtccttcacctgtcaggcacttggctacttcttacctttcaaggcccgtttcaggctgcaggccttcctgggatctcaaggctggggtaagggacccacagcttgagtgtaccccctgatcacagcgccacgatctgctgtggtctctgatctcactctcccagctgcacgctggtcaaaggcggagctcggtgactcctctgcattgccagggcgcctggcaggggacgcgcttactgaagccgagaactttctggggaggtgacaccccaacagcgattcccatgtaccaaacgcctaccacgtgccatgcacggtgctaggtgcacagatccctctcaccctcaccctcaccgaccagcaaggctgcaggataacagcccctttcaaacgaggatgccaaagcgcccgaagagtcagtgacctgcccagggtcaccagagtaaggacggatgcggccaagctcggggcctagggagagccggctccgaagttcctcccagacgccagcctgcttggcacctgtctgtcaccgtgatggagcaccttccaagcgctgggtgcggaggatgtgacagcgaaggggacagacaaccccgaccctgagaggcgggaggcggccgaagcggggcagaggaagaggcaaggaaacggcccgcggccgcccgccttgccgcccctccggggcgacagcggctcgggaagctgcagtccgcaagcccacgcccgatctgcgtggttccaagctcctccacccgcgccccgggagcgcggccccgcccggaaccaagcccgagcccaggcatccctcctccgcccgccccgcggccccacccatccttcctggccgtccgcgccgctctcgggaccgtgttcccgtcaggcctccgcgagctcggccccaagcgggacgagggctgggcgctcacctcgcagccgcgggcccatccccgggttgcggacttcggggtccgcgtgggagtgccgcggcctttggcgcccaggcagctactcccgttcccgctccagcgccggcttttccagccctcctgcccacgtccgccgggccgcgcctccaagactatgcgcaggcgcagtcctgacgtcctacccccggttccaagaccccaagtggtgggaagcctcgcgagcggcgtcccccgaccggaagtcgaggggaggagtctagtgccgcgggctccggagtgacggaagttgtgctcttggtgaatggggttcttccttttttatttaccggtggctgtgcttccaatttaggaagaccccggcgacctgttcctcacccccgcttcgccctcacactttcgggatgtctgcgattcctgctgaggagagcgaccagctgctgatccgacccctgtaagggaccagcgagagagggaatgaagccacgggctgtgaggggcgcgaggggtaaccggagactggcctcctccgtcgcccgcgctcccacctaccccggcagcctgcctttggtccgcgcttgcgggccaggcttctcaggctcgaggggttggaggaccgttgatcggaaggggcctgctatagagtgaacgggattttgctttttcatcagtttcaggggagggtatgttggagtcggaaaaaaaaaagttttacggggccaccgctcgctttcgtacacgctaagaagcgttttcacttagcacaagcacggatctctgcgcgtcagggcaagctgtgagggagccggtgaagcttatgaccgacaggatgagaggaggacctgaatgaggctacagccgtgcagggaagaattaagtctgtttcttaacaccagggcttcacatgtgccagaagttagaaaatattagggacttgccgtgagtttcgatcttctcagctcaggccctagtagaataaggaaggtgtaaagctggagaagagaaagtgcagaggtgttagggacaaaaactcagccctcgactgtccataaggagagtggcctttcagtggacacgatcctcatcagtcgggaatgctgctgaaggggagatgcaaatgtagagaacttgaattcctacagatgagcatttcgaacccacaacatgtttattgttagatactagttggcacaacatgaatatacgctttccaaaaggtagaaagtatctcctttacacaatcattcagtaaggcttcattgagcacctgcttgggacatagtccgtttccttctgcttagttcacacctgtcatgtcttcctgtgatgagcaaacactgagcaagtgtcaagcaccacacatggggatatagacgcaacagagggcccagttaattgctctcgctcttttggagagaattacagtgcacagtgggaaatattggagagatactttggaataataggagactattactttgaagtcagacctgaagtccattatctacttgaccaattagtaggacaacaatctcactgaacccgttttctcatatggaaataagataaaacttgaagagtgaacatcgcggtaggtgctttgtaaataatagctaatctaagaacgcaggcaggcattgcactgagcactgtgaaagtatggaaaagggatttctgacagattgaggaaaaaaggatacctcgtggatcctgaaaaatgtgatgcctgagctgagtcctaaagaatgagtaggagttaaagactggggggcccaggatgttctaggcagtggaagtggcacatatgaaagtgagagtggtcacagcttgtggccagattcctcatggctgtagctaaagagttgagttagcagatgaagcgacaggcagttgaggtccagtttaggaagcacctcgtatacacaggagtttggacctttatcaagtcaattacagggagccagcgaaggctattaagcaagcatggatattgtgggaattatgttttaggaaaatctctcctggcagcagtgtagcagatgaataaaagcatggatgaataaaagcatggattgagtagagcagattcagtgagatattgaaagattctaagtctagctgacgagagcctgtagtgagtgatgtg

SEQ ID NO: 3188 - DNA, 4001 bp, Homo sapiens
ctgaactcggagtttgggtttccacaggtagaacccagttctgagtttggtgtcgaggtttgttgctctttgagcatgctactcagctcttgctgcacttggtattcgtatgatttgatttatgtttagattatctttatgagatccagtgcatagagacttgttttaaaattcagaaagctaatgcctctcttccttaccatgaatcagttagacatcattctctagtgtcttaggatggcttggtacatagtccccaatcatcttcatactgctttcatgtagttttcggtttgaccagataaggagttcctatttggcactttgtcactggtgtggtacagagtcactgagtttatgaaaatgccatttttaaaggaactggataatatctgaccagtaatatttgccccaaacttaaaacacatcccttagaatctagcagtagttcagaatggatcctggtacccagagggaatacaactataatatgaacatcaaatgtatgtttaactttagaaaatatcatctccatgaactctgattatccagacagcctccatattttacatgtaacctgtagaaatggctttacaataaaagaaggaaccaggtaaaataaaaaaatcccaagttaaaatttttttccgaattatttgacatccactccttctacaaattgtttttgaaagtaatcacatgaatgccattttgatctaccaatgctcaccttctcctttcctgatttgttttacttatacaactccacaaaaaagcaagtcactatcagaaatatcactgaggaaattaacatgaatttaactgcagacaggttttaaaaacacattgaggtcatttattttacctcctgagcacaccaggcacactgaggtccaataagcaggcagtcttcacaggtttctgcacctcccagggcacagccacctaggtttagacccagcaagatgcagggattaagtacactttcagtcattccatttatgagactgatggctcttacattacttgaacaaaacaacatcaaagtttagtttagtatccaaaatcagtcctcgaaatgttagcaattcacataaaagtttgtattttacatctatcacatgtaaaatatgtgtatgtatattaaaaattatgtatgtcttataagccaaaattatcatgctcttttttcttaaaatgtgaaagttcacaaatataggattatcctatttattattcttagccaatgtgtgccactttaatttttaaaaattacttgcaaccattaaaaaatgcttctttcttaaacaagttatttctgtttttgaaataaatcctctttctctttcaagattattactcctaagtggaagatcttgtggtagaataaaatagaaaagtttcaaaaatggttatcatactggcactaagttccattgggcagtaatgttatttaattctcctcattaaaatgcctgtgcaacctttgtatttatttaccttaagcctagagcattcactgtgggaactgcccggtgtttgtctgtaatttgttaaagtgttcactcagtcacaaaagagcaatggaacagatcaaataaaacatgacttcagatctagtttctgaaccaaatgacaggtttgtcaagcataccacgaaagtaatatatcagagaacgcaggtcttaccttgtacgtgatcattccttcctagaaatagaaagaacaggcaaagcagttcaatccccattcgtttcagttcttgctgtgcagaccgattaaaaaatgaattaccttcagcgttacaagaccaacgctgaatatcgttaaagtctttctttcttgaagtataacattttaaatactacttacactgctttgaaaagaaacttgagatataagttagaaagttttcattaagactgaaatgaaaacagaggctacctggacaggtaaagcagaaaagctgtgtttaaaagcaacttcaacatgatttacttccttgttctccttataaggaaggcaggtgtacaatcaccaagaaggtggggaaattcattcagtagaaattttggtgtaagttctatgagtctctctgcatcctagagaaagttaatatctttagtgaaatattgatcaatgaaaagtcacaacagcaatagaaatatagtcattttaaaaataattttaatttaatgtaaagaataaagattaaataaagcatataggctatatatgaggaaagtaaaaaatgagcttaatgaaaatgcctgagattttagtgtttcattgctaaatcctttgcaaaaaattgaaacgaaccctgaaaaagaaaaattattatcttacagtaaatgagaaggaaggctagggaaagcaaagcactgtttccttattttttcaaattagatgaaatatatttttccataagtataaaattcttattttaaaattatattggaaataatcataatatataaaaatcaaaggagatcaaaataagaatgtctcaaaagacactgatgacaacaatgatgaaaacagaaatgatggtgcccaagattctgaatccctcaggctagggaccaagttctctatgcaatgtgctgttccaacctctagctcatgatttggcacataggagatatttatttgttgagtgaaagagtgacaattcaaaatatatatgatctatggctaaatccatgaggttttttgtatttttcccccagggtgttcttcaggaaggtgttttgagatttgtagagtctgtgaacagataagaatcgaattctcacttcgtcactctagaaactgctgaccttagagagacttttctgtggccaggcttatgtctgaggagattatcttttcaaggagcattcctgggtaagcatgtgaaacctgtaaacagagggaaacggactatggtcaataataatttaattctacatttaaaaataactaaaagactataaatgggttgtttgtaacacaaaggagaaatgcttgaggggatggataccccactttccatgaggtgtttattacacattgcatgcctgtaccaaaacatctcatgtatcccataaatatatacaccgactatatacccacaaaaataaaaactaaaataaaataattaaaaaaaaaaaaccaaagaaagagagaaactaattatagactacctaggcttttctcagaagcctatgttatgttcaattttgaactccatcatatccaagaagctggaaaaacatggcaagaattttgcggtaacaatccagaattattgaagaattggaagatatgcattttgagagaaaatttatataaaattagttgatttaacttgaagaagaaagatcgagccacaaattgtttgtgtctctgttattgtcattttaaaaatccagtattaactattattcattcattattcattcattcaacaagtacttcttgggcatttactttctgtcaaatattatttttgaagcagaggctacatcagtgaacacaaccaagtttttgatccatgcagcatatattctaggctggagggcagtgcagggagatagacttctaaaatcaggcagtgcccagggctatgaatcataagtctgggtaaaaggaaagaggggcaagggagtgtgtgattttctttagaatagtcagggagggtttccctgaccaactggcatctgagagagccctagatgactttgacaacacagctaactatgaaggcctgagacagcccaatggcaggtgttttcaagggcaagtggaatacaagaagggagagagagagggtaatcagatttgagggcagaggtcagatcatatgtagtcttgaccttgaattttattctataccttgtgtatcactggaaagttgaaagtagagaaataatactatttaatttacattttagaagaaccacactggctgctgaggaagtgaaaatgtatgcggcaagattggaaggtgaatgggg

SEQ ID NO: 3189 - DNA, 4001 bp, Homo sapiens
tgtgccgctcctgcaaaatctgggggaccttctgatggagttggaataacaccctcccactgtctgacctggtcctccctcctcaaatatctccaggaagaggtggctaggaaaagagatgggcaagcgtgctgcctcctgcccccatccctgcccctccccaggctgagtggagggcagcttcccttccaaagaaaaggagtcttgaagaaccccttgcaaacttttaaagctgcagaaccatcttcttcaaatatggagcgccccctccacctaagcttcagatgaaaaggggggagctgctctcatggggtgcacagcaacccccaacctcgcctaggtggttgttgaactcttgtggctctgagccactggttgctgcagtgaccaccataaaagggcagggggttctcagtctcctggcattcctcactcagggtctctgcccaggctgacacccaactctgacggccctctccggcgccccctcctccagggtccaggtcatcctctgcaggccccttaatgccccaggcaagactgaacctgagccacaaaacctggggagggggctaggcgttcaggaagactcttcagaagcctgcatctggaagtggggaagcagtggacaaagactttctcagtcctgcctcaatgcggggtggggaggcggggaggacatgggcttggtaagccacaagaccgctgggggcggcgcccacgtagacacctttgccaggcacaataaaacctggctgggccagctctccctccctccctgtccctgcccgccacgcgttctgccccctgcgggcccttcccggacacaaggcacgcagctcagacagttttccacggcggaaatgccttctctcccccccggccagagggaaagtggaggaagccggggtaggggagggggatgacaggggtgggggaacgcgcacagagcccggggacccaggatgcaagggcactggggcagttgggagccctccccgtggggtcgggggacagcccagcgagaggctgggaatggagaaaagagaggggagcagggaggcccagacggcagggcgtggggtgggaagggggcacccggcctcggacccccgacgtccagaggccgcagcgccgtcggttctggctgatttccatttcatcactttctggtctgtcaattccggtgcaggccagcagcacatcctctgtccctcgcagcccccaatttcggaggaaatcaacggccccaccctcttcgttggtaccagacccccccacccccaattccccagccaatcaggtcccaccgccctactttggaaaaactacgtctaaccctcctcccatcccccacctggggactcgactcgcggctttcccagttgattggaaccagacgcgtacccccccaccaacattcctcgaacttcttcggaccagccccctccccctataaggcggcgagggggcccccacttttggaagagacctcgagcacttctccacctgaagaccagaaccagacgcctcccactcttcggacttcagcttttggctgccgctttagtacgggacttaagccccctcctcattctgggataagcaaccattcgagacttcccaaccctgctccaccccgggctctggggccctgacgcgcctcgggcagtccccagggccgacggggcgcgcctgggtcgtgagcctgggtcccccgccccaccgcctgagccccagaccctctcaccctagccggcgtcagcaggatctcggtggccgaggccggcgcaggggccgacgccgacgccttgtcagccttgtcgcccttgatgccagccacggcgggctggaagctaatcttcaccatggctgcgccggcccgcgcgtccgccccgcagcctctgccggtgcagcctcggtctctgcctccgccgctccgagctctgcaggcaccggaagtttggatcccgctcgcgtccctctctctaaccccacccccagccctccccgccccgtccccgcgggagggccccggcgcccgccgcgcctgcgcccccttcccgcccgcggggcccgcagtgacccctgccgggcgcgccgctccgcacctggggcgggtcggagttccttctgccgctcgctcgcacagtcactcactcgctcgctcactcactcactcactcactcgctcactcattcattcagccgtcacgctcggatccgttctccgtagcataatcccttcgcattccctgtccaaggccagcatccccgcaacgcaagtctttgttaacccagtgtttgccaggcaaatgcagcttccagacaactcacccgtctctcctgccccacttcaggtcttcccctttagaaacgctggagcctccgctctacctgtccccacgcccccctcctccgacctgtccttggcgcggggaggaggctttgagacaggcgccaaactgctgcctccgtcttgccttctgaagccatccacgcctccttcatcctccatcttgcttctgccttcattctttattcctgcaaaaccttcctggggggtcctggggtgcacgctggagccgcctggagtggagaagggaaggccgcccctgctccctggctccttcgtgttgctgcgacctcagttattgggtgacctcctgaactgcccttgtctcactcatccaggaggaccctggcgagagtggagggaagacccccagggcgggtgtcagaggctcgggttccactcaagactctgctcctcccaagtatcacgggtactggggaagcaggggcttctgttgctgggatggctgctcttggcactaacgccctgaatctttcctctttgctcctggtccagactgggccagggacagcgcccagcaacacacacaggttgtgctgagtggtccgctttggttctgctgttgggctgccagtggagggcaggggagtccgtccgcttcttgaggacagtccggggtcctccactgatctctcttctcacctttcaggtcttttgcagctgccttgggcccttagcgcccacgtcccagacccggacctcttggctcagatcttggatgaacctagcaaccttgaggacagacaggtggggaaagaagaaagtctaactgatgctaaggccaccagcctggggaactggggggagggaatggggaggtggaagaagacagatggtttggaggagacgaggaggaatctggtttggcacagagccagagaggaaggtgttatggactaccgctcatcacctgctccagatcccatgggaaacctggtgtctggagaaggcaagctccacgtcttgcttaggccacacccccaacatgcattccttcactcagtgttttccaagcacccctgtgtgccaagcattgtgttaagctctgtggcagaaaacagagatgcccaagacacaacccagccaccaaggatgtggtcatgtgaaaccttctatgagtggcattctttcacgtgcattcaattatttaattttcatcacagcctctgtgacctacacattagcctcatgttaatagtgatagaaggtagcatgactaaacccagggtcgcagagctggtttggcacaaatctctggtcagcaagacagggccacctgggtgaagcatccacatgcctgagattggcaggcgagcaccccacttcccctggaaggccttcccagaccggctgggataagtccctttcctgtgcaccttcagcactgtgcacatccccctcgggcctctccttacgcttgaccatggactcaatgccggccaagtgctgggcgtacaacctagtgcagtgattcctaaattttttggtttcaggaccccaagagcttttgtttaggtggcttatgtctatcaacatttaccatattagaaactaaaactcagaaagttttaagacacaagaatacatatattccattgggcatcaaagcgatgtcatcacacat

SEQ ID NO: 3190 - DNA, 4001 bp, Homo sapiens
caggtctctgtcagactgcccaaacccatgccatcagcaggctgcggctggagaatgtgccgctcctgcaaaatctgggggaccttctgatggagttggaataacaccctcccactgtctgacctggtcctccctcctcaaatatctccaggaagaggtggctaggaaaagagatgggcaagcgtgctgcctcctgcccccatccctgcccctccccaggctgagtggagggcagcttcccttccaaagaaaaggagtcttgaagaaccccttgcaaacttttaaagctgcagaaccatcttcttcaaatatggagcgccccctccacctaagcttcagatgaaaaggggggagctgctctcatggggtgcacagcaacccccaacctcgcctaggtggttgttgaactcttgtggctctgagccactggttgctgcagtgaccaccataaaagggcagggggttctcagtctcctggcattcctcactcagggtctctgcccaggctgacacccaactctgacggccctctccggcgccccctcctccagggtccaggtcatcctctgcaggccccttaatgccccaggcaagactgaacctgagccacaaaacctggggagggggctaggcgttcaggaagactcttcagaagcctgcatctggaagtggggaagcagtggacaaagactttctcagtcctgcctcaatgcggggtggggaggcggggaggacatgggcttggtaagccacaagaccgctgggggcggcgcccacgtagacacctttgccaggcacaataaaacctggctgggccagctctccctccctccctgtccctgcccgccacgcgttctgccccctgcgggcccttcccggacacaaggcacgcagctcagacagttttccacggcggaaatgccttctctcccccccggccagagggaaagtggaggaagccggggtaggggagggggatgacaggggtgggggaacgcgcacagagcccggggacccaggatgcaagggcactggggcagttgggagccctccccgtggggtcgggggacagcccagcgagaggctgggaatggagaaaagagaggggagcagggaggcccagacggcagggcgtggggtgggaagggggcacccggcctcggacccccgacgtccagaggccgcagcgccgtcggttctggctgatttccatttcatcactttctggtctgtcaattccggtgcaggccagcagcacatcctctgtccctcgcagcccccaatttcggaggaaatcaacggccccaccctcttcgttggtaccagacccccccacccccaattccccagccaatcaggtcccaccgccctactttggaaaaactacgtctaaccctcctcccatcccccacctggggactcgactcgcggctttcccagttgattggaaccagacgcgtacccccccaccaacattcctcgaacttcttcggaccagccccctccccctataaggcggcgagggggcccccacttttggaagagacctcgagcacttctccacctgaagaccagaaccagacgcctcccactcttcggacttcagcttttggctgccgctttagtacgggacttaagccccctcctcattctgggataagcaaccattcgagacttcccaaccctgctccaccccgggctctggggccctgacgcgcctcgggcagtccccagggccgacggggcgcgcctgggtcgtgagcctgggtcccccgccccaccgcctgagccccagaccctctcaccctagccggcgtcagcaggatctcggtggccgaggccggcgcaggggccgacgccgacgccttgtcagccttgtcgcccttgatgccagccacggcgggctggaagctaatcttcaccatggctgcgccggcccgcgcgtccgccccgcagcctctgccggtgcagcctcggtctctgcctccgccgctccgagctctgcaggcaccggaagtttggatcccgctcgcgtccctctctctaaccccacccccagccctccccgccccgtccccgcgggagggccccggcgcccgccgcgcctgcgcccccttcccgcccgcggggcccgcagtgacccctgccgggcgcgccgctccgcacctggggcgggtcggagttccttctgccgctcgctcgcacagtcactcactcgctcgctcactcactcactcactcactcgctcactcattcattcagccgtcacgctcggatccgttctccgtagcataatcccttcgcattccctgtccaaggccagcatccccgcaacgcaagtctttgttaacccagtgtttgccaggcaaatgcagcttccagacaactcacccgtctctcctgccccacttcaggtcttcccctttagaaacgctggagcctccgctctacctgtccccacgcccccctcctccgacctgtccttggcgcggggaggaggctttgagacaggcgccaaactgctgcctccgtcttgccttctgaagccatccacgcctccttcatcctccatcttgcttctgccttcattctttattcctgcaaaaccttcctggggggtcctggggtgcacgctggagccgcctggagtggagaagggaaggccgcccctgctccctggctccttcgtgttgctgcgacctcagttattgggtgacctcctgaactgcccttgtctcactcatccaggaggaccctggcgagagtggagggaagacccccagggcgggtgtcagaggctcgggttccactcaagactctgctcctcccaagtatcacgggtactggggaagcaggggcttctgttgctgggatggctgctcttggcactaacgccctgaatctttcctctttgctcctggtccagactgggccagggacagcgcccagcaacacacacaggttgtgctgagtggtccgctttggttctgctgttgggctgccagtggagggcaggggagtccgtccgcttcttgaggacagtccggggtcctccactgatctctcttctcacctttcaggtcttttgcagctgccttgggcccttagcgcccacgtcccagacccggacctcttggctcagatcttggatgaacctagcaaccttgaggacagacaggtggggaaagaagaaagtctaactgatgctaaggccaccagcctggggaactggggggagggaatggggaggtggaagaagacagatggtttggaggagacgaggaggaatctggtttggcacagagccagagaggaaggtgttatggactaccgctcatcacctgctccagatcccatgggaaacctggtgtctggagaaggcaagctccacgtcttgcttaggccacacccccaacatgcattccttcactcagtgttttccaagcacccctgtgtgccaagcattgtgttaagctctgtggcagaaaacagagatgcccaagacacaacccagccaccaaggatgtggtcatgtgaaaccttctatgagtggcattctttcacgtgcattcaattatttaattttcatcacagcctctgtgacctacacattagcctcatgttaatagtgatagaaggtagcatgactaaacccagggtcgcagagctggtttggcacaaatctctggtcagcaagacagggccacctgggtgaagcatccacatgcctgagattggcaggcgagcaccccacttcccctggaaggccttcccagaccggctgggataagtccctttcctgtgcaccttcagcactgtgcacatccccctcgggcctctccttacgcttgaccatggactcaatgccggccaagtgctgggcgtacaacctagtgcagtgattcctaaattttttggtttcaggaccccaagagcttttgtttaggtggcttatgtctatcaacatttaccatattagaaactaaaactcagaaagttt

SEQ ID NO: 3191 - DNA, 4001 bp, Homo sapiens
agctgctctcatggggtgcacagcaacccccaacctcgcctaggtggttgttgaactcttgtggctctgagccactggttgctgcagtgaccaccataaaagggcagggggttctcagtctcctggcattcctcactcagggtctctgcccaggctgacacccaactctgacggccctctccggcgccccctcctccagggtccaggtcatcctctgcaggccccttaatgccccaggcaagactgaacctgagccacaaaacctggggagggggctaggcgttcaggaagactcttcagaagcctgcatctggaagtggggaagcagtggacaaagactttctcagtcctgcctcaatgcggggtggggaggcggggaggacatgggcttggtaagccacaagaccgctgggggcggcgcccacgtagacacctttgccaggcacaataaaacctggctgggccagctctccctccctccctgtccctgcccgccacgcgttctgccccctgcgggcccttcccggacacaaggcacgcagctcagacagttttccacggcggaaatgccttctctcccccccggccagagggaaagtggaggaagccggggtaggggagggggatgacaggggtgggggaacgcgcacagagcccggggacccaggatgcaagggcactggggcagttgggagccctccccgtggggtcgggggacagcccagcgagaggctgggaatggagaaaagagaggggagcagggaggcccagacggcagggcgtggggtgggaagggggcacccggcctcggacccccgacgtccagaggccgcagcgccgtcggttctggctgatttccatttcatcactttctggtctgtcaattccggtgcaggccagcagcacatcctctgtccctcgcagcccccaatttcggaggaaatcaacggccccaccctcttcgttggtaccagacccccccacccccaattccccagccaatcaggtcccaccgccctactttggaaaaactacgtctaaccctcctcccatcccccacctggggactcgactcgcggctttcccagttgattggaaccagacgcgtacccccccaccaacattcctcgaacttcttcggaccagccccctccccctataaggcggcgagggggcccccacttttggaagagacctcgagcacttctccacctgaagaccagaaccagacgcctcccactcttcggacttcagcttttggctgccgctttagtacgggacttaagccccctcctcattctgggataagcaaccattcgagacttcccaaccctgctccaccccgggctctggggccctgacgcgcctcgggcagtccccagggccgacggggcgcgcctgggtcgtgagcctgggtcccccgccccaccgcctgagccccagaccctctcaccctagccggcgtcagcaggatctcggtggccgaggccggcgcaggggccgacgccgacgccttgtcagccttgtcgcccttgatgccagccacggcgggctggaagctaatcttcaccatggctgcgccggcccgcgcgtccgccccgcagcctctgccggtgcagcctcggtctctgcctccgccgctccgagctctgcaggcaccggaagtttggatcccgctcgcgtccctctctctaaccccacccccagccctccccgccccgtccccgcgggagggccccggcgcccgccgcgcctgcgcccccttcccgcccgcggggcccgcagtgacccctgccgggcgcgccgctccgcacctggggcgggtcggagttccttctgccgctcgctcgcacagtcactcactcgctcgctcactcactcactcactcactcgctcactcattcattcagccgtcacgctcggatccgttctccgtagcataatcccttcgcattccctgtccaaggccagcatccccgcaacgcaagtctttgttaacccagtgtttgccaggcaaatgcagcttccagacaactcacccgtctctcctgccccacttcaggtcttcccctttagaaacgctggagcctccgctctacctgtccccacgcccccctcctccgacctgtccttggcgcggggaggaggctttgagacaggcgccaaactgctgcctccgtcttgccttctgaagccatccacgcctccttcatcctccatcttgcttctgccttcattctttattcctgcaaaaccttcctggggggtcctggggtgcacgctggagccgcctggagtggagaagggaaggccgcccctgctccctggctccttcgtgttgctgcgacctcagttattgggtgacctcctgaactgcccttgtctcactcatccaggaggaccctggcgagagtggagggaagacccccagggcgggtgtcagaggctcgggttccactcaagactctgctcctcccaagtatcacgggtactggggaagcaggggcttctgttgctgggatggctgctcttggcactaacgccctgaatctttcctctttgctcctggtccagactgggccagggacagcgcccagcaacacacacaggttgtgctgagtggtccgctttggttctgctgttgggctgccagtggagggcaggggagtccgtccgcttcttgaggacagtccggggtcctccactgatctctcttctcacctttcaggtcttttgcagctgccttgggcccttagcgcccacgtcccagacccggacctcttggctcagatcttggatgaacctagcaaccttgaggacagacaggtggggaaagaagaaagtctaactgatgctaaggccaccagcctggggaactggggggagggaatggggaggtggaagaagacagatggtttggaggagacgaggaggaatctggtttggcacagagccagagaggaaggtgttatggactaccgctcatcacctgctccagatcccatgggaaacctggtgtctggagaaggcaagctccacgtcttgcttaggccacacccccaacatgcattccttcactcagtgttttccaagcacccctgtgtgccaagcattgtgttaagctctgtggcagaaaacagagatgcccaagacacaacccagccaccaaggatgtggtcatgtgaaaccttctatgagtggcattctttcacgtgcattcaattatttaattttcatcacagcctctgtgacctacacattagcctcatgttaatagtgatagaaggtagcatgactaaacccagggtcgcagagctggtttggcacaaatctctggtcagcaagacagggccacctgggtgaagcatccacatgcctgagattggcaggcgagcaccccacttcccctggaaggccttcccagaccggctgggataagtccctttcctgtgcaccttcagcactgtgcacatccccctcgggcctctccttacgcttgaccatggactcaatgccggccaagtgctgggcgtacaacctagtgcagtgattcctaaattttttggtttcaggaccccaagagcttttgtttaggtggcttatgtctatcaacatttaccatattagaaactaaaactcagaaagttttaagacacaagaatacatatattccattgggcatcaaagcgatgtcatcacacatgtagtctctggaaaaccccactgcacgctaatgagagaatgagagtgaaaagggcaaataatgacttatattgttgcaaaaaatagttttgaccttggagacccccctgaatgggtcttggggggcaccatgctctgcagatcacctgttcagatgctcaagaatccatattccatggattctaagaaacacatttcttcacattttaacatcttgagaatcaagatatcttttacaattataattggcagtgattaagtaatgtctttcacaagtgatagcatcttatatttgatg

SEQ ID NO: 3192 - DNA, 4001 bp, Homo sapiens
ctcatggagggttccccatttctcaaaggcagccccgatgcccaggcagtcttccaattgtgggtgagcctcttggcggctgagcacccgacaggcctcaatgagatcatccacaaaactctccacaaactcacaggtgcagggcaggtcacggatggcattttggacatagtgtttgtaaaaggagtccagggcctcctgggaggggaagtcagtaagccagttgtaagaggtgacagggacaacacggacttcctcctcctcctcctcactgctggaatcaaaggccggttcatgctgcatgttctgtcgcaggagctcaaagacgagaaaaaggcaaaagaggccagtgttccacaggtttcccagcatccagcccagaggcccttcctggccatcggcctggaacggccaccccatgtctttcttccccagcactaactggtcactggatgtgtctcctgtccagaagttctctgccttctgcctctgctcagcggctcgctttctctcttcaaactccatctctagcaggcgcatctcctcactcattcgcttctccagctgccgactcctggctaatgtgtccaggtccatccgatcactgaccatcagagggtggtgaacaacatacatcactgccaagaacagcaggcttatcacagccatggaggcctctgcatctggagaagtaggagagtaggagtcagtggtcatcttccagacttatctgctctctagctcacattccccagagccctggtaccccaaattctgaaaatcagctactcaggaggaacagaaagcccacagagcttggcttggacacagcaagggtggtcggcctgggaggaggttcgagagaaaagagggcgaaaggatgtgccactcagtctctctcctgctttccttccacatggtgtgggtggtatttaggcttccagaaagtgtacatgggactgttttcattcctgtgtaggatggggagggggacccttgtggtagggtggcctcacccgactcctcagtcaaccatgggcaccagatatgacctgctgatcccagaggctcccttttatagccagaaagccctgaacctgcctgggtgacacctttcctctgccccggcagccagttgtagcattccacttcctctgtgacttcacagtcttcattctgctcacccagtatgaagtgagcctcatcactcagcctctccctctctgcccagggagcgcaagagaggcacagtgccgccagctgcttgctacggtgccctctctgctcctaaggggctagtggataccccgtgtgtgggcaggctagcttcacttcttagttcagaaaactgtctgcagaaccaggtgcccaaggcctacctgacagccggcagtggtcagttccactgcctccccacccacccgtgaagcccgagcttctgccactcaccctaattcacaagctaccgcgcttaccaacattcatgaaggactatgccgtgtggacgctgaagccagctgggcctatcctccctttggaacttggccttgcttcgtctccccgccctctctaggagccctgttaaaatgtacaaggtacctgggggctttggctcaaatcggaacccgaccctccccccattcataacttccccaaattccacgcccagagatttgtactctcacccgcctatccgtaggaggccaagggcccatcctacctcgggatgtctcccgggacccagggccaggttactcaccgtcagtgttagtaggaacacgatcttaaagagacagcgcggcctgaccgccactgcttttttcccggcagggtgggggcgtccggttcatcgctggggccgcccgcgggagtggccctgctcccctttcctgggttatagaccatgcttgtccgagcgtctgaacgtctggctgagcgcggtgggcccctacgacccccagcacgcggctccgagggcgcccgcgcgccgcagccgctcccgccgtccgggctcctccccgcccacccagtacaagctcctccccgcccaaacccccgtggcccagcgtgcaggggcagcggcctccccacaccgggtctctgtccgcaccgaggcccccgtgggtttgctgggagagtggaggggccgtggccacacactctccgctgctcggcctccctggggtggcaaatggggcaccgccgtgcctgctgtcagctgcactcagctcagttcagtggagaacagacttactaggattcgggtgtaaggatgatggtggcaaaactaggaattgaccgagaaaagccattctcacttcgggctggccctgagcaaaatggcacacgaaataagatgtggtttcagcaccctaaatgtgcttccctcccagcccacgcccagactcaggcatctttccccaacccctttctcatatcaaagtgactctcatgaaagaacagacagcacccaaagaccttacttggggccttgcttgctactcactggccacgtgggagtaagaatcctacctacagggcagctctgctgatacatgggtgtataaaggagaactttatacggtgtggaggctggacaagctttatcacaccttaagaaacacaacagaatgggtttcctgaaagggatcttcagatatcagaaagagcccttagtcttcctgtcttgtgtcagctatccaagaagaaaaggaagtgatgaccccttgatactaactcactaaaatccctctgctgaaagacaagtttcagggtttttatttgtttgtttgtttttgagaaagagtttcgctctgtcacccaggctggagtgtagtggcaccatcttggctcactgcagcctacccgccccaggttccagtgattctcctgcctcagcctactgagtagctgggaccacaggtgtatgccaccatgtccagctaatttttgtatttttagtaaagacggggtttcaccatgttggccatgctggtctcgaactcctgacctcaggtgatctgcccgcctcggcctcccaaaatgctgggattatatgtgtaagccatcacacatggctgggtttcaggtcttcttatccagtggcaatgtgtagggagctcccaaacaacttgtacaatacttccaagaatactgacttatttaattgtggagcaggaaaaactgtctgctagctgacaatgactgaagttccaaagttactttttataaatgtgaattatgaaaaatagatcacaggttattgagcattcatgcatttggagcagtaataatgaaagtctcttatcttttcacttatgacatgatgtcaggatgcaaaatatatgcttcagagtgtgcaaaaacgataatgtttaagaccatgtgttttaaagttgtattattttaattaacaaataataattgtacatattcatagggtgcacagtcatgtttcatacatacaatgtataatttcagattagggtaattagcatatccatcatctcaaacatttatcatttctttgtgttgggaaggttcaatcctccctctagctatttgaaactatatattattactattattattttgtgtgtgtgtgtgacggagtcttgctctgtcacccaggctggagtgcagtggcaccatctcagctcactgcaacctccacctcctgggtcaagcagttttcctgcctcagcctcccaaatagctgggattacaggcacacaccaccaagcccggcaatttttttgtattttagtagagtgggggtttcaccatgttctcgagctcctgagctcaagcaatctgcccaccttggcctcccaaagtgctgggattacaggcatgagccaccatgcctggtctattattgttaactgtagtcaacctacagtggtgtgaaaccctagtacttagtcctcccatctggctataatcttgaatcctttaacaaatccctccctatcaccaccttcccctccccttcccagcct

SEQ ID NO: 3193 - DNA, 4001 bp, Homo sapiens
tctgggtctcatggagggttccccatttctcaaaggcagccccgatgcccaggcagtcttccaattgtgggtgagcctcttggcggctgagcacccgacaggcctcaatgagatcatccacaaaactctccacaaactcacaggtgcagggcaggtcacggatggcattttggacatagtgtttgtaaaaggagtccagggcctcctgggaggggaagtcagtaagccagttgtaagaggtgacagggacaacacggacttcctcctcctcctcctcactgctggaatcaaaggccggttcatgctgcatgttctgtcgcaggagctcaaagacgagaaaaaggcaaaagaggccagtgttccacaggtttcccagcatccagcccagaggcccttcctggccatcggcctggaacggccaccccatgtctttcttccccagcactaactggtcactggatgtgtctcctgtccagaagttctctgccttctgcctctgctcagcggctcgctttctctcttcaaactccatctctagcaggcgcatctcctcactcattcgcttctccagctgccgactcctggctaatgtgtccaggtccatccgatcactgaccatcagagggtggtgaacaacatacatcactgccaagaacagcaggcttatcacagccatggaggcctctgcatctggagaagtaggagagtaggagtcagtggtcatcttccagacttatctgctctctagctcacattccccagagccctggtaccccaaattctgaaaatcagctactcaggaggaacagaaagcccacagagcttggcttggacacagcaagggtggtcggcctgggaggaggttcgagagaaaagagggcgaaaggatgtgccactcagtctctctcctgctttccttccacatggtgtgggtggtatttaggcttccagaaagtgtacatgggactgttttcattcctgtgtaggatggggagggggacccttgtggtagggtggcctcacccgactcctcagtcaaccatgggcaccagatatgacctgctgatcccagaggctcccttttatagccagaaagccctgaacctgcctgggtgacacctttcctctgccccggcagccagttgtagcattccacttcctctgtgacttcacagtcttcattctgctcacccagtatgaagtgagcctcatcactcagcctctccctctctgcccagggagcgcaagagaggcacagtgccgccagctgcttgctacggtgccctctctgctcctaaggggctagtggataccccgtgtgtgggcaggctagcttcacttcttagttcagaaaactgtctgcagaaccaggtgcccaaggcctacctgacagccggcagtggtcagttccactgcctccccacccacccgtgaagcccgagcttctgccactcaccctaattcacaagctaccgcgcttaccaacattcatgaaggactatgccgtgtggacgctgaagccagctgggcctatcctccctttggaacttggccttgcttcgtctccccgccctctctaggagccctgttaaaatgtacaaggtacctgggggctttggctcaaatcggaacccgaccctccccccattcataacttccccaaattccacgcccagagatttgtactctcacccgcctatccgtaggaggccaagggcccatcctacctcgggatgtctcccgggacccagggccaggttactcaccgtcagtgttagtaggaacacgatcttaaagagacagcgcggcctgaccgccactgcttttttcccggcagggtgggggcgtccggttcatcgctggggccgcccgcgggagtggccctgctcccctttcctgggttatagaccatgcttgtccgagcgtctgaacgtctggctgagcgcggtgggcccctacgacccccagcacgcggctccgagggcgcccgcgcgccgcagccgctcccgccgtccgggctcctccccgcccacccagtacaagctcctccccgcccaaacccccgtggcccagcgtgcaggggcagcggcctccccacaccgggtctctgtccgcaccgaggcccccgtgggtttgctgggagagtggaggggccgtggccacacactctccgctgctcggcctccctggggtggcaaatggggcaccgccgtgcctgctgtcagctgcactcagctcagttcagtggagaacagacttactaggattcgggtgtaaggatgatggtggcaaaactaggaattgaccgagaaaagccattctcacttcgggctggccctgagcaaaatggcacacgaaataagatgtggtttcagcaccctaaatgtgcttccctcccagcccacgcccagactcaggcatctttccccaacccctttctcatatcaaagtgactctcatgaaagaacagacagcacccaaagaccttacttggggccttgcttgctactcactggccacgtgggagtaagaatcctacctacagggcagctctgctgatacatgggtgtataaaggagaactttatacggtgtggaggctggacaagctttatcacaccttaagaaacacaacagaatgggtttcctgaaagggatcttcagatatcagaaagagcccttagtcttcctgtcttgtgtcagctatccaagaagaaaaggaagtgatgaccccttgatactaactcactaaaatccctctgctgaaagacaagtttcagggtttttatttgtttgtttgtttttgagaaagagtttcgctctgtcacccaggctggagtgtagtggcaccatcttggctcactgcagcctacccgccccaggttccagtgattctcctgcctcagcctactgagtagctgggaccacaggtgtatgccaccatgtccagctaatttttgtatttttagtaaagacggggtttcaccatgttggccatgctggtctcgaactcctgacctcaggtgatctgcccgcctcggcctcccaaaatgctgggattatatgtgtaagccatcacacatggctgggtttcaggtcttcttatccagtggcaatgtgtagggagctcccaaacaacttgtacaatacttccaagaatactgacttatttaattgtggagcaggaaaaactgtctgctagctgacaatgactgaagttccaaagttactttttataaatgtgaattatgaaaaatagatcacaggttattgagcattcatgcatttggagcagtaataatgaaagtctcttatcttttcacttatgacatgatgtcaggatgcaaaatatatgcttcagagtgtgcaaaaacgataatgtttaagaccatgtgttttaaagttgtattattttaattaacaaataataattgtacatattcatagggtgcacagtcatgtttcatacatacaatgtataatttcagattagggtaattagcatatccatcatctcaaacatttatcatttctttgtgttgggaaggttcaatcctccctctagctatttgaaactatatattattactattattattttgtgtgtgtgtgtgacggagtcttgctctgtcacccaggctggagtgcagtggcaccatctcagctcactgcaacctccacctcctgggtcaagcagttttcctgcctcagcctcccaaatagctgggattacaggcacacaccaccaagcccggcaatttttttgtattttagtagagtgggggtttcaccatgttctcgagctcctgagctcaagcaatctgcccaccttggcctcccaaagtgctgggattacaggcatgagccaccatgcctggtctattattgttaactgtagtcaacctacagtggtgtgaaaccctagtacttagtcctcccatctggctataatcttgaatcctttaacaaatccctccctatcaccaccttcccctccccttc

SEQ ID NO: 3194 - DNA, 4001 bp, Homo sapiens
ggttgagcaccaggtgttggaagagattgaccggctcagcattcctaaatgtcttagggattgggatggtcaggggcagaaaattgttaccaatgaggaaatgatggagggacctttgctggaggccacggcccaagaaccagagaatgtcctggagccgctgagagagcatgttgtgggcccagtccgtgaggggcagccgtagcaagaggtgcatgagagctgttttaaaatggtaagaagtgaggatggggcgggatgctccatggggtaagctctgatgctgccggagacttaaaatgatctggaggcacttgaggtgacaggtgttctcgggggcaaagcgccccaccagcttcaggaacaggtgctcacaggccacaaaggactcaggccagtccacactggtgagctgctcctggtcaggagcctgactcaccaggtagaccaaggtgtcttctcgttgcacccccaggaccaagtggattgagagaaagcggcctgagcgatagtccagccggagcttgcaggaggtggtagacggtgggagactgagtttaaagtcatacttgtgggccacaagggcccaggcattgcccatcatgttccggaaccactgcacagtcttgcacacgtctaggtggaagccggtgcagagagctgccttgatggagctactacacttccccaagactgccgaggggtccctgtggtggtgcaccaggcacagcacgtcccctaggagtttctcacgcttgcacacacattctgactccaccagcacacagccacagcggcggcccagggctgggtccctcatctccaggacaaacatggtgccctgtggggggacaatgggcaccaggatatcaaatttctgggtctcatggagggttccccatttctcaaaggcagccccgatgcccaggcagtcttccaattgtgggtgagcctcttggcggctgagcacccgacaggcctcaatgagatcatccacaaaactctccacaaactcacaggtgcagggcaggtcacggatggcattttggacatagtgtttgtaaaaggagtccagggcctcctgggaggggaagtcagtaagccagttgtaagaggtgacagggacaacacggacttcctcctcctcctcctcactgctggaatcaaaggccggttcatgctgcatgttctgtcgcaggagctcaaagacgagaaaaaggcaaaagaggccagtgttccacaggtttcccagcatccagcccagaggcccttcctggccatcggcctggaacggccaccccatgtctttcttccccagcactaactggtcactggatgtgtctcctgtccagaagttctctgccttctgcctctgctcagcggctcgctttctctcttcaaactccatctctagcaggcgcatctcctcactcattcgcttctccagctgccgactcctggctaatgtgtccaggtccatccgatcactgaccatcagagggtggtgaacaacatacatcactgccaagaacagcaggcttatcacagccatggaggcctctgcatctggagaagtaggagagtaggagtcagtggtcatcttccagacttatctgctctctagctcacattccccagagccctggtaccccaaattctgaaaatcagctactcaggaggaacagaaagcccacagagcttggcttggacacagcaagggtggtcggcctgggaggaggttcgagagaaaagagggcgaaaggatgtgccactcagtctctctcctgctttccttccacatggtgtgggtggtatttaggcttccagaaagtgtacatgggactgttttcattcctgtgtaggatggggagggggacccttgtggtagggtggcctcacccgactcctcagtcaaccatgggcaccagatatgacctgctgatcccagaggctcccttttatagccagaaagccctgaacctgcctgggtgacacctttcctctgccccggcagccagttgtagcattccacttcctctgtgacttcacagtcttcattctgctcacccagtatgaagtgagcctcatcactcagcctctccctctctgcccagggagcgcaagagaggcacagtgccgccagctgcttgctacggtgccctctctgctcctaaggggctagtggataccccgtgtgtgggcaggctagcttcacttcttagttcagaaaactgtctgcagaaccaggtgcccaaggcctacctgacagccggcagtggtcagttccactgcctccccacccacccgtgaagcccgagcttctgccactcaccctaattcacaagctaccgcgcttaccaacattcatgaaggactatgccgtgtggacgctgaagccagctgggcctatcctccctttggaacttggccttgcttcgtctccccgccctctctaggagccctgttaaaatgtacaaggtacctgggggctttggctcaaatcggaacccgaccctccccccattcataacttccccaaattccacgcccagagatttgtactctcacccgcctatccgtaggaggccaagggcccatcctacctcgggatgtctcccgggacccagggccaggttactcaccgtcagtgttagtaggaacacgatcttaaagagacagcgcggcctgaccgccactgcttttttcccggcagggtgggggcgtccggttcatcgctggggccgcccgcgggagtggccctgctcccctttcctgggttatagaccatgcttgtccgagcgtctgaacgtctggctgagcgcggtgggcccctacgacccccagcacgcggctccgagggcgcccgcgcgccgcagccgctcccgccgtccgggctcctccccgcccacccagtacaagctcctccccgcccaaacccccgtggcccagcgtgcaggggcagcggcctccccacaccgggtctctgtccgcaccgaggcccccgtgggtttgctgggagagtggaggggccgtggccacacactctccgctgctcggcctccctggggtggcaaatggggcaccgccgtgcctgctgtcagctgcactcagctcagttcagtggagaacagacttactaggattcgggtgtaaggatgatggtggcaaaactaggaattgaccgagaaaagccattctcacttcgggctggccctgagcaaaatggcacacgaaataagatgtggtttcagcaccctaaatgtgcttccctcccagcccacgcccagactcaggcatctttccccaacccctttctcatatcaaagtgactctcatgaaagaacagacagcacccaaagaccttacttggggccttgcttgctactcactggccacgtgggagtaagaatcctacctacagggcagctctgctgatacatgggtgtataaaggagaactttatacggtgtggaggctggacaagctttatcacaccttaagaaacacaacagaatgggtttcctgaaagggatcttcagatatcagaaagagcccttagtcttcctgtcttgtgtcagctatccaagaagaaaaggaagtgatgaccccttgatactaactcactaaaatccctctgctgaaagacaagtttcagggtttttatttgtttgtttgtttttgagaaagagtttcgctctgtcacccaggctggagtgtagtggcaccatcttggctcactgcagcctacccgccccaggttccagtgattctcctgcctcagcctactgagtagctgggaccacaggtgtatgccaccatgtccagctaatttttgtatttttagtaaagacggggtttcaccatgttggccatgctggtctcgaactcctgacctcaggtgatctgcccgcctcggcctcccaaaatgctgggattatatgtgtaagccatcacacatggctgggtttcaggtcttcttatccagtggcaatgtgtaggga

SEQ ID NO: 3195 - DNA, 4001 bp, Homo sapiens
caggtgttggaagagattgaccggctcagcattcctaaatgtcttagggattgggatggtcaggggcagaaaattgttaccaatgaggaaatgatggagggacctttgctggaggccacggcccaagaaccagagaatgtcctggagccgctgagagagcatgttgtgggcccagtccgtgaggggcagccgtagcaagaggtgcatgagagctgttttaaaatggtaagaagtgaggatggggcgggatgctccatggggtaagctctgatgctgccggagacttaaaatgatctggaggcacttgaggtgacaggtgttctcgggggcaaagcgccccaccagcttcaggaacaggtgctcacaggccacaaaggactcaggccagtccacactggtgagctgctcctggtcaggagcctgactcaccaggtagaccaaggtgtcttctcgttgcacccccaggaccaagtggattgagagaaagcggcctgagcgatagtccagccggagcttgcaggaggtggtagacggtgggagactgagtttaaagtcatacttgtgggccacaagggcccaggcattgcccatcatgttccggaaccactgcacagtcttgcacacgtctaggtggaagccggtgcagagagctgccttgatggagctactacacttccccaagactgccgaggggtccctgtggtggtgcaccaggcacagcacgtcccctaggagtttctcacgcttgcacacacattctgactccaccagcacacagccacagcggcggcccagggctgggtccctcatctccaggacaaacatggtgccctgtggggggacaatgggcaccaggatatcaaatttctgggtctcatggagggttccccatttctcaaaggcagccccgatgcccaggcagtcttccaattgtgggtgagcctcttggcggctgagcacccgacaggcctcaatgagatcatccacaaaactctccacaaactcacaggtgcagggcaggtcacggatggcattttggacatagtgtttgtaaaaggagtccagggcctcctgggaggggaagtcagtaagccagttgtaagaggtgacagggacaacacggacttcctcctcctcctcctcactgctggaatcaaaggccggttcatgctgcatgttctgtcgcaggagctcaaagacgagaaaaaggcaaaagaggccagtgttccacaggtttcccagcatccagcccagaggcccttcctggccatcggcctggaacggccaccccatgtctttcttccccagcactaactggtcactggatgtgtctcctgtccagaagttctctgccttctgcctctgctcagcggctcgctttctctcttcaaactccatctctagcaggcgcatctcctcactcattcgcttctccagctgccgactcctggctaatgtgtccaggtccatccgatcactgaccatcagagggtggtgaacaacatacatcactgccaagaacagcaggcttatcacagccatggaggcctctgcatctggagaagtaggagagtaggagtcagtggtcatcttccagacttatctgctctctagctcacattccccagagccctggtaccccaaattctgaaaatcagctactcaggaggaacagaaagcccacagagcttggcttggacacagcaagggtggtcggcctgggaggaggttcgagagaaaagagggcgaaaggatgtgccactcagtctctctcctgctttccttccacatggtgtgggtggtatttaggcttccagaaagtgtacatgggactgttttcattcctgtgtaggatggggagggggacccttgtggtagggtggcctcacccgactcctcagtcaaccatgggcaccagatatgacctgctgatcccagaggctcccttttatagccagaaagccctgaacctgcctgggtgacacctttcctctgccccggcagccagttgtagcattccacttcctctgtgacttcacagtcttcattctgctcacccagtatgaagtgagcctcatcactcagcctctccctctctgcccagggagcgcaagagaggcacagtgccgccagctgcttgctacggtgccctctctgctcctaaggggctagtggataccccgtgtgtgggcaggctagcttcacttcttagttcagaaaactgtctgcagaaccaggtgcccaaggcctacctgacagccggcagtggtcagttccactgcctccccacccacccgtgaagcccgagcttctgccactcaccctaattcacaagctaccgcgcttaccaacattcatgaaggactatgccgtgtggacgctgaagccagctgggcctatcctccctttggaacttggccttgcttcgtctccccgccctctctaggagccctgttaaaatgtacaaggtacctgggggctttggctcaaatcggaacccgaccctccccccattcataacttccccaaattccacgcccagagatttgtactctcacccgcctatccgtaggaggccaagggcccatcctacctcgggatgtctcccgggacccagggccaggttactcaccgtcagtgttagtaggaacacgatcttaaagagacagcgcggcctgaccgccactgcttttttcccggcagggtgggggcgtccggttcatcgctggggccgcccgcgggagtggccctgctcccctttcctgggttatagaccatgcttgtccgagcgtctgaacgtctggctgagcgcggtgggcccctacgacccccagcacgcggctccgagggcgcccgcgcgccgcagccgctcccgccgtccgggctcctccccgcccacccagtacaagctcctccccgcccaaacccccgtggcccagcgtgcaggggcagcggcctccccacaccgggtctctgtccgcaccgaggcccccgtgggtttgctgggagagtggaggggccgtggccacacactctccgctgctcggcctccctggggtggcaaatggggcaccgccgtgcctgctgtcagctgcactcagctcagttcagtggagaacagacttactaggattcgggtgtaaggatgatggtggcaaaactaggaattgaccgagaaaagccattctcacttcgggctggccctgagcaaaatggcacacgaaataagatgtggtttcagcaccctaaatgtgcttccctcccagcccacgcccagactcaggcatctttccccaacccctttctcatatcaaagtgactctcatgaaagaacagacagcacccaaagaccttacttggggccttgcttgctactcactggccacgtgggagtaagaatcctacctacagggcagctctgctgatacatgggtgtataaaggagaactttatacggtgtggaggctggacaagctttatcacaccttaagaaacacaacagaatgggtttcctgaaagggatcttcagatatcagaaagagcccttagtcttcctgtcttgtgtcagctatccaagaagaaaaggaagtgatgaccccttgatactaactcactaaaatccctctgctgaaagacaagtttcagggtttttatttgtttgtttgtttttgagaaagagtttcgctctgtcacccaggctggagtgtagtggcaccatcttggctcactgcagcctacccgccccaggttccagtgattctcctgcctcagcctactgagtagctgggaccacaggtgtatgccaccatgtccagctaatttttgtatttttagtaaagacggggtttcaccatgttggccatgctggtctcgaactcctgacctcaggtgatctgcccgcctcggcctcccaaaatgctgggattatatgtgtaagccatcacacatggctgggtttcaggtcttcttatccagtggcaatgtgtagggagctcccaaac

SEQ ID NO: 3196 - DNA, 4001 bp, Homo sapiens
atatgtgacccttttgtcttactaaagatggaaatttgtgaaactctacattaaaactaaaaatcctaaggttacatgattttctactttttaaaaaagatatactaactacataaggttaaaggattttttaaaataagaaagaaaaaaagaaaagcttcttgaaagctgctgagtttgggtgatgggtacatgctatttttgtgaaaatacaaattttttaacactattaatccaatccccaaaacatgcctaacacacctcctcatattcaggagagatcaagattttagccttgagatgtaccgaacaatggtaactccctgcttagtaattctgtacaggtcaagttttcttggacgagtttacctttcattacaaaggtgggcacagggaatagttatcaatgcatggaagggtgaaaaaatgcaagcttttcaactgcttattaatattacatcaaaatagcagcaatgcacattttttccacgttttcaaaaacataaaatacatccactttatttacttttgaaattacaagagagtcacaggcacagccaaaaaaagctaaaggaaaacacatcagagttgtcagtatctttaaatttggaaggacgtcattattaattcgcgtaaatgttttatgcgatgtttctaggtagcttttaggttttatcactgattaacaatatagcaaaccagcacagggagagaggcaatttttcgaaacgcttaagaagctttaaactacaagagctatgctacctaaactgagctcactaacaacgtaaaatttcaagtcacaccttgcctatttctgagtaagcaagcaaacactagtgagacaaactagaagcatggagcaaagcaagtcatttctatgctaaccttaattcctatcgtaaaggggttggctccatcaaaaaatattcctatttcagtattaacacaagtttcaaataaagcacacttgccattggtaattctagagcgacaaggcgcataattaataaatccaaacggagcatctttctatagaatacaaagccatctgcagtttcagcctcggtttacccactcactatgcatatgcagacgtctttaaaaataaataaataaatacacaaataaactttatctggcctgagagattacatctctcggtgcttcctgtatattctggaagtcaataacgctgaaggtaaatttaacatttccaactccggaggaacgcgagcggtagacgccaagcatccgcccactgtcctctcgtgactcgggctactttgacgcaccgggatgcggctcacctgacattcggcaccaacccttgccaggaaggaaaaccaactccgcgaaaataaaatgggtccccgaggaggcgtgcgggtgcccccagagctctcttctgctcacaccccgaaagcgagggggccacgccacccccgaccctcgccggcgtccgccacctgccagacgaggccgcggccagggacccgggctcggccgcaaggaaggggcagcccagcccaggccccctcggcgtctgtcccggcccggcagcagaggaaggaacccggggccggaggtttccgccccgcacggccgagcccgccaggggcctagctcgggggccgcccgtactcccgaggacccgtccccatcgtgcggagcgcacagccgcctcagcccgacccgcagagcctccgggcagcgggcgcggcgcccgcacctgccccgcgccttgctgcagccccgctagcggcttcacccacctggcgccctcgccgcgcctcccgctcgtcacagcgcgactccgcgtccctcagcaccggcagcctgggcgcgggcaggcgcggggagaccctgctctgccgccgtcgccgccactgcagctggcttggtcgtcaggccgccgcccgcgaacctgttgcgtagcctgtcacagccgctcagggctccgccggcgccgcctcagccccacaacaacatggcggccgcggcctccgcaggaagccggggggcggggaggtaggcgccgggccgggcagctgacggcccgcccgctgccgggcaccgactccccaccctccggagcccgaaactgcccgggcgtggctcctcgccccaggagttccggggcattgaaccctgaaggtctgctccgagtcggtcgggtccgaagcgctcctctctgccctcggggaggccccgaagccccagacctggcagcccttcctggagttgcacagacccacctggctcctcctccccgaggtaacatgctgagcttgggtggtgcttttcctgccacggcagacgccggggttttggaaagtcccaagcagtgcctgccacatccctgttgcacccaccacggggttctccctggaaccttctcactcgccgaagttttctccactgatctgggggaacgaattctctgggaattggggggtggaaggtgggaaggaggttgatcccacccttgcccatgggtctgttacaggcctcttgaacccttctcagggacctggaggacttaaccataccctcggtcatccattcaccattcctcgccctcctccataacacacgcggagcgcccacgaggagcaccctctacgctagtcacactccgccgagcagtaggaagactctgtccccatagagcatagcacgacgaagctaaactttcctccccacccctcgccaagggacaggcgaagctcctactcagaatttgtctcttttctcccctcccggttcctggtctcctcacaaaagaccagacttcaactcaagccgccaccgtatcccaaaaccccaaaggtttgcccttgacaagaagcttcttcaaggggaaaggctttcttttgattggggtgagggaggagttagtgtttcctaatgaacgtaaccaaatgtcggcctggcacagtggctcacgcttgtaaccccggcactttgggaggccgaggcaggtggatcatctgaggtcaggagttggagaccagcctggccaacatggtgaaaccccgcctcttctaacaatacaaaaattagctgggcgtggtggcgggcgcctgtagtcccagctactcggaaggctgaggcaggagaatcgcttgaacctgggaggcggaggttgcagtgagcagagattgcaccactgtactccagcctgggcgacaagagcgaaactctgtctcaaaaaaaaaaaagtaaccaaatgtaagactcaagatttttggatataagacccaagatttctttttttttttttttttttttttttttttttcctgagacagactctcactccgttgcccaggctggagtgcagtggcgcaactgtgagatctgtgctcactgcaacctccgcctcccaggttcaagcaattctcctgcctcagccttccaagtacctgggattacaggcacttgccaccacgcccggctaatttttgtatttttagtagacactggtttcaccatgttggccaggctggtctcaaactcctgacctcaggtgatccacccgcctcatcctcccaaagtgctgggattggcgtgagccaccacgcccggccaagacccaagatttattttggcttttagaagcagggtgagggctggtctggggtccaaaactcatatcccttgatttgatctgtgtagatcaaataacccctggcatcctttcattccttacctgttgaggcaggtgaaggtgagatggctccaaacccaggcctatctgaactggccagccagcttaggaggaatttaccaaacatcgatgatgataaacaggcttttcccgctctcacactcagtgtttttcctaactcttcgattagaacctgaccaagacctgacagacaggtcctgagcttcagtgacacagagaagcctgactcttttatcagtctaggaggcccctcacttgctggggaccagccaatctgtccttatctgcaaacaaaccacccaggcca

SEQ ID NO: 3197 - DNA, 4001 bp, Homo sapiens
aacctatatacatgtattacatataattactttttttttttttggagacacagttttgctcttttggcccaggctggagtgcaatggtgtgatctcagctcactgcaacctccacccccccgggttcaacaagtgattctcctgcctcagcctcctgagtagctgggattacaggtgcccgccaccacgcctggctaattttttgtatttttagtagagatgggcttcaccacgttggccaggctggtctcaaactcctgacctcaggtgtttgccaccgtgctcggtctactttttaaaaagtaacttaaaaacacaaatgaatggaaaaaaaactattctgaaagtatcaggaaagtgtttttttgtttttgtttttgtttttgttttttttgagacagagtcttgctctgtcgcccaggcttggagtgcagtggtgcaacttccgctcactgcaacctctgcctcccgggctcagggctcaaaggatcctcccacttcagcctcctgagtaactgggactacaggtgtatgccaccacactcggctaatttttgcatttttttgtagagacgaagtaggggggtggggtaggggcgtaggggggtggggtacgggcatggggggtgggggtggtgttggtctcactatgttgcccaggctggtctcgaactcctgggctcaagccatcggccgcctacgcctcccaaagtgctgggattacaggcataatccaccgcacctggcttaggaaagtgtttttaagcagtgcatgcctggaaaacgctttgcagtcattagaattcactgtcctacgtaaggaaaagcaatgaactcaaaacagtaaagggcttaacgcttaaacaattatttaagcactcaagttttctttttaattttcaatttttgtgggtacatagagggtgtatttatttatggtgtatttaagaacttttgtaacagaacgccccaacaggactagcacacaaagggaaagcaaatgcgacgtgtttcccacaccaggttctgcctcacttatccttaatctcaggtgccaagcaccgtgccagcagagtgggccccagtaacagcttacagaataaacaaacagtaaagaaaggagaccaaacttcggtgaggaggaagaggaacgatctcaaggtggaggaaaggcacaaaaaccaccagtaagtgccagaagcgcattccttactctatgcatgcaactgaaacatgggtcctgcacttacgtccggtgttgcaagcaagattaaaccactcctaactagcagtgaaaagtctaggaaggatcccccgccccaacgccccttggattctccaactactcaactactgaaaactctcttaacagaagacacctctccttccctgcacacaataggagcttaacatatgaaagtgacttcccaatttcagcaaaaaccttcgccgattcagaagaaagctttcccaccagaatcccctctccaacgttctagcttcgacgcttgcagctggtcagagggctcttgccctcctcgggccgggtcgcgggagggaaggtttcggggggcctccttgcccccacccgcggggtgccaggccaagccccgccgagtaactgctccgcctcccagcccggtcccccaggtccctgccccacctgactggtcgccgctgtaatattccgagtccatggcaggcggactctcagcggggagtgtccgcgccccgcgccgcccccgtcacctccttccaggcggtgtgaccccggatggcgcggctaagtgttcagagactgccgcccgaccggagaacttaacgggtgcggagggtaagaaagcggtagcggcaaaggcgaattctttgacctggaagccccggcggaaaaggccgtacccggcaggctggcgggcgggcaggcatgcgagccggcgttctacttcctagaagcaccgctggggccaaaatggcgtctgcccacgaccctcaaaggaatgcagcgcgcaggcgccgcaacccgtcaaccggccaatgagaagacgcaacagcaatgacgccaggcacggccggaaaggagactcctgggaaaattgagctggaactcgggctttagttaaataccttcctcgggtggatcctggtctgacccccgtggtaataacgttatcattgattctttatcatttcctagattctgtgtccgtgccttgtttgaagagcttttgagatactcttccgaaaaatgaagacctgctcaaatgacttttccgtcattcagccaaaccactgtctttcccgtcaggcccagaggcgcctggttcccgcccgcagtaggcaagaaagcgggcgttgctcactgggacttgtagtatgacgcccgcgagctgtgatgcgttactaactggcgcgatccacagcgcctcctctcccggcgtcttcctctctttcattctaaacaacgatttaatttccttgttaagaagccatttagccaacagtaagaagtacacgtctttgcttccagaagggttcccctgatgaaacaccggaggaaggtgaagttgaactttacctgagccctgtgttcctggaaaacagcggtgattaagaaaccccctcatctatttgtgtttctggaacggcacactgtaaagaaccacccgtctccatgtgactcagataaaacgcgtgcagatgacccccttgtttgcctgtgacaaggccagagacctttcccctttattctgagcctgttaataaagccaaacagaccttccaaattcccgctgatgatatcgagtgattagttgagattagaactctcctccccccaacttgttagacacagagaacatttcctgttcacctgactgaaacttctcctgattgcaaaacaatcccaactgtcaatcatcccaccttcctccctataaaagtcaaaactacgctgccaagacactgatcatatctggagtgctctccctattgcaataggctgagtaaaatccatttccttacttgttcattttagtcttggacagagaggggaacattcttgcctttggatcggaggagggccagtagaggtttaagcaaagactccccaggaggtgtagacatgtagaaaaagagccttttgttactactgcagatatctgacccttcgttagccagtcagagtatgctggcagagcccaattataggctcctgaagaggacgtgggaagagaagaaaggggagaagtggtttctctctggaaattcccattttcctgcaagagagttcatggatattcctttccgaagtggtggaaacagcattgaatccaaattccttcttttcagctgtgggaatgacatcttctcaggcagtcttgagaatcaaaagaacaaagaattagcaatgcccgaaaccgaatcacttgatagaagatatcaaggctctaagccctcttctaaagagaaggtgagagtacacctgtgtaaatggagcaggattaatagatcaaaattccaggcggaggttcagtggaagagaaccttttagtttcaccagagatgtaagtccaacagtcaggaaagtggttgggttataaacaatgcaattgccggatgaaaattactgaattttagcgttaaaactaactgtactggtggtttggagaaaggatagaaacactctggacacacaacaatgttcttagctctagaagcctgcaaagaagcatcagatctaatttttgtactcagaaagccaacaatttagtgagacaggacaagtctttcaaatgaatacagagccttagttaaagcagtgtggttgtcagtgtaaacacagcttacggagagttcccagagctccttcctaccagctggctgtccctcctggatcctggtagagaaattctgtagtggcacagatgtgtctttctgagtcttggctgccttacattttcaggactgccatctccttacccatcacaccccaccccagtaca

SEQ ID NO: 3198 - DNA, 4001 bp, Homo sapiens
atagttacatggcgaaatgttaagcagctattaaaaatatttttcaaagaataatgatatgcgaatgtctgagttaaatgaaaataccatgtggtctcagttttaggaaaaatacacatatatgcagacagaaatatttaaagtacaaaatatttatagttttcttatttgcactcatctattttccaattactttataataataagatttaacaaaataatcgattgttatttgcaaaggcgcatcatgaaacaaaattaaaatgtaaatgttaaaagtcaatgtgagagaattggcctggattaagaagtttcacataaaaaattactccagacagtttgcgggagagaataatctatgtagattaaaaccatgaggaaatggttgcagacgctgacactgatctaagtaggtggaaactgagggagaaccaaagataatggttacaacagattttaaagatactcaaatatattctatttcatgattaattcattgtttatatttccccaacatgtgggcttttaaaaaattcacttttgttataaaaataacactacttggcaattggtagagattaggaatcacttttcctaatacaaggcatttcttctttcttacaatctcttaagacagagaccatattatgaaactttacaaaaacgaaacaagtttgacatcagagaggtgactaacccaaagaaatggctagttattaagaacgggaaaggcagagaccactcactgttaagcctctttctcaatactgaattatttttagagtcattttttcctagtcagaaattgccagttttgtctgcagtgctcacttcacttaggttttgtggctaacaaacctgccccatccagcaatatttaaaattattactgacccaaactcagatgaagttaagcaaactggctaaagacgaaggaagtttgtctcctaaacctcgccagaacatgaatgtcctgaagtttggggaatcaaaaacggaatgtgcttaccacagttcaaacaaaaaaacaaacaaaaacggactctcccagagtaagaaaacattacaagaacgtccatccagtgcctgccctcccgactgcaaagccagcctctttcctttcctgtggtttctgaaacggccaggataccgcctggtatttcttgctaccaaacaccacgcaatctgactttttccagcaagaccggtcccttcctcagcacaccggtgacacaaacttggaagcaccgtccctcaaaaatcccctagattctgctctatcccatctaactctaaagcccaaatctacgttttcctgaaagaaagtgtgaaataaataaaataggggtctcatcaaatccagtgggctccgcctcagagccgcctcaaaagagccgtcaccacacccccaatgggtgaggctcagccgatgaggcaagaggcgggtccaggaaaccacgtgttctgccttctgcgcacgcgccagccaaaacaaaagggaggtctgccaagccccaccccccacgtgaccggcgtccaggtccgcccccacccctccctagaccccttccctccccagctgccaaggctgttaggtttagccgtttaaatttggctgcggtcagacccccgccctagagcgcgatcccgtgccgagaccagagtccagcagcccagaggattcggggggcgaaggggctgccggtcggtcgcctgacccgcaagtccacccggcagtcttctcccctccccgcgctgccgccgtccccaagagggaagacccacccccgtcatcccgccgctgagacgccggccactcgcctgctggggcgccctggctcccctccgccgccgcaccttcggtccggccgtggtgggggctgctgaggtgatctctagctgcccgcccgcctcccccacccggggcgccgctgactcgtctccagagcgcgccccgctcccgccccggccgccgccgccgccgccgccgccgccgccgccgccgccgccgccgcggtttaacagtccgcccgctgcccgcagctccgtgcggctcggggggacggaaccctgccgcggtctgggagcagtgggcggggcccggcgctagccaatggcaacgggggaggggcagcgccatgcaaatgaagcgggtggcggggaaaccccggcagggggcggggcctgcagaagcggctcggagtgttctggaagtggcaggagcacgactcccttaactctggtgcagggtttacctcggctccctcgggacgggttccgtgcagctcctgcttcctcccttctctttcccagtgccatccctggcgagggggaaaaaaaaaaacacggccaggagacttcccacccctgctttgctatttttgtacctccgtgacagaaaaacaaaaccctgaggaaaagtcaggcgacttcattccctgccgtccgcgccggggcctcgactactgctggcgtccgcggctttcgcccgccgctccacaggcgagttttaagagatttctcacaattgtcaagtccgcaagtctccgtgcgtttgcttttatttgggccgtgcgttcaaatgcgctcataattctttctgaccctcagaggggccctgaagtaggtgacaaatttgccttggatccaactgggtggttttatgattaaaaaaaaaaaaacagacaaagcagttttaagtctctacaaatctggtttgagtggcgctggacctaactcccctctgcagtaacgctgtcaaataaacaaacggagtttatgtggagatagttggccagcgacacccaaaaacacttctgagcgtcttgcacctggccccgcgaaccgctcaccacaaaacaaacctgcacctgggcacttccccagccaagaactcgatttttttaaaactgaactctaaatgtagcttcttagatgttgtatcacagtctttcctaagcaccgaatttacacatgaaatgatttaaggaacgaagagcactaggctttttaagccagaaggataatagccattattttaaccttatcaattggataagatcccgggggcggaagaggggagaaatccaaggaattgcagtcataacaaagcgtaatccgtaacatagataactggaattggaaaattagctactcgttcctggttcttctagtagattgtgatattactgaaataatttttatgaccagctgcatttattggagctatatttttttaattactgaataattgcacctcgatatggggcaagggaagaattttaggaaattgatttactttcattgtaataaaaattgtaagctaatgatgtgttgtgaaaaataattaaatcagtaagtatttattggatatttaccatattcaaaggactgtcctagtccctggggacagaaatgcaaaaatgaataaagtattttttaaagttttgtttttttaattagcagtttgagacatctaataagcatgtgttaagatagatcaaaggaagattctggatttgagttggacgtttaaaagacttaagagagaggaggaaggcatcaatagttcaggagatagtgtccttgggtggtttgaggagatgttgtgtgaatatttggggggcagaaaagtacattgtcaactagattgagtaaatcttgaatgacaggaattcagattttaacctgaaggaactgtagagacatcaaatcatttaatggtagttttctcctgtgaaataattttttgctaccaaacaaaatatttatatatttgccaaatgtttattgaacacatgttttgtgatggctaatgaagatatattagtaaacaaattccctgtcctcatggagtttatagaggatgacaaagggattaagctttgtaactacacaaatagtgattcatacagcatttctacatatattatgtaatttgttcatcacatagccgtgggaggtaggctgtttccaatactctagattaatttttttttttt

SEQ ID NO: 3199 - DNA, 4001 bp, Homo sapiens
aatatcattagacataagaagggtttagattaacctatggatagcagctctgtaacaagggaagagaaaaagcaacgtcttgggaattggctcctaaccttcgtgtgtgaaaccaagaaaagcaaaatgcattactataaaaaggctattgttgccactgtcaagcaacccagagcactggactaatgtgataaaagagtcgtatcctgtgggtaatcttttaaaatcaacttttcagtctttttcttcaccagttaaataaccctctacgattttcccctttccacacgtcctactatctaagtggaataggttgtctgcttttcatttgcacgtcttgctttcctaactcttgttagctgtctcacagagatagccacattcaagcctgctatccttatgctgcttaagagatgcctgaatttaacatccaaatgcctcatacaatctcccccagtcaatcctgagaaaatcctctctaaattcccatctgatcactgcccagtgaggttaccagcagcccttagaagccccaactcacatggtactttcgtgctgccgccggggagtgacaaagagcatgcgggtggggcgggcactactggcatctgggtgggcactccaaggcttggcatagctatgatccagaaaaaccaggtccagctcccgttcatgcactgaaagctggaagagcagcgaggtgcccatgcgtcgagctgaagtctggaagtccctctccccaccccggtgggccatgtcagtggaggggcagaaagtcagagcatgggtatctgcatgctagtcacctgcagtgaaaagtttcagtttaggtcaattccaatatcctaaatttctcccaatctacaccatctaacatgcttacttttgtaacctactatcattcctattgagtatccatttcacggcagacctctggtggggacggttcgtggaatcccacaccaacaccaaaaaaaaagaaaaaaaaaactatggtgccacgagttgtcccatactcaacctctagcgaactgaaattacctaacgggagagctcaccgaccccaaggttcagaaagacctcgcgtggacagacagtaaacttgcttggccagcaccacttcctaggtgggcaggaagggttttgacaaacaggaaatcacaaatatgaattcgttgaaagctaaggatctctgttgcttcacaccatcctctaacgacaatgcgaagggagccggggccgcagctagagcgtgggcacccctaaagggcagggcaacgccggcctcaaaaaagcgaatcccagctagggctccacttcttcaagcctctcgtattgtgcgaaacaaaagttctgttaagtacttcgtaatattccagagttgtttacataaaaatgaaaactgcccccccaacaaagcctgtgacaaaatgatccccgtggaagccctttcaccctcacccccagtgaggcgtccctagcaaaccgcccaggaccccggctgccccgcaggcgttcccgccactgagcctccacacggcccatctaggagacagggctatgactcgcattttacagacgaagtcgccagctcggggaactgaagcgatttggccaaggtcatccagagttcgcgacgaggaggagccgcctggcccccgcctcccgcctcccgctccctggggcagggctcggcgtccgcgtcacggaggcccagacgcggcccctgccagcccgcccccggcccgacccgccccgcccgaccagcaccggcagccggccctagcccgggcccccgcatgccccgggagccctgaagccctcgccgagacccccggccgtcccaaccacggccgcgatccccacggcccgccactcccctcgaagccaacgctgctctcacccgcggtcttacggccgcgcgctcggccacggccggatccctaagcgcgtgcgcgttaacgcctccacgccccggcgctgcgggcaccgagtaaaacgcggaagcgggttacggcctgggaagggagaggcggtgagcggcaaagcccggaacggatgaagctccggcgcctctgtccggaagaggagagccaagaacacgcgagcatgtccgaagcagaaagtcaacaactaggctggagtttccccctcgcgcatattcagtagggaaagcgagggcggaggactaggctggcttctacggccccagttctcgccacccccaccgtgttggtcctttgtgccctctgggcggtcgagcacccaacggtccacctccaccagggcagccacctgaatttactcattaagaatttacctaatgtggctcacgcctgtaatcccagcgctttgggaggcctaggcgggaggacctcttgagctcaggagtttgagatgagcctggccaatatgatgagacccccgtatctacaaaaaattttagaaattaggtgtgtgtgatagtggtgtatgcctgtagtcccagctacccgggaggctgaggtgggaggatcacttgagtctgggaggtccaggctgcaatgagccatggttgcaccactgcactccagcctggacgacggagtgagactacgtctcaaaaaaaaaaaaaaagaattttgttactgaccctagattgttttgtgtggttaactttcctatgtgttttgtgtagagagagtagatcctcaaaatcagggacattaacctttgtatcctccagagaacatacacccagaacataggtaattgttcaaatgttgactgatcaataattggttatttggttgactgactgacaacatgacatcaagagacatgagacaagacagcaagagacatggttcaagatgataaatctcacccgggatctgtggctcatgcctataatcccagtactttgggaggccaaggtgggaagattgcttgagcccaagagttcaagactagcctgcacaaaacagtgagacttcgtttctatttaaaaaaagaaatggccgggtgcggtggctcacgcctgtaatcccagcactttgggaggctgaggagggtggatcacgagttcaggagtacaaaaccagcctggccaacatagcgaaatcctgtctctactaaaaatacaaaaattagccaggtgtggtggcgcatgcctgtaatcccggctactcgggaggctgaggtgggagaatctctcaaactcaggaggcagaggttgcggtgagccaaaatcgcgccattgcactccagcctgggcgacacagcaagactctgtctcaaaaaaaaaaaaaagataggtacagacatgcaaacactcgaaacattcagaaagccactcaaagctgtgttccacaaagatgagagggtaaactgagaagacggaaggcataggatcggggaagcagggtctaacacaagaagcagacgaggaattctgaaggtgatggcaaagagtatcccaggacaatagctatgctgcaggactggggaccactagtctcagctgggggagaagagaagaccaggagggagagccccggggaaaacaataaaactgggaaaatgcctcatagatttgaaaaaatcaaggaatgctatttaaaagtgctgtttagaaatatggagcttaaggccatagaaattatcacaaatagagcagcccctgccccacctctccctacccttaactttgtctcctgggcgcttgtttggggccagggttctgctatttctctacttatattcccattcccactaaaaacagatttgtatcttttctctgccccttcctttcctcagcacaccacgtttatcattttgtttcattctttgccaatttaagaggtgataaatggtatcttatcccatttatttgcttattaatgagttttttgttttgttttgtttttgtttttttgagacagagtctctctctgtcgcccaggctggagtgcagtagcgtgatctcggctcactgcaacctccacctccctggttcaagc

SEQ ID NO: 3200 - DNA, 4001 bp, Homo sapiens
ttgttttgtcttgaaggtggtcaatgtacacaggactacagtttaagataaactttaatatcccaaattgaaaactgattataactttaattacgagttcttaaaattacagagataaggatacatttcgattaagcagacgaagtggggaaaagaggcatagcttcctacttctgtgtccctttcaatgaggctaggtacctcattatttcaaaatgcccaacacttgaacactgtaagtactcaacaaatgctttgcgaagaaaatatagtatatttcatattagttttgtaacttttaaaatacagaatcgttgaacacagaatgttgagtcaatttcaacgtcgcaattagtaatgcgaattttgaaacttgttctaaatacaattttaatcaatctgagtttttcagccttgaaattctaaggtccgtatttcccaaagaatatccttcccatagtgctaagcacacactaaactgactcactaaactttctccactcctacatcacctatacaggattttaaaatccggagtacacaaactttcaagccacttctacaatcttgtattaaccttagcaggacaaacttttcgccaagactcttaacactttttatccaaaaacctgtagtagtgaaacaaagaaaacacaaccccctcctccttttctaaaccatatggcaataaattaaagttaacttatttcttaccagctcaaagcctatacatcgaccctaaacatttgtctctttgtgccctgggactgggcttagagctgtctgcttatttgcaactgtactccaatcgtgttttaaaatggcaaaacaaggtccaaaacgacccccgaccatgaacagacctcaccatcgtcattttccaaaacctggtctggtaggcagcacatgccggcgagggcaccagggccgcggggagcgagccctgctccgcctgggtgactgagcagggagtttgcttgctgcggcggggtcggatccaccccgggaacttggttacccgagcccagggacgcgccgaggcctagccgcgaggccggggcgggctccaggcggcgagggcttcccgtcccttggccgcagagccttcccgccagccccgcggtcgcccgcaggcggggacactcgccgtcgtctcccggcgaccggacgcgcctgccgggtcccgggccggctcttttgcctcctgctgccgcccgcggcccggctctgcgaccacaccgggctcttccggggcggcgggagcgctaggccgcgctggggcccgcggctcctgaaccggccgggcgggccttggcgtccggtatcagtcccgaaggccgagctcccgccggtaacgggccccgccgcctcccctccccctccgccccatgacagtgcaaaccctccggccgcccgggccgccccgcctccagcaccaggcccagctaagggccgcggccgtggcggcagcggcgccgcggctctccgccctcgctcgctcgctcccgggtccagcgcctcgggcccggctcgggctcggccaaagtctccgccgcttcccggccgccctccgccgcgcccggcccgggcggggtaggccgaggcccgggaggtgcgggtgggggcgggggctcctctcaccttcatgtcgggacatcctagttcagacggtggcggcgcggcccctcccgggctccggctgcagtgtcccccgcggggtcccggcgctgcccgcgccggccggccgactcccactcgactcccgggctcggccgcgggggcggggtgggcaggggagcgctcccgcggcggcggcggcggcggcggcggggaggcggcgcggggcgggaatggggccgggcctggtcggggctgagctcctccaggaggcgggtccgacgccgcagctccgccggcgcccgccgtgactccggtcactctcgggcctgccggctcccggcagcggcgcggcgctccgcaaatcccgctcctcccctcccccggcccaccccccgcccctctcccccggctcccggccgccgcctcctcctcctcctcttcctcctcctccgcctccttccgccgcccgcacgccagccccgcctctcgctgccctcgccgggcccagccgcccggaggccccgcggccggcggtcgcgacgggggcgacgcggcgacggcggctcggggcgcggcgcttgcccgcgctagccagcaggccgcgatcgggcgcccgtgcccagcctcggcctggccgccgccgccgccgccgcgccgcgcgtagggaggaagaggaaatgcccggcgccggctcccgctgctcaccggcgcggcccgaggggcgcccgcccgccacgccgcccctagccccgcctggggcgggcctaggccgggctataggggccagggccttgggctgcgccggccgcgggaggtgggtgcttctcggcggcgagctgcgactcggagagactcctgtccgcaggtgcatggcttccgggcgggcctcgggcagcgagctccagccccactgagaggccgcggaccgcctggggacttgtgtttgtgtgtattttaagccaacagcccagaaagggaaggcgactggcccccggtcttcgccagtgtttcccggccgggttactggtggtcaggagggaagccaggaggctgccgggctccgaggccgattccttgcgaaccatctccgttaaagactccgcgccgggcagcccgggagtccggcggtacccgcgcaaactttgtcccagcgccttggctcaccgtgaatgccctgccttgaaaatttggagttttttgtttcctgaaagtggtctgcttttccgattttatctgtgttttccatttttaccttcttattgtcaatttgttttcaggcattattaattcaacaaatctttgtactgccccttaccacgtgtcgatggttccgtggtttggtggaaatagatcgcgctttgaagtcaagacggatcggccatggaattttggctctgagatcctctgtgtaaccgtggatgagctacaaggcctgctgagcctccatttgtctggtttttgtggttgttttaatttatctttttccatttgaagttgtgggttttgcataaaattgaactgttaccaggctaagtcaactgaaattggaatctggggtactgcttgctttgaggttactcttatactgtccaccatttgctggctgtgtgatctctaaacctctctgtgccctgacttttctatctttaaaatggacgtaacaacagaggtttaataataagaggtttggaggttaagtgctaaaatgcatataaaatacctagcacaggacacagtaaaaagattgttaccgtatttcattgaatctggttttaagacacttcctgatttcaaagaaactaaaagctcatcttgaagtccaggaagtaggttttgggtcactcagaactcccaagggactgtatttggtagtaactagtgataaacaaactggagtttaaatgaggactttgtcaccagagatatttttattgcctgtatggagctcctgcacaaatttattccatttctcttgtagaaagagatccaacctggccgtaaatggggtgtggtggagtagaaagaagggtattaagtaaagctctgtgtcgatgcctttctgagcattttacggtgttggcatatgtgatcctgggtatcaggagcctcaatttcttgggctgtaaaaatggggagaacaacgctgatcccattgtctcctgatgggtaagtgatgtctataaataaattgtatagagattaaggcattatcagtgctgtagtctgataaaatggtggagcagataggaaagcctacaacagtactgaactgcaggagggactaagagtaaatatagagatttcatttgcttggttttgcagagggttagctaactaaacagataactttgttttcgacagttacttcatttttttcagtc

SEQ ID NO: 3201 - DNA, 4001 bp, Homo sapiens
aagttacttttttttcttatagtgtgcaaatgggctgggttcagatctccagctttctcccatcaaaaatccccctctaatccaaaagaagcttgtaacccactgtgaaggaatgccacaggtacacagtagagatacttacagccaatcagatctagaaggacaaagctctaggcaaaatagcaaatcacaactagtctctcagcgtgtcctaagcattcggcagccctgggaacaggcagaccctgcaggagctacccagggcatccagtgagaaaatggcaaacatatcatcccgccaaattctgatcagaaccccaacacccaggccccaaagtcagtgtacgcgctgcgcatctccgcggctttttcagtggtgggtgcaaaccacaggcacctcccggactccttggaggtgctggttccggctgagcctagtcccccaccccaccccgaatcaggggtttaccaagggtctcttcaaagtggcagccgcactgtgaaagtgaaaccagacacttgaaaactgtctttcctctctctaaggttgctggctgatggagccaccggcaggggtcccgggggtgctaggaattctgatggatgttctccgaggacccttcgctgctctcgttgaggggcgtctccgaggtctcctccagctcatcgtctgccccctcctcctgaatggtgaggtgcacgtccggggaggaggactcggagctcacgctgtccccttccatggaacagagggtgcaggacagcgcgggcgccacgctctcctgcagcatgttcagcatcaggggcacctgcaccgacctcaggcccgacaccacaggcagcggcttcatggcctccccccagagccgctcctcgtctttgtacagcagcaggaggctggacttcttctcccgcctcttggatttcatgtagcccagcatgattccgatcaagaaaatgccgtagaaggacatgacaaccagaatgtagaagtactcgttgccattgccgctgccgccgccggccgcacgggactccagggggctgctggaggcggcggtgccggggtgcgtgctgttcagaggctccattttcagcattgaggctgcctccacagcaggggctggggaaaaagccgcaggttagaactctcccccaggtcctgggcacagggaggtgggggagcacgaggtttgtggaactgcaataccaaaaaagcttaaaagtgcatgaaagaaatagcataagagggttcgccaaacagctgacaagagtgagctatgagggcttggagtgcacgggagagaagcccgggaaggttcactgggaaaagtaagaaggacttttttttttttttttagtgtacacatttgtcctgtttgtagtgagcagtattactttgattaaaaaaaaaatcaatgtaagacaggagcatacagtaaatagtatctttaaaactgggaaacgtattttaactgagcagaaacaaagtttacattgtgtttccaaaaccaaactattttaaattcaaaacaatgtttccttagaacaaagaaaagcaggaagaaaataaaggaaaaaaattcatctattaattggcaaaaatgtccctctttcaaatgtttctgaaagcaaagtgtagccttgctgacttaccaaggctgacagtttgtcccaagttttgaattcccaaatcgtccagtccaagagggttcttctgctctgtccggctctgcgctctgacaactccgctgctgcagttgggatatatagtcaagaagtgcatcgtcacgtgctctgggaggaaaatttacaacagagattgatcgtggcagagtgagcagtgaactgaaagcactgcagttcaactccctgaactttgcagctgtgaaaagtgaaaaagactgggaagtgggaactgctcctcaagccccagcacccggccagggttttcaggtagcggtgacgatgagtgaaaagaggagaaagggatgtgctgtgctggaaccgttaccccaaagtccgcgctcactgaaaattagctcatgcttcgcgcggctcctggggaataaccattattgggctacaggttttcagaggcagctgaatcccataatctggatgaaagacagttggaagcaagtgcgggatttacagtcaaggaactggggcttcggtttcagttcttccactccttatgcaaataagataaatccttccttaacctctccgcacctcacattcctcgtctgtaaaatcgttgtgcctggcgggggggggggtcttctgcaggtaggattatataaaccacgtgaccttttgagaccctttcagcttaacccttctaagattgaaggctgcctggtgttgcttagccctctaaaagcagagattctagctgccttccacatcaaggtcacaaacctatgtttataataatttttttttaaaagctcccacattcttttcagtggtctgcattaagtggaaacatgttgtcgtaaaagatactatgggcaggttttgttccgtcctgccatacacagctgctcctctgaagcctcatgcggaggctattgacacgtctctttgctgtctctcgtaggtcaggggaggagcaggactatttcagagtgcaactaagcacagttcaagttttttaaacctcggtagaccctgtgtttaaatggctgctgtgatcaaaattggaagaggaattgcaggctttaatgtcagtctctctgctccctgggctgcttattctgaggctttcatgctaagtggaaggaaactgggagagatccactccctccagttgtctgtggcctgtggattgcagccagactgtcttgtgggccaactctaaaggaaacatctctcatggttctgctgtagtcaaactgacgcatgcgacatccacctgacctgcttgaacatatatagcttaggcactggaattttcactgctgctacaggaacccccctgggtttgcacctgatcctgattctaagaagacacctggaggaagaataggaagatgaactgaatgctgccatttttcccacttgactactcacctgtgttcatccataaatccccagctggcactggaggtaccaaccatcgaccactccagcatcacgatcatccatacagtggaactgtgctcacaccagtaaagataccctcaccattgtgttaatacgtaaaaccctccatagctacctcagccatggtagacttggtcttttcaacaggtgtccatcataaacactagaacacttccatctatatctaagcctacactggaatgtctgggacactagaacaagatgggcccaagaaagagatgcctgttgattgttgaccctggtattttttattgtataccttaggacatacgagattggtcatcatccagggattgtccaacaccaaagactggaagctttgagtaggcagaaaggaggtggggataggagttaccagattcaaggagcaggaagtacaaagcctggtgccaggaagccaaacagaggctgaagttttaaacataataaatccccaaacctgagccaacagtcccaagggaatacaaccaagaaaagagatgagtgtggggaaacatcgagaatgaattccaaaggacgaagcaagtcagagccaaaggaaaagcaggactaattgcaggagtcagggaaggaacagcccagaagaaattctggggtgcctgcttggagtccctgctgccccgattcccacatacttcctgcatggatatttctactagagttaaacgaggccaactgcagtgtcttagttcagtaatcccaatgcttgaagaggctgaggtggatgaatcacttgaacccaggtgtttgagaccagcgtgggcaacacagtgagaccccatctctacaaaaaaatacaaaaattaactaggcctggtggcgagtgcctgtagtcccagctacttgggaggctggggtgggaggatcac

SEQ ID NO: 3202 - DNA, 4001 bp, Homo sapiens
ccatctctgcctgaggggccctcctgtcacttgcaactctggagccgggtcctgtggtgcttctcctcggtcaggagggggatgaaggtgtcgctgtgggagagcttcagccggctgctgcagctcggcgcctccttccccgcaggctctggagggaggttgtccaggtcactgcgggagcccccggtcttgccctcgcccccgctgctggagttgagttccatcagctccagctcgtgcttggccgcggtctccaggacgcgctgcttgttgtagtacctgacaaagttgttgatgatggggtggatgggcagggcgatggcgatgacaccacacaagaagctgatggccgcgttgagcttgcccagcgtggtcttggggtagatgtcgccgtagccgacggtggtcatggtgatgatggcccaccagaaggactgggggatgctcttaaacagggtctctggatggctctgctccatggtgtagcccagggcagagaagacgaagatacccactgccaggtacatgagcagcagccccagttccttgaagctgcgcttgagggcataggtgagggtctgcaggcccgaggagtggcgggccagcttgaagatgcgcgcgatgcgcatgatccgcagcgcctgcacggcctgctgcacgttggtcagctccatcatgcgggcacccaggtgcgtgagcgtgaggctcacgtagaaggggaggatggccagcacgtccacaatgttcatgaaggacagcgcgaagtgcagcttgttgggtgacgagaagaggcgcagcaggtactccagggtgaaccagccaatgcacgccgtctccacgttctccagcgtcgggtgctccacgcggttgccctcggcgtccagcacctgcagctcggggatggtgcccatgcacatgaccacggacgagacgaggatgagcaggaaggagagcacggccaccacccgcgccgggcacgacgactcgggcttctccaggaacttccagacgcacttctggcagcggcgccagcggccctcggctgcgtccacgcccaggtcgtccaggatgagctgcacgcggcgcgcgatctcctccagctcctcgcgcttctcgctcaggtggctcttgcaacagtcgtccaggaacttgaggtccaccttccagaagtccatctcgttcttgaagcagatggggcagatgcccttcttcatgtggacctccccgaaatagtacacctcgatgacacacttgaaggcgtccgggtccctgtcaaagtagaactcgcgcttgccggggtcgtagtcgtcgcacagggagaagatggtgtcgtagcccccagccaagcagttgatgagctccgccagccgggtctcagggtactgactgaggaggtccccgtacagcacctgccgcacgccccccacgttgacgactatctctatgtcgtcgctggcagcggagctctggctgcccggctccgggaggctgcgctccccggacccgtccatcctccccgcgcgcgccctcgcagcctccgccccgcgccccctgcagccgccgccgccgctgccgctgggggtccggcgggtgccacccgtgcgctgatctcggggagagcctggccggcgcccgcctgcggggaagggcggtcacagcgggcagcagcctgcgggggcgcgccgcgggggaggcatgcacccggcggcggggctcggggctggcatccgggcgcccgggcgagcccgcgggggctttggcggccgccggcctcgcccggggcactcaccccggctggctggcggcgcgctccgccgcttcagctcggcctcctgcgggagcggggtctcctcgtgggcggctggcaccgtcctccgccccggggcgcgcaggcagcggcggcaggtcccggagctggcggacccacgccgtccgcgaggtgctcgaggtgtgcagagagcgaacttgggctggctttgcccgagccttttctaaacacaataggaattccagcctgacgtcaggagcttttcaaactgtaccctcttctggtgaaattctgcaaggcacgcgcggcagctgcaggggacggattaacccttgggcagacgggcacagctgccgcgcccgccgccaccaccgcgcaccgccggcccctcctcgggcgcagcgggtcaccgaggggttgcgacctggcttgaagcggcaggcattctctctcactgctgtttggagaggattagtggggagagaatgctgccgcctgttgctgggcaggaaaatgtgctccaggaagccccttagaaggtgactcctatgtctgggtccctcctccggccttagacccgcgccggcttttcctggtgggaggaaaatcctgcctgatccttgaagcgtttcctgccccatccccccgacccagcaatgccctgctgtgttggtggcactgtctcaccttccccgcaacgctgtacaaggaggacatctagtccagcctcctgtagaagggaagggacttgcccaaggtcacgcggcggaatgagagcagagctcagcttgaccgcctcctgatcccgagctttccggctgtcccagctgaccgacgcctgctgttcagcagatttcaattctgccttgaagtccctgccgtctggcacctcctatctctctgcagtcccacaccaaggccactagcttccagacccctagggtccagtggctcctgcttccccgttcctcactccttgaccaaggcctgtctcttcctgaccagtgtcccacaccctcctctcttccagcctttgcagccacagctgtccttctgtcctcactcacctgaaccactacagcagcttcctaacagtgtctctctcctccggttcaccactatcatcaatactgcaaattactgatatcatctatggcctcgagatcgtgttaaaaatattctggagggaagaatgaataggcagagcagaggatttttagggcagtgaaacgtaccataatggcggatatgtgtcgttatgcaatggtcaaaatccatagaatgttcaccaccaggagcgaatgttaatgcaaactcggtgctgggcgatgatgacgtgtccatgtggggtggtccaccatgacaagtgtcccaccctgtgtgagatgttgatgcgcaggggagagctgtggagacagggggcatgtgggaattctctgtactttctgttgaattgtgctctaaaatataaagtctatttaaaaatgtattctgtaggctgggttttttaaaacttaaggacatgtccgttaatggattatgaaatcaatttactgggtcactgacagtattcttttttctttaatgagttagcataaaacagaatatattagaatacatcacatgaagtattatttagtgaaacttcgttttacaaattttacttcatttccatttagcatcagacaatgacatgctactacagagtaggaaatcgaggctcagaaaggttgagtaataataagagttgccacttattctccatgggcatcggagtgcagtctctgagtgctttgcatttttgtcatttaatttcccagcaacccctaaggaaacaagatgtcaggtaacctgccgagatcactctgtggagctgggatttaaccattgtcctgctgggttctgaggcctattcttctccccagtacagtgctacacaccacctcctacacacaccccagcttcctcttccaatccttatgcatgctactccccttatcagctgtccgagtacctgcagggttaagttcaaattgcatcctagtctgagcttaatgggcttctaaatacccattcattcactcagttattcaaatatttatcgagctcttatggcacatgtgtgcaaatgcacacacacacacatacacacaccaccctaggtgtggggacagggttcatattctagtagataatatgttttttgtaaataataattaacagtttggggtaa

SEQ ID NO: 3203 - DNA, 4001 bp, Homo sapiens
atttacccaaatactgttttctggatttaggacagtttagatttttctttgttctcaaggtaatggttttttcccttcccatatcatagaccctctgaaagtcgcagtgtgaatctttgctaccaaacggtggacaagaggtttgctaactccatactttgtaggaaaagggggaagaaaagggcacagacatccattatttagagtctatcgataaattaacctgctttataatataacgattccattacagcacatagtatgccgggggcagagtgtatagaatgtgtggagagtgcacatttcaccataacaagaatccatctttccaaacactaccaaaaattggcaaataattcaaactgcgcttagttcaaggcttaattgttgaaccctaacaataaaagttcagaaaaatgtaattagcaggttgctctctgcgcaaaagtaaactacaaagaggggacatttgtctatctctacacgcccctccccatgcctgaggatttcgccctcaagaggtgcgtctagtgtaagggccagaccccgctggtgccccggacaacggggtaggagtggggaccgaccggtcccgtagttggccgcgcctgggcctcgctgggcgcgcaccccgctggctcggtcgcccggaggcggacaggacggagacgggacgtatggacgggacggacagacgcgacaggacggacgggacgggtagagaagcagtgcgtcctacccggagggctccctcccagggccggcggagtacctgctccggtcatccaggctgcggttgtcggcggctgcgttgcgccagtcgggcaacgtgctggcgcacagcaccaccatggacacgatcacgaacaccaccgacacgctagccaggatctgcgcggccagcgacgacgtgggctcctcgaaggtccgccgcatgcgctccagccagcgcctggagggagccgcctcggccccgccggggcgcgcctcgtcgcggcccagcacgcccggctcgtcggccgagtagaaggtgtaggtgtcggacatgcggtcgtcgaggcggcgctggcagcagtactcgaggtgcgcgccctccaggccccagtagatcatctcgttgtagaaggagagctcgcacatccgcggcgcgaagcgcagcttgccgtggccgcgcacgtagagcaggatgaagccgaaggcctccgagtgccggtcgaagaagtactcgttgcgctcgcggtcgtagtcgtcgcacacctcgagcacgtcgcgctcggagcggcagccgtgcagccggctcacgcggcgcagcgggaagtccttcagcagctcccgggacagcgaataccgggcgccgcccacgttcagcaccaccgaggccgccccgctgcgcccgaaggtcatggctggccgcccgggggactttcggcccgagggccccgctgcagccccccaccccaagccgccacgcggggcctgcctgcccgtggctgacgggggagcgcgccgtcggggcccgcgctccctcggggctccgctcctgccctccgctggcccgggggtccctgggctcgagtatctccggcgctgctagtagcgcgccctccgcccggcggtacctgcgggtggccggggagtcctcgccggcgccagcgctgagccccaccggctgggaacgcggctgtgtccgcgccgccgaccctcgcgcccgagggctgcgcacaccgaggccgcggtgccctctcccaagccgcggggccgaccccctgagggctgcgggcgccgaatggagccgccggggcggaatagctccccgtctccggcgctccctgcggccgcgaatccggcggccgccccgccgccgtccagaggcgagaggcaaagtgagcgggttcggaggcggcgaagagccggctcgcggcggcgggggcggggcctctgtgcagtcctcctcctcgcccgccggctccgcgcgcgccgctcacctccctccgcgccgccctccgcttcccgcccgcgcccgcacctccccggcttgctcgggctgggattcccgggcgccccgccctggacctcgggctccccgcctcgtgacgccgtcctccccctccgctccggcccgtagtggcggggaggggtccgcagggcgggggagcggggagcccagcgccgggatgcctgctcccgcgtcctgccctgggccatcgggatgaattgggcagtccccagggccccttttaacagccctggttcaaagcccagtgtggactcgggtgcggggacagacggcgtttggagagctttttccagaaactgtccggagcccagctcgggttctgacatcgcccctaaggatttctcagggaaggcatcccagccacggcttttcctgccgactttgctcttcctaccgccgcgcggggcgacccacgtaccgcgtgctcagagggcggctacacgccccatcccccagcctcggtgccgcctgccagcccgcggagggaagcggtccccgacccggccccggcccccacgttctggggcgcgagtcctgagaaggcgcctaacgtgtagcgcgcctggaccctctcgagatgctgcccttagagtgggatgaaagtctggggaggaacgccttgtcaccggcaaaaacagcctttctcttggtcttcgtctgcatcctccttttcaaaatatcttgatttcccccgcgcacccctgacccggctgcagcaccggccctccgagcgggaagagccccgtgaaggctccgcagagcgatctaccccgcgctcttgtccgtgcccagaaagcgggttccacttggcagggattattttaaactgctaccagcaattcattcacctgacacccgacaccggcagcccagcccgccggaggcgagacaggtgagttgtaaggcgaaccgtgttagatgcaaaacaaatactagaagaaaaaaataagggtggggtagggtgagatgcggtcatctgaccacagggtaacctggctggttaaagggaagagtttttcattgccctctacttttcgtaattttgtaggattgtccggtgcccgctagaggtcgccaaacggagtccttttgcgctggttcttaagtggattcctagtgaaaaggcagacaactgaaaatgtgagtgctgtcttttaagtaaaatcactctcggtggcttcttaaagaatgaaaatctctgtgagttgtttatccccagacttggataatttatcttaagagcactaaatgtgattaaaagctcaaaaacaggagttatttgctactttagtatctactaaatagtttgctattcagtatctattttgctatttagtgtctactgggtagatactgctactttgctgtttagtatctactaagtagatattaaacaagaaaaatatctgtaagaaagtgagtttcaagacagaattggaggtgctgatggccatgagttggcacagagaaagggcaaaacattcctagtagcaaaatctcgaatgtggaggtttaaagtctgtgaagaagtataatgcacttgcccactgaaacaatggggatctcaactgcagcatttaaattggatcccataagcaatggaatccctggaggtttccatagcagaaatggcttgatgaaagctttatttcaggaagatgcctttgcactttgggtcattctaaggagaaggtcatttcgcaacccaggaatgggatccccaaccccgtgtctgtgaagatgaagaagggtctgttctgagaaacgctgagaccaagaactttgcaggtcttgaagatggatttgttgtaggacgtgaggatggggaaaagtttgcagatgtgagccagagatgagcctggcttgataccaagagccaattcatcaggaagccgttaaaaaatactttctagaagcatcacaagcaatagaagacagaactatagtgccgattgtttgctctaacattattgtagggtttatt

SEQ ID NO: 3204 - DNA, 4001 bp, Homo sapiens
tgcaatgataaattttttatctgtaataagaagacagtatggcatctttgaaaaagcttccacaatattctccgtaacactgaagcaatttgttgcataataagagctctgaaatgcaggtgcctccccaaattactaatctctccagcccttatgaaaaaagaaaacacaagaaaccccacaaactttaaatgtgagattaatgatcctaagtaattttaacagaaagtattaagaaaccactcttaaaattgcaagaatagaatttcccaaatagactagttctcaagccctgcaactgcgggggttcctagtggacactcagacaagcagctgcccattgatattttcagaatgtcatttaattgtaatgtaaatattttcaaagtcaaacagtgaaacattctgtagttgtcagatttctcatttcaaccttggccctttgaatacaactttctcaaagtagttattattctttggcttctccctatctctcttaggcatgttacacacatcatgttaaaaacaaaggcaactagctttagtaatgaaactacttcatatttaatagcaattcaacaaggcaaagattcacattttcataatatatatttcccaaaagaaaaatatttacacacacacagtaaatatcatgacaacctttttacttttactttgggagatccttgaagttttctgtagtagcaggaattcttaatataaagagcttattaatttacatcacagattgtatttactatttccacatagattgtgaagcaggatatacaagtttagtttgtacgcaaggtaccagatcctcacatcactaaatgcagtgctgaaataaccgcaaaatatatggcatacaaatgtattaatatagttttaagaaaagaccgaagataagttaacaaatacaggattttaaattaatatatttatatagcaacaatttattccctatatttagtccacatgagaacattaaatttctgtgcattcagtctttgtgggatttacttattacacttcaatttttaaatttctagatggaaattttaaggggataataaaagaatagaaatattattttgaataatgagccatttgcatcgggaaccagcacagatgagatactgcttttccaaattaccctgcttaggatatatttgcattgattcaatacaaaatttagcttctataaattaatagcaagcaagcatccgtgtcataccactgctttgcagtttaaccaaggtaaaatatagtttgcatagtcatttacatcgctactaccatttacattctcttgttcgaatagtatggtctgctctgcttccgactttcagaaagtctacagtaaaacagcctcaaaatataaacccatgttatcctagcacgttccctttaagatagtagaatagtaggaaattaagtagcaaggcagataatggagcagtggtagaggaggatcaaattgcctcctataatggagaccgtaatctaaaatgtaaatcaaaattaatatcagaagaacactcccgctgccattcgaacctcctggctcggtttcacagcctcttaagttgacagagcctggagttgccggtctccccaccttggaagcggtggacgccaagtgcactaacaaggcagaaagcgagggcgagagaagagaacaaacgaacttactttgcccttcaaatttccgaatgatggtccccagaaatgtattttgtggtgccacatgccccctgcgcacaggcatgttggccccggtcttccgaggagcgctcccccggagctctggagttctcccgggatctctcctcggctagagcccaggccagcgcgcgagccgctctttgtggcagagcatcctcttttgaaaccagaattctcttcccattagcaccacttctagacacccgctttccccaccggagtccaatccattcccctcaccttccggagggggcctcgcaccggactgccgcgggtgagagggtttgggggtggggaacgggaaggaggcggggtgaggggaggtggcgggggagggaaagagggagggagctgtgggggtggggtgggaagggggcggggagtcacaagggcaatcgatctgtttctcttctcccaaacagcgccaatttcccagtgcaaatgggcttaacctggcggttgcccagagcagtaaggaatggctgaggggggatggaagacttgtgccggttttgctggaaggagagagagaaaaggaggctgggggtcggcggggttgacgtttctatccccgccctctccccctaacacacacacacacacacacacacacacacacacacacacacacacacacacacacgctctctttatcttggtagcttgggcgccgccacagctcggattactcaagcgtgctttagcggaagccagccaagaaatctccaaaactcagtgacaaacagctactctgggaaggtgatctctacggccaccggccacagggctccgtccctgagctcctcacgccgcagtagctaaagcacccttagctgcaaggaaaacacaggtgggaaaacagtttcttaatgaggaatatttgtaagctctgttggcgctcagcaggttgaagattgacaatgaaccacctaagggtgcagatttagcctcagggtgcagctcggatccctgggttcagcggaggtgggtgccgaagcccgaactgaattggcacgcaggtccctgcccagcgctgagccgcgcctcgggaaagactgaaagctgcccgtgccgctgagcatgcccagtttctgcctgagtccctggagggttgcaagattgggggttgatttggtctccaggtgccgtaggctgcgaggaagatgagacggccaaagatgagaaggccaaagattgcgagcgactagtacaaaagaaggaaagagtttgaaataggtgaggctgagcgccagggggaaggaacaaaaggtgggtggggctaagagttaccagccttggctgtgacctccgatgccactcatctccggaacacactagccacattctgctctcctccaccatctctaaggagccatctcatataggatagaaaagggttcaaggggcggaatagagtcctcttccttctcgcttctcaaaggctgccagcgtgggaatctcagggtatacagacacttctgttcaaatagtcctcctggagacttaggaaaataaatgtgacaagctgtgccaggaaagcgtgtttttgaagctgtttttctagtttttcttggttcttttcccttcatttttgttatcttccccccacccacccccttgaacctaatagcccctctccacgcccctttctctaaatggaatttgctaagatttcaatctactcaagcagaacacagatgaatctctcatttcctgctggagataaaggtccagagattcctgtcaacacatgcagttgcatgatagaatttgggggggttcttgcagctcattagcctgctatgcctgtgccttgagtcagctgggttcttattttctcagttacagcttcaaatctgaagtgaaataatgagagtagaactgagaagggctgagaagcagggttagtttaggaaggtgaatcaggtgggttgcaataaccaggaagtaagcataacaacttttatgttccaaaaccacaaccccccaaatctaaacaaaatcaagaaccgaagtaattcttcctctttaatatcagagtaatgaaaatgaatcaaacggaagacgttcctaggaatgttgaattttatggctaataaggtttactttaaaagtaagcagccaatgaaaacctctaggctcttctagtagcttgagcttccctgagtctttacggttgcctctgtgggaatataaaaagccatacatcgctagtgtatggttttattttcttctgaaaaaatatataagtagatcattctgtcatactgttc

SEQ ID NO: 3205 - DNA, 4001 bp, Homo sapiens
attgctaatatccctgataagcacggctcacaaagcctgcacatttattatccatgcaagccccactgactggttcaagcctgccacagccctagggagcaggaattcttatcagccccactttacagatggtgaactgaggcttcgactgtttaagggatttttacagccagtttatgaaggtgacaggatctcagcacaggcctggctgactctgaggctctgagctcccccaactggatcaagaccccagaactccaggggtatgagtgggcacatacccacagaaaacggagcctcatgggagcctgaatggggtttttggcaggtggaataaaccatctgtcatcttgtgcatactgtccaccttgcaaagaaacctcctcagaaatcacaaaggcaaacctcacactgcccccgactgtgggtgaacccgctgttaggaaggtctgaggtactaagtgaagtgaggctggctgttgctcctggccactggaggccccgaggatcagggaagagcaatggagagatcacagcttccctgtgcaccagccaccccccacgcccaccccaggctccagatggggaaagaaaatggggcaaggggacaggggatggcaatccctgcaggaggcacggtcctctgaggcacagcagcacaggacgctcacccctccacactctgccccaatcccagcacctgtatgtcccacgaagttccctgtcacagattcctcctgccagggccagcatccggccgagcgaaggcccagcctgggccactttctcccccatctccaatccaaagctcctggtggcacccctctgaaccacttggagcaagcccgttctctctgggcctcatacactcaccaagagagaaggtgtggcagagcccagtggcttctgaggggcatgtggctgtggactttgggaaaagggccagccctggacatcgaaggtagaatggagggaagccttgcttcctgccccttcccgcactcagcagcccttcgcaggaacttggggcacttccccatgcccgaggggctgctgggcagctcccaggcaggggcaagctcgctctctctcattctcaggcctctgggtctcagtactgagagttggagcccggcaaggtcagcagagtgctggggcaggcaggatgcccatgtcctcggagagggcaacagggacgagaacaggacgagctagccccttccccacggccagaggtgcagggcctctttgaacaggggaaaagctacatccctggcttcagggtccccttcagaaccaggtgtaccatggaagggccccagggggccgtcagtgtctgatccaagtgtgggtctgtctcctcagttaatattttattgagacagaaatgtggcgcctgcgggtttggttactgatcccatgggcttgaaccttgcttggggaggggtaactggataccaggtgcggggcgaaaggggaggccccatcacagggcagaggcctcaaatctctccccaccgccggctgccaggtgccctgggctgagggtccttcctgtcatctgcaccctgcgccacctcccgctacagggcgacccaagccggtgtgctcaccaggggcgcccggactgcaggcctaggatggcaggagctgtccgctcaaggtgtcaccaggcgcctcactcacacccagcccaagcgctgcggcttcgtcccctctggggcttcctgggactacgtctccttagtcccaggcccaaccctccggagccgggagggggcggcggcccaggccgctcctcgccagaccagtgcaccccggcgtgcgggtactggtccctccctccagaccactggtctgcggcggaggcggcgaaggggcaagtggccacgcgttaccttccatggatatgggctccaggatgccgaactgcttgaggacggcgatgaacagcagcaccaccacggccatggcgcacagctccatgccctggatgcccatggcaagccgggctgcctggggccctggggcccgggcgcacccctcgcccacgcgctgcctcggaggcaccggggcccctgcagcccgcacggcctctcgggggcggcgacggctcacatgcccccggcaggcggggctgctgggttggctgggccggggccccgtggagggcggcggcggcggcgagcgggtcaggccggaggctggacgcggggaccggacgcggcggccgagcccgagcgcaactttccgagtcagccggcaaacttcgaggcgcggcggcggcggcggcgcgaaacgcagcgcggacggccagcgcgggccagcggcgcctccatgcccggcgcgggcgctgcgcctctgtcgccccctctccagccccgcgggcgccggggcgcgggggcgcggcggcggcggcgcggcggcgggggtcccgggcgctcccggccgccccagcctccatcgccgctccccgcgcgctcattggcctaggcgcggcggccactccgggaggcgtccctgcggcccccccgcgcctgcccgggaagggcggagggagccggccccgccccgcccggcacgggccagcccaggacggagtctggcgcgtcgccaccgctgctccgccagcccctggaggccgcgcggtcggcggtttctcccacgcgcaggatgggggccgaggggctggggaggggccgggagcccgagaggagggggcggcggctgcgctctcccggggaggcgctgatcccggcccgccccgcgccgctggcccgcgcggagtcggcggcgggggatccgggaagccctcactccccggcgcatttcccgcaaccccggtcctccgccggagattaaactgggcccaggctggccccctttgaaaatgcagaagttggtctccaaagttctcccgttctggaaacgcgcgtgcactcggggctttagggaaagtgtgggctttggccctggcgtctgcggaacagagcttggtcgctgactttgctgcgtgaccttggtcgagtcacggactcgcagccgccgccgcctgctccgcagagagggggagacgcccgccttcgggcggcggggaagagctaagcggatgcggagtgccacgcacgggcagggcaagggcatgcttattcgtttgtgggtggctttcttcctgccgggtctggtagaggagggaaagccgcgaaaaggaaggagaaaataggggaggacgaggcgtggccgggcggagcccggggtccttggagccgcgaggccggagacctgagccgggagcctggccctctgctgccctccagcgggcgcggcgcactgtgggcatccccgccggacggactcagcgcggcagcgcggctacggcccgcacctcatccttcccgctgtgttagccaagggagaaatccagctccgctccacgcctataagcgcgagtcctgtttggactcacggcctgagcaattgcagcttccatctagggagcctctgccactcactcggccattcattcagctgatgttgagcgtaacacggtgcttggtcccaggcacagagctcgctgcctgggtggggtgggagccgcggcgcgtggctgcgagggccccctggagcgcgcctacgtgtgccaagcctttgagcttacgtgtgattcttaaagggctccccccgtgggctttcctcttcctccattttacgggggaggaaacctaggctagagggctaattacgtgaggggcacagggacagccaggcctgctggagtccggagcggggactttcccgtgacaccagcctgtttctggtgggaaatgaccgggagaggggctgcgcagtgcagcttcactgtatcacatgcctagttaaatgtctgagccgttggcgttagttttaaagaactgtaaatgcatagcttttaattctagttaattgggatgtggtgattctccactgaccaaaggcaaaagtcctaagcagagaggctaaca

SEQ ID NO: 3206 - DNA, 4001 bp, Homo sapiens
tcttgatgagaaacctaatggtggcttctcctaggaccactgtctctgctgggcccagcaccaggaggtgtgggtcccactcccctccctggccaggccagccacaggaaggccaccagcagacataaggacagtgagacccactggggcccaggagctggttgtgggagggtagagcgcagtgtggggtcacaatggccaagggaagaaccagatgtaagtgcaggactcaggccacccactctgccagtctggcaggggcaggagtggccaagctcccagagtgacctttggcagttaaggcccgcagaggaaaggcaaaggaggggaggactgtcttctgctggaggtcagagctggctgtgtgcacatctgtgtgcagcctgactctggaaattcccatctctgtagtcatgcagggtcgctcaatgtgtctctgcctatgggcacggttgcactgtgcaccctgacgccgtagtgtgtgagcctggggcaaggcgctacgtttctccactctgccctgcctgcatggtggttgctggggagacttgaggtgacaggagagaaggcacattttccatgtgtagtgttgccatgctcaaagggcttcatgccatcacctcagctgatcctcttggcaccctggaagatggagcagatagcacaagggaggcctggggtttgggggcagtgtggtccaagccagccacccgcccatgcttggatgcttgtcctcacagatgaaagaggcaggaagccatctgttcagggcagagacgctgaggtgccaaccccatatcccttctttcctacattcaagaccctgattgtctctgggtccttttgcccttctttctttctccttcctgctcatatgtcagtatgagcccatgtgtgctggctggagctccagcagttatgttgcaccttaaggtaacctcaggggtgatacagggcaggcctgaaatgctgctgatcaggcggcctccaagccagccctccactgcccctctggacttctgcatgagagagaaaccccgctaaccttgttccatccactgttatttggggcgttctgttatgagcagccagacctgaactatcctgaatgtgtgagcagctcacagggcatcaggccagaccttttgagagtcagctagaggctggagggccagcttatttctccttccctcattcctcctttaattcttcacccttccctgttccccaccactgtttctcaaactctgtgccaggcgttttccttgcattctctctctgacctccccacagccctactgaaagggaatgtgtgggaagtgctcttgttaggggctcctagccctttcagaggaagtgggcactcattcgttacttgattgcttgattagaagatgcgttcattgaccaacctccaagcacaagtgactccctcccaggctcacccctcccccaaacctgaaggctgtggggcccgggctcagtgtcagccacgctggcacctgacccagggacctaactgagcaggatgagtcgtgggctgaccccaagctcctcctctgtccagcttttcttccgcaaacacttataaacctctcccatccaaagggagccctaggagttcagcctcccagccaggacaccccaacaccagccaggacaccccaacgccagccaggacactccaacaccagccaggacaccccagcgccagccaggacgccccaacgctcactttccccaaaggaaagtggaacaagaggggacaagggtcaaagaaaaaggcttcctggtccagagcaacccccagaagcctccattcctccccccgacccccctccagagcaagaccccattcccccagcacctaccttagccggctgcatcctgggcgctgaagaaaactgttgccagcctccccacttcacagccgaggcagacaagactgcccaggccggctggcagctgcctcatgtttgcttggacccagacgtaattgtcaacggcggcttctcgccctccccctgcccaccccttcctccctgccggcttctatcgctccacccctctgcctcctcgctccctccctttctctctttctctctctctctctctctcccctctttctctctctctctctcccctctttctctctctctctccatggcccctaatcctggtctctcagagcctgtccaagcctctgtctggctctcctggcctctcccctaccctgtcaccagcggctctctgtgcctcccctgcccgctgcctctttctctgctccttgccctttttggtcaccaaggaggaatgggggtagagggtgcagggagctggggctggggagaggggagttcagggcaggagtttctgccccaagaagtggggaggagcagcagttgaacccagagtgcccaggagggactgtggaagtggaaaaggaagggatcattcctggaggtattttccagaacaagccaggacacccccactgccccagtcccgcctgccactcttcacagacacaggacagtgccacccttatgatgatctcagcccaaggggcccccaggacagcagggagccactgcacccagcatctgaagcgtcctctctcagggtcctggcctgaggtgctggtctgcaaggtgctggtctggggctcacatcctagaaacagcaacagccaccagggctacatcagcagggtgacactcagggtccttccacctctttcatctgtcccttattaactacctcccattcacccatccgagggcctcgaagcacgggtgtctccccaaagcatgacctgctcatgctctccagctgtgctgggtcccctcccagctcccaagtcaggatgcatccagggtggctgaggacctgacgggatctcctggggtgtgagggtgaaggatggggccgagggctcccaggcatccctgagagagggggctgtgtcctgtcccttgggcgggcagctcctgggcatttgcttggcccccaagcaaaccactcaggagccaggtgcctgaaacctttgccaagtttccctttttggagcccagaggagccagcctgtgccagtagttcccatggagacgaagccctaggatgcctccctcctttgcagcctgcacaattgtgcttgcatgcccttttcctttttttttttttttttttttgagccaaccaattacctccaactttcagatcctcaggggaagaaaatagcctggagctgtcgacccaccgaggcaaggaggactgtttccagaggggaggtggcagcccaggtgtctggccctgtgcgacttcagaacaggctggacttcacactggggaaggggctcggcagagcccggaggactccctagctgcccccgccccacccacactgcaccctaggaagtggagggaggcaagcgccttcatggctgccagctcagggccggcatcctgggagctcatctgctttttttttttttttttttttttttgagacagggtctcactctctcacccaggctggagtacagtggtatgatcatggctcactgcagccttgacctcccaggctcaagcaatcctcctatttcagcctcccaagtagctgggactacaaggctcatgccaccatgcacggctaatttttgtattttttcgtagagatggggtctcactatgttgcccaggctggtctcaaagtctggggctcaagtgatccacctgcctctgcctcccaaagtgctggagttccaggcatgagccaccgtgcccagccccatcctcctttcactgcctgagacagtcctgccctcctgactctgagcaagcctcgcctccgcaagcagggacgcattgagcattttgagtcctcatagtgaccttgggagaaaagtgtaattatctcactctacagatgataatggtgagacccagaaaagctaaaagactggcccaagtcacaggctagggagtggtaaagccaggtc

SEQ ID NO: 3207 - DNA, 4001 bp, Homo sapiens
cataataaaagattttgacacatggaagaaggatataacaatgaaaggatagttggttgccttcaaaatggtgggtgaacaactttgtcattctccactgttgttgcttcctgcctatgtgaaaatgcccctcatgctcctggacactagtgcttgttccacatttggagccactgtcctactgaatgctgctaagtgcttagtgtttcacaaaagcttgagaaagaaaaaactccatgattcttttgtattttcaacctattttatgaaagttctaaaattccttacttagagcctttctgtatagactgtagctaacaaaattcatcattctcatttgggctttttcaggactgttgttacttcttacctacaacttttgtagcactcttactctaggctctttacaattgtattttttttctcttgcaactaaatacatggaaaaacctgtgaacagggaagtcaaaaggctgataatcggaacagttaagcagcatttttttttttttaacctaagactgctggatttggtttggattgtgttggcaagtggagtaatatagagaaggaagattgatttctgattcccacttaaccaattaccctgaataactattctgtggactcttatagtcagtgtggtttagtgtagagaacgcaggataaggggatatggccttcaggctctagcactgttggttacatagctgtgtcattttgggcaaaccactcaatcccattggcctggcatccttagattaaaacaaagaaagtgaaaaaagagggaattatgataataagatttcttaaagctctacagacttatgtaaacaaacatatttccacttcctacaaaggatacaagtttcctatatgatttcttttatttctgtatagtttgatgtctgctcgtatggtttaaaaaattatactattgttacctgatatttaagtctcatcagctgatcccaatagaaagtgaggtggaaggttgggaaggtttgcttctattgctgtgtgtgggctgtaaaatatttgcccatttataaattatttggaggaaaaatagtacctattaaaaaatgataggcagcttcactgatcatcagaattcattctactcattgggttgtagcacttaaaagtatgtattttctgttgccatgataaaaaatagtatagttcatactgaggagttaagataaaggctataactaacaaacattaaatgaagatggcattactatgtatttgttcatgtctggtgtaaatactttaagactatattgaaagtcttataatgatttctcctgccctccacaattagggcaaacactattgagttctaaccctgttatataagctcagagattctattttaatttctcagttgcagaagtatctattaatttccgcaataattccatgcttaaaaatttacgattaggatactcatcactttcttcttagattacagaagtaaaaacaaagtggcttattcttttggcatttgtttttttatgctcattttgggtttttgaaattccttccaaaagaaaaagactttttttttcctcaagccactgaattttttttcctaaggcctttatcctctactgatatattgtaatagaaaattagtatacatttaataaaacagttaagaaaatttccagtaatacattcaatatggctgttattgcatttttaagatttaagggaaaagaatatagaaaccttactatcctacactatagataatgtctttgttttaaaaatctgttggaagtaatctagctctgttgctatttgccagtcagtttctttccctgtttcccataaggaaagaagaatggatattattgcatgtactcaccagttcttttgctgggtcagcctttatgccaaggtaggtcttaaggaaatttacagagtctgcctttttgatcagataattttaatctacaagtctagtttgtaggttctcttcttggactggttttacagcttacattcctctgtttataatgttgtgggggctggtttcagctgaggttgatgtgattggtcacttagcctgcaggggggccaattagctctgatcatgtggaaaagaatgctggtttgttaggaggtctttctttacccaacacaaaccttaacaactctggagaaagcctccagaactgacttggagaaggggtgcattttttccctctaatcaggaccggtctttagtaagtttgcataatcttacttaagagtttttttgaaagttcaaagggataaaattccctgcaagatttttcagccgtctttccttatatagcatgttgaagtgtgagatatttcctttactaatctttttttttttccaccatgtctttggggaagatttatttggataaggacttataggcataaattaatgcattgattttcttagttttcttctcatgtctcatcagaatggctaccattagttccagaactagtaatatagataattacgtgaaatcttttatttttttggttaggaaacaaactttttttttttaaaggctgtatacaaagaccttgaataggaataaaattaattgttctgtacctgatactttaaaaaatgcacacctgtgggaaagaaccgaagaattttcttaaggcttattttaatgatgtttagaagatgttttcctgatcagtgtgatgaagtatagtgttaataaaacatagtgtacagtgtacagaaaatgtaacacaacattgaaatagtgtttagctggaaaatgtgatccagcttgttggaaccctgaaacgtgctgtggtatggctttgtgcagtgccttagtgaacagtacttttctcctcctccgttagctgctgattttaaaactttgaccaaatgtcacatgtaagaggatctgagaaacaaagactgtgattgttcaaagtaaaatcttggaaggcctgctgggaaaattattaatgtagaccaatataatgctacttagaaagtgaaatccgcctttgtagaatcctctccgtcccccccccgccccacaatttaaaaaatatattaattccttctttgttttattagtaccaaatacttcaacacaagttcagacacagcattagaaacactgaccttcagaactagggaaggtaaagtataaagaaggatttgtggtgtgatgctcattccctgcatgtactggtaggaattataatgtgtatcaattcccagctaacaaattgcagaaaaacagaacaacacaacaacaaaatactagaacaagtatagtataatactgcttctagaaagcagaagcacttgagtgtatctgtcatgtgttttgaatatacattgtatattttttattttcattttttttagacatagagtcttgctgtgtcacccaggctggagtgcagtggtgtgatcacagctcactgcagcctcgacctcccaggctcaagtgatcctcccacctcatcccccaccccctgcagtaatgccaccacatctggctaattttttattttttgtagaggcagggtcttgctgtgttgtctaggctggtcttgaactcctgggctcaagctgtcctctcaattcagcctcccaaattcctgggattacaggcatgagccacttcacctggcctgagaatacatattatagtaggcaagacagttaaggattttattaaacttaaaagtctttttccatagtatacttggtttcaatatattgagacaaaaatgatttggcaaaatgatcttcaattaagaaagaaatgtcttaagtgaagctaatttctggatctctacaatttgaaagtcttgctatggtctataaacagtgattcctactgctgtgaatattgtagaccagctctgaagtgcccacttaggagcatagctctcccattacaatagcctgagcatttaaagtcatttctggttgaagttaccaggttagctggtgtagggga

SEQ ID NO: 3208 - DNA, 4001 bp, Homo sapiens
tctggcttcagttctctacgcaacctcagataaatatttttcattgtacgaactatttatttaaggtcatctttttcaatttatggacatctgaaaactactaagacaaatccctctagggaaaaaaatgaattgtaaatcacacacagagacaaacaactgggctttaagccttccttcccatactctaattggatgagtgattaagaaggacttctcttgtttgtggtggtgccctctaacgactagacggaccttgctttaataaccactccatgtgcaatttgttttagcatttacaccgttgatggtaggaagcaattcttctttaatggatgctgaaagcttcaagtgaaatctgtaattgacaaaggcttcacagaaacaggcaattaagaataaaattaacaagaggctctacaggaaaagcactcaagctttcaaagaatacttctccaagaaaatatttagtaaaaataaaaatttaaaagaaccaagtgtggtttcttccactttactatctgcttcttgtatctgtgtgtttgttaaaaagatgaccatagagttaaagtcattgggtccagaggagtaatccgcctcctaatattattagggggaaaaaaaggaaagaaaaaaataagaaaagcccatcgtgaaagttgaggcaagttcagcacctatttcttcaaaataacagctgttcagttgagttctagtacctcgcattgaatggggtagtgtgtagacaacaaataaaatcgctctgaatagcgaagcaacagggacaggaaggcgaacagggcactaattgccctcatggctccaggagccaacagcagtcctcacgtgttactagtccagtaagtgatacaagcagatccgaaatgacgaatataaacaagagcacgagagtgagtggaaaaggaacagaactgtcaaccgcattctttgcccagtcctccaacccccaaccccccaaaaggaagtttacctgtggctataggtagaaccaggggagggggcccgggctggttctcagacgagttactccgcgggtttgggggacgcaggtctcccggtggggaaggggcggggagcacttactttgagcagcttgcagcgaatctgcgcggagaccatgtggctgttgcgcaggttgcccacccggaacataagcgtgagttttccgtccctcatggagatcaccgcgtgctcgctgaacatgagggtctcggcgcgcttcttgggctgggacatcttgatgaacatgcagccgatgaggaaggcgtccacgatggagcccaggatggactggaagaggaagaggatgatgccctcggggcacttgtctgtgatgtatcggtagccatagccgatggtggcctccgtctcgatgaagaagaggaaggcagaagggaagttatagacattggccacgcaaggcgtgtagttaccgacgtgggctttgttcaggtcgccccgagtgtaggcgatcacccaccacatggacgccatgaaaagccaggccacggtgtaggtgagaatgaagatgaagaggttccagcgccacttgaggtccaccagcgtggtgaagaggtccgagaggtagcggcttgtctcgctgcccaggttgccgtgctgtacattgcaccggccgttcttgtccacgaaccgctgccgcttcttcttgggcacaagctgctgctgagggtcctggcctggcccctggggctgcaagcccgagccgctggacgatgtggtcactacctgataatcgtccccaaatttccttcggagtgcagacataatacgaaggggcgagccagattcaaacgcgaagcgaaggcgcaggagctgggcgctgcaaactagcaccaataaggaggtgggggcgggggaggaaagggggcgaagcgagcgctcctgggtggggggcgcacccggcaggtagctgcggtctctgccccctgcagacgcctctccttctcccctgggacggaggccttctttccaaggtgagtctttaaaaagtgttctcccgcactcaagccaggagggatgcaaggaacaggaacccaagcgcaattttgcctccaagcttccagaggctcctcttttctttccccaccaccggcatcccgggtcacctcttgactccccacggccctcctgattatcctgcagtacccccaaactgactgcttaaaattaatgagttgacaagcgagtcccaacccacctgccaactcgctggctgcctaagaagctgcctttacctgcctggaccagaccctcccccctccccgccgctccccaatctcccgccccctgggaccgctccccgcacccccggcgcacctgtctcctatcttttagccaaaatcccgcccaaaggcatgtctgccgggcactggtgcaacgccccctacccacgccctccgggctcagattcccgggttccggactccagagacctgtccgcctggcgtcccccgaccgccgagtttccgcgggcgccaccggggccctccggcggaccctcaagggcccgcaggccgcccccgcgctcagctgagacacggcagtgcgcgaagcctgggcactcacccagcgggagagggcaggaggcggcgcagcgggcggtagcggcagcctggcctcgcactctgcgctcacggctgttttcctcgttcccacttttcctggtgtaccacgatgggcgccaatgcaggtcccccaagctccgcacctccctgagggcaccgcgctgtccctgccagaaagatccttggcgcacagagcacagaatgactcgagcgggggctcgtgggttccttggcgctgtgccctccttccaggcgacagcggtgctgctggacggggttcgagccttgggctgccggtcagactttcaggttaaacagtagcgccgctctagcttttcctctgcctcttccttcttcggtcccccactccttgtcagcgcctcggtggccccgggtggaagatgcgaggcgcaagccggggcagcaggaatgtggtgtgtgtggtggtgcgtgtgatcagctgcagagccgcgctagccccgcctgtccctgccttcccccgctgctccaccagcctgaattgcacctccgagcctcagttgagcctgcagtgtctggcagctcaggaaaagcgagcccctccaatgagaagcggctctaaatctgctcccaaacgcccgccaactctccttcctcgccccctgcatcagtcagaaagcccccagtaaaaagcaaatgctgctctctgaaggaagagaagtacaatatgtctctgtaactgggcactcgtttaaacggatgcctggatttggggttgcatcataaacagagatcccaactggctctcagataggcatattcagaactcaaagttgcaggaagcaggaggggccttaggatgagaacagaaaggagagaaacactaatagaaatcctttctgcaaatggctctattagaaaggctcagaatatctagagttaatgtgtgcctataattgaaggaagaaggctggattttaatggcctcagcctggcagttaacttaatggaggggcaaagtgcagaaatagctaatagagtgcccatgagtaaataccagcttgtttaccacatttcacgtttgctttaaaatgccatggtatcttaaggcatatttcagtcagcccagatacatgaagttgattttgttggaaaatcatcaaatcatggcattataaaagcaaaaggctgctataagattcccatggaaaggaaaataagtacataattactctatgcattctctgccaataggtactcctctctacctctctacttataaaccaactgcaggaaagtgcatgtcaggttgtcagccataagcaggggactctcactgttatttggttaaaacatctatcctcagttacagatgcttctcctgccagttcgctgataaaaggtcagtaactatct

SEQ ID NO: 3209 - DNA, 4001 bp, Homo sapiens
tagcaacttgatgcagctcttaaaaggggattttttttgagggggtcattttatatcttctatcaccataacaacatgatatagctttttaaagggtatttttatccaatttgtgtgtgccttggacttgggccatatttgccttttctatttaaaataatcagatcaagcatgacacatgaaaaatcattgaaggcaaggaagtgctttcatagactatacatatacacttagagagacatctctagctgctcatatgctgcacatggaggcagcctctctccctgcctccaaccagccatctgctgtggcttatcctgggcagttacagtccatgcctctgtatctgaactggcataccaaaccactccagaaggtgtgtctatgaaatccctcacttctcaagcccagcaaatccagccccctcctccaaaactgcacaggagagagtgccttagggtgactagaggtgtgaccagccaagtgccttcttccatcctgggattcaaagcaggagtggggggacacacacagccttgtcaaggtgataagcatgcgtttctgctgcactctatacaggtgagtaaccgagggtgggggctttgtttcacatgacacccagggcccagggaaagtgggggatgggaaaagtgagtgagaggagaggaagaaagaggaatgaaggggtggatggagagcaggggtggctccagaatttctccacaggagctcagaggcagcaatctggccacagagggaggggtgggggcctgaaggagtattgacacagcattcttcataaggttgagaaaacgtgaactgtttatatccaaaaaaagagagaagagatgatggaaagaataggggaactatccctgctcccagctaccccttggtaccactaatggttggaaaaagtggcaagggaacaaaaaaagggtcaagaaattggagaaggggctgggagctgggggagaacacaaggaagggaggcagaacaacagcagctgaagtcctggcctcaggctaacgggctttactttggggggcggtatagactgtaggagaagcaagtgggaaggagatgtagggaaagtgatcctggggcaagtggtcaccctctccagggtaaaggagttagaggccactgagggagaaaacagggtaaaagaagaaagcgggggagactatgaaaagaaataaaagcgccgagggtggagggagaaggggcttttgagatcatcctggagaggaaactgaggcctgggggttgtgggtggaaaacaggaaggaaccggtagcccttggcacgtattcttagaggagaaaacggaggctcacaaaggtcagatcacagagccggccagtgttggagcacaggcggcccggggtgagcgccagaggtgggctttcttccctcactgaaagccgggagggagagagagagagagaacgggggccggcggagaagagggcgagacgaaagtaagcaaagggacattagaagggaaggcagagccgagggacgcggaccgagcggccgagcagtggaaagggcggcaggtgaaaggcacagagaggaaagatgcgcgggggacgcgccgctcacctatggttgacaccacggtgcccacgaagtagaaggcgccggggaagtcccagcgcgggcgcagcgcgtcggcgcggacgccggcggccagcgcggcctcgtagtgccggaggaaggcgcgcagctctggctcggccacgccgtgcgcagcgctgaagttgcgcagcgtggcgccccagcgcgcccgcgcctccgcctcgccggggctctcgagcgccgagaagactgtggcacccgccaccaggtagaggccgatgagcgccgccagcagcacgaagcggccggtgtcctcgttgaggtgcgaacggcggcagcagcagcagcagcaggaggggcgcggcaggcggcggcggctacggcggggcgggggccgggggctgcgggaggacatggtccggagctcagccccggggccggggcggcgctcggggcccgggccacgacatccccccggcgggagcaggagcgtgaggatggtggccaggggtccggggccgccgcggagcccctcgccgccttcgcagagcccctcgtcgccttcccagagcccggacagaggggcgcctccgcctcctccccggcgctcaggccacacgcgagtcccgtggcccagcgggtgcccgggcaggggcgctcctctgcgcgccccgacgcctcgccggctcccgcggctccttacccgccgctctcgggcgcggggctccgcagctaggcccctgccgcccggtggccggcgtccgcggggccccgggcctcatactcctctccagacaggccgcgggctgcgggcggggtgggccgtggatcccgggcgcctaggaccgggacgcggcagcaaggcgtggagagagcccccgggggcgtcccatgaggcgttcgggatcggcgcctcctaggtgcgggctgtgcgggcagtcctgctcccgcccccggggctgagctggcggcgtcggcttcagagcctcggagccgagccgagtccggggaagcgctcctttctcagctccagccgaagagccgcccggcagggagaggcggagtcactggcgcccggggcggggtgttggggaggggtgagtagggacaggagggagggggtggagagttgggctgctgcgacgcctcccggtggctctggcggcaccaatgcggggcaccggagcaggtgtccgactgcggtgcgggctaccactccgccggggaacctcgtcttgctcctccctgcgcttcgcctctggaatctctcccttatctcatgccgcggtgaaactttgctcaagttggtggtgctctgaggtctccagggctggaggccgcgcgacgcgaatcgccgacactggattctcgggcgttagtccgaagtttaagttcccttcgttcactcctttgccctggatcgaaccgcagccccaggacgcagcgggttccactggaaacggggaatcggggagaggcggtcgctgggctccgggcgacctgggaacgagggcgtttgctccccctcccgaccgagcgggcggccggcgtcagcaccgcggacagcgcatcggtgccgcagccgcgggcgggcgccgctagggctgccaggggtccgaggcgcgggcaaggctgctcaccccgctgtgctgtgcaccccaaaccttccctgttttcctttctacctcccgtgtgcacccccctacccgccacccgaggcaggtgcggtcgctgaagcaggctgctgacagggcggggacgctgcggaatagagacgggggaggagtcaagcgcgggtagggggccaaggtgccacagggagaaagagcccaggcccggcggactgccgggctcctcgcgccaccccagctcaccgacccctctagcccggggcggggaataacaccctgggtgcggtagagagtagaggaatagaggaggtgtaggggaagctcactggcagctcccctgaggccggcgcggggaacggtgtgctatggaacgcccctgggaaatggtcgcccccctacgccccaccgcggcaggaaaagacgacggatgccccgcgcggctgcgggtgctcctctgctggacacaagccggctttgccggggccacaaaagttctggcgtggaacaccctcagtacaggcggaaaatcatcctcttcgggcagccagctccttccctgtcctcccgcttactatggactgcgggaagcaagaccctggtgatgatatgatggcagaaaataaaaataataatggtgactgtacttagatatcccaggtgggtgagcggtggcaaaaagcagacccctgccccctgccctaccgcccatttccaatcccgggctaaggtcaacccaaagtggtggcagcagcgtcagtcaattacgggtcatagtactaaaagtg

SEQ ID NO: 3210 - DNA, 4001 bp, Homo sapiens
aaatctgggctggtgtttttcaggaagcgggctcctctttgggcagacctaagtctgatcatcctatcctaaactcacaggaccagtaggacccagaggtgccccagctgggccacatccactcccagggccctttcctccctcttccaagagaagaatccagaaacgacacagcatagctccccatggtccccagggagccgtagattcttggaacagtgtcctgcagtggatagaccgcaggaagagtgtctagtcctgccttttactccctcagctcctgttgactcccaggaaaacaatgccatcttcatgggctgcgctaagtggcaacgaacccctgggagtctgatcaaggcagggaaggggactagggagaggagagggaacagtaaagacagaggaaactgcttctggaggcatctcaatgggctttgggggaaggtgggtttcatctcagaatccaagcacgtcggggctggggaggagctcttgagatcattttggccacccctccttgtctggaggtgagcctgagacccagacaggggaagggacttgcccaaggtcatatatcacggtagtgatggagctgggctgaaatcatagggtgttggggacaggtaaggtgttattcccgtctggacagttttgaatagcaccaccaagggcctggctagagattcctttcctgggcaacgtttgttctctctctctctctctgtctctctctctgtgtgtgtgtgtgtgtgtgcccgccctgtgtgtaccctgtgagtgcctgtgtgtatctgtgtgcatgtgtgcctatgcctgtgttgtctgacagtctgggtgtacgtgtggcctcctacatggtgatctgccctggcttggaaagaactggggttattcctgtgaggtgactgttttgctgggacagcagagaagaaggctgacaaggccagatctggcttcccgcaccaattctgccgctctgagaaaatcacaggcactgactggtggcgaccaaactcctggagctgaaacacgcagacacacgtacactcacagccgccgttatagggtggccccaagtgccccgaagtgccgcattccgacatcctcatgcctccccagagcccagcaggtgtagacctgctaggctgtggaagccgatcctcagggatacggagcactggcgctctcccgccgctcactctcagcgccctgttcagggcctggcccggccacacccctcctgcccgagcctccgccggtcgtccctgcccctctcacacacttcggagtccctgggggcctatgcaacatggcagggccaagttagggctggcccggccggagagtcaggtccggagccaggaatcgacgcctccccgagttccgtccccgcggagcacacacgccaggctgaactcgggtttctgcgagcgcagggttcggcgcccagcccctctcgggggagcccccgcccccagccccagccggccccggacgactcccggagccccgcgcccagccctgggttcccgccccccgcccggcgagccgttaccgatggtggtgatgacggtgatggcgaagtagaaggagccggcgaagcgccactgcacgccggccttgtgcggcttgaggcgcagcacgacgcgctccagctcctcgtagccgccctggctgaggttgtagcgcgcccgcagctcctgctgccgcagctccagccgctgccgctcgatcagctcgggctccgactccagcgcgtcgaagaccgcggcgcccaccagcaggtaggtgaaggtgcacacgatgagcgccagcgtgcgcacgttctgccgcttcatcgtcccgcccgggccgccgccggccccccggcgcccccggcccgcgcctcggccccggccgccgctgctgctgccccggaggcggcctggggcatggctgcgctcgccgctctccgcgccgggcacccgctcagcgcccggggccgccgccgccgccgccgccgcggagctgtcccttcagcaccacccaccgccctcctccgcccggccccgcgcccgccccccgccccccgcccgcaggccgcctcctcccgccagccctcccgcccagccaaataaggactggggagacgcgccgaggagggaggaggggggctggcggaggggacgggaggggcggccgcgagagagcccgggcaggacagagagagagaaagagagagagagcgagcccgagagacagagaaaactagacagcgaaacgctgataactacggagaatgggagaaaggcagtgtaggactgagggaagggggctgtgtgacagaggaggagataaaatcagaggtgcactcagacagaaaaagaagagaggcgggcagaaaaatacagagcaaaagatggaaacagagagagcaacagactgagacagagaggcctggattgctggagataaactaatgacagagaaacagacaggaaggcaaggaaggcagagcgagcccctccccaccccaccctccaccctcatcacagcatattgcagccaggaggcacttggggcctcgctgtcctgcccttatcctatggatgaggaaatggaggcccagagaggtcaagtgacacgcatgggcacgcagtgatttcgtgacagcactgggactcagccaagcgttccttcctcccaggccacactccttcctcccttgggccagactctggctgtcttggaagcaggcagggcccagctgtggacctgggcacacatgagctgacacccaagggaaagccctgttctcaggcaatgtgtgccttcccaggtcagcacagttcttggaactggctgagaaggcacaggctgggagtctaggcctcctgcttcgctcccaggggcttctaggctgtcccgactcccatggttcctgtcttgcacccgtgcaccaggctgggcttaggctgagttgccagagatagcacctgccaccaccttagggcatcccagcagaaccgggatctagctggaattgggcaggtggggcccagagcaggaggctcactggcagactgcgggaactggggcaggagagggggtccctatgcctcagtttcttcatttgtcaaacatggtggctatggtggtgaggtgggaagggtagtggaaactcaggcattactgaccctctcagagccttgtttccttatcttttcaacgaggtgtcgtagcagatgatcccacaggccttgcccagctctaaacaactccagacttggatgggctgagtgagcagaatgattggaatgcaaatctcagtgccaagaagggttaaaaagtccttcacaggaccctggcatgggccaggcagagagacagggaagagacaccaaggcccctgactgagagcagactcaggaggcagtcagccagaagctggagcactgtctacccacaggctgggctgacctgtcactgccggacactacactcctccaatgacaccccagaagtgccaccaaccccttcattccttcaacaagtatttattaagcatctgttgtgtgtcagggattcatcatctctggtcctcaccacaatcctgaaaggtaggtgtggtcatgcctattttatagatggggaaactgaggctaaaggcaatgtagagaatcagtaaatttcactcagctgggaagaggcttcagtctgtctgcctcttaagcccatgctctttgccatgactccttgagtctctcttttttttttttcaatttgtaaagtggaatagataataatattagctctacccgcgtcttgaaccatttgttttgagagatcaaagaagaacacatgtgtgcaaatcagatgatatgaggctctctaatgacttcagagcccaatgggagggtcctacatttatagcaccatgttccccctccctcttcaagggaagatctttgtttctttgcaggcacagaatttctggtcttgccctctgaccagcaactcag

SEQ ID NO: 3211 - DNA, 4001 bp, Homo sapiens
tgggtcattttggcaggtggaggtagctctttgctgtcctctgcccctgctgcgggccacccgagtgaagctttcggctcggtctccccagacaaaaccggggggagacatcaagaatgcaaaaggtgctcctttctccaaatgaacgagaagggacagagcggggttgggggtgcaggacaagccctgcaatgcgaaaggcgcccagccaggctcgccgcggcccctgccggcaagactggctcgcttgctagccaaggtgcctcaggaggtcgggcagccacccagaaaggcgcgaaaaaaaaaagaggagttcctgaccccggggtgacccttccccaccactgccactgatccaaacgcagagtccgcaagtgactccacacctgcgctgcaagcctcacgccgtccccacccagggcgcagcgctgcacgagagcaagggccctgggttcgctcttccctgcaactgtcgcggggcgcctagcacagctgcagggcaaaggggaggggaggaatgacaaagaaggcggagcagacggcccgggaagcatttacaagcgccaggaaagcgcctcctctcgaggaagggaaggaacggcttcccggccaaggaaacgccccggggatgcccctacgcgaggtgccgcctttcttcggctcatcgattctcccgcctccaggtggtcctccccctgaccatagcccaccccactccccgaaagctgatcctaaataccttccccgaggctttcaaatcaacccagccaccgcttcaacagcccgcagttcacgcaacaggcggagccttagggctccagcgacggcgggctctggggaccagaggatgcgggcgccgcgggccagacgcccagaaggacggaaagtgctctgcggccgtagaccctcggggtcgtgcacccgcgacctggaccacaggagactggggcagcaaaaggtgggggaaggcgcggtaaagttgcagggtcgcccggagaagtctccggagcgcgcagggaggtggggacgccagccaggtacctgcaggagtccggacgcatccagctagctccgctctgcgacgccgcctgcccgcgctgcagggatcaggcctcgcggcgcggccccgcgcctgccgccgcggcggcgaggagagcggggtggcccgcgtcggccggtctgtccgtcggtcccgccccgctagagcgaggctcccgggagctgcgggcggggcggggccggacgggacggggcggggcccgccgctcggccgccgccccattggtcgcagctccgccagcccctcgcttcgggcccgcagccgggcgccccgggccgagggcgcgggcggctgaggactgcggggctccgaccgccagacaggcggacagacccatagacctagatgctgccctgccggccgcgcgcccccgcccaggcccaagtgcagagtcaccccggagcggcaggcgctgtccgggtgggaccaggagcgcgccccgcgcctcccacctgcgcgccctcctgggccggaagcgccgtggccctgcgggaaaaagatgacctcccccgcggccccggcggctggggcaaccgcctttctaaagtcgcggcccaagcgacactttgctaatttgcctggatttcctcaggaaatcgcgaggcccaaacttgttttaaaacaaagtgcgaaggagagtacatatagctccagttcctgccaatgtttgccatcggtcccgctgcctgaagactcaggcacagtgcagaacaagatgctttgtcttattcctccactcaccgagtcagaagaggtgcttggacatttgcaccaagcagatgcgcctcatatgtagaagaggaaccagtcgggtcccctttcggaaggacgaatggaagaggaagtcaggggacgatgccttcagccgacgttgaggaacaaaccaggacctcggcgaggacagcgtgtggtccagaaggcatcgctggcctcgctgcactgagcgagagcgctcagttaacagccaggaggagaaatgggacgcttcgggacccacccccgcgctccccctcccgcccccaaactgcagatttttaagttgtgcagacgtggaacaattcctcggagccagctgctccaagctaaggcgcccagtgttccctgggttcctacccgcagcatacgccctgccagctgcccccaagccagcacccgctgaccactcacctcaggcaagcacctaggaagacgatgcagattcaagctccagaccttgagccaagcgctggggagggaatgggggcaaagagatggtggaaaacactttcctgaacttactgaataccctatgttatgtgtgggttttctaattgttctttgcttaatgaaaaacccacgttggaaatcagaaaaaggcagtaatcctcaccgtatcttgtgggcttcaaagaggaggttttccccttaaagggagttttggtccagaggagaggctaacagcaggcaggaagggcagaggaaaagataaagcctagggtggtcttccccctgaggcctggagcccaccaagctccaacagtttcatttggcttctgggaagcaaagtacagatgcatgtgtctgcagagcactgttctgagccatttgtccctaattccatggttctttggttcctccaatcttgtctcctctcctgtggaagaggatccaaagcattggtccacactgctatttacaagtggctgaagaaggtaactttcttacatagttcatctttagcataagctctaagattgttctaaaaatatatttacattttatcaacaccttagaagaatgcttccagatctctcccagcagttacctatttaatcattttaaaatcactaagtttatccaaaaagtccagcatggtttacttgagaaggaaatatgttcagaatctctaagcactgcagaaggcacctgcagtgcagaagagttggcagtgaggtctttctcctggggtctgggcggaacatgtgagcagtcgggaaggcacacacagtgggagccagtaagggcccctgtgcatctgcaggagctgaggacagaaggggtgggcctccacggtgggcatgtaggagtgggcacagagaagggccacagatctgagacagagacagacaggacttcttaccctgctgagccctgcagggagccacttcgtctttcagccctgattttgtcatctgtaaggaaatttcctctctcccagggtaatcatgtgaagccaatgaaataataaaaaggaccacatcggatgacccctgaggcaggtctgctccccaaaagtttactcttgaatgttgaccaaggttgagctaggcaaagtggtaaattcacacacacggtatgtagccccttccccaaccccagtctccattaccgggggcatgctgtgaactaactgcctccttttccccacacacccacttcctgcccagtctttatgcctcccgatatgacatcccgttccctcttaattaactgtgcctatagagaaacatctagataaaccatgcatttaatctgtgaggggtcaatcatttaatcatcgttgacaataatgctcactcctctgtggtttcagaggactcctggagtggatggagacacatgccactaatgtgggatgcatttcagtctgtcttccaggcctcgtttggaggtctccctctcttacccacctatcacacatccatgtcttcccttccctccccagagccaaacctgtccccgactttttattctcactaaagttcaaatgacagaaatcagctagattagtacttgccttagtcctgaaggaaagggaagtgctcattagcttcttaaattggaacaggtctgcaggtgaaaatgaagatgtgctcatctctggcaggaaggttgggagtgaggggtatagtcataatgagcagcgtttatttggtgtgtgcctctcacttgccactttcta

SEQ ID NO: 3212 - DNA, 4001 bp, Homo sapiens
ccagcaaaaccttagcgtagctgcattcatcaatggctctattcaggcaattatgggtcagacaaaagattcaattaatactgatcccgcaagtctccttagtatattcacaacatgctttggattcagagttctatggcaccttcatatgaccttctccggatcccaatattgacaattcctagttcagaaacgacaaacataatattagaacaagagaagaagggaagctggtgagaaagaaagaacagactagactgggtgcagaaattatatcatccatttgctgtctgtccccgagtgcatcctggggcctggcccatggcgggctggttggaaatgcatactgaacgagtcaatctcctcaagaaggtcaccacccaggtaagaagtggagcctgcacattacaccaagttcagctagagaatcaaagccacctcttcggctccagatatgcagggaagacaaagcacgagggcatatgccttcagctaagagataggtgcgtgcttcctgtttacctgggcaggtatttgcaaatagtctaagaaggggggcaactaggagtgacttacacagttccaagtgaatggttacgcaaatcgcttgagtaaatacagggaaagaaacaggaaaggcttctgaactgtttgtactcatctgctccagtattttcagagggtagggtgaaagacaaaaaacccgaacgaaggctccgggccaaccacaaagctactctccggcaggaacgtaaggaacacctaccgcccctccccccacttcacgccttggcaccaaaccagggcccctgggtcattttggcaggtggaggtagctctttgctgtcctctgcccctgctgcgggccacccgagtgaagctttcggctcggtctccccagacaaaaccggggggagacatcaagaatgcaaaaggtgctcctttctccaaatgaacgagaagggacagagcggggttgggggtgcaggacaagccctgcaatgcgaaaggcgcccagccaggctcgccgcggcccctgccggcaagactggctcgcttgctagccaaggtgcctcaggaggtcgggcagccacccagaaaggcgcgaaaaaaaaaagaggagttcctgaccccggggtgacccttccccaccactgccactgatccaaacgcagagtccgcaagtgactccacacctgcgctgcaagcctcacgccgtccccacccagggcgcagcgctgcacgagagcaagggccctgggttcgctcttccctgcaactgtcgcggggcgcctagcacagctgcagggcaaaggggaggggaggaatgacaaagaaggcggagcagacggcccgggaagcatttacaagcgccaggaaagcgcctcctctcgaggaagggaaggaacggcttcccggccaaggaaacgccccggggatgcccctacgcgaggtgccgcctttcttcggctcatcgattctcccgcctccaggtggtcctccccctgaccatagcccaccccactccccgaaagctgatcctaaataccttccccgaggctttcaaatcaacccagccaccgcttcaacagcccgcagttcacgcaacaggcggagccttagggctccagcgacggcgggctctggggaccagaggatgcgggcgccgcgggccagacgcccagaaggacggaaagtgctctgcggccgtagaccctcggggtcgtgcacccgcgacctggaccacaggagactggggcagcaaaaggtgggggaaggcgcggtaaagttgcagggtcgcccggagaagtctccggagcgcgcagggaggtggggacgccagccaggtacctgcaggagtccggacgcatccagctagctccgctctgcgacgccgcctgcccgcgctgcagggatcaggcctcgcggcgcggccccgcgcctgccgccgcggcggcgaggagagcggggtggcccgcgtcggccggtctgtccgtcggtcccgccccgctagagcgaggctcccgggagctgcgggcggggcggggccggacgggacggggcggggcccgccgctcggccgccgccccattggtcgcagctccgccagcccctcgcttcgggcccgcagccgggcgccccgggccgagggcgcgggcggctgaggactgcggggctccgaccgccagacaggcggacagacccatagacctagatgctgccctgccggccgcgcgcccccgcccaggcccaagtgcagagtcaccccggagcggcaggcgctgtccgggtgggaccaggagcgcgccccgcgcctcccacctgcgcgccctcctgggccggaagcgccgtggccctgcgggaaaaagatgacctcccccgcggccccggcggctggggcaaccgcctttctaaagtcgcggcccaagcgacactttgctaatttgcctggatttcctcaggaaatcgcgaggcccaaacttgttttaaaacaaagtgcgaaggagagtacatatagctccagttcctgccaatgtttgccatcggtcccgctgcctgaagactcaggcacagtgcagaacaagatgctttgtcttattcctccactcaccgagtcagaagaggtgcttggacatttgcaccaagcagatgcgcctcatatgtagaagaggaaccagtcgggtcccctttcggaaggacgaatggaagaggaagtcaggggacgatgccttcagccgacgttgaggaacaaaccaggacctcggcgaggacagcgtgtggtccagaaggcatcgctggcctcgctgcactgagcgagagcgctcagttaacagccaggaggagaaatgggacgcttcgggacccacccccgcgctccccctcccgcccccaaactgcagatttttaagttgtgcagacgtggaacaattcctcggagccagctgctccaagctaaggcgcccagtgttccctgggttcctacccgcagcatacgccctgccagctgcccccaagccagcacccgctgaccactcacctcaggcaagcacctaggaagacgatgcagattcaagctccagaccttgagccaagcgctggggagggaatgggggcaaagagatggtggaaaacactttcctgaacttactgaataccctatgttatgtgtgggttttctaattgttctttgcttaatgaaaaacccacgttggaaatcagaaaaaggcagtaatcctcaccgtatcttgtgggcttcaaagaggaggttttccccttaaagggagttttggtccagaggagaggctaacagcaggcaggaagggcagaggaaaagataaagcctagggtggtcttccccctgaggcctggagcccaccaagctccaacagtttcatttggcttctgggaagcaaagtacagatgcatgtgtctgcagagcactgttctgagccatttgtccctaattccatggttctttggttcctccaatcttgtctcctctcctgtggaagaggatccaaagcattggtccacactgctatttacaagtggctgaagaaggtaactttcttacatagttcatctttagcataagctctaagattgttctaaaaatatatttacattttatcaacaccttagaagaatgcttccagatctctcccagcagttacctatttaatcattttaaaatcactaagtttatccaaaaagtccagcatggtttacttgagaaggaaatatgttcagaatctctaagcactgcagaaggcacctgcagtgcagaagagttggcagtgaggtctttctcctggggtctgggcggaacatgtgagcagtcgggaaggcacacacagtgggagccagtaagggcccctgtgcatctgcaggagctgaggacagaaggggtgggcctccacggtgggcatgtaggagtgggcacagagaagggccacagatctgagacagagacagacaggacttcttaccctgctgagccc

SEQ ID NO: 3213 - DNA, 4001 bp, Homo sapiens
agctttagggaagttttggggggtttttgtttgtttgcttgtttgttttttgagatggagtctcgctctgtagcccagggtggagtacagtggcgccatctcggctcactcccgggttcaagcaattctcctgcctcagcctcctgagtagctgggaccacaggtatacaccatcatgccgggctaattcttgtaattttagtagagacggcgtttcaccatattgggcagtctggtctccaactcctgacctcaggtgatccacccacctcggcctcccaaagtgctgagattacaggcgtgagccactgcaccaggcccagggaaggtttaagggttggatttttttaatccattctggagatcacagaaccacaagtgacactgtggtgttttcccacctaaaacaatactgtgatgaaaaaggtactcccaattattgagaatctgcagtatccacacatttcatagcaagttgaaaatggctgccaaaaggctcaactacatccatgtcaattcacttttactcagtgaacaactaagatcgttttgtagatgccagctagtctccaataaaatggaaggagaccattaaaatctgaggaagaccatgtgtgtagaatacggtcagcaacagaaaccattatgggccaaaggtccagccttccaaaaccacttatggatgtgacatctcgcactgcctagaagtcctgggagcagcactccaaagatccatgtgtgagagccacctctgaggcatgggatggaacttgttccctctgcctcattactggctccctggaatcctatctattcttcaaggccttcagcaaacctaatttcttgcatgaccgtcccacgtatccttctgccccccaagttagaatccttgcacaattctacaaatatactgtgtgtctgtccactttttaccccacttgtttaatccctactttttggtctgtaggccaaggaagccagggcctgtgtcactcttaataactcccatttactgaatgcttattatgtgccagccattgtaagagacacttgacacactttacctaattcacacaaaaactctattggatgggaattactgtccctgttgacagatgaggccattggggtaaaaaaaaagagtgatgtgtacaggggccacacaaggactgactgctagtaggttgtggagccagccccaatccagaacggcaggacgaaccccaagttcttcctgcttcaccccacaccgcctcctccagcactgtttcacccctatggatcctgacccagccctttcactctctaagcatctgtccatctcaagacttggctacgataacacagcagcaccccgatcccgaggatttaagagctactcctcctaccccaaccccaggcagtctctcctaaggataggaacatcatcattccaaggccacaccaggggggcactccgcaggccccatcctcaaaagcacccagttaggctccctgctatgtggaaagtgtccagccctcggggacaatgtcccccagagtgcattcctatgatcacctgcatcaaaaccatcagggacgcttgggaaaacgaagacactccggccacagcacacagttcctcagaaagtctgaggaggggtcgggatctgcccgcgaaccccactttgaaaaacatcgctcaaggggctcacactcctcttccgaagcgggaagagccgggaggagctggggagccagaaagccccgccacggtcttccgcggcctggagaccccaaatcggcccgaagcccgagcctgcagcccggggcgcgcgcgttaccagcgcggcccgtgcccttcctcagggcgccccgccgccttccgggcccgcggcccatcccgcgcccggctcttccgcaccgggggggtggggcgggtcggcagcttcccagactgacctgcggcccgccagaccctcggcgcggccgccggacgccgcggggcggacgcggaagtgaacgccttctcagctgctcggcaactcgggagcagagcggccccagcggcgcccccgtgcggcccggctctgaggcagcggctcagggagggagggaggccacgtcccgggcacgccacgccacgccacgccccgcccccagattcgtctcgccccagtgggccgcctcggagtcgggtgggtcttccatcccggaggtaagggaaacacacggtagagaaggccagggctgaaccccaagggacggtcttgtgtgttcagaggctggttttacaggtgaagagaagaaacagccgcagaagttgcgattgtccaaggtcacttaataagtggcaagaattaggatgttaagtgttctcacccccaggtcagtgcccatccctccaaacagggctgctcagtgccaacgtgtgttaatatattgcacttggataagtctatctggatagtgtctgcagcttacaaagctttttcacacacagcattcttgtttagtctgtgtgacagtgatataaagggtgatatttatttcccattatagcaaggaaaattgaggcgagagcaaacatttattcaacacttttgtacacctgacactgtgctaagtgctttgcatgcactacttaatttcctgttaacgataaccctaaaacagttcttccagtttctagcaccatcttaccttgtgcaaggtactgtgctagatatttcaagagaaatataacagtcctgttttcaaggtgcttccccaaaatcaaaaatatttggttccaaatttccctgactggctcttagaagagaataagccaaagagaggtaagtcaacctatccccttagatattaacagtcttaggagagagggaaggtttgttcaacctgtaattattaagcactagctatggagcaagcactgagagtaaaggactggaagagacaaataatgggcgttcaaccttactttccagtacaacatgcagaaaacttgttctgtaaatattttaggctttgtgggccatgcacaactactcaactcagcagttgtagtctaaaagaaggcataggcaaaacctgaacaaatgagcattgctagttccaactttatggacactgaaattccaatttcacataattttcatgtgtcaaaaaatattcttttaaaaatgcagctttttcaaacacttaaatatgtacaagccattcttagatcatgggccagacaaaaacaaatggtggtccatgggccatagtttgcctgcccttgttcaagtgggagaaacagacactaagcaaagtggtgacagagagtgataactaggtgcgaggaaatgagtggacatttaagttgagggctaggagtcagaatgagtccaccttctgcagagatggaggaagggtattttaggaagaagggagagcaagtcggaagcccctcaggcaggaaaggactcagcaatttgtaggaagagaaaggccactagtatgtctgagccttggtgggcatcaggacaaaggggaagatgagatgggatgaggttgaagagagaggcaagagcccagactctaaagtattgtgtggccatggtagaaatttaatttgactgtaagcataatgagaagctattgaaaggttttaagcagggaagtgacacaattgatttactattaaaaaaaaataatcactgcagctactgagatgagaatggattggaaaggtgtgagatggaagtagatgactattgcaataatccaggggagaaatgtcttagttcctccttgagtagtgttggcaataaagagaagtggatggatgcaagaggggtactcaggagatagacatgacataaaatttgttggtggatcaaatacaatgtgttaatatggatcccctgagaagcaaacaatattatcagattagacatgtgagagatttattgaagggaacacctgtgaggtaataacagggaagcatctgaggggaattaggaaagacattagacagt

SEQ ID NO: 3214 - DNA, 4001 bp, Homo sapiens
gtcactcctccttttcaacaagagacaaggcacaacactgaagctttaaaacatgcctaacagcatacccctttcctacaactctttgcagataaataccagtttgggcatacactgtcaccctgaaagtgttcaaatgaacagtgtttcagaaatcaacatataatcaactgccaatgctaaaacttgctgcctttatttgaacatagtttaagaaaaagcaaagatgatggccaagtgaagattctgaaacacatctactaggcagggtggaaatatcttctgttctgacaagcttccttcaagttatcaccactttggagtctttgttaggaaccttttttcagttattttcgcacaaaggagtctttgttggtacaatggcttcctcactgcttgttcccagacaatcctttcacatcaatacttctattagggagcacaatcagaattcatctgtctttgaaaagatctaacagaaaaaggttctgagtgtcataatgatttaaaaaaaaatcactggccgcacttgttcccaattctctccctcccctcatgcgtccaagtgcagtatttctaagccagtcctccaatatgccatatatgggacagctccaccccatccctccatatatggtcatatcccacacccacccaccggctcatcacagacaaccaggaacccactcctgccctgacccaccatatacggacaaacacccatcctaatacgccaaacagaacttaagctcctccctctacactcacttcatttttaacaagtctgaaagtttttttaaaagttgagtgaataaattaacaggaacaaacaaacaaaaccagctgaaagtacttccaagcactaaccttcaattcttaatgactccaaacgtcacttacaggccctacctaacgctaacaaaaatactcctcctcctctgcagtaaagatgagacagtcctggtgggacacagcaccggcattaatgaagcgtgtctgaacaaccctaagcccattattaaagccaggcagccaggagctgtgggccaaacacaactcggctctatacaaccattccaaagactttcaagatctagcttcctgcaccttcagatcatatgccaactttctggtctccgttttcagaaaacggaaggagggaaccgatggtcgcgttaccacggtaactgcgaaacgtccggtggcagaggcccggagccgcctgtaccttcagatccttcttggtaacgtcggtgtgggaaacagctcgaatggtcccggagagccagggccactcggcgacgcgctccacgtcccagctgtcgtggctgccatcgctgccgtcggctgcggacagactgagaaacctcctccccaccaataccggccaactttctccgagcgtgagcaccatggtttccacgcctgcaggaagagctcctccctgcaaaaacacaaaaacaaaatgcgacgggggcggccggtgggagggggccgggcggagacagcagggagggcgggcggagggcgccgaacccgcgcgaggacgcggccccgggcggacccgcaccgagcccccctcctgcgccctcccgccccccgccgccctcccccgccacacacccgggccccagcgccgcgtgaccctcgctctcccaagtttggcttttctaacagctcaaacgcaaccgcagagggagtgagggaaaaattatctgcggctcgagtggatttgaaagtgctcagcccccagccccgaaaagaaaaggcccctggtgcagagagccggtcccgggcggctgggtccccgccccgggcggccccacgggggagggtgggcgagcccgcgattccgcacttgccccgccgccccgccccggcgcccagctccccggccccgaaccccgggcgcccgtctcccgggcctgcgccgctgccaacgggcgacggggccgcgcgctcggcgctttcacctttctctcccctctccccgcagccgaggccgcggcgctcttaccccgcctcccgcctccctgagtcaccggcggcagccgccgtttccagccgcctagccgactccagcgctgacttggttcaagagctctcacaagacacgcacagcctcccggacccgcccccctcggagccgcttccgccgctcattggctgaaacacaggagctgggcgaggctccgggggaaacagatcatcaccattggccccccgggcgagggcggggccagagaaaaaaacaattccttggctgcctcctccctttcccctcccccttccgactcccgggcgacccccattaggttaaagtacacagagaataagcgagtgatccctccgccataggcctattctttccatttgttgcctcacagtatgcaaaaaaaaagtcccgcgaaatcggttatcaactttggggcccggaggaaaattgctgtggcgcatagataagactgaatggcgagaccctgagctataagtgcctactggattgttcttcaaccgcgtaggctgtcgaccgaagatgagccttccacttggcggaagaatctcacaggaaagggtgagggcggtgcagggttagcgggggagggcagggaagagaacgtgcggtttcaggcgtactcagctagagggaggagcgatagtgctctggaggctcgtgcgcaggcgcctcgccgagcttaggctgctgggcgaaatggctgcgggaggcgcaggcgcacgtggtactgatcgtggaacgtctaaagtccgccattttgaaggataaatgaagaaaggcgtggagttactggataatgacgttcattaaatttagagcaaaagagacctttaaatacaatgtataatgagatttttttttctccaaagtgggattgagaaggtattcagatacttacaaagaaatttaaagtagttgaaggccataatgaatgatggaagagatgaaagagaaggtgactttgaaggacaaaggagtttagaggtgattgtgtgctctggacctgaagtattttgattgaatgaaaaagaaatggaatgaagaaattgaagatatgttcataaaggctagtgtttgacattacatcacatttaatccttaagaagaactcatgcctcccattttacaagcgtggaaacgtataatcagagaatgtttggaaacatataagggattatagatgcaaatcaactctggatgttgattttcaatatacatattctgaatgtgattttaagtttttaaagttagtaacaagaattaaattggatttataatctgtagaccatttaaaggaagggggctgctaaatgagaagaaaaaacctatccagctgaaagaaggcagaaatgggaacgagataagcaaaagaaaccagaacatatggtaaaaatgtttttcatgtgaaaagtccaaacatcagtatttacaataaatgtaaatgggttaatttcactcacaagttttaaaagacagttgggaataaaaggacaatccagctataaattgaccataagcaaatgcttacaaaacaggaagcttgaaaatactgggctaaaatatttaatcaaatggtagccaaatgaaagcagtatagcaatattaatacaattaaaagtatcaaaagagaaaggattttatattaaagataaagtccatgaagacagtatggtctcctgaactgttatgaatctaaaaacatggcctatcctaaggtgacgctatgaacgatgagaaattttacaaatttgacaatttgttttcagagtagaagacataaatatctcagaaatatgcaactcaaatgtaaaatataagggaagatatggagaacttagattatgtaattaaatattaatttgaaaaacaactcaagggaaaaattctattgaacctgaaggaacatatactttctatgttgaattcattatttcagagcttagaaaagatggaaagatatccaatgcattttataaaagttata

SEQ ID NO: 3215 - DNA, 4001 bp, Homo sapiens
cactttggagtctttgttaggaaccttttttcagttattttcgcacaaaggagtctttgttggtacaatggcttcctcactgcttgttcccagacaatcctttcacatcaatacttctattagggagcacaatcagaattcatctgtctttgaaaagatctaacagaaaaaggttctgagtgtcataatgatttaaaaaaaaatcactggccgcacttgttcccaattctctccctcccctcatgcgtccaagtgcagtatttctaagccagtcctccaatatgccatatatgggacagctccaccccatccctccatatatggtcatatcccacacccacccaccggctcatcacagacaaccaggaacccactcctgccctgacccaccatatacggacaaacacccatcctaatacgccaaacagaacttaagctcctccctctacactcacttcatttttaacaagtctgaaagtttttttaaaagttgagtgaataaattaacaggaacaaacaaacaaaaccagctgaaagtacttccaagcactaaccttcaattcttaatgactccaaacgtcacttacaggccctacctaacgctaacaaaaatactcctcctcctctgcagtaaagatgagacagtcctggtgggacacagcaccggcattaatgaagcgtgtctgaacaaccctaagcccattattaaagccaggcagccaggagctgtgggccaaacacaactcggctctatacaaccattccaaagactttcaagatctagcttcctgcaccttcagatcatatgccaactttctggtctccgttttcagaaaacggaaggagggaaccgatggtcgcgttaccacggtaactgcgaaacgtccggtggcagaggcccggagccgcctgtaccttcagatccttcttggtaacgtcggtgtgggaaacagctcgaatggtcccggagagccagggccactcggcgacgcgctccacgtcccagctgtcgtggctgccatcgctgccgtcggctgcggacagactgagaaacctcctccccaccaataccggccaactttctccgagcgtgagcaccatggtttccacgcctgcaggaagagctcctccctgcaaaaacacaaaaacaaaatgcgacgggggcggccggtgggagggggccgggcggagacagcagggagggcgggcggagggcgccgaacccgcgcgaggacgcggccccgggcggacccgcaccgagcccccctcctgcgccctcccgccccccgccgccctcccccgccacacacccgggccccagcgccgcgtgaccctcgctctcccaagtttggcttttctaacagctcaaacgcaaccgcagagggagtgagggaaaaattatctgcggctcgagtggatttgaaagtgctcagcccccagccccgaaaagaaaaggcccctggtgcagagagccggtcccgggcggctgggtccccgccccgggcggccccacgggggagggtgggcgagcccgcgattccgcacttgccccgccgccccgccccggcgcccagctccccggccccgaaccccgggcgcccgtctcccgggcctgcgccgctgccaacgggcgacggggccgcgcgctcggcgctttcacctttctctcccctctccccgcagccgaggccgcggcgctcttaccccgcctcccgcctccctgagtcaccggcggcagccgccgtttccagccgcctagccgactccagcgctgacttggttcaagagctctcacaagacacgcacagcctcccggacccgcccccctcggagccgcttccgccgctcattggctgaaacacaggagctgggcgaggctccgggggaaacagatcatcaccattggccccccgggcgagggcggggccagagaaaaaaacaattccttggctgcctcctccctttcccctcccccttccgactcccgggcgacccccattaggttaaagtacacagagaataagcgagtgatccctccgccataggcctattctttccatttgttgcctcacagtatgcaaaaaaaaagtcccgcgaaatcggttatcaactttggggcccggaggaaaattgctgtggcgcatagataagactgaatggcgagaccctgagctataagtgcctactggattgttcttcaaccgcgtaggctgtcgaccgaagatgagccttccacttggcggaagaatctcacaggaaagggtgagggcggtgcagggttagcgggggagggcagggaagagaacgtgcggtttcaggcgtactcagctagagggaggagcgatagtgctctggaggctcgtgcgcaggcgcctcgccgagcttaggctgctgggcgaaatggctgcgggaggcgcaggcgcacgtggtactgatcgtggaacgtctaaagtccgccattttgaaggataaatgaagaaaggcgtggagttactggataatgacgttcattaaatttagagcaaaagagacctttaaatacaatgtataatgagatttttttttctccaaagtgggattgagaaggtattcagatacttacaaagaaatttaaagtagttgaaggccataatgaatgatggaagagatgaaagagaaggtgactttgaaggacaaaggagtttagaggtgattgtgtgctctggacctgaagtattttgattgaatgaaaaagaaatggaatgaagaaattgaagatatgttcataaaggctagtgtttgacattacatcacatttaatccttaagaagaactcatgcctcccattttacaagcgtggaaacgtataatcagagaatgtttggaaacatataagggattatagatgcaaatcaactctggatgttgattttcaatatacatattctgaatgtgattttaagtttttaaagttagtaacaagaattaaattggatttataatctgtagaccatttaaaggaagggggctgctaaatgagaagaaaaaacctatccagctgaaagaaggcagaaatgggaacgagataagcaaaagaaaccagaacatatggtaaaaatgtttttcatgtgaaaagtccaaacatcagtatttacaataaatgtaaatgggttaatttcactcacaagttttaaaagacagttgggaataaaaggacaatccagctataaattgaccataagcaaatgcttacaaaacaggaagcttgaaaatactgggctaaaatatttaatcaaatggtagccaaatgaaagcagtatagcaatattaatacaattaaaagtatcaaaagagaaaggattttatattaaagataaagtccatgaagacagtatggtctcctgaactgttatgaatctaaaaacatggcctatcctaaggtgacgctatgaacgatgagaaattttacaaatttgacaatttgttttcagagtagaagacataaatatctcagaaatatgcaactcaaatgtaaaatataagggaagatatggagaacttagattatgtaattaaatattaatttgaaaaacaactcaagggaaaaattctattgaacctgaaggaacatatactttctatgttgaattcattatttcagagcttagaaaagatggaaagatatccaatgcattttataaaagttataaaaccgtttcacaaattctgaactgggcgagtataagaaagaaaaactatggttcaattatacttaggaacatagatgggaaattcttttataaaataccagcaaattaaatccagcagcattttttttaggtaattgatatgattaattagtgttatatgaatgcaaagatacttcaagattagaaaattactaaaattcaccatgacaggttaaaaaagaaaaatcgtatattcaccttagggctaaatagagcatgcagtcacattgaacacttgtgatcttaagagtatttttaaattacatagaaaac

SEQ ID NO: 3216 - DNA, 4001 bp, Homo sapiens
aggaaatacaagaaccaataagccgggtgtggtggctcatgcctgtaatcccagcactttgggggactgagacgggcagatcacttgagattagaagtttgagaccagcatggccaacatgtctttacaaagaaaagccctgtctctacaaaagaaaaaaaaaattagtggggcatggtggcgtatgcctataatcccagctacccaggaggttgaggcaggagaatcgcttgaatccaggaggcggaggttgcagtgagccaagatcatgccactgcattccagcctgggcaacagagcgagactctgtctcaaaaagaaaaagaaccaacaaatcggctgggtgcagtggctcatgcctgtaatcccagtactttgagaggccaaagcaggaggactgcttgagcccaggagctcaagaccactctgatcagtatagtgagaacccgtcccttatacaaaatttaaaatacagctgggatggtgacgtgcatgtgtggtcccagctactcaggaggctgaggtgggaggatcacttgagtctggaggtcaaggctgcagtgagcatggttgcaccactgcactccagcctggacgacagaatgagaccctgtctcaaaaaaaaaaaaaaaaaaaaaaaaaaagaaccaacaactgactcttcagtttctagcagacaactgagaaagatatttcccactactaaacggtgttcattgacctctgtgaaaaggacttctggtaaactcctcttggaatttagcaccaggaaaaagcttgccagggctcatgaaccagctctatccatacataacccatggcatctcatgtttgcctccagtgccagcaagccctgagctatagttgaagctcaaataccatggtcttaaatgttctccaacagtttaactgtacatactttttactgtaagctacctcaaatctttctcagaaataggtgcgagatatgtggataaataagttagaagtaaatgttgatgagaggcaagtgcataggcttggggtttaaaaagaaacagcagaagcaggtagctgtgtgcccctggataagccccttggtctctgaatctatacttatcagtaaaatggggatcctgatgcctgacacctgacacctgatgcctgagttgaaatggaaattggctaacacgatgctattaaatcctgggtcttcttattaaaggcctcaattccttcctctcttctgtcatgctgggagcccccccaggattcccgggtagagggcgcgggtccggccttgaagccgggttctcagggcctcactgcggggtctctgcagcctcggtcgctggcacaaatgctggactgcagcagcccctggggtcccctaggggacctgggcgcccctaccttatctccgagtcctccttagggtacttgtccaccaggctgatgacgtccagcaccactagccccacgcacaggatctgcttctcttccatgaggctactcccagagcttcctgcccgcccggctgacggggttcctcccggcctctgcctcttatccaggaggatggtgtccccgctcccagctgccctggctcctcctccgcgtgggagctcctcctccagggagccacctgcagcggccaggggtgcagggaacgaaaggagcagggcccttcctcgcgacacccgaagacccgagcgggtctaggaaagccaacccagaggtcttggtccccggtcttcccgtagcaggttgcctgggcctgcagatggcaacgcctcccacttctcagccttagtttcctcgcttgtcagatggactcacagctgatgcaaacctttttaaagcgcggctaagcgatctcgagaatgcaaagagaaaatgcgctacttgccccgcactctcctgcacctgcgtctccgactcccgacccgggacacgcgaggtacagctgggcctcgcatctgcagccctgcctgaagcccgcggtcgcggcggccccgccccgccccgccccgccccgccccggttagtcccagccgaggccacgcctccgccgcggaggagcaggacccgccgggtgggccgcagcctcacgtggcgggaacgcagagcgccccctggcggacgccggcgaaacgggcgtgacacgggggagacgtcgcaggagccgggcgggcgccgcttgctgcctgagccaaccccgagccgccccgagccgggcggaggcggcgaacgcagtgcggaacccggggtcctctccggaggccgtcgtctctcccgccccgtgccctgtgcacgcccggcagcccccgaccccgtaccgtagcagaacggttcgtttagttttttttagaaaaaccaagtgtctttattcctcgatcgtttagtatggcggtgggcggcgcccgcgcgggggagcctggagcccagggaatcgacctggagggccagtggagggagcggagggtgcgaggatcggctcctccgcaggccggccctggaggggttcttgggggatcgcgccaggccaaaagtctgcatgggcggccccgagcctccctgagccggcgcgccccgggcgtggggagaggccgctctgggcgcggtgccgctgcgggcccgggtgcggcgctcgcccagggctaggtgccccgtctcaggcgagaccccaggagcccgccgcccccgctgtctcttcagccgacgtagacacgtcgggcgggaccccagtctacgcgtgttcaagctctgggtccccatagagcagggccccgctgaagatggtgagcggctcctccgagtgcgccagctgccccatgaccaggtcgacgcagaccgtgtccccggcctgcagcggcaggatgaggctgaagacgcccagggtgcccgggctgggctggctctcggccaccggcttattctccaggccctcaggctcgtagccaccggagtctacgcgggccacgccctggttggagcgggacagcacggcctccactttctcgtgccggtgcccagtcagcaccgcgctcagcaagtagcgtccagccagtggcgctgtgaacacgcctggggacaaggatagcagtcaggggggccagggaagctccggggagcgcaccagaactcctggactgaggagggaccctctgggtcttttcacctcactggaatgtgagcggcagggaactgggggctttgttcactatgcattcccagcacttaaaacagtgcctgggcaggagcaggccccagtaaagatctgctgaatgaatgaatgactacttcttctccccactgcctgagaatgaataaatgaagaaagagccggggtctccccaaatcagagaatgaagattcacactgtcggaaaaggcaagaatgggaagatatcactgcacacctcacccatttctccaaccgttcaacccagcccctcccaggactacctgtctctggatcataatagcctccatcattgagcaggactctgtcgaaggggaccgtgcctggttcagaccggggcaaactcagagcagctgaaaatgccacttggggcacaggggctgctggtgccccctccactcctgagtgggaagggtggatgttaaaggggatgctcagggcagagtgccagcccccttcccctgctggatccccagcccagggctgcccgaggacctctatcctccaacccctagtcacttctccctccagaatcaaatgaaaggcactcaccctgttcaccttgaggacctgtgagaagaggaaagggagcagtgagaaataaagcagctctcactaagtcactcagcaaacatctgctgaggctctcctgttgtgctcggtgctacgtggacttcaaagcaggaattggggtatcaagaaaaacaggaataggtagggtccattctgttcaactgctgggccatcccagcctttcacaccccagacagctataatagactcagctttagtctccagtactgcagtggggccaacat

SEQ ID NO: 3217 - DNA, 4001 bp, Homo sapiens
tgagcctcactctgctgcccaggctggagtgcagtggtgccatctcagctcactgcaacctctacgtccctggttcaagcaattcccctgcctcggcctcccgagtagctggattacaggcgccacacctggctatttttgttttgtatttttagtagagtcagggcttcaccacgttggccagactggtcacgaactcctgacctcaggcaatccacctgcctcggcctcccaaagtgctgggattacaagtgtgagccatcgcgcccagccaagattcatcttaactagcctaagagggccaagcagagcagtgatctcagcaggacagccacccgttagtgagccccacatgacgcatcctatgcagcagctgagctgcgcagcatccatggatggtacactttattttataagtgaggaaacagatgcttagagagtaagaacttgactcgtggaggaggtccagaatcagactcaggcaagccaggtactcactacaggcacaaaatttaagggggtaccaaaaatgcagtcagataaatgccttattacaatattttaaaacatcaaaacaaatacaaaaatccctaatgtacaaaatctcacatttttaaataaagacaggatcagtgttcctgatttttcctgttgcctcagactccaagatggcacagcataggggcagagcccagaaaccagcccagctcaaccttctccaccagctccacacgacactgtctctagatatctttctcctcacaattttataacctcaataggttcttaggatgaccacagtgctccatcattccaggtgtgcgcccgtgggaccgagctccagggaaaataccaggggtctacacagattctagtctatggtatatgcaaatgaaggaagcctgcaggctccaataacctagtaggataccttaagaccagtttgggaaggtgtgagctggctctaaaagggtaacacagctgcctgtcttccacttggatttcctggctcaaaactgtcaacaggacctgatgcctgcaggcggtttgcacctacacggagtcaaattcacacagccgcactgcttctgacttgcatttcaaaagcaagtgactattatgctctgatcacatgtgaacttcataccgaatctttgcctatgatgaagcttctgttcaacaaatatttgttgattaaaaatgtgaacacttcttagatcaactccagaatccctcccgggtggcgtgtaatcaaagcctaaaacctgttaaataaaccatcacctaaagcataaggcagttcgtgaatgtgtccactcctttcccctgcaactgcgtgtggagacagtgggcataaagacctcgtatgctagcaatttcaaccgagcaggaccttctctccctcctctttcattttcctggcgcgtaaactgctggatttgcctcacagtggaaagttgggtccagcaaagtgagcaaagggaaactttgggcacttgcacgagcgcgtccggctccccctcggccgcaggagctgcccagggcttcggcggcgggggtggcgcctctccgggtccgaggggcccctggcttcacggcctctgccctcgaccccctagccccggcccgccccacctccgcccggtgcccccgcgcccaccccgccttcgacccacgcctgccttgggacacgcgatttcaaacccctcgaggtacctgggacaggagcgtggcccgggctcggcgagacgcgcagagaagggcaccttccgcggggtgcggcgagccggggctgctcccgccgcggtgcgcgtctagccccagcccaaagccggggcgacgcagcaggtggccgcgcggcctccagacagcccgggtctgcggccgaagagctggacgcgggcgctgacactaccctcccgcggccggcccggccctgcgcccggcgcgctcccagctcccagctcccagctgcaggcgcgccggcttcgctcggctccgctcggctcggcgggggcggacgccgctcagctcccctcgccggccgccgcgcgcacctcccccgcggcgcacagctcccaacgccgcctccgcagctggcccggcggagtggggccgagacctcggggcggggggcgcaggcgccggcctgggccttggacgccccgcgggaggcgggagggcgatcggggtgcggggagggcaatcggggtgcgggcccggctgcccagcgctccctcccaagcccgcgccgctcccgacccgcctcggcctgtccgcgcagcggcgctgtcggggctccgggagggccggggggcaccggagacccggaggtggtggcaagtcagtccgggactggcccagggcacccgcgcgcgtcggtgagagggacccgggactccaggtgacctccggatccgccctctaagtcagtggcctgcggcgggcgtgggcgccgagggaaggaagtgtgcatttgaataaaagtaaaagtttgttattgttgttgttttataaccctgtgggtcctgagcgtctccaggctaattagggaagctgccgccccgtctggaggtgattcatgggtgtgacaccggcgagtgtgggaagaaaggcagctgatgccgtctcagctgcgctcgcctttctttattttctttctttcttctttttttaaaatcctttttcttgtaaagacagggctggtccatttagggagaccgcgcacggagggagctgccttgggtggtcgcccagcgaatctcctccggagcccgagccgcggctttggtctgcggatggcacagcccggcgaccccgtcccggcctcttccccggcggtgcacgcccagggccaggcaggcgagaggcgcgggagtcgcgtcccagcagggagcccaggctgcgacgagtcctcaggggacgccttcaacccaggctggaagagatgatactaacgtcagacggggagtctcgggtgtcaccggacgccagaatgagcggcgaggtccgcattgtttggaggggatcacgcggaatccgcgctactccgcgggacgctgggtccgacggctagcgccgcgcacactggaggcctggaaaagccgagctgctcggctgtcggaggccgagagggcctggaccccggaaggagctctctccacctgtggctttcaaggggctcaaaatcccagatagaagaatcgagcgaaacgaggcccaagacagtttcccatttacttgggcatatcaaacgaagtttcctttttgaatttttaatgttatcccttggccacaagctattcacgtaaaagcctcttttgatggttaagtgctttaagttccctgtataaaaagaacaaaaatagtgattcagccttataacccccccccaaattaataacctgcattcacaatgaatgggtgactcatgacaatcagagacaacgagtttgttgggtgtctgtgtgtttgtttttttcaaaatcctcaaactaaactgaacaactgcaaaaactatactcccctctctcctctcccaccttgagcctctgctccttgctcttcaaaatcatgttagtttttgccgctgtaactactaaatatttatggactccataaactgcctttctacctaagaatttcgtttccagaatatcttaaacctctggctttatttgtattctgtgggtggcttttgaagttcctggaggttttcagaagacaaaaaccgaggttcctggtgattagttaaggccgagaacatggtgtcaacactcaaaatagaaactggtggggaattttgtgaataggttgggaaaatggaaaattatctggagcctggtagagcaagcaccttcatgctttaaaaatgtggaaagaaactgtgcccctcccctacccctgggactttcatcttcctgtgagagctctggttcccagggccctgccaagtggctggcagtcaaggaggctcttcccctccttaatgccttttggat

SEQ ID NO: 3218 - DNA, 4001 bp, Homo sapiens
actctgcacgcctcagttattgcatttgcaaaatggtaaaaatatctacacttcatagaattgttgtataaattaaatgaaattatgtatcatttggcacagtgtccgacacatagtagtaactgcttaattgtagccattattattaccagaaaacacatgtatttatatgaaacacatttctaacttcttataaagaaagcacctatttcataattctaaaattggaaaattatattagtttgtatttttacaaaaatagattgctctcattttctctagtataagaaatagagcaaaaaattctgtagactctgccattaaataaccttgtaggtctttgaaggaaacagcaaaggaagttctatgtttatcaaattccaaagttaagtataagctatttaatcaccatcaacagtacctccataacatattatactatacaattgaagagtaaaggtgatttattctagaattctaactttcaaatgtcctaactgaaaagacaattctgaaatagcccaagccacatttattgctcctcaaaaagaattttaatgaaaagtacacctctattatatattaagcactcttaatatataatgattagtgcttgctttcatggtaagtcaattttcatctgaactaaataccaccaaaaaattactatttgattataaatgtttctatgtgaagtcatatatttttaatagccatataacttctccttttcttgtattttcttgtttatataacatataaacactatataagtttactaacatcattactgagctgatctcaatagataacagacaaccttaaaattctaatttaaacgcaccactcctgtttaagaaaatgtgttaaaagtcaacttggtcttctgggggctgctgaggaaaagaaatgagcattccctgccagtttgaacatattcctgaaaccaagcttactcacacccaccaaaccgctgttgaatagagtcaattttgtcaatgctgacacccaggccataaagaaaggaggaaacagtagacaccgagcaacacacaccggaggccaactgggaaaagcagaacacggaaaactcagtgattcacgggtcttgcttagtactgtgaaagcaccatcagcaaagctgagttgaccaatttcaactctttctcaatccgtaaactatgaactgacggaatttagatttgtttttctcctcctaccacgcctctgatacaatgcaccttcgcccttcccctccaccccacagcccaccatccctgaaataaggacaatggttggagagtctcttctctaagtagcacgtactccacgcccacacgctagagcccggcagcatgacactgacagttttcagtcccttctggtctttctaactcttggagcctccgcacaactcagaaagagaagcggagagaacgctcaaagcggacagctgagcgtaggaaatgctagtttgggaccttctgacctctttgccccacctgtgtcgagataagctcgacacaagtgggccaaagagctggggctcaagccagtcaccacccggaatctcctagaaccgagctggagaaactaccagccctagaggggaaacaagggtttcaagactccagcgccaccactgccagtgtgctgggaaatccagggaacaaggcggcgagcctgggtctgcgcggaccaccgcgcagcctgactagcagccgccgcagagctctaggccacttggcaggaggcgggggcaccaaggagaggcaagcggggaacccgcagcttatttcccaggggcacagctcagcatgcctccccgctgcagagccctcccaactgccctcgccttgagcgttctacctgcaagaagcgggcgcagcccggcccgggcgtccacccccgccagtctcggccgccaccgcccagcctgcctccagagcaggcagcagccgccactgacagagagacaagccgggccaactccttcccatgaaaccccgcgctccagccgctcgccaattggcgccgcggtcggcgcgcgccgctcccccgtcacgtgaccgtaccctgggcgggtagttgttggggcgggtcggccgggaggttaggatcttgtgtttgtggcctccgcagccagcttaggctgctcggtgtcgtgtcgcagttatgtactgccatttattatgactcttagaatatagttatttcttactcttccgctgcctcctttgcttttaaagcctgttctgccaagtctcgctggagaaggaaacccctgaaactggtcctggtggtctcagaccgccgcgcgagcgaagagtggggaggacaaaggttggggagttgagaaggatggagatgggtgcatctggaagggagtccgtcctgaggagtcccccatcagctgtcagccagccagcagcaaagcaaattaagactacacagctccgaagaagccagttcccaaccaagccagtggagaaaagtcagcccggtccccaggagtgcttgaggctctgtcactcttggacgtcaaaaagggtcatttgatgactggacgcttacctcaccggtgtgaggtaagcttcaaacgccgtatcatgttgctttaaaacctgcgggtaacagcataagctgagttttctatcttagaactcttaaccccaagaacactcttcacaggccctgataggtggacccacaaaaaaaccactcaggctatatttgactcggatttgaaacgctgccgaaacggtattaagtgtcctcctcaactggaaaagacaaataacaaatgatgcctgaatgagaaaaagactagacgtgcacacagtaatgtgtgagcagggaaacttcagcgaaggtttttatcatgctttaccccttttacatgctttaccccatgtgcaaacatttttcatgggtttttttctattttttatttatttttattctatttttttatttatacacaaaaaagtttcaatgattttttaaagagtaatagttttaatatgttacatttaaactttgacgatgcaaacaggttgtcaagagaagcaactgagcattgtttggttggtaagaaaatttattatactagaagctaccgcataattcactgtgcaatttgcttgccctaattgcctaaatatttagttacagttctgtacacttgcaaggatgaggggaagggaactgaagtttagcgtgtcactgtggatcaggcactttccaaatgtagaagaaaatgaacagaaacatttcacctgttttgatgtggaaatttaaccgttttgtttttcaacctttgctgttgcaaagtattaaagtcctgtgcagttttgcaaatatatctcaccgcagaaagatctcctttcctaagaagactgggaagaacggctttccacttgccagtaatgtgtcctctggtttcaattgagccatcagtgtctgtactccagcctgggctaccaagcgataccccacctctgaaaaaagggtagcaaggggacagagaagagctgtctggatacacgagattccaaaaacctaatcctgagataaaattccctagggaattgctctaccgagagtagagatttgacctggaaagagaagggagagaagtatttaatcattaactcttttaatcctcccaacaacctttttagtatcatttttcaaatgaggaaactgaaatgtagaaagattatgtacactgttgaaggtaacactaagccactgcctccttcatatcaagaatagttgttcatcgagcaaataaagtgagggaaagacattacaagcagagaaatcaacatacacactattgtggctggacttcaggctacagggtggttccaaatatttattgacaaggccctgtgttacgtgctgaggatacagagataaataaaccagctgtcctaaagccgctgacactagtgagagaaaccttaaaaaaaatacaatgcagactaaataagtgc

SEQ ID NO: 3219 - DNA, 4001 bp, Homo sapiens
aaagacttgctttctctctagagaacaaagcactgatctctacttgtttgcctagtacttgcatcacttttcataccacacaatttgggaagcatgttagagcacatagtgcgttgttgttgttgttgttgttaagacggagtggcgctccctctctcatcaggccagagtgcagtggcgcgatctcggctcactgcaacctccgcctcccgggttcaagcgattctcctgcctcagcctcccgagtagctgggactacaggcacgcaccaccacgcccagctaatttttgtatttttagtagagacagggtttcaccatgttggccaggatagtctcgatctcctgacctcgtgatccgcccgtctcggcctcccaaagtgctgggattacaggcgtgagccactgcacccggccagggcgttttattataatttgtttgggccttggtagaaagcaatctaaaatggaattcagggcaaggatcttccctgagagctcatttctcttcacttccaaaaagattcatttaaaagttcaaaaatattacccacgtcaaacacttaaaagcttacatttcaaatgtgatactaatttatgctatacatgtttaagagtactttaaatcatccaaatgagaaaaaagtttttctgttgactttctctttatacaactgtactaggcaagggaagaccccccagcattaattctagttaaatgaatgtccaagaaatcagagtctgaatttaagtataaaaggcatagcattgatggataatccttaataaaacataaattatctcgaaatagctgttatagtgcacctcattcaggaaagtataaatttatcaaaaacggtgacaagaaaaagctcaaagttcaaattactatgaaatccactcccattcataaaatatcaaaatcttgacaatatttaaggtaaaatacgttatttaccaaaaataaaaatccaatatgtttaacagacttcattttttaagaacatacttcccctcccctccccgacccccttctcttggtttatgtatttaatatacatgtattaattaagaagactagtctaagtcacttccacaccagatagaggtctacaacaggaatctgatatatttttttcttatttcaaatagaaaaaaaagctcttggagacagagacgttttcccttagccagtggaaagatgggaagagagggggccccgtggggcaggcaggcaggcaggtcaaaggcctctggcctaacagagggcggcggtaacaccgagtcatcccggaccgggaagaagccttgtacccaggcttcctgacttctgcacacacaggagatcggagtcagctggaggagaaagtaaaatcacatcccagaaccggcatgaggtcaaagccagtcaaaccttgggcccggaggctcactacgcggcgcgtcctcggggcacccccagaccttcgcgccccgctcccgcccgtggaggcacagaaactccaggggcgcagagcggacaaaggcgccgggcagcgggagcgaggcggggcagaggcccggggcgcggccgggcgcgcagaagctggggttcccgccgctgtgcgcgggcgggacggtctgcagggacatggaccgggcgggtgacgggacgcgggccagctggctgctcgaggcgcggccggctgaggctgtgcacgggggcgttcgggggcgtttgggcaagtgggaccccgcccggggtgggaagccgcggcgggagccggctggctgtgagcggtaccgccccatgccgcacttcccgccccgcggtgggcacccgagccccctcggcgtctcgctcacctccacagggccgcggctgccctcgcagcgcctctgttacctgcagtggtcggcaccgcccgcgctcgcgccctgaagctgccgctaccgagcccgcaaccccgtccgcagcgcctcacaccccgcccccgcccgcttgcaggcggctgcggagactagcgccgaggggtgggggagccgccgagccgacgccgcccggccaatcgcgggccagcgccgcagcggcggagccaatgagcgccgagcccctgccgggcgggagggcaccggaggggcggcggcggctgactgtcgccttgccttgcctgctgcttctccttcctcctctggcatacactcccaggcttgtcgcagtgcagcgtccccaccctcccagcgtcttgtctcttagcaaccagatcctaggagcctgatcttaggtgaccaaccctgagtccagaagaaagggggatatacaggagataaaagattaaagaatggatgaaattgttcttggtgcagatcatttggtacaccgcttaggtagagcggaaagatcgcatgatgagggacaccgaaagtatcttttagaccaaggtctttgggtaaggacctgaagtgtctttaccaggaggtagctctttaaaaatgtaaatagctctggattacaaattcggttttcatacattaatagggtgtgtgtgtgtgtgtgtgtgtgtgtgtgtgtgtgttattgtgaggaacactactattgggcatctagtaaaatgcaaacggctcaatattgtagggtaactgctacatgtcaacatttctatctaatttccacttggtctattctgagaaccaaaattaaatgttaggattagaaagaacagaaaaagtaaagccttaaccaaatgaataattactacgagatctgatgattaagtagagattaagtggttcactgtacagaatgtcaggagtttttaccaattgtatcatcctgtgactttctgcagatcttttacgatttttgttccacaaagacattaaagtggctgggtgcggtggctcacacctgtaatcccataatcccagcatttagggagaccaagacgagaggattgcttgagcacagcctgaacaacaaagtgaaaccctgtctctaccaaaaaaaaaaaaaagttgttttttttttaagttagctgggcgtggtggccccaatgagctatgtttgcaccactgcactccaagctgggcaacagagtgagaccctgtcaaaaataaaaataaaaataaagttaggcaagtgtcgtatcataagatgttaggttaagtcaggtaaattctttttttatttttttgagatggagtcttgctctgttgcccaggctggagtgcagtggcaccgtctgggctcactgcaacctccacctcccttcaagcgattctcctaccacagcctcctgagtaactgggatttacaggcgcatgccaccatgtccagctaattttttgtatttttagtagagatggggtttcaccatgttggtcttgaactcctgacctcaggtgatctgcccgcctcggcctcccaaagtgctgggattacaggcgtgagccaccatgcccagccaggtaaattattattattttttttttggagacagagtttcggtcttgtcacccaggctggagtgcaatggcgcgatcttggctcactgcaacctccgcctccctggttcaagtgattctcctgcctcagcctcccgagtagctgggattacaggcgtgtgccaccacacccggctaatttttgtgtttttagtagaaatggggtttcaccatgttagccaggctggtcttgaactcctgacctcaggtgatctgcccacctcagcctcccaaagtgctgggattacaggtgtgagccaccacacccagccccagccaggtaaattcttaaacagaaactgcttgccctctacttcccctctttcttctttcatataggctggtacttagttgtgatggtggtactttacaaccatgaaaacaagaataatgcataaggggctgggcatagttagctcacgctgtaatcccagaactttgggaggctgaggcaggaggatcacttgaggttaggagttcgagaccagactggtgaaacctcatgtctactaaaaatac

SEQ ID NO: 3220 - DNA, 4001 bp, Homo sapiens
tttgatgaaaacatggggaaagaagacttgaaaaaagtcttggaagaaccttggaagggccctgagaaatttctgtttatttctctctttaactcgctggattatgatttctttgatgggctgggccttctatctttgattccccaaaagtgtgaccagcaaggcagatactgccaaaatgtttactgaattaacgagaaggtcacaaaaccttaagagacatttaatgtatcctttggaattcactccaaactgcaggtccacaactcatttaaacatttaagtatagatggggatgtgcaaagatggatggggatcatgtcctgctggattaatcaatttagttttgaatccttgaaagacttgctttctctctagagaacaaagcactgatctctacttgtttgcctagtacttgcatcacttttcataccacacaatttgggaagcatgttagagcacatagtgcgttgttgttgttgttgttgttaagacggagtggcgctccctctctcatcaggccagagtgcagtggcgcgatctcggctcactgcaacctccgcctcccgggttcaagcgattctcctgcctcagcctcccgagtagctgggactacaggcacgcaccaccacgcccagctaatttttgtatttttagtagagacagggtttcaccatgttggccaggatagtctcgatctcctgacctcgtgatccgcccgtctcggcctcccaaagtgctgggattacaggcgtgagccactgcacccggccagggcgttttattataatttgtttgggccttggtagaaagcaatctaaaatggaattcagggcaaggatcttccctgagagctcatttctcttcacttccaaaaagattcatttaaaagttcaaaaatattacccacgtcaaacacttaaaagcttacatttcaaatgtgatactaatttatgctatacatgtttaagagtactttaaatcatccaaatgagaaaaaagtttttctgttgactttctctttatacaactgtactaggcaagggaagaccccccagcattaattctagttaaatgaatgtccaagaaatcagagtctgaatttaagtataaaaggcatagcattgatggataatccttaataaaacataaattatctcgaaatagctgttatagtgcacctcattcaggaaagtataaatttatcaaaaacggtgacaagaaaaagctcaaagttcaaattactatgaaatccactcccattcataaaatatcaaaatcttgacaatatttaaggtaaaatacgttatttaccaaaaataaaaatccaatatgtttaacagacttcattttttaagaacatacttcccctcccctccccgacccccttctcttggtttatgtatttaatatacatgtattaattaagaagactagtctaagtcacttccacaccagatagaggtctacaacaggaatctgatatatttttttcttatttcaaatagaaaaaaaagctcttggagacagagacgttttcccttagccagtggaaagatgggaagagagggggccccgtggggcaggcaggcaggcaggtcaaaggcctctggcctaacagagggcggcggtaacaccgagtcatcccggaccgggaagaagccttgtacccaggcttcctgacttctgcacacacaggagatcggagtcagctggaggagaaagtaaaatcacatcccagaaccggcatgaggtcaaagccagtcaaaccttgggcccggaggctcactacgcggcgcgtcctcggggcacccccagaccttcgcgccccgctcccgcccgtggaggcacagaaactccaggggcgcagagcggacaaaggcgccgggcagcgggagcgaggcggggcagaggcccggggcgcggccgggcgcgcagaagctggggttcccgccgctgtgcgcgggcgggacggtctgcagggacatggaccgggcgggtgacgggacgcgggccagctggctgctcgaggcgcggccggctgaggctgtgcacgggggcgttcgggggcgtttgggcaagtgggaccccgcccggggtgggaagccgcggcgggagccggctggctgtgagcggtaccgccccatgccgcacttcccgccccgcggtgggcacccgagccccctcggcgtctcgctcacctccacagggccgcggctgccctcgcagcgcctctgttacctgcagtggtcggcaccgcccgcgctcgcgccctgaagctgccgctaccgagcccgcaaccccgtccgcagcgcctcacaccccgcccccgcccgcttgcaggcggctgcggagactagcgccgaggggtgggggagccgccgagccgacgccgcccggccaatcgcgggccagcgccgcagcggcggagccaatgagcgccgagcccctgccgggcgggagggcaccggaggggcggcggcggctgactgtcgccttgccttgcctgctgcttctccttcctcctctggcatacactcccaggcttgtcgcagtgcagcgtccccaccctcccagcgtcttgtctcttagcaaccagatcctaggagcctgatcttaggtgaccaaccctgagtccagaagaaagggggatatacaggagataaaagattaaagaatggatgaaattgttcttggtgcagatcatttggtacaccgcttaggtagagcggaaagatcgcatgatgagggacaccgaaagtatcttttagaccaaggtctttgggtaaggacctgaagtgtctttaccaggaggtagctctttaaaaatgtaaatagctctggattacaaattcggttttcatacattaatagggtgtgtgtgtgtgtgtgtgtgtgtgtgtgtgtgtgttattgtgaggaacactactattgggcatctagtaaaatgcaaacggctcaatattgtagggtaactgctacatgtcaacatttctatctaatttccacttggtctattctgagaaccaaaattaaatgttaggattagaaagaacagaaaaagtaaagccttaaccaaatgaataattactacgagatctgatgattaagtagagattaagtggttcactgtacagaatgtcaggagtttttaccaattgtatcatcctgtgactttctgcagatcttttacgatttttgttccacaaagacattaaagtggctgggtgcggtggctcacacctgtaatcccataatcccagcatttagggagaccaagacgagaggattgcttgagcacagcctgaacaacaaagtgaaaccctgtctctaccaaaaaaaaaaaaaagttgttttttttttaagttagctgggcgtggtggccccaatgagctatgtttgcaccactgcactccaagctgggcaacagagtgagaccctgtcaaaaataaaaataaaaataaagttaggcaagtgtcgtatcataagatgttaggttaagtcaggtaaattctttttttatttttttgagatggagtcttgctctgttgcccaggctggagtgcagtggcaccgtctgggctcactgcaacctccacctcccttcaagcgattctcctaccacagcctcctgagtaactgggatttacaggcgcatgccaccatgtccagctaattttttgtatttttagtagagatggggtttcaccatgttggtcttgaactcctgacctcaggtgatctgcccgcctcggcctcccaaagtgctgggattacaggcgtgagccaccatgcccagccaggtaaattattattattttttttttggagacagagtttcggtcttgtcacccaggctggagtgcaatggcgcgatcttggctcactgcaacctccgcctccctggttcaagtgattctcctgcctcagcctcccgagtagctgggattacaggcgtgtgccaccacacccggctaatttttgtgtttttagtagaaatg

SEQ ID NO: 3221 - DNA, 4001 bp, Homo sapiens
aaattattcccaaagctgcaactgggtttctagacatgctaccagcaccttccccaaacccaagggagcgttctgcctacctgctgccttccatatgccaggatggcttctttgaggtcttgaagtgtgtgcagttcaagatccagcttcctccagggacctctggggcagtaggggccttttctcctctctttgggtgtccatgccgaaatggcaaaaccttctgagtacaggatcagggcaccctttctagtactgaaagttttagggagaaagaggctccaggagtgctgactggcattgttcttatcttgaggtttgctgacaggaacatagtcttctggggacctccagttcaagtaatcctgcaatgagaagcagccactttgacggagccactgtggaagacctttctatagcaaatactgcttgtgcaaagccttcggcatttttttagttactgattttctctgaactgttcacatggtgttatggaacacaattgctcttcttagcaactgccttttctctccacatttcaaaattagtagaacccagggcatggttctatttcaccccatacaactttcaggagagtcatgtatggctggaggattaactcagcttgtatgtaggttacaggccagttaaagtttcctggtatgcaagtaagtggtcagaattattaagggcagcagataactttgaaattagacctggactagctggcagtttaaataggagcattccaagccaccaccacttcagctgtacgtggggagaatttctatacattccagatgctatgtaacattacctaatttggctatttaggggcctataaagcagttacatatcttgtaggtaagaaaatgccattggccatacaggtcctttgaaactttatatgccgtttaacacagcaaaggtcaaatatcatgacaaagtaccatgacaatggaaatctctgtatgacccccaaatttgcaaagtatccccaataggtttcttatccctggcaggattcaagtgaaataaaaatctagtataacaagggaattttgccacctctttaaaatcttctaaaatgaggtgggtttttttttggcctatattaaatatgagtcctgtgggttgaattccagaaagttcaaggaagccattgaaatggcatgaacacacacagcatttcaactgcagagcacgacttccaaaaaccaaacaaccatcagtttgcctagaacccaggtggaaattctggtcttgcaccaaaccatccaaattccagacaatctggaatctcctttggtccaagcaaagacagctacaaggggaaagatgagggcctcaggggcaatctcggtgtgtcaggaaaatgatgttattttcttgagtttcatgaaggaggaaggaagatcttccagtgaccccgccacctcactaacaacacaaaccaagacacacatggtttacctcccaagtggaaacatagagcattcctctcccacctccaaaatgtgcctttcttcagctgtgggactcacctctggttcaaagtagacttctaacttctgtttgtcctggcccagcttcccgtggccccggctcaggagggagagcgtgaacatgtttccctctgaccaccccttctcaagggcagtccatcttggttttgaaggctgaaatctggtcacacctcaagatttccagagctcacagcaagcccaagaagaccacaaacacagggccttttattaaatacatttttccctctcgcagcagcttcttagtaacaaccagccacacagtttagacagtgtgtgtctttgtggagagaaaaaataaaccgcacagccagcctcctcaagccctggattgtctactctctgggcgacctgtctctccccttctcctgagctcttgttgtcccttggtcccggttgctctgttaccagccgtgtgcatctacagatctcggccacagcaccatccttcttgtctgagcggaggttgtttcctggttgctatggcagcacagggaaatgaagtcccttaaactaacccaggcaaggcagagacgggtgccgggtgcagtgtgcattccccggggatgggggtgggggtcaaatggacactgaagggaccaggctcaggttgcaagtcccagttgcatggggtgggggacttgttggggtactttttctgttattgttctcatcttgtttttagagagcgtcttcccctctctcctgatatgtgagcctgtcactgtcaactaaccattaacagagccagggtgtaatctaggtcacctaaaaccacctgtgactttttccttggctgagctccatcatcccctcaactggacacgagacctcattatggtagttgctgctttgcctgagcgggagacactgggattctctagcttcctttgcatacctggttctcaactgggcaagctatcccctgatgggggtgctctggaaatgtgggtgggggacattttggttgttgcaatgattgggggtcttgctggcattgatcaagcagaggccccagatgctaaatgttctacatggtgtgaaattcccacatagtgatgaactgtcccactagaatgccaggagcacctgctttgagaagcactgtgtagcctgggatgcttgggtctctttaacagtgacattgtgacgagcacagacaggagggaagagggtcaggaaacaaaaagacccctttgctggggatctaggaacctgctcaagcctggaaaagcaagctgcctgttagctgtcagctgaactaccctggcagtcttgtgggagtgcccactgctggcctatatgaagaagcacaacaggctacaagcccacttacctttttgatcttcctatgtggcactttcccctccccctctgacccctccacccccaaccaagttcaagtctcctgagaaagaaatagaggttctgttgtaaaataaaatagggtttattagggggaatcaagacagcgaatgagtgaatgcagaggctccaaacagaatttaatcaaaaccacaatgagataccacttcacacctactaagatggctattattaaaaaacaaaaacaaaaacagaaaataacaagtatttggtgaagatacggagaaattgaaaaccttgtgcattgctgttggaaatgcaaaatggcgcagcctctgtaggaaatggtatgacagtttctaagaaaattaaacagaattaccgtatcaccagtaattccacttctgggtctgtatacctaaaggaggtgaaagcagggtctcaaagagatatttgtatactcatatgcagagcaaaactgtttataagagccaaaaggtggaagtaactcaagtgtccatcgacagatgaatgaatcaacaaaatgtagcatatgcatacaatgcagtattattcagccttaagaaggaaggaaattcagttggtcaccatggctcatgcctgtaatcccagcactttgggaggccgaggtgggcggatcacctgaggtcaggagttcgaaaccagcctggccaacttgatgaaaccccgtctgtactaaaaataaaaatttagccaggtgtggtggcacacgcctgtagtcccagctacttgggaggctgaggcaggagaaccgcttcaacctgggaagcggaggttgcagtgagccgagatcatgccactgtactccagcctgggcaacagagtgagactccatctcaaaaaaaaaaaaaaaaaaaaaaaaggaaggaaattcagacatatgctacaacacgcatgtaccttgaagacattacactaaacaagataagccaatcatgaaagaacaaacattgtatgatttctcttatgtgaagtacttagagtggtctgattcacagagacagaaagttgaatggtaattgacaggggctgtcagggagaggggaatggaacatcagtgtatagtgggtacagagtttcagtatgaga

SEQ ID NO: 3222 - DNA, 4001 bp, Homo sapiens
ctccagcctgggcaacagagccagaccctgtctcaaaaaaaaaaaaaaaaaaaaaaagttgccccagggagatgtagaaaatggaggtacctgggatcctgacttctttctgactctcattcaatcctattatctccttttccttgaagtaaaaggtttaagtttctactgtcttctaaacagccctgacaaatacagtagcacataaaatggagaaactgaccgttcttgagcaaaagcaggaagaaggggatggcacattcatacatgatcctataaaaattaatctggcagtgtatgtgacccagactggaaaaatacaaagaatcagggccctagataccagtcaaggaatcaccagacagtacacaagagaggcagtgggaatagagaagaaatgagggatattaacttgaaaaatataaaatccctgacatttgaactttctgaactaccaaaatatccagaagagatattctggatataaagataaaactatgtgactggttggaaaagaaaacaggtggaagatgaccagatgcccagcataggtgactgaagaatggagctgcccttaaccaaaaaaaaaaaagcaggagaaagagcagacttttctctacttaagttatgcctcctcccttccaccaccccagctgggcgaatggggctttggccaggctgaatttgaagtgtcccaaaagaactaggttggagaaacccacccaatacttggaaaaagataccgttcacactgtgtgtgaatgatctggaaattattcacacaaagggtgtagaacaaggattctcaaacttgtgtgcaccaaaattatttgggaagcttgtcaaatacacatatcccttgagctcctccccgggagaatcccattccctagatctggggtggtgcccagaaactgacattttaacaagcaccccaaaatgattctgatgaaagtagtccatgctagtaaagctagaagagaacaaagaacacacctggccacggcatttcccaacctgggctctgcactcaataccccacggtggtttaaaaaggtgtagatgtctggtcctcagtgttgtcaaaatgtggacaggaacgaacctgaaggggtgattcccgagccacacctcaggccgaaggaatgggaatctctaaaacgctaagaaatctacatttttaacaagcgcccatagggagcagagatggctgcatagttattcataaaaaaatttttcatcggtttaaacctgtcaacttgaaagaataaaaattccaacattacaaagtgatgaagaaattatttccctataaataaatcttggaggcgtggaaatcaatggcttgcactattttgccaggcgtttaaaagcctgcacaggacaatggagcaatggagcccacgataaaagcaagggagaaaacaacacctcccggcccgtggaagcctaggaggaggaacctagaaagactagcggtaccagctaagggggctctcaaggtggtggatgtgccagaggctgcttggcaaaagaaaaaaaacggttttaccaacacccttcaccccaacccacccgaggggcccctcaggagacagaccaccagagactccaaggtcggagaccttcccggcgctccaggaaacgcggactcgccccgaaagccggggcccgagcgtccggggcccgcgccatgccctccccgggacccccggtccgagctcgccccttccgcgcactcctcggctgtcccacctccccgcccgactccccgagcccggcctcgcccccgactcctccccaatcccgcggcaaagcttcgcggaccggcctccacactgacggtctcccaacctggtcctcagctccggcggaacgggcccgctcggctgcaggcgatgtcagaggacggggaagcaagagacggcgactgcaagcgcgtcgccctcaccacacccggcggccatattcttccctctccgcgaactgacagatcacgtgccctgggtaggggagggactccgggttgccacgccccctgggcgtggaggggaggggcggggcggggcgtagagcaggcggggctggaggggccgcggggcggggacacccaggacaagcgccccaggcaaggtttttcagtgtcaatgtcactcttattacagttaatttattatccctattttccattataatcaagcttattcagagaaataaacatcaattatatcttcagaagaaactgcacatacataagaaatgaaagcccgctcagcagccttcttccggatccaggagcgagacctctgcctttcgcggggcctgtagttcacactccttccaggtctcccagcacctcccctcacctccttcagcctccacattcctaggccttgctgccaacaagcgtcaatcttgatttttgaaaaggtccaaggatgattacgacgtgcgtaggttgcgaaccatcgaaaagcacccaccaatgtgtcaacctggcaactcaggaaaaagccaataaggagcctgacttcatcagaagttggtgcggggtggggacaatggctcactcctgtaatcccagcattttgggaggccaagacggaggatcacttgagctcaggagtttgaaaccagcctgggcaacatggagagacctcttctctacaaaaaaaaaaaaaaaaaaaaaaaatacaaaaatacaaaacttagccaggcgtggtgttgcacacctgtagtcccagccacttaggagacagaggtgagaggatcacttgagcccaggagttcgaggctgcagtgagctgagatcacaccactgcacttcagccagggcaacagggcaagatcctatctccaaacaaacaaacaaacaaacaaaaacggaagttggtgtgcccctcatgaaacaaggagcgaacaccccaacgtgtacagtggagtcctaaatggtgtgatttcttcgataatgacttgctaaggccagccactgttgtaaacagggcagggtgggtcaggcgttgggggttagaagtatggtaggtgtattagcccgttttcacactgctataaagaaccacctgagacagggtaatttataaagaaaagaggtttaattgactcacagttctgcatggctggagaagcctcaggaaacttaaaatcatggcggaaagggaagcaaacacgtccttcgtcacatggctgcaggaagagaggtgcccagcaaaagggtcaaaagccccttttacatccaacagatctcgtgagaattcactcactatcacgagaacagcacgggggaaaccgctgacgtgatccaatcacccccgaccaagtccctcccttgacacgtggggattatggggaatacaattcgagatgagatttgggtggggtcacagagccaaaccatatcagtaggatataaggatgaagccaaccttagagtaggggagaagacaaggaaacaggttaaatgtgcgttatttagcacagcctttctgagtcctgaccatgtcctaggcacagtgcagtaaggaggtaagcacagaggatggagttaccaactctgcttggggtccactaggaaggttcacaaaagaagggaccccccccccccgcacctccagctgtatctgaagtatagtttgtccatcacatcagttggatggggctaggaagaatgtccaggtcggggaacaacactttggaaaagaatagagatgagaaggagggtggcccaaagttccaggaactgtcaatatttgccagccttggggctggggtggcagcatgggagggggcagtagatggagcaggggtcagcctctgaagggccttgagtgttaagtaccatttgggaatttgttctagggaaatagaaggccactgaagggattagaagagtatcaaatttgtcctatggaaatagaaggctgcctcccccagcatccactacccttcccaccaccccccaaccccatctttcctcagcctcc

SEQ ID NO: 3223 - DNA, 4001 bp, Homo sapiens
taaaggctgccctcctccgatcccacgctgggcccctcagccagcggccttaccgcatccctcctcatccctccggtccagagggttcctgggtcttgactccaaccaccccatcaaccaaacaaggaacccctctaaatagacggtgtgtgttcagtgcaagggcagacctgagccctggccctggcccatcccacaccctgcaccgcaagctccacatctgctccactcctgactgccccactcctgactgccccactccacagcctggctaaggctggtggccaaccacacctgcaaaatggccgccgcaggtgcagccccaacccccacgtggaccccagagcttcccttcaaaccctctgctgccttctcacaccacgagggtgctggcatggcttccctggcaaaggccccgccagcctgagtgcgacctggtgtcccgcagagccgagcacggtgtcgcgctgtgcgtccccagggtgaggccagtgccagccctgcgaggcaggggcctctccgcaccgcctcctctccgcagccgcaagatccaatccgcttgccctggcaggcctttaattccagcaatgcaggcaccccttggaaagggctgacgcttggggaaggggtcctccagtctctgggggaaagtccctattcccggggacgtgggcgcgcatcgggtccgcgccgggcgacgtcgcgctcgcgcccagcaggccccatgacttggcattccctccttcccctccccctcccgcccctgcggccggcagggcccccccaaccccacctaccggcgcccagcgccccgctcctgcggaccctccctcccggcggggatgctgccccggcccttcccagcgagagggcagcgcggctggtttgggggaagtcagcgtgaggagcggcttaaagcgggagtgcgaaggtcttcgcggccactgttccttcgtgtcatccgagcccgggcgccgggggcgcgccgccagcctagaccctgcggccccgcagcccctccctcgccgccgggccacacctgttacaggggcgctggctgctgagacgcaggcagtgctcgccggcggcccctcccaggtgctgggtctttctggaagggagctggggtctctggcgtgggagggggtgatgggcaggccggccgtgcaacgaagcgggtggccaggccccaacgccgcagcccccgccccgcccgcctgttttgctcccggctccagcatccgccctcccccaccccgggaaccggagcagctgcccgcgcccggccgccctgcgcgctctcccctcgggccgaggcgctgcagccgcgcaccctcccaggtgcggcgtcagcgtcctcagccccgctcaccatccctcccctcccccgccgtctgggcgcagcccctcccgcagccccgccggtggctcctctccagggaagcggaatagccggggaagggcgggggtatcccgatcccgccggccgggcgagccctcccgagggcgacccccgcccgcctaagccgagggtcccgctgcagccgagatcgcggcaaagggaccttttccagcggcacctgaagggcggacacccctgaatttcccccattgttctctgcggagatggaggaaggtctggaagtgaaggggcctcgcagtgcctgcgctttgggcggcaacaagggcgccgggccggagctccccgccctgggcgcagtgggtgcaggtgcgggctgcgggcgcgggctgccgggcgcaggtgcggggcgaggggcgcgggcgcgggaggccgggcgggcggcggccttacctctccggcgtcactggcggcggccccgcatgggcactggcatgggcgcgggctctcgagcccggagctgctgccgctcgccggctgctctgcgctgtgacggcgccgccgcgtgacgggctgcgcgcccccggcccggaccgccccgcgcccctcccgaggcgctggttggctgcgcgcggcgtccgagctccagtcgccagctggtttgtcgcgcggggagagggacgggcgacgcggccgccgcggggatggggctggggacggagggggccggggccgggctgtgacgtcaccgctgacaccgcggcgggccccgcggagggtgggggaccgacacccggctcggacgcagcgtcccctcccccggcgtgcccctgagacctcgcgggggagggacccggcggcgccccgtcccgaagccccgcgtgcacctgaacttgcccgcggacccctcgccgggccgtcccccaccctggcccctttcgagtgaaatcgtaaaacgtccacctgcccccgctctgagccagcgacagacgcatcgtggggggcgggcggggctggggagggagggctccttgcgccagggatgctggctccgggtgtaacaggtgcgcggtgaaatcgcatcttgtgtcggggccggggcgccgggggaagagcagcagtgacccaggccctccccgccggatgatgcaacccgcccgcggacccgccgcctcgcctctaccgcggctcgtggggaccccccgccctcctctcgccccacctctccaggcccccattgtcctcaccccagcctgtccagtttaacttccttggacccccaagtcacacgccgctcgggggccaccccggcaaaccccagcctgcgtcacccgcccccagccgccttcctagttccaggggctgactggtatctctgtgcgcgccaccgtcctccctccaccgtcccagggctgggcaacttcgacaaagcctctgggcagctcgcccatgggaacctccccgcactgcggtgcgggggtgcacggatttcgggccaccctgaaccccggggctgggtcccctccagcccagcccctgccatcgagcccctgccatgggcatcctggcgtcgcctggctaagcctccctggcgcccagcaggggcctgcgctgccctagcggcctcgccgttaaccatttcatccacactcctgggagagccggcttcacctcagtcccgacagctgcgtgcgagcgccttgcaggtggctgggggagattcacatccacttctgcaagacacgggccccccactcccagccccagccccgccgaaaccagctagacagctcctcctccttcactatttcctggaaccgccggcatgaaagagaaatcaattgttcttcctaaccctggcagaaacaataaaaccatctgggcttctggggctggggtctttatcacctccgttttcctcatgctttttaatctggcaagttctctatttctcgaggcaatagacatttttctaggaattaatctatttcacgttaatatttaaatgactagcatatctttttttctttatattctggctttttatggttttgtttgtttgttttgacagggtcttgctctgtctcccaggttggagtacagtggtgccatcttggctcactgcagcctcagcctccccagctcaagcaatcctcccacctcagcctccctagtagctggaactacaagtgtgtgccaccacgcccagctaattttagcattttttgtagagacaggattttgccctgttgcacaggctggtctcaaactcctgaggtcaagccatccacccacctcggcatcccaaagtgctgggattactggcatgcatttggcctgtattttgttttttgcatttttctcttttaatatttttaaatattttcagagctccaacttttagttctgttaaacgtctttcccgttatttcatttgcttctgtctttctgtattatttccttcctttgtggttctttggatttgatctgttcctctgtcttgaaccaaatgcttagctcctttttaagccttctgattttccaatagatctactgtattaaaagctacaaaattccttctacagaactgtcttggctgagtctcacaaatttggacataaaatgttttcattatcattca

SEQ ID NO: 3224 - DNA, 4001 bp, Homo sapiens
tctggcctgaggctgggccattctcaaggttcaggggcaggagggtcccatctctgaggctttgttcttccatccactctgcttctggtggtctttagctgctcgacgggtctggttcttgtcactgtgccaaccatggagttccccatgaccccacatgcaagactgaggtggcaattgtgctgccggcacccagtgggggatggaaggggattcacagggccctccctgatgtcctgggtcaccttacaatgacacagcaaagcctgttggagcgtggaacaggcgtcctctgcccaccccgggccacagtgctcaccagaggtcacggttcccacccggagtcgaaggtcacacccagagccatggttcgcacctgaggtcacatttcccacctgaggtcacatttccagactcacagctctgcgcagcctgaggcttccctcttaaaggcaagggtcctgccacctgagcactttctccgaccacaaaaggccagggctgcagtcagctaatgcagcgagcgttgttggaaaagcactggccttcctgggcaggacaaccggtaggtgcattgtgttcatccacgggccccggcaaggccagggccccggccacggaggtcacccacttacgaacgcacctttgtcagcttcccctcaaacttccccaatctcccacagtgcatcctgggaccacctcccaaataaactcttggtgctcaaatcctcatctctgggtctgcttccaggaaccaaacagacaaaacaattcaccatgaagaacagtcaggatgcaaccctgaagtacactggggccccacagccgcagcagcctccataccctggagtttagcagggtctccccagcctgtccactgcaccatgattagccacagagctccacgggcttctggaaggatcatccctgggccagacagagggcccgagcagagccctcacttccataggacgtgacagagcccagaacacccccagtgacacctgaatctccagcccctgagcaggcctcggagactaaacctagggaggaagcttccatgggacctgagtgccctcccctcgggacgcccccctccccacctggtagataatagatgagggcatgtcggatgggtgcacggcacctgtgaatgggaaggctgtcattgtccacatcctgaagaccaggtggctgttcatgtcaccactcagtgcagctgacaccacttgatcctgtgacggcagcagcagttgcagctgcaccagaggccccagcacaaactgccccgctgagcccagccagccacagaactgagagatgacaattggttcttgctccaagatactgatacggtttggatatgtggggaaacatatgggtgtccttataagaaagccaaacccagtggtgggtgtccttataaaaaagccacatgaaagcagagacacagacacacagaggagaaggccacgtgacgacggaggcagagactagagcaacgctgctgcaagccaaggtggctggcaaccaccagaccccggagaaggcaggaaaggtcctccctaggagctcagagagagtgaggccctgctggcaccttgactttggacttctggcctccacagctgtaagcgtaaatctctattcttataagcccaccaccgttggtggcagtttgttacagcagccccaggacacccacacgccacatagacaaggaggtgctcttgcggccagggccaggttgactgctgagcctggcccataggcacaggaccatggcccccagcaacccatggccgaccccgatgctgtgcaggctgatactcactggtggtgcttccagacatctgaatgatgcacttggagtcacggctcatttcccgggaattgaaggggcggacccgcaccgccaccttcaccgaagccccggccatctctgtggccttcgtgggtcactcctcgcagtagtgggagccccagtgtggggggaacaccttggaaaaaagggaaacatgaattagaaacaatatctgaggaggcaggacaggcactccggctgcagctgaagccacaggtcttttccactcccctccaaagctcccagtgtgatacatgcatggggtggaatccacaaggagaggaggcagcgcagataattctagaaagcaggagcccagcgggaccagtggaacccagcttcgcaagcctgaggaagctgaaacccaacaaaagaaacagaaacacagcgacctgggtgtgaacgtgaaggtggccttcacacccacggcaaaccccccaggaagggtcttcccctgtggatgcaggcgctggtgggctccatgccaggtccgcgcaggccccaagagccagtgctggctccagatcgacatgtcaaggacgctttaaaacagaacagtgttctagaatgccccatcacacccttcacaccaagcgccagctggtagccacatcagcagtagtgtggtctctgaattagcaagaaagaactttactcagaaatgaaaagaacagcacagacagccctaagcaatgggacaaaagtcaacgttttcggcccaatgtcctgctggtaattcacgcagaaggtggagaggaacattcctgagccccactgaggagaagcaggagacaagtcatggggaattcggtacaagccagggctgggggaccagcttcggcctggcctttaccccagctgtgtgacagcttcctgggccccagtttaccgtctgtgaaatgacggggtggtggtcaggaaccccaaaatgatttggcctctcgggtactgggactctgaggaaggctgatgaaaactccccgcaaaacagtgacgaagcagccactgtgaaaggtctttccgggctgaccagccagatgctgctgcttccccgtgggacttgcggcctgaacgatggggctcctgggcacagggacagggacagcctcgggacagagctgttggttacaggaatggccagaactccatgaaacagaattcatgcagcctgacacgagaggttttcgccaattgctgtctaaatgctctagggtgcccactcagtggtgagtcccacatcaccagaggcatccaagtagagcaaaggctgggaggcctccttgaaacccttccacactgacattccatgaagaggcaaccttctgcctggtcgtccccatctgtaagtgccacccttgggggaatctggcaaaaagcccccatcctacagtgccccagcctcatagctgtgaagaagggacaagcccctctgggctgcccctggaagctccaggatcaagagcaggaagggtctgtctgcagaaggaaagggggcacagcaagcctgggtctgtctgcagaaggaaagggggcacagcgagcctgggacaggatcaagagcaggaagggtctgtctgcagaaggaaagggggcacagtgagcctgggaccagggcagacgctgaactcctggaccttgcccaggccactcccaggctccccagaactcctccgcagaacaggctggatgtggggcagggctgtccctcaggcaaacagctcttccagaggctacaggggagggggatgtgccaggccaccctatggctaagtggggacaagttcctgatgtggctggactcgtgccgcctacaccacagccccttagagccaccaggtgcagccgcgtctacactccagagtgcttccgccactatctcttctcacagccaggagtggctgccagcgtggacggggggatgacctctgagaatctgtgtttccttgtgttgaaaatccctgcacttttaaaactggaaaaagtcttaggacgttccagccgggatggagagaggaacaggcaagttcaccagtccctggctagagcacaaatcccgcaaggtttctagggagcaattctgcagcacgccctgggcctttaagaaggtctgtatcccttgactcagtaatcccaagta

SEQ ID NO: 3225 - DNA, 4001 bp, Homo sapiens
atgggctggggcgggcggtggttgttgttgttgtcatcctcctcttctgccacccaggcctcaatcactgggccctcagggtacccaggcggggcggacacggccttcttcctgcggctgctcttcctccggggccgcttccccagcatccccctcttctccagctgggccttcaggcgggcaatctcctcttggaattcccgcagcagtgtgtccttggggtcctcgttcacccggggcttgttcttgatgttcttggctcggttggcaaagcgcaaggtggagaggctctcatcgtagctgtgagaagctggccccagtgtggctaccatgatggtcttggcattcccccccagggagtcctggagcagccgggtcagcttggagtcccggtagggaatgtgggtgctcctgttgcccgccagggcagcaatcacgttgcccagggcagataatgagaggttgattttggaggcttccttaggcctctctccaccagcaccaccaccactgcctccaccgccaccaccgccacccgaggatggtgtggctgcccctcccgctgtgttggggcctgccttgttctgcctctcgctgccagccaggtccacgaggttgagcttgcccactcggatgtggtcctggccatcagagccacgttcgctgcactccacagtgatgatgaagatggcatgggagcgggagctgacctcattcatgtgggtgctgcccacagcccgggtctggttccccaggttcatcacatgctcaatctccttgacattcttggtgacgaaggaggagaggtccttgatgtagacgccagtctcggggttctctttcagctctagcctcttgcccggctccttggagagcaggtctcgaatctcttcctggtagatctccaaataggaggcccggaccaggtactgttggttctgggagcgggagatgtgggtgaagatgtgctcaaaggcattcgggatgaccccgcgcagctcgggctccacccaggtcccctgcatggtataggtcttgccagtgcccgtctggccataggcaaacaccgtgccattgaaaccctggagcacggagtctatcaggggcctcacggtttcgtcatacaggtcggcctgcttggagctggcatcatacacggcgtcaaaggtgaaggtcttgggcagctcccccggggcggcgcgggggttccgcagggtcacctggcccagtttcacgtccatggtcaggatctgctcgtgaccagcagcctcctccttcctgctgagggggcggcaccgggccaccaccttgagggcctcgctggccttggtcttactggccatcttgctgctctgaccttcctgcccccgagcccctccgcagcctgggcggtcctgctatcctgctcgctaggtcgggatcagcggggccggcccagcccccaggcgcagctcttcaatccgcatgcagcctcctagggtggggacgctgggaggtggccccaacgctgctgcagtccgggcctccaccgctctccggtcctctctgcaccggctgggaggtgaattaggcagaatcccccagtcgccgcgggagcagcgcctgccgagcagccgtgcccggagcccgccccatgcaggagcagagggagcgctgccgtaaacagcttcggcaacaatgagataaaggaagaggaaaatgggatgggggtgggcggcgagctgtcttctcctccttcctctagggatccatagcgtgggctgccggtcgtgggcggccgggggtcccgggcctcccgagggcagaggctcacctggagtcctccccccaagctgggggatcattcattgcagccagcgcggctgctgctgcctctgcctccgccttccccgccgccgccactggagaatgagagagaaaaacagaaggggatggggcggagcagcggcagcgagagtgatgttgccgccgcgctgcggccccagctaagcctcccgactggggtggggcagggggcggggccgcggggcgggaggcgcgagcccggagcggcccgggtgcgggggacaggggcgcatcgccgtctctgcacccccgccgaccgctccgggatgacaggctccggtgccgacccaggtcctgcgcccaccagtcgggtgcagcgcagccaccgcccgccgtcaccccaccgagcccgagcatgccgggaattgtagtcctgcctttgttaaccgggttctggcaggttgctaatgcctttcccggtcccccagtccgggaggcgcctccctcatccgcatgccaccccttgagtgactgctgagcttgcaccacctatgcctggtccctccgagccaccatcctcggacacccccctgctcctgcctttctgcctgcaaatgggtgcgcgtcacccctccccgtcagggtgtcgccaggcctccgggaaccgaactcctaaatgttccttgactctgtcctttcctccccctgtcccggtctacttctggccttcctcttctctctgctggagcccaccttccagctgattctctcgcaccttatgtccgcacaagcacccgggagccccctcgctcctcctccaccgccttccttgtgtgaaagcctctccatcttccgccttcgcagcctcaccgccactactcctctatagaaaaatctgtgttccagacagccatttcttcagttatccagcgcctgctgagccccaggccccattctaggatctgggtccttcctgtcctcaagcagtgcacattcccggaaccgtgttttgtttctttaactggctttgctgtgcagcatctttgtgcttttgcccagaggcctggtcacccttcggcacttagtgccctgccacttgggcagttcaagcacctcctcctccacgaagccttcccttagcaatttttttttttctatagtgaaagaggcacagaatttacctaagacaaaacctggattgaagttccagttctgatggccatccaatggagtggctttgagcagtcactccccttgctccagccttagtttcctcatttatttttttaaaaattcgaggcgggaaagaaataattaacaactacttcatggaatggttgggaggctcaaatgaaataatgaatcatgaagtactgtaccatgagaagtcctgccctggcttggattgcctgacagctcctgcttccttgagtatcctggatagaccatgtctgtgcttggtgttcctctatgggagtcttaatcttttttttttttcctgtaggatacaaataaagtgtaattccacaaggccaaggaccaagccagagtcctatccatggtccactctgcagagggcagttgagtctgtggactgagcccaagctgtctgtctttactctccatatgagaaccagattgagaggtgctgttatctgaaacctggagacccttcttcacagaggcaccagaagagtctttccacaaaacatttccaagcatgttatcctctagaggacccaattgtttagttttccaactcaacaaaatttacctccttaactcttccccatcccagaactttagcgtgagctggactagaggcttgagacttagctgagagcttgcccgcttctgaagctccctggcctccctccaccctctccttgattaagctccactgcttatgattaacatggcttttggaccaattacggggtggggttttggctccgtagactaacccctcttggctctcacaacatgatttctggatggagcctttagttcttcaactattttctggttgcattcggctttgggttttgaataccctttctctgcttaggctaatgtatctgacactacagcgctggataaaagggattctcaccctgttctccccacttgatgtcaccacctggcaggggacttacccagatcctcttgtgtgagagggagattggaatcgcgttgcttacaagatgtgtgatcct

SEQ ID NO: 3226 - DNA, 4001 bp, Homo sapiens
acaggttaaagccctgaggccagagccttgcccaggctcctctagcgtggagagctcccgccttacggtacagctggcacctgctggtccccagggcccttcgctgcgactgcggcagacaaccttggcaaagatgctggggaccgcccgggctggaaaacgtcggcctctggcgcttgagaaaggccaggcggactcctgcaataccctcggtaaactgtcacctgtcaatcacttgacctaaatacaccagccactggaggaaggggaggagggggttagtcggagcatgctcagtgatcaggatgacatcacttaatcaatgctggggacgggaaggctgcatcagcagcctggagcaggctgccaggaacgtgtcagcggggaccgggaggctcccattaactcggtccctccccacgcggctcgcatacaaagggggcaccatcagccacacacgctacggacagcgggcggggaaggggcgggggaccgagctggtttgtttcatctgacagattcctttaagaactacaatccattggtgttccctccccctaccagcagccccagctgcagagagggagctaagtagggggagggggtgggggagaaaaggtggggaagggagatagagagggaggggggtccgagccgcacgaagtaacttctgctcttggcacagggggctactgcgctctgagccccctcgccccacagatgtggacacagcctcctctccacccagcgtgaggcgcatcagagggtctgcagacatgggagggaggtcatcccagaggggagggatcaagccgggactccacatccagggcagccaggcgtgagaggaagcgggagacacaccaggcctccaggggacaccgaggccaccagtactcccccaaccctccgccttccgcgcgcggagccaggtgtaacaccgcggggagccgcgtctacactgccgcgggagctccgagacgcgactagaaattttcctgtacccctttttctttcttttttgctagggtcgtgagaagaagaggcaaggcgtttggtaaatcgaattgattgatgcccagaagcatttgcgggttgcagagctcacactttaaagggggcctgggcacccggcttgagggtcacccgaacacactacccacgcggcgaggcgagcgtggggaacaatgggcccacccgggcccccacccggcgaacaatggcggcgccgagcccgtcttcgccccccatccccacccccgccacccccgcccggcccgccgctcccggccgcctctccacccgcccgggagggaaccatagtgcgcggggcgaggggtctctggtcaggtccacccgagaggccagccccgcgggaatgtccgagggggcggcctaaacacctccgctgcgtctggggcgtcggggcgcccagctgcggcgcggagcagcagggaaggcagacgccccagccacttaccccgatcaccacggtctcatcgcctttaaatttggggatgaatttgtccccgcggaggatctccgcttcgttgaggggccggaaccggcacatcactttgatgctgcattcggctggatccgccatctcggccggcggtagggagggggcacggggatgggtggggggccggggccgggaacgacgagggaggaggccgcgagctgcaccgcccacagctaggccgcctcctgcagcctccgacgacgcttctcagcaggtcatcgcgagcccggccggctgagcagccccggccgctccgagcccgggaaggtgggcagcttctccgctccggcccctccggctgcagaccggcctgccctggccctgccccgcccctgcccagcgccccccggcccacctgcccgcgaccacgcggcgggcggaggaggcgatgcgcagggagcgagcctcgcccggctcagacctcccgggctcctgcgcgctcagccatcctgcatcagcaccagcgcgctctgccgccttgagacccgcccctccgccccgccctcccctggcccgccccgggacggtgacgtcaccgtagaggtccgcccggcccccgcccgactccgagcgctgcgcatcccgggacttgtagtcactctacctgccgggggaaggacaggatgcgacctccaagagcctgcaagtccggtctggctgcccaagccggaaccggatggaggtcatatccaatatttccggttaaaatctctagataactgggtctggatcatcctgatcccaaaagaaaatcacttgggaaacagctcccaatagcccctgggtttcatccttcaacttctaccactagataaggatggatgtctgttcagagtttgggtttgattggccttggtttaggttggcatctagtgctaaaccaatcaaccagaatcagggattttgtaagattatggaggaatcccttggtgggaaggttcccaaaagaagagggatggtattcccagacatggtgccgggctggcagaacaactgagtgtccactctatttttccagaacttccttttcctctaagacctagctcaaccctccttcctcagactttcccagctcactaaacacctataaagagttggtggccctccttgatgttcccctaatctgctgtgcctgtctctagcactgcacttgggtggtgatatctgcttgatatctttgtgtctgtagcatctagcacatagtgggcagcatactgaataaggattctaccctaggaagaagcaatgcatgagtgtgaatcccacctcagccacttattagatgtatgaccaacaggcggaggaaattaagagcggaggaaattaagaagtcttaatttccttaagactcagtttcctcatctctgtcattggaataatatcatcttgtgatttctgggggaattaaaagacagatgcttttaaagcacctagcacggtgcctgacatgtatataggataagctcttgaaagttagatgttattgggtgctgaacaaatgatcataaaacaaataagttagttaattttaggaacacatctgttgcttaaattcgggtaatacctgaaaatacaagtgttctctgcctagctgagaggacagacctactaaaatcaacttttataaacccttgtaagtagtaccagttctatttcatctcctcatgtgcagtggaagtagattaaaaagacccaggtgccaccttctcatctgtttttaaattaagtaattctcaggctctggctcagagacccatcatcttaaatgatcaacttcataatatactagagaggacaatccaattctcagtttccctgagcccaccagaagatgcccagaaccttgcatacactggtttatctgaggaggtcaggattatctcaagtggacagagacgtatctgtgtgtcactgtgttcagtcatcattcattcgttcatctgttcattcatcagctattaactgagcaaatggcatttgctgtcactctgtaaacttagatttattaagtgaacccttttcaagggagataacgtagggcctctcatttgaagggaggttgcaaaataagtcatcgccctcaggcagcttagaaactagtgggagtacagaggatgaagttctcagtgttgtctgagaaggcttaatataggaaatgggctaagtaggattcaaaacaattgaaaagggacaccaaaagataggtaacaggccgggcgccgtggctcacgcatgttaatcccagcactttgggaggctgagatgggtggatcacttgaggtcaggagtttgagaccagcctgaccaacctggtgaaacctggtctctactaagaatacaaaaattagccaggcatggtggcacgtgcctgtaattccagctaatctggcgactgaggcagaagaatcgcttgaacccaggaggcagagattgcagtgagccaggattgtgcctctgcactccaacctgggcgaca

SEQ ID NO: 3227 - DNA, 4001 bp, Homo sapiens
aaagtggctgggaggaggagcagctgcccagggaggaggagccaacactgaggccatctagtcggtctgccagtggccgcggcgccctgaccatggctctctgaggcggcaaagccgccaaagcagtgtccctacagatgctctcagggactctggggccttccgcctaggcttccagcactccacgcaggtagggcccatggcgattccaccagttccctccacagattcgggagtggaagtcatctgttactgtcccaaggctagcaggtggtgacaagaagccaacctgccgcgaacccggagaggatctctttgcagttttttttttctttttgagatggagtctcagttgcccaggctggagtgcagtggcacaatctcggctcactgcagtgcccgccaccacacttgggtaatttttgtatttttagtagaaagagagttttgctatgttggtcaagctggccttgaactgacctcccgggttcaagcgattctcctgcctcagcctccagagtagctgggaggcgtccgccaccacgcccagaaaatttcgtatttttagtagagacggggtttcaccatgttggccaggctggtctccaactcctgacctcaggcgatccacccgccttgacctccccaagtgctgggattacaggcgcccggccttgtttttttgagacagagtcttgctctgttgcccaggctggagtgcagtggcaccatctcggctcaccacaacttctgcctcccaggttcaagcgactctcctgcctcagcctccccagtagctgggattacaggcgcccaccaccatgctcagctgatttttgtatttttagtagagagcggttttccccatgttggtcaagctggtctcgaaagcccggcctcaggtgatccgcccacctcggtctcccagagtgctgggattacagacgtgagccaccgcaccagaccctcaccgtctctttaatctggaggggaggagggaagaggctggaatgagctgatctcttccaaaagaaaactaagccgggggcgagagggtgatattactctgagaagagtaatacccctccctcccagggaggttacagtgggccgagatcgcgcgcccactgcactccggcctgggcgatagagcgagactccctatcaaaaaaaaaaaaaaggaaaggaaactttaaatgtacgaagatacacgtttcctctctatctgccatgcaccaaagcatcaaagctttccgtctgccgaggttccccgagatcaaacaagacgaggccacctcaaatccccggcctctgtcccgcaggctgcgccactaaaccccctgtgatgtcacagaaccgggcgccgaggccgactcaccacacgggcgggaaggggctcgcccggcccacagtgcccgcacaccacgaggcccgcgctctgcccacgtccacggctacctccccgaagcccccaggtcgcgacgcttagggcccccaacgctcgcgtgccgcgttcccgcctccaagcgttgccccgcctccaaggcagtgcggcgctcccgcctcccgtcgttgccccggcccctagaccttgcccgcccccaggcccgagcggcactaccgctagccgctcttaacccgcccgacggccgcgtgccccgcccccaaaaccgtgccgcgttcccgccagcagctcttgccccgcccccaaggccgcgtgccgcgttcccgccagccgctcccccgcccaacggccgtccggctcacaggaccggggtgacgtcatggctggaaatagccgcggggccagcggggcggggccgcccaggaagcgcaagacaaagctgcgcggggaacacgccccctcctcgcccccgccgacccgggcgcgcccgtcgcggccgccgccccgcccggctccggagcccgcccaggcccctaccggcgcggccgcagcgaagccctgcacgccccacctcccgcatttacaggcgcgcgagtgccgcaccacttcccccgcctcgcccctcgctcagacgagtagtcccgccgcggcagccccaccactcactgcgcgcgcgtcgtctgggcctgcgaagtccggcgtgtgcatcgtgcaggccggccgggagcaacaaagcggccgcggggcgtgagctcgggcgcagcagcggccgcacgtgggctgcgggcggcggcggcggcggcaacccggagctcctgcggccggcacgcgcctcgcccgcccgcgcggctctgccccggcgcggccctcgcggcgcgggaggggcggggcggccgcggagggagcggctggcggggcggggcgcggaggcgaaccaaaatacaccgcgcccctgccggggcggggccggccaccaccagccaattcgtgcccggccggccaatgagcgccgcggggggccgcgtgatcggagcctggccgcggcgtgatcgggcagggcgggacgcggcacgtgttttggtcggagcgaggggcggggcctgaggccctggaaagtaagggaaaggtcgcagcggcgccaggggcaagcggggcggagggggcggcgggggcggagggggcggcgggggcggagggggcggcggggcggcgggggcggcggggcggagggggcggggcggcggctggggaaatcccagggccggggccggactcggtgcggggagaggggaccacgcttataggaacctcctgcagccccaccggctgaatccatcggtagcggagacccacctagaggcctcaacctggcttttgtttggttgtttttaacttctgtcattctcccttcgtctcttaggaatgcgtccttgaccggagaggtcggaaagctggccggttctaggtgacattcctgcatccggtcatttttgcagacagcgggagtcagagcttattggcctgagtgtcccgctgacgcccctcctctggcgtctctgggcctcttccgctctgttacggggtcaggggaagccgaaacgggcagtcacccagaaggcgcccgctgaaacccgcccattcttcccaggccccgagaaaacgccgccccctccgggaagtcctcgagcctgcaggagacatctagcccgctgtccagggcacctttttttttctccctatatttcggttgctcgcgtctcttggtgtggtttgcccacgtctgcagcgccaggttcgtggagagcaggaaccatgctgtttattttcgtcgccgcagccttcagctcagcgaggagccacccctcctccgtctgttcactgcgcgcgcctttgctgagctgtgatgcgggttggcgctcagtgcaaggggcagaggccgcagtgaggaatcctccttttttaaaagctccatccagggagcgggagcagagagagaatcccggcaccccggggctttgctctgagcgagagaattctggtcttaggggaacgggctgggccccaccactcacatgagcaggactctggtccccacttgttccttcggggcccactcgggttgggcagaggggttgaccaggctgaggagagggtgtttgctgaaatagtaagagggtttaagacgaaagaaccgtgataaactgctcgcatgaagaccccggaggctctgagaggggcgcagggtgttctgtgtgtaaaaagttaagtcttaagatacacactggaatattctcttttgcctggactcctgcattcgccttataactggtctccctgcgtccactccagctcccagagcctcttcccactcagcacccccaggggtctttaaccctttcagtggctcccactgtactcagcgtaacgcttctgctccccactgtggcttgtgagctcctgcagggacccagccccatgcctctccccacgccccggagggacagcctgggcctcctcttgggcgcctgtcccaccagcccctctgccgtctccaggtcctcgcacttgctgttccctagaatgcttttcccccaca

SEQ ID NO: 3228 - DNA, 4001 bp, Homo sapiens
ttccatgtctgtctgctccaagatgctgcaagtagacctttcgctgtcatgccgcttcctctccaggatggactcacatatgtccatgatgtcaacctaaaggcgacacaacacaacggcttctcagtgcaggggaaatacagaggccacccatgatgggcatgtggatatgcatatcagaagcctacagtaggcatgtaatgcacatgcaatagtctatagcaacaaacaccgaggtgtagtaaaagacattcaaggaatgctcatgacaattcggcttttaagccaacatttcacagacagaactaagctggcaagcgttgccaccaaaaatcctgactcttaaaaagggctactaagttcatatttttcttgggtaaatgattaataaaattaactcctgaggttcaagccaaaaagtggctgggaggaggagcagctgcccagggaggaggagccaacactgaggccatctagtcggtctgccagtggccgcggcgccctgaccatggctctctgaggcggcaaagccgccaaagcagtgtccctacagatgctctcagggactctggggccttccgcctaggcttccagcactccacgcaggtagggcccatggcgattccaccagttccctccacagattcgggagtggaagtcatctgttactgtcccaaggctagcaggtggtgacaagaagccaacctgccgcgaacccggagaggatctctttgcagttttttttttctttttgagatggagtctcagttgcccaggctggagtgcagtggcacaatctcggctcactgcagtgcccgccaccacacttgggtaatttttgtatttttagtagaaagagagttttgctatgttggtcaagctggccttgaactgacctcccgggttcaagcgattctcctgcctcagcctccagagtagctgggaggcgtccgccaccacgcccagaaaatttcgtatttttagtagagacggggtttcaccatgttggccaggctggtctccaactcctgacctcaggcgatccacccgccttgacctccccaagtgctgggattacaggcgcccggccttgtttttttgagacagagtcttgctctgttgcccaggctggagtgcagtggcaccatctcggctcaccacaacttctgcctcccaggttcaagcgactctcctgcctcagcctccccagtagctgggattacaggcgcccaccaccatgctcagctgatttttgtatttttagtagagagcggttttccccatgttggtcaagctggtctcgaaagcccggcctcaggtgatccgcccacctcggtctcccagagtgctgggattacagacgtgagccaccgcaccagaccctcaccgtctctttaatctggaggggaggagggaagaggctggaatgagctgatctcttccaaaagaaaactaagccgggggcgagagggtgatattactctgagaagagtaatacccctccctcccagggaggttacagtgggccgagatcgcgcgcccactgcactccggcctgggcgatagagcgagactccctatcaaaaaaaaaaaaaaggaaaggaaactttaaatgtacgaagatacacgtttcctctctatctgccatgcaccaaagcatcaaagctttccgtctgccgaggttccccgagatcaaacaagacgaggccacctcaaatccccggcctctgtcccgcaggctgcgccactaaaccccctgtgatgtcacagaaccgggcgccgaggccgactcaccacacgggcgggaaggggctcgcccggcccacagtgcccgcacaccacgaggcccgcgctctgcccacgtccacggctacctccccgaagcccccaggtcgcgacgcttagggcccccaacgctcgcgtgccgcgttcccgcctccaagcgttgccccgcctccaaggcagtgcggcgctcccgcctcccgtcgttgccccggcccctagaccttgcccgcccccaggcccgagcggcactaccgctagccgctcttaacccgcccgacggccgcgtgccccgcccccaaaaccgtgccgcgttcccgccagcagctcttgccccgcccccaaggccgcgtgccgcgttcccgccagccgctcccccgcccaacggccgtccggctcacaggaccggggtgacgtcatggctggaaatagccgcggggccagcggggcggggccgcccaggaagcgcaagacaaagctgcgcggggaacacgccccctcctcgcccccgccgacccgggcgcgcccgtcgcggccgccgccccgcccggctccggagcccgcccaggcccctaccggcgcggccgcagcgaagccctgcacgccccacctcccgcatttacaggcgcgcgagtgccgcaccacttcccccgcctcgcccctcgctcagacgagtagtcccgccgcggcagccccaccactcactgcgcgcgcgtcgtctgggcctgcgaagtccggcgtgtgcatcgtgcaggccggccgggagcaacaaagcggccgcggggcgtgagctcgggcgcagcagcggccgcacgtgggctgcgggcggcggcggcggcggcaacccggagctcctgcggccggcacgcgcctcgcccgcccgcgcggctctgccccggcgcggccctcgcggcgcgggaggggcggggcggccgcggagggagcggctggcggggcggggcgcggaggcgaaccaaaatacaccgcgcccctgccggggcggggccggccaccaccagccaattcgtgcccggccggccaatgagcgccgcggggggccgcgtgatcggagcctggccgcggcgtgatcgggcagggcgggacgcggcacgtgttttggtcggagcgaggggcggggcctgaggccctggaaagtaagggaaaggtcgcagcggcgccaggggcaagcggggcggagggggcggcgggggcggagggggcggcgggggcggagggggcggcggggcggcgggggcggcggggcggagggggcggggcggcggctggggaaatcccagggccggggccggactcggtgcggggagaggggaccacgcttataggaacctcctgcagccccaccggctgaatccatcggtagcggagacccacctagaggcctcaacctggcttttgtttggttgtttttaacttctgtcattctcccttcgtctcttaggaatgcgtccttgaccggagaggtcggaaagctggccggttctaggtgacattcctgcatccggtcatttttgcagacagcgggagtcagagcttattggcctgagtgtcccgctgacgcccctcctctggcgtctctgggcctcttccgctctgttacggggtcaggggaagccgaaacgggcagtcacccagaaggcgcccgctgaaacccgcccattcttcccaggccccgagaaaacgccgccccctccgggaagtcctcgagcctgcaggagacatctagcccgctgtccagggcacctttttttttctccctatatttcggttgctcgcgtctcttggtgtggtttgcccacgtctgcagcgccaggttcgtggagagcaggaaccatgctgtttattttcgtcgccgcagccttcagctcagcgaggagccacccctcctccgtctgttcactgcgcgcgcctttgctgagctgtgatgcgggttggcgctcagtgcaaggggcagaggccgcagtgaggaatcctccttttttaaaagctccatccagggagcgggagcagagagagaatcccggcaccccggggctttgctctgagcgagagaattctggtcttaggggaacgggctgggccccaccactcacatgagcaggactctggtccccacttgttccttcggggcccactcgggttgggcagaggggttgaccaggctgaggagagggtgtttgctgaaatagtaagagggttta

SEQ ID NO: 3229 - DNA, 4001 bp, Homo sapiens
tgacaagaagccaacctgccgcgaacccggagaggatctctttgcagttttttttttctttttgagatggagtctcagttgcccaggctggagtgcagtggcacaatctcggctcactgcagtgcccgccaccacacttgggtaatttttgtatttttagtagaaagagagttttgctatgttggtcaagctggccttgaactgacctcccgggttcaagcgattctcctgcctcagcctccagagtagctgggaggcgtccgccaccacgcccagaaaatttcgtatttttagtagagacggggtttcaccatgttggccaggctggtctccaactcctgacctcaggcgatccacccgccttgacctccccaagtgctgggattacaggcgcccggccttgtttttttgagacagagtcttgctctgttgcccaggctggagtgcagtggcaccatctcggctcaccacaacttctgcctcccaggttcaagcgactctcctgcctcagcctccccagtagctgggattacaggcgcccaccaccatgctcagctgatttttgtatttttagtagagagcggttttccccatgttggtcaagctggtctcgaaagcccggcctcaggtgatccgcccacctcggtctcccagagtgctgggattacagacgtgagccaccgcaccagaccctcaccgtctctttaatctggaggggaggagggaagaggctggaatgagctgatctcttccaaaagaaaactaagccgggggcgagagggtgatattactctgagaagagtaatacccctccctcccagggaggttacagtgggccgagatcgcgcgcccactgcactccggcctgggcgatagagcgagactccctatcaaaaaaaaaaaaaaggaaaggaaactttaaatgtacgaagatacacgtttcctctctatctgccatgcaccaaagcatcaaagctttccgtctgccgaggttccccgagatcaaacaagacgaggccacctcaaatccccggcctctgtcccgcaggctgcgccactaaaccccctgtgatgtcacagaaccgggcgccgaggccgactcaccacacgggcgggaaggggctcgcccggcccacagtgcccgcacaccacgaggcccgcgctctgcccacgtccacggctacctccccgaagcccccaggtcgcgacgcttagggcccccaacgctcgcgtgccgcgttcccgcctccaagcgttgccccgcctccaaggcagtgcggcgctcccgcctcccgtcgttgccccggcccctagaccttgcccgcccccaggcccgagcggcactaccgctagccgctcttaacccgcccgacggccgcgtgccccgcccccaaaaccgtgccgcgttcccgccagcagctcttgccccgcccccaaggccgcgtgccgcgttcccgccagccgctcccccgcccaacggccgtccggctcacaggaccggggtgacgtcatggctggaaatagccgcggggccagcggggcggggccgcccaggaagcgcaagacaaagctgcgcggggaacacgccccctcctcgcccccgccgacccgggcgcgcccgtcgcggccgccgccccgcccggctccggagcccgcccaggcccctaccggcgcggccgcagcgaagccctgcacgccccacctcccgcatttacaggcgcgcgagtgccgcaccacttcccccgcctcgcccctcgctcagacgagtagtcccgccgcggcagccccaccactcactgcgcgcgcgtcgtctgggcctgcgaagtccggcgtgtgcatcgtgcaggccggccgggagcaacaaagcggccgcggggcgtgagctcgggcgcagcagcggccgcacgtgggctgcgggcggcggcggcggcggcaacccggagctcctgcggccggcacgcgcctcgcccgcccgcgcggctctgccccggcgcggccctcgcggcgcgggaggggcggggcggccgcggagggagcggctggcggggcggggcgcggaggcgaaccaaaatacaccgcgcccctgccggggcggggccggccaccaccagccaattcgtgcccggccggccaatgagcgccgcggggggccgcgtgatcggagcctggccgcggcgtgatcgggcagggcgggacgcggcacgtgttttggtcggagcgaggggcggggcctgaggccctggaaagtaagggaaaggtcgcagcggcgccaggggcaagcggggcggagggggcggcgggggcggagggggcggcgggggcggagggggcggcggggcggcgggggcggcggggcggagggggcggggcggcggctggggaaatcccagggccggggccggactcggtgcggggagaggggaccacgcttataggaacctcctgcagccccaccggctgaatccatcggtagcggagacccacctagaggcctcaacctggcttttgtttggttgtttttaacttctgtcattctcccttcgtctcttaggaatgcgtccttgaccggagaggtcggaaagctggccggttctaggtgacattcctgcatccggtcatttttgcagacagcgggagtcagagcttattggcctgagtgtcccgctgacgcccctcctctggcgtctctgggcctcttccgctctgttacggggtcaggggaagccgaaacgggcagtcacccagaaggcgcccgctgaaacccgcccattcttcccaggccccgagaaaacgccgccccctccgggaagtcctcgagcctgcaggagacatctagcccgctgtccagggcacctttttttttctccctatatttcggttgctcgcgtctcttggtgtggtttgcccacgtctgcagcgccaggttcgtggagagcaggaaccatgctgtttattttcgtcgccgcagccttcagctcagcgaggagccacccctcctccgtctgttcactgcgcgcgcctttgctgagctgtgatgcgggttggcgctcagtgcaaggggcagaggccgcagtgaggaatcctccttttttaaaagctccatccagggagcgggagcagagagagaatcccggcaccccggggctttgctctgagcgagagaattctggtcttaggggaacgggctgggccccaccactcacatgagcaggactctggtccccacttgttccttcggggcccactcgggttgggcagaggggttgaccaggctgaggagagggtgtttgctgaaatagtaagagggtttaagacgaaagaaccgtgataaactgctcgcatgaagaccccggaggctctgagaggggcgcagggtgttctgtgtgtaaaaagttaagtcttaagatacacactggaatattctcttttgcctggactcctgcattcgccttataactggtctccctgcgtccactccagctcccagagcctcttcccactcagcacccccaggggtctttaaccctttcagtggctcccactgtactcagcgtaacgcttctgctccccactgtggcttgtgagctcctgcagggacccagccccatgcctctccccacgccccggagggacagcctgggcctcctcttgggcgcctgtcccaccagcccctctgccgtctccaggtcctcgcacttgctgttccctagaatgcttttcccccacatgccccctttactctcacccgcagtccacctggagaggccccctctagcggacacaccctcggggccgacctccagtccccttctggcgggctttcttgttttcttcctccacaacacttttcttgaactgccccttttccattacttcagttatttatcatctgtctccccaccagaaggactctcccaaggccagggagcctggctgtttaataagtccacgtaggtgaacgagcgaatcgaaggtatccaccagcctccctgcttgaacat

SEQ ID NO: 3230 - DNA, 4001 bp, Homo sapiens
tacatcttcccgtcctccttgagtatcttttgtcagtgggctcttctctcttttgcctaccttctaatctcaaaatcaagctcctattctttattgacactcgctaattactgaaaaacactccgctttgctcctgcccaccctcccccgccccccatccgatggtcataagcaccagttgaaacagatgaacctgatttcaggtatcaagtgggtagagctcatgcatgcgagaacgtggtccctgtcagcaatcgctcctaacaccccaaaccaccttcccacccggctcctccgaaccccagaagttcggcaggtctctgataggggacagcaaacccgacaacgtgtgcgcagggatgtgtgttggcgactgaaacgcaggcagctcgcaccggctgctcagctcggcactctacgaggttaggggtgggtggagaggtaagcgcagatgactgtttcagaaaacattttcaacaacagacagccaaaaaggaagaaaaaaaagtcaaacaaacaaacaaaaatttcaacccagagcccacaccaacgcagcccctgcgtctccgccgccaccacacgatttacacaagtaatttaaatcattcacctgctgccaggtctcctccagggatggtaaagctgagaagtagccggtgtcgtggacaagttgtagctcctggaatatactataactagccaacacgtccatgctgctgctgccgggcaaaacgggaggcgaaaccctcccccgaacacagttggggctgtttgtttgtcagtctgtctggctcaccccccaagaaggcagacatccagtggcccttttgttttgttttgtttcagtcaactaaaaaggaaaaaaaaaaatcaatgcaggagagggagagaggaggtgagagaggagcgagtgagtggggtggatggagagaggcatccagcgtgtacagtgcagacgactgccaggaaaaggggacttctccacgggagtaacaattcccttccagggctctaatcactccagctcgtggatcaggaagggggatgcaaactcactgacacgaagctgccatctatttctgcagcgctgttcgctcctaatgcaatctttgctctttattttgggaggttgcatttttttctctcgcgatcgcttctcttccccccccttcccttccctccccaccccccaccccatccttgctagtttgtagtcttccccctcccttttctcctcctcctgctcttccccctccccaaactccctccctccgttcggttctccgcgcagccgtgggatctcgaggagggcgtccattaggccgcgtgtgaccatgtaaggtaaacagggggctcatgaagtcactgaggaccaatggggagcccggagcagagcctggggcggggcttggccctggcggcgggcgcggattggcacgctgcggatctccctgctgccttacaaggcggtgcgaggcgagctatttttagagggctatataagggggctgaggcggccgcccggcggccgggcagcgcgagcgcaagggacagggagggtcgtggcgacactcgcgccagctcccgggacggctgggctcgggctggtcgccgacctccgaccctccactagatgcctggcagagcccggcgcgtccggagcccgcgcccctcagagggaaggggtcgcgcgtcgccgcggcggccctgaggctgacggtcgggaggtgaaaggccggagtgcggggtcaggacgcctcctggagggggcgcggcgcagggggccgcggggaagccgccgagggcgcggagcgggaaggaaggacagtggccaccccgcctccgcctgggcacggggcagggacccgcgcgaggcggtgccggggaggtcctcacgtactcaaaaacaagcagaaaaggcatccagggccccttcccgaactccccacgggctgccagggtgcagagaagaagcgcctgaggaggaagtgccacacaatgggagagaacaaaggggagcggagcgagaccgcggcctgcgcccgccccccgcttgcgcacagtccccgccccgccccgcgggcgccgccgccgccgccctccctcccgcgcctccttctgaccccgagcgagagacctggtcgggagtccggcggctagagttgattgcaaggggcctgttgctcgactgtgcgttaaagaggctagagggagcctaggtagacgtggggcgcaagctggagccggcagcttgcgagggggcctttacgtgatgaggctcaccatggggtctccagcgaggtgtctgcagagcttcgatggtgagaggaggaactcgatttctcgttttctggagttgggatgtagacatagagagatctgttacatctgagatgaaaaccctgcacaattcacgttagggttggccaattgtttgcttgaccttaaatggttagtgtggtttaagcttccccaaaatgcgctgtgagctgagcttccacttttggaatgattgcagaattcggtgcttaagagatgagaaacttcgttctaccagtaatggaagaaacgcttcaccttaatcaccctccttgtctttcccctccctttgactatgtaggactcgataacacaacatttgaaagattctactctatgaaataagcacagattgaaattcagtatttgccaaggaatattaaacatgaattactgggattgaggaaagcctgatttatttacttgttagtgtctggaattctgttggccagattcatagcattcattgtatgagtataattggaacatttactctaatgtagatgcagatgcatctgcaattagatgtgcaaggacgctgccagctaactagctgcacgactttgagcgaattactgggtcagaacttgtatctacccatctcagaaacagaaatagtgggatccgcgttgtctagttgttatgaagagtcaaaatatctttggtaactcacctagcatagtatctgacactattaggtgaatactaaatattagctatcattgtctccccacttgagctatgtaaactaataggacctttaggagaatatactattaatagaatcttggagatagaggaaaggtagaaaccccttgctagtttgttacaaggtctccccttctccatgctctcccctgacccccatgctatttcaactggggggatgggcaggaaccattgagaaacactagggcaaaaaacatgttcatgaataataggggaaggaaaggaacttgggtatagaaaactagaggcaaaaggtgaggcaagaccaaccatataatttggtacttgagactcaagtgaacttattttgtgtgtgttacattataacaatttttgaataaaataggacatatcggttaacgtgagtttgaagattttacaaataatagttcccatttattaagcacttcgaatgtgccgtatgcgcataaacactttatatgcaatgtctcatttaatcttaaggacagccccaaagtatccccaactttatggatgaagatacccacgcttggaaatactaagtaagttggtcaaggtctcacaacctggaagtggtcaagcaggggttcaaatccaagagcatctgactccccacactgttctgtactgagctttgtatggtgaaaaatggggttcctcagctttaagtcagtgtgtgtttacaaaaattgcttgggtggggccggaggaggaggcttccattgagacttttcctatgtaactatcagccgtctgacttgcaaaaggactcaaccaaaattttacaaagcaaatactgcaaacctcattatggtctttgctccaagctttgtagaatattttagattcattttaagagatttatgcagcaaggcattctgaaaggcacattttcaatattagttatatttagctactttttataccctagagacccaagattcacattgcaaaacacatgcaaggtatcc

SEQ ID NO: 3231 - DNA, 4001 bp, Homo sapiens
cgcaccggctgctcagctcggcactctacgaggttaggggtgggtggagaggtaagcgcagatgactgtttcagaaaacattttcaacaacagacagccaaaaaggaagaaaaaaaagtcaaacaaacaaacaaaaatttcaacccagagcccacaccaacgcagcccctgcgtctccgccgccaccacacgatttacacaagtaatttaaatcattcacctgctgccaggtctcctccagggatggtaaagctgagaagtagccggtgtcgtggacaagttgtagctcctggaatatactataactagccaacacgtccatgctgctgctgccgggcaaaacgggaggcgaaaccctcccccgaacacagttggggctgtttgtttgtcagtctgtctggctcaccccccaagaaggcagacatccagtggcccttttgttttgttttgtttcagtcaactaaaaaggaaaaaaaaaaatcaatgcaggagagggagagaggaggtgagagaggagcgagtgagtggggtggatggagagaggcatccagcgtgtacagtgcagacgactgccaggaaaaggggacttctccacgggagtaacaattcccttccagggctctaatcactccagctcgtggatcaggaagggggatgcaaactcactgacacgaagctgccatctatttctgcagcgctgttcgctcctaatgcaatctttgctctttattttgggaggttgcatttttttctctcgcgatcgcttctcttccccccccttcccttccctccccaccccccaccccatccttgctagtttgtagtcttccccctcccttttctcctcctcctgctcttccccctccccaaactccctccctccgttcggttctccgcgcagccgtgggatctcgaggagggcgtccattaggccgcgtgtgaccatgtaaggtaaacagggggctcatgaagtcactgaggaccaatggggagcccggagcagagcctggggcggggcttggccctggcggcgggcgcggattggcacgctgcggatctccctgctgccttacaaggcggtgcgaggcgagctatttttagagggctatataagggggctgaggcggccgcccggcggccgggcagcgcgagcgcaagggacagggagggtcgtggcgacactcgcgccagctcccgggacggctgggctcgggctggtcgccgacctccgaccctccactagatgcctggcagagcccggcgcgtccggagcccgcgcccctcagagggaaggggtcgcgcgtcgccgcggcggccctgaggctgacggtcgggaggtgaaaggccggagtgcggggtcaggacgcctcctggagggggcgcggcgcagggggccgcggggaagccgccgagggcgcggagcgggaaggaaggacagtggccaccccgcctccgcctgggcacggggcagggacccgcgcgaggcggtgccggggaggtcctcacgtactcaaaaacaagcagaaaaggcatccagggccccttcccgaactccccacgggctgccagggtgcagagaagaagcgcctgaggaggaagtgccacacaatgggagagaacaaaggggagcggagcgagaccgcggcctgcgcccgccccccgcttgcgcacagtccccgccccgccccgcgggcgccgccgccgccgccctccctcccgcgcctccttctgaccccgagcgagagacctggtcgggagtccggcggctagagttgattgcaaggggcctgttgctcgactgtgcgttaaagaggctagagggagcctaggtagacgtggggcgcaagctggagccggcagcttgcgagggggcctttacgtgatgaggctcaccatggggtctccagcgaggtgtctgcagagcttcgatggtgagaggaggaactcgatttctcgttttctggagttgggatgtagacatagagagatctgttacatctgagatgaaaaccctgcacaattcacgttagggttggccaattgtttgcttgaccttaaatggttagtgtggtttaagcttccccaaaatgcgctgtgagctgagcttccacttttggaatgattgcagaattcggtgcttaagagatgagaaacttcgttctaccagtaatggaagaaacgcttcaccttaatcaccctccttgtctttcccctccctttgactatgtaggactcgataacacaacatttgaaagattctactctatgaaataagcacagattgaaattcagtatttgccaaggaatattaaacatgaattactgggattgaggaaagcctgatttatttacttgttagtgtctggaattctgttggccagattcatagcattcattgtatgagtataattggaacatttactctaatgtagatgcagatgcatctgcaattagatgtgcaaggacgctgccagctaactagctgcacgactttgagcgaattactgggtcagaacttgtatctacccatctcagaaacagaaatagtgggatccgcgttgtctagttgttatgaagagtcaaaatatctttggtaactcacctagcatagtatctgacactattaggtgaatactaaatattagctatcattgtctccccacttgagctatgtaaactaataggacctttaggagaatatactattaatagaatcttggagatagaggaaaggtagaaaccccttgctagtttgttacaaggtctccccttctccatgctctcccctgacccccatgctatttcaactggggggatgggcaggaaccattgagaaacactagggcaaaaaacatgttcatgaataataggggaaggaaaggaacttgggtatagaaaactagaggcaaaaggtgaggcaagaccaaccatataatttggtacttgagactcaagtgaacttattttgtgtgtgttacattataacaatttttgaataaaataggacatatcggttaacgtgagtttgaagattttacaaataatagttcccatttattaagcacttcgaatgtgccgtatgcgcataaacactttatatgcaatgtctcatttaatcttaaggacagccccaaagtatccccaactttatggatgaagatacccacgcttggaaatactaagtaagttggtcaaggtctcacaacctggaagtggtcaagcaggggttcaaatccaagagcatctgactccccacactgttctgtactgagctttgtatggtgaaaaatggggttcctcagctttaagtcagtgtgtgtttacaaaaattgcttgggtggggccggaggaggaggcttccattgagacttttcctatgtaactatcagccgtctgacttgcaaaaggactcaaccaaaattttacaaagcaaatactgcaaacctcattatggtctttgctccaagctttgtagaatattttagattcattttaagagatttatgcagcaaggcattctgaaaggcacattttcaatattagttatatttagctactttttataccctagagacccaagattcacattgcaaaacacatgcaaggtatccagatgtacaaagtaatcaacaaattaagatcacaagagaactttggcagttcagcaaaccaaaataaactgcactgttgtaactaccacttactggttgattaccttctttgtacctagcattttacacatacctctgatctccacaatcctgtgagggaactcttagtgctccatttttatagatgaagatactgaagtttagagagtgcatgtaatttgctcattaccatgtgtccagtaagtgggtaaaagcagattagaatacaggtctgcctccaaatcgactccaaaatctgtcttctccacaagtattgccttgggaggtgttcattttacttctaataatgtcaatctttggaagtaatcctatagaaaacaccctagagta

SEQ ID NO: 3232 - DNA, 4001 bp, Homo sapiens
tatgagtgaaaatcttactgcattttttttaagctattaggttaaaagaaaacccacaacaatagcacaccccagaggtacaatagcattacacattactgtcaggattgctgaactccatgaaataaccaggggactacaacaaatgttaagactgcattgctttccactgtttctcacatctactggttgctagagctgaaaccaagttatatatttccctctggtaatttgtaaattttgagagacaatgctgtgaaaactaatttaaatctaaacaaacatgaaagctgaaaaatttctatcaaaacctcttccatgtttctcttctcctattttcaacaaacaaagaaaatatttgtttgcatatgtttccttggggaggtgggtggtgaggatgttggagggggagaaaggagacaagattaaaggcctggggagagggtgatgtctttgaaattactttccccaggcacatgatgcaaagcagcctcaaatacccctttcatcttccaaggattccttagttgcagtgcataaaagaaattcccaaaacaactcaaatctaaattaaccatcaaagtgagctttaaagtcacataacctgggcagagctggtagctatggcccaggcctcacaccgcttgaaggaaggcactgggttcccctacacttccaacaacttggaaatgcattttcctcattcattatgtctgtgatcctcaaaattcaatgcgaccattagggacatgatggcccatgcacagagaggcttctctaacttggtttagagttgtttttccagatgttactctgcaggacatactgactgggagtctgttggcctggcctctacccacagttgcagagagcccttaagaagaattgctcactattacttggccactggactataactaaattacagcttctgaatagtcaagagacaacactgcttatgcagagctggggcctagaagatgctcctgtatgctatcccctcatctcctatgccctcatctcccaaccaggcccctattcaggttggcactcactggtggaaatcccacttgttacatacagattgaaagcaagttccattagatggccctgctttggtcattacacttccacggacaaaatgaaattcacatcttaaagagtcaataaaaataatcctacccatactactgggaagtgcaaagggctggatctgcactgaaagtgagatttaagaatgagaaaatgcaggagagacactccaatgggaaaaacccatcacatcccatgacaatggcaaccagtcggtccctgctccaaaaggagaggactctaagcagttcgtcaagagcccaaggacgtgggaggaggcctcttttcagaggagtgatggcttcctaagaacaacaatggccctgtcgctttttcagcttcccattaattttccataaagagcagttttcttgacgagcgcttgtgtcaggcagggcctgatgcttcagaaacctgtaattattcttggctccccaccccctacagcctctgcacctgtgtcagttcaaggcaccagctggccatgtcttgcctcctgcctcttaagagggggagggggggagccatcattgaaaacccaaactcacattactcgcctcttcttccaaaatgcaacaacaaaacaaaaattttaaactcaccaatctcattcctccccccagtggatcttgccaaaggaaacaaataaacattaattggctagagagccctcattcaaaccaaaattactgaaaaacacagtaacagggaaaggtctgacaaggcattattaatcctgttttacagcccgctcttatgcacccccacccgctcctgttaactttgcacacacactcacacaccctcctcaaactccctgggcccctttacactcactggccaagacgggaacatgccgaaccagttacatcatctccccttcctctcccaaatcacttgcacaggctgactcgggctactgggatttttttttttttttttttttaaagcaaactcatttcattggctccttcctggaacacagtcatctccttctcagttgggttaattaatatacccttcccctacccccataaaaaacacacagacacatacgattacttcttgtactccaaagcacagctgcacacgtgtacaacgttctctctctccctcgcagcttgaatttcccaagaataacaggttcaaagcccattgggccctcggtggcagatgcaatttagtggctggtaatcatagaggatgctttcaaaacggagagctttgaggaacttccactgcggaatgttaaagacaaggtgggggcgctaggaggaatgtttcttctactcagaatgcataaaatggcagccaaaaccataatgaagtcaagccctaagctgtttttcctgatatggattgttgtactgttacttgagatacttggacttgatttcccacaatgtttaaggtggctgtgtgggtgtgccaagtgccactcactccaattaaagaaacagactggccattcgcatactgagaggcagaagaacagggacccaagcattggccctggagccagactgcctgggtccaatatcaggttacactactcactagctcaatccccctgggagaagttaacccctctgtgcctcagtttcctcacctgtaaaatggggtaatagtagtacctacaacgcagaagcattgtgagagttcaatcaattgacatgccaagtacttggaagggctgggcatgcacactctgtatgttgtagctattcaataactagtgttatttttcattacacttccagacagacataaagaaacctatcgagggcatggagatggaaaataaaaaataccaaataagtttccaggggaagtaaacctgttggatataaaagtttaagtaagcaggggactctgagttgggaagatcaaccctgactagctgggtgactttaacttcaatgggctcagttttctcatctaccagctgaacttccaggggcccactaatctggaattctatgaggaagcaaaacagtaataggagagtgaagactgaacagtaagaaaagctcattcagaacaagttcagaggaactgatagatagctctgctgtcattgagtggttaaaaaaaaaaagggtttggagaacctggaagaaagtggtctttgaaccctcctctgacagggacctcaaggcctttattaaaagccctaagacactcaataatccatgtttacaggatgctatgaaggtttaatttcctgcttcaccatggatacaagcctcacaacatctaaaacgtaaacttcacaagaatgtgactcttcaaagataccagacctgtgcctgacttgcagcctgcctcaagcatttgtcaaatgaatgaatgaatgaatgagtaattgaatcaactcccaaacaatcaaagtgaaagtcaacagtgatcacaatcctgggtaggaagagattcaagagtatcatgaaagccagaaattcttccttcttcaccaaaggaacatcagaagcagtgtgcatgtgtttattaccaacatttctggtagaacacgtcagtattttcagatttaactataggtgttatttacttgtctctaacgtttttcatttggaaaaaaaaaaaattaaatgcttactgtctgggacagatccggatttctaaacagagaggccaatttagcttcacggggtagccctgagagtatgcacctgtgttggaagtaaaagctgtctccttgccctggagaatgccctctccctctgccacttcctcttttctcctctggcctccagaaaccaccaggaagagaagcaattaggatgagtgaacaaaacgctattttcaactgtcattttttattggtgaaaagaactctggcctgggaatcaggttcagcgcctgcctttcccacaccaccccttccctttcca

SEQ ID NO: 3233 - DNA, 4001 bp, Homo sapiens
gacaagaatgcatgtgtggacacagagacaccagacgccaatacctggaggaaaactcacagcctctgaccagaagtgaactagcaacaatggtacagttaaaggatccgccttgccactcggctccttataccaaaagccaaacctcttttgctaaagcagagactgttacatctcagcctcaagctggcaaatcctgctttggatcccggcagaggaaattcagccgttcattagccttaacaagctgctgtcactaagcgaagaaattacacgagcagccacacaccgagcctctcacagccctccccccaagggcaagcgggtttctccaggacggactgtacaagttcacacttcctatgtgcaaatccggactgtcttcttggactttccatggtgcacactgtacaatttttaaatacccgtgtccccccgcccccacccaccatctttcctgcagaatgtcccctcagcagctcctaatcgctgctgaaaaaaaccactgtttccgcagcagagccagcactttccactgaccagcactttctttattccacttcacaaagcccagtgaacttgtcaccagccccacttcatcctccctgggacggctagccaacttggcatcggtgcccttcagcatcctgggagtttcttaactagtcctctaagacaaagtcaaaggcatggaagcacacatcagcctttgtccgaggttgtgctgcctaactagagaaggaccctaaacaaaaaagagaaacaaggacacgcatagagggtgttctctttctggagggatcacactgggaaaacctacaattcattgtcagcctcagctacatcttcccgtcctccttgagtatcttttgtcagtgggctcttctctcttttgcctaccttctaatctcaaaatcaagctcctattctttattgacactcgctaattactgaaaaacactccgctttgctcctgcccaccctcccccgccccccatccgatggtcataagcaccagttgaaacagatgaacctgatttcaggtatcaagtgggtagagctcatgcatgcgagaacgtggtccctgtcagcaatcgctcctaacaccccaaaccaccttcccacccggctcctccgaaccccagaagttcggcaggtctctgataggggacagcaaacccgacaacgtgtgcgcagggatgtgtgttggcgactgaaacgcaggcagctcgcaccggctgctcagctcggcactctacgaggttaggggtgggtggagaggtaagcgcagatgactgtttcagaaaacattttcaacaacagacagccaaaaaggaagaaaaaaaagtcaaacaaacaaacaaaaatttcaacccagagcccacaccaacgcagcccctgcgtctccgccgccaccacacgatttacacaagtaatttaaatcattcacctgctgccaggtctcctccagggatggtaaagctgagaagtagccggtgtcgtggacaagttgtagctcctggaatatactataactagccaacacgtccatgctgctgctgccgggcaaaacgggaggcgaaaccctcccccgaacacagttggggctgtttgtttgtcagtctgtctggctcaccccccaagaaggcagacatccagtggcccttttgttttgttttgtttcagtcaactaaaaaggaaaaaaaaaaatcaatgcaggagagggagagaggaggtgagagaggagcgagtgagtggggtggatggagagaggcatccagcgtgtacagtgcagacgactgccaggaaaaggggacttctccacgggagtaacaattcccttccagggctctaatcactccagctcgtggatcaggaagggggatgcaaactcactgacacgaagctgccatctatttctgcagcgctgttcgctcctaatgcaatctttgctctttattttgggaggttgcatttttttctctcgcgatcgcttctcttccccccccttcccttccctccccaccccccaccccatccttgctagtttgtagtcttccccctcccttttctcctcctcctgctcttccccctccccaaactccctccctccgttcggttctccgcgcagccgtgggatctcgaggagggcgtccattaggccgcgtgtgaccatgtaaggtaaacagggggctcatgaagtcactgaggaccaatggggagcccggagcagagcctggggcggggcttggccctggcggcgggcgcggattggcacgctgcggatctccctgctgccttacaaggcggtgcgaggcgagctatttttagagggctatataagggggctgaggcggccgcccggcggccgggcagcgcgagcgcaagggacagggagggtcgtggcgacactcgcgccagctcccgggacggctgggctcgggctggtcgccgacctccgaccctccactagatgcctggcagagcccggcgcgtccggagcccgcgcccctcagagggaaggggtcgcgcgtcgccgcggcggccctgaggctgacggtcgggaggtgaaaggccggagtgcggggtcaggacgcctcctggagggggcgcggcgcagggggccgcggggaagccgccgagggcgcggagcgggaaggaaggacagtggccaccccgcctccgcctgggcacggggcagggacccgcgcgaggcggtgccggggaggtcctcacgtactcaaaaacaagcagaaaaggcatccagggccccttcccgaactccccacgggctgccagggtgcagagaagaagcgcctgaggaggaagtgccacacaatgggagagaacaaaggggagcggagcgagaccgcggcctgcgcccgccccccgcttgcgcacagtccccgccccgccccgcgggcgccgccgccgccgccctccctcccgcgcctccttctgaccccgagcgagagacctggtcgggagtccggcggctagagttgattgcaaggggcctgttgctcgactgtgcgttaaagaggctagagggagcctaggtagacgtggggcgcaagctggagccggcagcttgcgagggggcctttacgtgatgaggctcaccatggggtctccagcgaggtgtctgcagagcttcgatggtgagaggaggaactcgatttctcgttttctggagttgggatgtagacatagagagatctgttacatctgagatgaaaaccctgcacaattcacgttagggttggccaattgtttgcttgaccttaaatggttagtgtggtttaagcttccccaaaatgcgctgtgagctgagcttccacttttggaatgattgcagaattcggtgcttaagagatgagaaacttcgttctaccagtaatggaagaaacgcttcaccttaatcaccctccttgtctttcccctccctttgactatgtaggactcgataacacaacatttgaaagattctactctatgaaataagcacagattgaaattcagtatttgccaaggaatattaaacatgaattactgggattgaggaaagcctgatttatttacttgttagtgtctggaattctgttggccagattcatagcattcattgtatgagtataattggaacatttactctaatgtagatgcagatgcatctgcaattagatgtgcaaggacgctgccagctaactagctgcacgactttgagcgaattactgggtcagaacttgtatctacccatctcagaaacagaaatagtgggatccgcgttgtctagttgttatgaagagtcaaaatatctttggtaactcacctagcatagtatctgacactattaggtgaatactaaatattagctatcattgtctccccacttgagctatgtaaactaataggacctttaggagaatatactattaatagaatcttggagatagaggaaaggtagaaaccccttgctagtttgttacaaggtctcccct

SEQ ID NO: 3234 - DNA, 4001 bp, Homo sapiens
ttatatacattgtggctgtggacctctgggaaatctctttatgcatgggattcaaggcattgtatattagggagcggatcttattttcggtgagcaggcagcttctttgaaggcctaaggctgtttttaagtacactggatctatatcaatgttgatatagctcagtagattatagaggcattcaattcgattttctacatcatgagcagtccacttaataactggctctatgatagcttcttctttccaaacactgagattctttctggacaagataaagagaaacttttcaaggctgatttccagaaattcttcttgttgccacacttccttaaactttgaacatagaattcttcgagattccttctctagttctggacacacatgaaattctgcaaaggagtgcattccaatacaattatcaatatccaagtgccttaccaaaaaccgctcacaagccttctttactgaaaggaactgtagcagatccgctgcctcaagcaggctttgaacatttcttttagttatttcaatttgggaagtgtatgcataatttacaaggccttccagaatatcatggtggatgccagagagttttattttatttttaaatttttctttcatgtcagctgtgaacattgccttaaaataattgctgcaagcagctaaaacggctcggtgacaatggaaaattatgcctgaaggacactgaagagtaatatcagtaaataatccatccaagtaaaatgttctgaatgcatccagaaaatccactggatgtgttgaatccttgaaaagataaatataatcttcttgtccttttagagccatggctgcaataaatatgaaataacaaatgtgttttcaatgttgcacattctctcaaataatcaacgctaaataacttgactatcatcggatatactccaaaactggactaagttcagcatctaaataataaatgcaaaatgtggatggactgtttgatcatttatatggtggtcaatttaaattcagggtagctcggagcttgaaatgaggctcctggatttttcagtagtccttttgagagtactgatttgctattccattcaccgcaatctaccctggcctggcgttcggagatgagatcccacactaggcaaggcaagtgtccgagggtcaccccactcgaggccggacctcagctgtctcggctcggccccaattcaaccttttccccaagctcgtctccctttcaaatcacatcgaaatgccaagaaagggatgatggaaatataaatggacaagaagaggtctcggaaaagggaaatcccgagccctttcgcttaaggaaggagagaaaggaaggcagctcggcgcagcccttgcagccctcgccccctcccccgcgcccgccgcaggggtttccgcgcgccccgcgcctgggccccggcccacgttcccgcccggagaccgccccgccccggggccaggagcggggctggactcgagggcgccgcgtgccgcccgcgggcccggtgcccgcgtccctctgcccggcgctccgcgcaggtgtgggaaggacgccgcaggcagccccagcgcaacgcgttcggcccggcccggcgcccgcgcggccattgtctgcgctcctctcccgcgcggcctcgctgcccgcgcccggccccgctgcccgcgcccggccccgctccccgcgcccggccccgctcgctcccagcaggccggcctcgggctgcgggtccacaccgcacctacctcccgccggggctcgggacgcggcgctggcccgcgggctagtagcgagcgggagcggggacgcctccggcccctctgaccatctttggaagaggcgctcggaagccgccagctagtgccgctccaccccacaagcagctcctattttggtgtcccggcggctcccccgcctccacccgaacagccccccgcacggtctgggcgcgaggccactcgcgggaactcccccgtcgccgggccgtgcggcgagcggggcggggcgtgcaggcgtgagcacggctcggcccctccccagcggcgccccccacagcaggtgggactgcttccccaggagacagcgcgcgccgccgccttccccttccttggctcgctctctgtcccgcgcgctctctcacacccggtcgagcgtcttctcttagataaactctgagtcctgaattattaataacaccatatatgagtgtgtgtgtgtgtgtgtgtgtgtgcgcgcgcgcgcgtgtgcatgtgtgtacactcccctccctcagtaggcttcgccagcccagactcaatcgtgaggacagagaagggggaaagagtggagagaatggggcacaactaaaggtcagggattggaggcgccgttgaaatgccagaagtagccggcctttcccacaaacgccatcccacccccagcaaagcactcaggagggcgccttggtgctggtgagcacatcaggggttaagctgaagctttgagagaaactttgggcagccggggccaaggcgaagtccaggcgaagtccagtcgtgctaagattcaggttattgtatttagagcatagcagctggaaggagcagcctttctggtgacggccactctagtcacagatgtctatgtggtacacaaagttcattttcttgttccaactaaagccagtatcaaatatttttgtatatcattcattcattcattcgcaagattttattaagtgcttctagtgcctgatagggatagacactagtagtgataagagtgttgacagatggtccctagctcacagggaccttcaccaccaccagaggaccatgtgtttcccagagtatggtctcagaaacgcaatatacatgaatggccagatagtatgtgacaacagaactctgaaccacataagaagcccaggaagccagaccacaaccttggtagcagctgaaccagaacagtcaggaagtagtcaacgactggcaatttccctattttttttcttttttgagacagggtcttgctatgttgcccagcctggaatgtagtcgcacgatcttagctcactgcagcctcgatctcctggtctcaagagatcctctgcctcaacctcccaagtacctacgactacagatgtgcaatttttgaaaaattttaaatattttttcatgacagggtctcactatgttgcccaggctggtctcaaactcctggactcaagcgatcttcctgcctgggacttccaaagtgcaacttccctatttttacccctagttccacctctgcaccaaccagagaaagccaaatatgttccgcaaacccatcacataaaatacccccgcttctagtagcccacctgcagctttcccatgccaacaacttccaatcagagcataccgggggcttttcttcacttctataaagctttcccactcgtctgccccacctttgagcctctgacaaagtgatggtgagtgggactcccttctacagcaaactctgaataaatagcatctgttggttctcctgtgggtgggttttagtttaattccacaagtcagatcatcttaattgaattatgtaagatgctggttatgcagcccccacaactaccacaccccacgcacagacgtctgcggggtggagacctagggatctgcattctaatcaagggcagcaggtgattcttatggacaaataagagaatgtgttggacccaaaaggaagaaggatgaaagtttaacatcccaacatctggtaaacagtatagttagaaaaggaaagcatatgagatttagtttcgggcttaaggctcatctctgccacttatccaacatatagcctctcacaaattactaaacttctctgatccttcgtcttcagatctgtaaaacacagacaacatggatactttctcaacctaacctaaggttattggaaagacaaattaataatgaagcacttaggacttgatatataaatgttagctactataatgaa

SEQ ID NO: 3235 - DNA, 4001 bp, Homo sapiens
tgagttagtgataagaccacacggcgaggaagaaactctgtagtgactagacagatgactttaaagagactgaaactagtataaatacagccgtaaccaggacagatctgtcattgcaagaggagtccgaatcccagcgttgctggactggagagaggctggaacctgcagcagcgggccgggatgccgctgagctgccgaagtggaagtttcgcaggcagcagcagctcggcgtcctccacggtctggtccctccagcgccgaggtctcgcctaatgctacataaatacctgcgtccacgattcgcccggggcgcgccgcggcgcaagcacgggagggagggaggagaacgtttgcagagcggcggggatggcagcggcggcggcggcagctccttacccatcagcatctctgggggcccgcgcgagggcccgccaacggaccgcgtctgccgcttggttccacagcccagggacgacaactggcttctcagcgggtggacccaggcatccgagactcgcgcgtggccgccaccccctcctccgagacggctggccgcaggcaggcagcgcgtccccgccttccccaggcaacgcagaggcgacctgccctaagagccacctccgacctaccccggctcccagccccgcgctccggccccaggcgagcacgtccctcccttggggcccggggccgacgctgcccagcgcgggcacccgcgcggcgaccgcagataaccctagcgctctcagcccgctccaggccacggagaccgggacgcgagccctgggctcccccggccccccgaggccatcggggcgcgcgttcacactcccacactacacatctccaggtccaccctgtcccacacatcaacaacccctccccaacgacaccacctcctggccgcttcgccgtccccgtgagctctcctttccgcgtccccccacaacacgctggcacccacaaggtgtcaagggaagtgtgcgtgtgtgtgtcggggtggggtgggtcacaataaggtctgtgcgggttccctcccgacggttttcgagctcatctacctcgaaagttacttgggattgagtaaagagacccagtccccaaatgcgagatcagaggacgcgaggggcagaaaaccccaacctggcttctcgctgcacagaggcgcgcacctccccaaaggacagtgcgcgcggccgcccctgggggccagccctccgtcgcctccaggtctcctgcccggccggggccctgggccgctcaggggaacgtggcctggagaggggcgcgcgccgccgggcccagcaggggggctgctccggccaggggtcacacaagcctccagcacctccgaacaccgtgacagtggccccaggcagccccggtgcatacacacccgggggcaggaagttttttccccccctttttttccccctggagcagcgcaggcgcaagggctcctgcagcctgcgagtccagacgcgggaggctcctgtcgccgccgccgccgccgaagccgagcccagggttccgggttccggccccgctcccacgcccggcccggcccggccccacgcggcggccaggacctgggtctccctccggcgccgcatccgaggcgctccagcccggcccggctcttacctccggcgcgcggctccggccccggcccgacgcgcagagagcccggggtcgcgggtgggcgcaggagggctgatggagagcggacagcgccggcgggtagcggtggctggggccgctcgggtcctggccggaggaaacggatccaggtcctcctcctcgcgttcctgctctccgccttctcccctcgttcctcctcctcctccgccgccgccgcctcccggcagcccagggaggatgcccgggagagggaagtcggtcctcctgcctgtcagcctgtgcggctatgagcggtgcggcgcggctctcatcgaggcggcggcggcggcggcggctccggcagcatcgcccccgccctctccccgcagccgcggcggccgcggggctggggctggctccgggctcgcggctcgggctccgggcgggggctgcgctcaagcgcggcgaccgccggggctgcggacgggcgctgcggagccggggccggggctggagctgcggcgagatccgcggtggcggggacggcggcggcggcgcgggggctggcgcggccgcggcgcggggaccatgctcccttctggctcgctccgctccgggtaccgtctgctttagctgcgagggaggcgggcttcggcgcgcagccaggggcgggcggagccaatcacgggcgcccgagtgggcgggggtggcgggtgggggaggcggggccctctggcccggcccggccaggccgggccccgtgcgcagtttccccggcccgagggattcccggctgccgcgcgccgggtccgaggttggagtgctcgcgggtgtgtccgtcggtccgtccgtccgccgcccccgccccccgcggtggcccccggctcgcctggctccgcggccgcgcccggcagacgcacggcgcgtggcacgggctgctccgccgtggcctcctggccttgctggcccagggttgggggcccgggactgaggcgagctccccgtctgctctcaacacctgaggaaactggcggaaaagtttgagaaggaaaaagtccaatcgtctttcagcttccgccctctttatgacactccagccttggaaaggagcaggaattgtccacacctctgaaggaccagggagagccctgcaaagtgtccaccagccttctgagtcagccctgcctctcctggggcgcgcgacttttctgttcatactgacccttaggaatccaggaagccttctctgtttaacagcctgaccagcctttgatgtctataccgactactcacccccaccacagctcgctctctctcacactgtctacactgacttctcagtcccaccacctctcggtctacacatgctgtctacacagaccctaacttctaaccctaatagaagagatttggccagaggcgtgtgggacccccaatgagggcttttccattatgctagaatatttcactctgggcacagtcttctccaccccgaccgctctcctaatctggtttttattccccgacctctccctcctcccctacatcccctttacctggttttgagtttcagaggaaatatctgtacctgccctcctcctccacccctgtctgaatgtaaaggcctgagggcccaatcctcatcctccaccctccctccgctcccccgggtaaaggcctgaggcctgaggccttgctagaaattggagttggggtgctgtaggtagtgtggggagctggctgtgggggcccagctgggaggagctggcctggggagggctttgccagtccttgcctccatctaccagggccaaggaggactgagccggtaaatattttcttctcagctccccccctgtgatgtctgatccaggcctctgctctccttggctgtaaactcagcgcacggattgtgtcttctttaatattttgtaggaagcagagtacagtgtcgtggctgataaataataaataataataatctactgagggtagcaggagcactgtcagaaatggaatgaggacgccggggaaatggcccactagtgtcagaataactgcatttcctggaaaaaacatccaacagagtttgtgtgtgtgaagcccgggactcaagggaggggacagagcggagcacttcagggaggaagccacccttcatgaggacgacagccaggaaaactggcgtgaccttaagagagggtgacagaggtgccgaaaaggggagcaggagtgggggggagggggagaaaagctccccaagggtcctcagacaacacctgaaggtgatcgatagctttggtttgagtactatgtccttcaaatggtatatgaaaagtgatagaagagtactagatagcaaaatggaaaaaagaggg

SEQ ID NO: 3236 - DNA, 4001 bp, Homo sapiens
ccactcaagggaagaagtgcctggagccgcccgagctcctaggagagaagagagcagggtcagccaagtggggatggtctcatcctcctgagcaacccacccggtctgtccatcagccctttccaccccttgataaacacaggatgggcatcgaccatatgccagtcactttaccccccatctgcctcaagccacccccagaaccctgcaaggtagggcaggtgtcattcccatttgcagtgaggaaattgaggttcagagagggtgggagacctacccatggccaggcattcagggcagaacagggttggcaaaagaacccatgccctgggtgtcatctgcaaccctgggctacactgagcccaccccccagggaccccggagacacccaaactcccgggaggcgtcctccgtcccagatcccacattgctggggaggccatttgggggctgcagcagctcctgctcccgcggtgctcccaggtgccaggccacgtgccaagcatgcagagaagctgtgcattcaccactcagccccacaacagtcctggagggtgggtgcaatcattgcctcttttacagctggggagactgaggcacagaaggtttcagtcacttgcccaagatcacacatttaggaagtggtggagctggaatttgaactcagagctaggcttgggggcccaggctctgaaccctgcattccacgtggccgggtggaggctgctaaacagaaacggccagccaaaggcagcgttctggagggtttcgcgtcaccacgcccgcatggttgaagtcagcaaggccgctttcaggctcatgtaattatgtgcatgtggtttatgtccttctggtatcgcaccctaagacaaccatccctaggagagatcaagtctgtgcacaagccttcgacccgggtcaccccagggcgaaaggctgcgcagcggagaggccgttcgcccgctagggggcgcctcgcggggccatcccgggcaggagaggcggccgcgcgtccacaggtacaaaatgcgtgggaacgccacgcatggaaatgacaaagctcagctggagaaccaggaggccaagaatctggcccgggcagccacggtgcaggtacaggtgcaggcgatgggagctagggctccccgacttcccgaccccggtgccacctcttgaccccagagcggggaagcacctgggagcccacagggcctcgcggaccaacccgggctcgcgcacagggcagctcacgtggccggggccccacaccccagcatcccggccggtacacgaagtacccacccaacactgcatgcatggggttcctgcctggcccctccccaggaggcgctggccccggtgaaggcggctctgccctccctgggcagccgggagatgagctggggcctgagtaggtgacagggctgtccctgggccaccgcctgcaggcctcacattcccgtcattgttgtgctcccttgggccagctgctgccgggcgatgggcaggcacgcatgagcgcccccacttcccctgggggcctcggggtgcctgctgacacctgtcaccctgcagtccctgcatgggtcggggcttcctgagggtctcagagcctcaccccagtgcctgcccaggcccggagtgaggaagccgagtgggcaggacaacaaaaggcctgagcccagccaggctggcgactgtggctgagtggccctggctgccatctgaggggtggcccagcctccccctcccacctctccggctgggacatggagggaaacctgtctcctgagcccccaccctgaggagcctggcttggccgctggcaagggccagggggcgtctccaaagcaccctgctgtgatccctggcctcgggggcctaacccaccctccccgctgctcctggctgggttccccctgccctctctgctgtcccctgccccagagccccctggatcctacctctcactcagcctggacctcgaagctgagaacacagacccgagagagcaggactgcctagccggcagccaggggacacggaggcctgcagggcggggcagggctggtctggtggccacgtggggagggtatttttagcctctgtctgcagggcgaggggagggtcaggcagtgagggctgggctggtgggggaaggagtgagatgccggctccttggtgactgttagctcagaaagcccactgaggccttccagggacttgtggcctaggacagacatcaggaagggctccagggcaaggacaggtgaaagctgtcgcggttgggctggctggtgggggcagggatgcagcttccccacctgtttcctcgtctacaagttgagtacagtggagcccgtggtgggggcctggggtcacagagaccctcagcccagggccaggacaccgacaggtgctgccctcgctgttgatgtcagcggcacctatgtgtcctcttgttctgttgtcacgtgggaaaacgtgattatcatgaataagcacaggttggtcagcagaggctttccgagcttggggtccatggtggcggtagggaaactttgcccagagaggggaggtgccacactcagttgccccgcccagctagcgtggataggggagatcttggggctccttgccctgctaccccatggccttggcctcggggctgcccaggacggctaagaaacagggtcacctaaaaatacagcagtggactatcagcctcccgtccagcacttggttcacggtagtcgcagggggaagctctcacgcctgggactgaaatgggctcagaaccacaggccctgaccaaggtcaggtgggttgagttggggacccaagaggccactggacatttctcacaccagtgaccagagcagagctttgtggctgagggacttcaggtgcatgggagagaagccctcagccctcagccctctacccatcggccatgtgggcctgagcagtatgaccatttccaggtgtgctgcgacctggaggaactggggagtattgggtctggctgtggcctcttgatgctactagggattgtcctaatgctcttacagaccagagaggtccaggcggcccccagggagacagaaccccactcctggtcctgagatgcacacagcctatggaggggaagctcacctacaaattactgccaagtctgcaaggtgcccttagggttaccttccatagagattccctgagtccatgcttcctctacagcccagcctggcccagccatagcccagccatagctcagcccagctcagctattgcccaaccatagcccagccatagcccagcccagctcagctattgcccaaccatagcccagccatagcccagtccagctcagctattgcccaaccatagcccagccatagcccagtccagctcagctattgcccagccatagcccagccatagcccagcccagctcagccatagtccagccgtagcccagccgtagcccagcccagcctggcccctgctcctgctctttcccctgctcgtgtcccacactgtcccagggtttttccccagccttgggcatcagcctcatgttgtgtgggggaccctcatggaggaccccaactctcgctgtgtccaggaccactatggggtgggcgctagagtgttgggtttccgtactgtcccccttgtttgcagtcctggctcgggctggaggaaatgaggacaggggattctgatgacaggctgctgtcacggggagctggctctgctcggggaacagcactgcttgccaagtgtggaggcctcacagcagccgtcgtggggctcggagccccagcacctcagatgacaggtcagtctgggaaactcaacaccgggggcgcaaaacagatcctccatcaagagattgctactgagtggcgcagtttttaaaaatacaccacttgtttctttttatgaggataaaaataacacaagttccttttggaaaacagaaaaataaaaagcagaaa

SEQ ID NO: 3237 - DNA, 4001 bp, Homo sapiens
cgacttttgtgtagacagtttttcctagaagataatccaaagtgtgtggaatatatatacaagtttttttcattttcaacaaaattatattttaggcagtaaccataaataagagatgaagtgctacctccaagaacttcaaatgaagttcagggaaacttggaagaaggtagaaaatctgaccaatttagagctgccagcagatgaagaagaaaaagaaattaaaaaagaaaatctgaccaattattacttctttataatggataagaactttgatttagggaaactatttggggaaagacattaactatttttaataggtaagagtatacaagattaaatttagtttttacagcagggggtggtggctcacaccggtaatcccagcactttgggaagccaaactgggagtattgcttgagcccaggagttcgagaccagccggggcaacatagtgagagcccatctctgctaagaaaaaataaatttagtttttactaaaatactgggctttgagggattacagtcacgatcatctataaacaaggcatttttggtaaaatagtataaagaacatcttaagtcattaaacatgaattagaacctcattattcaccaaactttttattacacattaacaaagcagtcaaatatttttctgtcaacgctctatacagcaaaagtgcaagggactggaataggacatcaattagagtaaaatgcaagcagcttgaataattcacaaattggctaactggatggtgagtaacagccttccctttaagcaactacatatacaaaaagtccttcttacctggaagaagtatgactgtagaggttgatccttattttcttcatccacatatagtcctcctaccacatatatctgattttgctgggtaacaatgctggaatgatttctgggaatctgctcagccagtgcagtaaggtagcattcattttccgtggggtcataagccactgctgctgtgtcattaaccaagaggatgaggtcttttacaaacattccatgcctgggaatgtcattcaggtaaccaggaagtaaatcttcatcaccaacatcaccattcacctcaccagccccagtcttcgcggcatttttgctaggttctgggagtttgcctgcgaaagcatcttttagaactttgatttttttctggaggtctgggttgcttttaattatatcatctttctcaacatgatccttaaaatatttttctgtcataaggcgaaaacggatacaatcaaacacttcactaaggtttttaaccctgttttccttgtctgttcgcacccatttcatcactgcctcaaatactgcttcttctttttctacatttaggctgtcatttgaaatgactgagatcagttcctgtggagacagttgcataaagtcctcttccttacaaatctgtacaaagcgatcagacacaaattcacgggcagaaatggcgagtctcgggcagtcaagaagaagtcctaatcttaggatggctagacagttaccaggagcaagtcttttctgaagataagaaacgcagacagtaaacactgaggggatctgaaagcggctggccaatgcaaaaatatcttgcacatttccgtcattgagatcaatactggcagagtacaggtatttgatgattaaatcaagtatagcaggatccacattgtctagcactacctccttttttttcgcctcatcaatttcagataaaaagtactcacggaagtaaggactacaagctgacaaaatcaatctgtggcaaggaagacttttgtcacctgcttttagggtgcaatcgatgaattttttctcatccaggagatcttttagaccatcctgaagaagggtggattggtaaagccgcagttcctctgcaagttcccgctgggaatccattctgtgagaaacctgggtaaggaaggggacactgaaggccttagctccttgcagcacacaggtctagctgtaaaaaggcagatcagtgtgctttgcccagcttgaagcctttgcaatttaatcccactagctaaatatagataccaactctaacaacgggaatttaggagagctggcttggaaagaagagttgttcttgcagctgttatagattgaaagtaacaactggaacttttaatcactagggaaacagctaagaaacaagacatttaagtgaagttgaaagcttaaaaatacataacacattagaagatatactaataaaggctactacaagaaaatgtttattgaattaacagaaaaatgaatcataaaaatgagtcactcctctaaatatgttctagtgtcaagctacttggctctctgaattaatgatgcaaaggtcaagaatatgagatgtgttcatttgaatactcataagcaagatctcatttccaataattgttaacatacaaatttttactttctactcagaacagtgggatatagatatttcttttagaagtagtaaacttaaagatgtttacttctgtactagttttacaaaacctttaatgttgccatgataattgaaaaaagaaatgcagaggaattgctaattttctaaaacattccaaattattcttacatggaaaaactgtaattaatattgaattaaattataaaattatttattcatatcctgccttgtcatacaaatgatctaatgtggcaaacgataataaggtaaaataaaagcaaaaggttaaaaggaatcacagagccagaaaaaataattaaaagtcaatctagggaacgaaaaagtccacacacattcaaataagatcacaaaagataatctgtaattttaaatatcaaaaattatcattcattaaataaaacgtgaaaaatagaacagatataaccccatgagaacaatgttatcactaaacacagcaaaatcaagatgaactcctacaatggtcatagagaacagccccccctttttttaaagagtatataactggggacataacgtaggctgttgattataatagaataccatattaattatggaggtagaagtaatgatttgaaagaaaatcggtcctttgtttatatatagatggtataatatacttcattaaatactttcatttatttatttatttttgagacagagtctcgctctgtcacccaggctggagtacaatggcgcagtctcggctcactgcaacttctgcctcccgggttcaagcaattctcttgcctcagcctcccgagtagctgggattacaggcacccgccaccatgcctggctaatttttgtatttttagtagagacagggtttcatcatgttggccaggctggtctcgaactgctgacctcgcgatccgcctgcctcggcctcccaaattgctgggattacacgtgtgagccaccgcactgggcccattaaatactttattacacagtcatattgtcacattatctgaactcaagtagggctgtagaaatactgtaatttcaaaagttggtatttttacacatacccccaaaaacaaattccatgaagacagggattgtgggagtgtctgttcttttcaaatgctatagcgtaggggtttcgtgagtgctttataagtatttgttgaatgaatgaatgccccagatcaaggaattatgtatttttaaacttcaaggtctctatccatgagtaaaggccttttcttttattttacatcacagtgaagtcaatggtactgtcagctgctaaaacaacagctgaaagaagagctcattgactctttttccatttatagatgccactaaaggttttaacacaccagaaaaaactaacagctgcttccttgtttaaacaataaatgactcatttctctctacatgtaacatctaacatttgaaaagattaatgagtcagatgcaaacatcatatgacatttgagattattccttactagtcagcaattttatagtctcttttgcttgaaaaaaacaatatttaaacaatagtta

SEQ ID NO: 3238 - DNA, 4001 bp, Homo sapiens
tcaatagacacaaagtcaattgtgtaaaatattatgggataacacacaaaatacaatatctcatcatgaaaaaggataaagaagaaatcagtatttttatggggttatatttataggtgtctctcttggaaaaaggaatctaaattattctacaatattctggctcccatcatctttcactctgaagacaaaaagcaacataaggcaacacagcaaacactaaaaaatttgatactgaacatggctgaatgttttacttaggtcttctgcagtgggatcaagcactatcaactaaaatcattcccaaaactgctttaagccttatctcatgatttgcaaccagcaggctgtttgcagacatatagaactattatagtaagaactcaaacatctcttagattaagatggataagaaatagcattttgtgttaggggcaatgtgttggagaactgcaaaagctctccccatccttggagagtcgaccaaaatttaacatggcctctagaagcctaagcccacgtccatgagggcaatccagccctcttttgagctcctgttggaaaagccaggctgtcaaaaaaatttttactgtttgttctagccaacacctaataacagctccctgacttcccttttaaaaggcatttactaaaaagggctcacaactacgaatcctcctctgttcctttgagatgtgtttgtacctcttacaactcaggagtgtctttctcaaggacctgaaagccatcgctctgaaatgtaaccaggaaggactgggcctgactcccagtctctgtgggaggatagtattttatcttagataattcccagataggagacacagctggcctacttgcgtttttacaatgatcagcactttgtaatttttcacctccctgactctacttgagccctctcttcccactccctactcccttcatctccctttaaaactcgcagtcatctcggtgaaaataggaatggagctcagtctttcccctctgtcaggagttgcggaataaaatcctttttcaacgctttaacgtccagcttcgtgtatctctgacattggtaggtacatattaaaactcagctgggcgcggtagctcgcgcccgtagtcccagctactccggaggctgaggcagaaggatcgcttaagcccaggagctggaggctgcagcgagctatgatcgcgccactgcactccagcctgggcacagcgagacctccgtctctaaattagaggattaaaagcacacacacataaaaccccagatcactatcaagacgggcctataaatcttagaagcttgtcttatagggccatatcctcaaaagcctaggataactccaaagtgatccccccctaaacctcatcccctcttctcttcccccaagggccccgctacttcctgctttccccgattcctaaatccacctctccctaagcgtcctacgtcaaagtctctactttccaggatgctgaacttcaccaaacggaagcttactctcttccacgtttgggcttttctctatttatccctgtcccctcaattttcgagtttcctcaccccacttccctttccctgacgctccgggtctagatttcctccgggtctagatttcctcttggtcgcccctagtttcccactccgacctcggcttcctccgcaagccgagcgccccttccctccgcactccactcggaagccctggcgtctctttccgggggcggcggccggtgaggggtgcgcgggactcgggccgcgccctggtcggccatttcgcacactcggggcgcgcccggcgggctgggcgcgcgaggcctgtcctggagcgcaggagttgaggggctgaagaccgggccgcccccgccgccggggcgggaactcaccttctctgaggcaggggcgggcgtctacaactactgtcccccgccccgccaacgccgccagccaggggataagccgcggtggaggtggcggagaggcaggaacaaccgctgccgccaccgccgcctccgccgccgagcaggctggatgggaggaggaggcggagacccggcttcctgaggggaagtcgccgccactaccggcttatgactggacagcacagacgccatggcggcgagacgcgctactgcgcttgcgcggccagcccagcgcccaggaagcctcttgagccccgccttgctgcttgcttcgcccgcttggcctggcagttcccggcgcggctctaatgtcttgctggcgcgactggttttgatcctgtccgtctgccctcctttttggggcaaggaaaagttcgtgggggtcgctcgctcgccttgggagaatgaatataaagccaactgattaaaaaaaaaaaaactggaaatttacagttccaccctcaaagtatctcaaaaatacatgatctgttgccttatcaacagaacctacaatataggttcgtgtaacaaatgcgcagtaagccaaacaccgacatattcagtgcttaggagcgggggaaggtttattccgtttggccaaagcgagagagcgggagaagaagtctctcaaatactgacatgccttagaacgtaactggggggcctttatgagtaaggtaagaatacagagggtgggatcccccatgatcaaagctgtttcctccctgggactctaggtctcatctgccccattagatgatgccccatctggaccatcaaggaggtctgcgtgacctaagggtcatggttgttttgtttgtgatagggtctcgcgttgtcgcccaggctggagtgcagtggtgggatcaccactcactgcagcctcgacctcccaggctcaagcgatcctctcacctcagcctcccaagtagctgggaccgcaggcatgcacacatgcccgggtgatttttgttcattttttatagagattgggcagggggtggggatgtctcactatgttgcccaggctggtcttgaacttctgggctcaagtgatccactaacctcggcctcccaaagtgctgggattacaggcgtgagccaccgtgccaggtccattgttctttaaaagaaaaacaagttcatcaatcttgcctgcactctggggttaggatatgaagttaatcaatcactagtgactaccctctactgaaatgactacgtgcaagcaagcatgcatggaggaagaaaaagacaaagaaaaggaatataagtaaaacaaaacattttatgatctttacaataaagcctcagttataatctttcctttattatgccctaaatacacagagtagattaagcacaatcctttgtcatcatacgtcgtcatcattggtccataaatgacctttttctctctctccctgttgctctttcagcatgtacatctataatatacattatacacacaaatatgtatgtatgtgtatatctcatcatctcatcccctgtttcccaaagaaatcactaacctggtttgtattcatcatttcctttctctatttattatcacacataggcatggctaaaacacatttagattgtttttaaacgttataagatttacacctttatgcagtacgctgggactcgtttgtttcacttaatattttgaatttcgtctaagctgttgaagacagctgtaatttgttcatttcactgctggacacgactccactgattttcctgttgatgggcacgtctcctggtatactgtggaagagtttattttgggtattctctactttcctgtcacattgccgttgccttatttcagattctcatcaactcttgctagaaacgtgctaagatctccctctgacttcaactgctccagtctactctccatattgctgccaaagggttctctctaaaagtcattactggctccccagtgtctgttggaaaaggtcaaactgagtactatgaggtttctgtgcacctccctgatctcattatctttccactgcccttacctccccaccctgctattacttgtgattcagcaa

SEQ ID NO: 3239 - DNA, 4001 bp, Homo sapiens
tgtattctttgatcaaagtcattcccaacaccacacagtgccttttccccaaaaggaatcataatcaagtagaagaaaagagaagttactttattacaatttgttatctcatcccgaggtcagggccccttgcttagtgggaaaaaaaaccctttaggactgagtctcggaacagcacctgctggacagaggggagaaccaacccaggtcagaggggaaagcagcatggcaagacctagacccagttctaagagcacttccttgtccccgctcttacccgggccaccaccttcaaggcccattacctgtcctaaacccaacttctctgtgatgcccggatttcttgattttgatccagtagctgctcattttcctgccttttacatttaggagattcaagctctgtcatttcctctagctgcagaagaagatagagttagacaccctcgccctgaatgataggtcagcatcttttttttgttttgttttttgtgacggagcctcactctgttgcccaggctggagtgcagtggcgtgatctcggttcactgcaacctccgccttccgggttcaagcgattctcctgcctcagccttccaagtagctgggattacaggcgcccaccaccccacctaattttttgtatttttagtagagacgaggtttcaccatgttgtccaagctggtctcaaactcctgacctcaagtgatccgcctgcctcagcctcccaaagtgctgggattacaggtgtgagcctccgcacccggccggtcagcatcttttcaacacagccagtctctgtggaatgaacccttcctgtttgccttccttacctgcccctgaagtccgtccttcctgcagggcccaactccacgtagagtgagtgcagccacacagcagtaaccagatagagcagcctcccctgcagacatgagcaaagaagggatccagagagccaaggctgtatcctgaaaagcaagaaggatggggagtaggagggagtagggcaagtgcagcaaataggggaaattaaaagggcaggaccaaggctttgtagaccacaagaaggaagagaatgtgctcacatagattcttgtggggtcaaaggggcagtcagtatgtcccggcccctcatccagtggtaccagaggatccagcagtcctgggtggcagtcagcaataaggcggcggccaccgttggccacagtgagtgacacagcaagaaggaggcccagggagcaggcaacggacaagagcaggttcaccagagctagtgccagcaggacccagtgctggcagggacaggagatcagggtgagcagcctgggcctggctaactctcccagtgactagacacccagtttctctgaggctcctccaatctattgaaagaccaagctcagtcagcccccatttccctgactcaagcctactcgttaaaagctccagggaagtccctctcaccagtggagggcgaagaaggttcctggacgccaggagggccacaagtcccacggaaacgctctgtggaagacacaaagcctttggcctgctgggctctccgggagcccggcccccgcccgggtcgcctgccgcgctcaccagcagccccgagccgacagagatgacattggctacggtgtactccggcgtgacagcgccgcggggattggccacgtgccgcaggacggtgccatgcagcacggcccccagcagcaggttcacgtggcccaccaagatcagcgcgaggcccacacgcatcagccgcctgggcccccgggcggcgtctgcaaagcacgggggagggcagggttgagtcgggcggggaggggagaggcggctcgcggcgggttaaccgcgggcagtaggacggggcaagggtagccccagggtaaggagacgagacgccagggcccggaagttaccgaaagcgcagagactgcagcgcctcatcccgtccgccgcgccagccgcagggccgctgtacctgggcccggccccgccccaacctgggccccgcctccgtcccgggtccccctcccacctgggccccgcctccgccccgggcccgctccccctggcgggaaaggcgcgaacacacgacgcttttagcaaaaagtagacttttattacagcagcaactgaggcgaatcgaatggccccccagggccaccactgcagcaccacctttctctcccgccccggccgccccagcgggattgtagaattcggctcccctagtgcccgtgggcctcctttccacacaggctgggcgggagccggcagatcagcgactagcccccaactagaaggcggctgctgagaaggcccaggcccacgtctgtgcaaaacaagtaaacaaagtgcagaggggaggaagagaggggaggggaaaggatgatgctcagaaccagggagcccccccagccctcctgaataataaaggagggaaggggcttcacagggtaatactgactggggggaagggacaggagggctgcagcacgtccagggacagccacagcgcagatcagggcctggcccgagtgagctctaagaggagacggtgacagcggctgagttgagggtactgttcctggcaaaattgaacttgttcaaggtctcttctagcagagaagtcaaccggctctggtcagcctgggggagaagagctcagtaagatgggggctgagagaagagaaggcatgggggcagccagggcagatgaaggcagaaacctcacctcactaatgaagcccagctgcaccagctcagccgccaactcggggatattctcatctgacaaagaaacaggagggggtgagtacagtacgggactgagggacctggggcccttcagacagccccactagggctaaactgtcagtcagatccacccactgctttagggtctaagatagtcattctatgtgagtcaatgtgttactgccttgtcacctcccccacccctgaatatgtccctaaaagataaggctcatagactctccatcctctgagggaaaggagagactcacttggcatcaggtcacagctcaggtgccggttcagtttgtcctccaacttcagcagaagtgtcagctggagaataggacagtcagaaaatgagacttttcttccctaccctctggctactagccctgcgcaaccctagccctgagccttacgtggtgtttgactccctcctccaccgactcaatgttgcactgcatcagcaccacctagggagggaagagagggtcactctagagacctgtccataaaaaacccaatacctagacgtctttcgagcccatagggcatggctgctagggagcattttctctaaaggatagagccttatttgagatgtcctctctcccttccaccacaaccatggagacaatccacacccacacagcccccaccttgcgagtctccacctcagctggttcaggtgtcggagtcttgacagaggggggcacgacaggtgatgtcacctcctcctgctgtggctgctggggccgaggcagcccaaaggctgtcagaggatagatcccattcctggagggagatgaagacaggtcacatgggctctgtgaacgccttaggatacccaaccccgcctgcttcctcaagaaagcctgcttctcactctgctctcacctgacatcttcaaggaatttatctaattccagagctggtgactgagagtacctggacgagaaaagagaaaggagatggaaggaaagaaacaagcaaaatagcaaattcaagcattcccagagaatggacagtttacagagcctcaagagtggtcgtgaccaatctgcccctttcagaccctctcagttactcacaaagtctgaactggttctcttcctggtcctgcagggatttcagccagtacggcactagtatccatgtttttggtgatctcctctagagcgttctctgggatcatgtctggagggcatgatggagtgggatattatgaagggat

SEQ ID NO: 3240 - DNA, 4001 bp, Homo sapiens
aagcccatgaatggaatgcacagagctcaattcctcctcgaagccttgaacctctcactttatttttccttgcctgttgcttcctgatgtgtgtgtgtacgtgtgtgtatttcttcagctcattccctttttctttggcttcttttttcagtcctacacttaagctgcaaaggaccacaagctacgtatgaattgatttacctttttaatccatccttcccagtccagtttcagccaggcaaaagttaaagtggctggttccgctcctgggcctgtcacatctggggtaccttgagatacctgatgggcatagtcttccaaatgactgcaccctgccctactccaccacttgcacaacttcgcatggtctcaaatatagtctttagttcccagaatagcatagtgcactcactctaaggatgcaatttattcactcatactaattgctgcttaattctgcattcaccccagcagctaagacaattagtgttcacaagccataatgttatgccatgtttagtttgcaaataaagtgacatgctcatattctgaaaggaagaacttaaatccaaacttttaaaaacttcaacttttacatattttacaaattttcaaatgttacatatttagtgttaattttatcaagacgggggacatacataccatatggtctcagacaaatcacctaactgctctgtatgtcaatgttatttaaagttaaattttactttcttcaaaggattatggttaagctcaaatgacattaggtcctttataaaaagataaaagatagtttgtaatatttttttaaattatcaataccttctgatggacagcatcaatgtgccttcgatttaggtttggaaattgtgctttcacaattttatttagacagctacaactttaaagtaaaaagcttgtataataattaaaaactgattgattttaacgaaatcacagaattcagaatctcctagtcacccactgatttagggctaaatagttaaataaatgactgagtgtctggtagttaatctttacacagtttcacattcatgcctgaaataagcaaattgtacataggagttcaaagtttagaacctgacttaaaaatatgttgagaaagcgtgtagtttttcattagtaaagaaaaaaggaaaaacaatatgcatattgagcaagattctttaagcatatcattgagaaatgggtaacattactctgctacgagtgtatatttcatatctaggatatgaattacttgctgaacacgttaagaaaatcaatacatttgcttcagtgttactactaaataacaccccactggcctcaaaataaaagcagaaaggaaaaaagaaaatctagtatatttttaaaaagtgtatcaactttcttttcttaggtttcataaaatgaaaggggaagaaactctgttcaagagtaggcattttcacttctctaaataaatatttaatatgactactagcagcataagacaattaaagttaccagaaaacagaggacttaaaatctgtttaagaatatctttccctcgtctggagtttgacctaatcttaccgcttaaactcaaataagaacaggactaactttggtttgtcaaatgtaaccatattcagtgcactatgttcatcagttcttttctattacattagtaaagatcttttcatttaacccatttctaaaggtggggcctttaggaaggtcataccatttttatttacaaaaagaatatatataaaaaaagaagagagtagcagaaaaaaacctctaaaacactatgacaaggattctagctgacagaagtttcatttggaaaaaacatggagtaaacattagggtagagagtttttatcagcgcctcaagcttaccagctaggatcccaatggagtgtttggctcccagaatctctccaagaacctctcaagaattccttgaaaatgtacaggccagatcttagggtgagaaattcaaagaactgctcagactccacccagtggagaatttataaatattttactttacttcctctcccctaaccaatcggtaatctccagccactgtcagaaatttaagcaacatgtgctcctgcccaccatttcaaatgccagagcctccagtgagggcttctttccagaggcaactttgctctttaaactcaggtaaacacacacttgtcctttaactatataaatctctgacccctgaactgatgagttggtcttagagctaaattccaaattttgcctttcttcttcactttgagctctggatttttgagacaataccctccttcaaatacactgaggattttcagtctgatggttgaatctatgacatttaatgggtaaactttttagtcaaaagtttaaaataggctctcaattccagaatacactctattgcctaatatgtgagttttcaaaaactcctaggtaataaatctggacagttaacaagacaatgaaggaagaaagatctgaagattcaagtggaaactagcctggcaaacttcattaatgcaaattattcatttaagtctgtgaattgtcttttgttctagtctgactacctctttaggcttattcctgagcttgggtcttttgatgaatatccttgtagttataaaaactaagagcaaagactttcgatattaggactagggatgaagaatgtgcttgaataattgaatgacttatgcacacctatgctttatttagtaacccacaacaaatcaagtaaagtgtcatttaatcatttctatcaagtgttcattgtataaccctgagcaattcacttaacccttgtggaggctcagtctcctatttatcaaatgaacttaataataccttcctcccaagattactgaaacgataaaaccatgcaggttgaaggccatagataccatgacactcaagtcaaaagtgacatattgtcttttttttaatcttaagtaaccagacaaaaagtactactctccagtttccaagagagggagataaagtgcatgaaattgctttaatacgagtaattgaccagtgaaaataaaatatatttcacttcattgatcctatccttacaataatcctataaagtaagtagactaccaattgattaacttagaatagtaaaagtttgaatccattcaggaaatttcagaaggtgtactttttttgcatctattctgtgtatgcctcatgctgtaaaaactttggaagattaccaggctctaatatatggggagcgaaccagagggcggatctgtgtcatttttgtgtcactcttttaaagactgactatagatttagagagctagatatggacattaaggttttgttttcacaagatcttgcttcttctaaaatcttgtaataatatgattaaaaatttcatcaaaatattatcttaaaaactactgtttaacttgtcacctttaaagaacttgcttggaggtctaagctatacttctatttcttatgttttataaatttctttctttctttaaatttgttacatttgaggaataaaaataaaatcccaagcccctagattaactgaacggacacgctcttggccaaggggatcccagagtaaacttgaaaactaagtttttggccatgacaggataggaagtggaacacatacccgctccatcactaactatgattaggctttctgccctatggctaaaaagaaaccagtcatttcaaaagattacaccaatgacatcaaccatcacctggtgttatccctctcttttgtggtttggaacaaaaagaaaatactgatcatggaatgtttctggctagtctatggagaatgtgcagtaaaggttttcatgtcctctgcttcacattgggctgaaaactgccccctcagattgtattaatgctgtcattttttgaacacggatcccatggagaagcatgaaactccattgtgcatgtgcacatttctcctttcacaaatattcatggcttcc

SEQ ID NO: 3241 - DNA, 4001 bp, Homo sapiens
cagggtgagactccgtctaaaaaaataaaaataaaaataaataaataaataaataaagggttaaattcataaaaagcatttactttataggcagtctaaataggtacattttattgaaggtttctgtcactaggacaatcctcaactgttctctttgccaagtcagtatgaagcagcaagtcctcctcccgcaagacaagacacatacttcagcttgagaatctgcacagctaagcagaatgcaggcccaaatggccaaagggaatccatctgacctgaagataattataaaaagctttgtttgggcagcttaatactagtcttaaaataatcagattgactcaaactccatatacattttggtagccttctaccctacacctcttcttcatctctttgattcctcctacctgcattactgacccaagttaatctataatgtgacaagtgttttaaggaaaaaaacaaccatcagacccacagattaatttgacagggatgaaatctgtaaggcctttatatcacataaaatgtcttttgtatggctgacaagtttcaaagaaataaactggtaaaatttttaaagcgtgtgccttgtttccaacttaactcattttcaaaactaaattttatttttttattttttagagacagggtctctgtcacccaggctagagtgcagtggtgcaatcatagctcactacagcctcgaatctcctaggctccagcaattctcccgcctcagcctcccaagtagctgggactacaagctttccaccacacctggctaatttttaaaaaaattttagtagagataaggtcctgctgtgttgcacaggctggtctcaaactcgtggccttaagcaatcctcctgccttgatttcccaaagtgtcgggattaatggtgtgagccactgcacccagccaaaagtaggtattcttaaaaatatctgtattccctcttaacaattatgttcacccaatgaggcatgagaaaacacaggcccctagtattttacatccaggttctcttttgcacagtgatttgtgacatgctaaccagtttaatttacaagtttctttttttttgttttccagctgtggatatgccctgtggagtgacaccggtacaaagaacttcaggtttcctaggtccccaaattctctaagcactaacagtttaaagacgtccttaccatacaccaccgtttgctctcatcattaccctgaacgcacttgtgtataatcacaaaggagtaacacggcacatgtgaataccgttaggattcttcacctctttttaagaagcaaaccaaaatacattaaaaaatgccaattacatagtaaactacatatttgccaatttttaaaatttatactatcaataattgagtttatttcaattaataatgttaacaatgacacatttaacattatgttagagctcaatttgtatatattaacatgtatttttaaataatttacgtatttatcgtcgaatcatgtatttttttaaagggggatgctcaactctctcaggcaaaaatgagcacctttccgaacaccgtggggagaggcagggatgcaggcagacatatcctaaactcaccctcccggcagcatcaaagtagccttcggccagggatttgttataatcagcataaggattcgggaaggccctttgagccatgacgccggaagcaagcctgcagaacaggggaaaaacagaaactaggttgagataggggcctcggccgagttgcgagggcggcggcggcgcccaggtatcccccttcctccagctccagggccatcgagccgtctcggcggtccgagtggacctcgggcccactgcggcccaactgctaggacatggcgccttcgcgaaaaagctgccagggcccttaacccacccggacaaagaggccccgttttgcaaccccgttcccacgcccgcgacttgaagcaagtgcgcctcccgcgtcctgaagcccttctcggccctggcctctcaccccgcagccccggacagtaacagaagggctattttaccgcccagttcctgccaggagggccaatcagagccttcgccgttcccgagacccgcccccttctctcttacagtttgttaaagacacaggcgtgtaatttctaaaggataacgcagggtattttaattactgggtagcagaagtgaggacctagaatcacgcggagatgtgaccaatatttcctacccttctttaatttttcttatttttaaaaagtcaaatttaagtccagagtcataagaagtatatatttttttaacctggagaagaaacagactgcttttagatctgaacatgctggtatttctgctgttcgcaatagataaaatttggcggggggtggggggataatgtctctccagggacttgccaatcttttcttttcatttcttaaaacaaacaaacaaaaaagcaccaccatcattaacaacaacaacaacaaaaatatgcccaaaggacaggatatcaaatagcagttgataatactttggggaaagcacatgaaaacacaaattacagctcttaggaaatttattctgttccttagcctaaattggactataatactggataacaaagctctaaaaaatactgaaaaccaacacagcaggagatccacaacattcaatttcaatgttttaacagtccctgctatctgaaacatttttctttcatttaaaattaaatcccacctggtacatattaggcccattctattgctcagagaattttggagttcagttaaaaagtcagcctcactctctccttttccttctctccggtttcaatgaagagtcctagctccagacctccaactggagaagctcagtctccaccccaactccctccctccttggcctaagtttgtccttctgaggctgccatcccaaactctactcctaatccctccccacacccaggtttgctcttttaaaatagttgctttcttaggaaatgtagttgctttcttaacctcatcaaattcatgaagatttagccgaggcccatggtgagtcttaagctggatatctctcatgttttaaaagatgggtgtttgaaggagcaactcacaagagagaaaaggaaaacgagagacattttatcaattattttttctttaatgattaaaggctatccatttatcccactcacagtctttaagcaattaaatattactgttgttaagcaaggcaggatggtaattgtatattttcatagtatgcctctatcttattttactaatcctttcccctaatgatggacattgtttctaacttccatactacaaataatattcttggaacatgtgcttttatgaatctgtgtgagtatccctgagacatacacccagcagtcaattgctggatcatatgagattctgtacttaatttccccaatgttgttagattgctttccaaaactgctggactagtttatattccctctaacagtatctattgttcactccaagagtattcactccaacatatcaattgtttctgtcatttccatctcctctccaacacttggtattatctagtgttctaatgtttgccattctaatgaataatgtagaatctcactgatgtttaatcttttagtttttctgtggctaatggtgttgaactttccttcatatacctgttagacaattgggctttacctgttcctttatttatttttctattagtgattgcattgttttcctgttgatttgaaagagttttgtttctttttttcccgtgtttgtggggtatattctgtatattaatctcctttcactttagttattgtagatactttctttagtttgttcacattttctaggatatcctttattgaatcacaatctttcatttcgatgaagttaaacccatctaattgtgacactgtgatttgaggatttagcttcatattcaaaatgtctttgtctactcatagactgcaat

SEQ ID NO: 3242 - DNA, 4001 bp, Homo sapiens
aaaaagcatttactttataggcagtctaaataggtacattttattgaaggtttctgtcactaggacaatcctcaactgttctctttgccaagtcagtatgaagcagcaagtcctcctcccgcaagacaagacacatacttcagcttgagaatctgcacagctaagcagaatgcaggcccaaatggccaaagggaatccatctgacctgaagataattataaaaagctttgtttgggcagcttaatactagtcttaaaataatcagattgactcaaactccatatacattttggtagccttctaccctacacctcttcttcatctctttgattcctcctacctgcattactgacccaagttaatctataatgtgacaagtgttttaaggaaaaaaacaaccatcagacccacagattaatttgacagggatgaaatctgtaaggcctttatatcacataaaatgtcttttgtatggctgacaagtttcaaagaaataaactggtaaaatttttaaagcgtgtgccttgtttccaacttaactcattttcaaaactaaattttatttttttattttttagagacagggtctctgtcacccaggctagagtgcagtggtgcaatcatagctcactacagcctcgaatctcctaggctccagcaattctcccgcctcagcctcccaagtagctgggactacaagctttccaccacacctggctaatttttaaaaaaattttagtagagataaggtcctgctgtgttgcacaggctggtctcaaactcgtggccttaagcaatcctcctgccttgatttcccaaagtgtcgggattaatggtgtgagccactgcacccagccaaaagtaggtattcttaaaaatatctgtattccctcttaacaattatgttcacccaatgaggcatgagaaaacacaggcccctagtattttacatccaggttctcttttgcacagtgatttgtgacatgctaaccagtttaatttacaagtttctttttttttgttttccagctgtggatatgccctgtggagtgacaccggtacaaagaacttcaggtttcctaggtccccaaattctctaagcactaacagtttaaagacgtccttaccatacaccaccgtttgctctcatcattaccctgaacgcacttgtgtataatcacaaaggagtaacacggcacatgtgaataccgttaggattcttcacctctttttaagaagcaaaccaaaatacattaaaaaatgccaattacatagtaaactacatatttgccaatttttaaaatttatactatcaataattgagtttatttcaattaataatgttaacaatgacacatttaacattatgttagagctcaatttgtatatattaacatgtatttttaaataatttacgtatttatcgtcgaatcatgtatttttttaaagggggatgctcaactctctcaggcaaaaatgagcacctttccgaacaccgtggggagaggcagggatgcaggcagacatatcctaaactcaccctcccggcagcatcaaagtagccttcggccagggatttgttataatcagcataaggattcgggaaggccctttgagccatgacgccggaagcaagcctgcagaacaggggaaaaacagaaactaggttgagataggggcctcggccgagttgcgagggcggcggcggcgcccaggtatcccccttcctccagctccagggccatcgagccgtctcggcggtccgagtggacctcgggcccactgcggcccaactgctaggacatggcgccttcgcgaaaaagctgccagggcccttaacccacccggacaaagaggccccgttttgcaaccccgttcccacgcccgcgacttgaagcaagtgcgcctcccgcgtcctgaagcccttctcggccctggcctctcaccccgcagccccggacagtaacagaagggctattttaccgcccagttcctgccaggagggccaatcagagccttcgccgttcccgagacccgcccccttctctcttacagtttgttaaagacacaggcgtgtaatttctaaaggataacgcagggtattttaattactgggtagcagaagtgaggacctagaatcacgcggagatgtgaccaatatttcctacccttctttaatttttcttatttttaaaaagtcaaatttaagtccagagtcataagaagtatatatttttttaacctggagaagaaacagactgcttttagatctgaacatgctggtatttctgctgttcgcaatagataaaatttggcggggggtggggggataatgtctctccagggacttgccaatcttttcttttcatttcttaaaacaaacaaacaaaaaagcaccaccatcattaacaacaacaacaacaaaaatatgcccaaaggacaggatatcaaatagcagttgataatactttggggaaagcacatgaaaacacaaattacagctcttaggaaatttattctgttccttagcctaaattggactataatactggataacaaagctctaaaaaatactgaaaaccaacacagcaggagatccacaacattcaatttcaatgttttaacagtccctgctatctgaaacatttttctttcatttaaaattaaatcccacctggtacatattaggcccattctattgctcagagaattttggagttcagttaaaaagtcagcctcactctctccttttccttctctccggtttcaatgaagagtcctagctccagacctccaactggagaagctcagtctccaccccaactccctccctccttggcctaagtttgtccttctgaggctgccatcccaaactctactcctaatccctccccacacccaggtttgctcttttaaaatagttgctttcttaggaaatgtagttgctttcttaacctcatcaaattcatgaagatttagccgaggcccatggtgagtcttaagctggatatctctcatgttttaaaagatgggtgtttgaaggagcaactcacaagagagaaaaggaaaacgagagacattttatcaattattttttctttaatgattaaaggctatccatttatcccactcacagtctttaagcaattaaatattactgttgttaagcaaggcaggatggtaattgtatattttcatagtatgcctctatcttattttactaatcctttcccctaatgatggacattgtttctaacttccatactacaaataatattcttggaacatgtgcttttatgaatctgtgtgagtatccctgagacatacacccagcagtcaattgctggatcatatgagattctgtacttaatttccccaatgttgttagattgctttccaaaactgctggactagtttatattccctctaacagtatctattgttcactccaagagtattcactccaacatatcaattgtttctgtcatttccatctcctctccaacacttggtattatctagtgttctaatgtttgccattctaatgaataatgtagaatctcactgatgtttaatcttttagtttttctgtggctaatggtgttgaactttccttcatatacctgttagacaattgggctttacctgttcctttatttatttttctattagtgattgcattgttttcctgttgatttgaaagagttttgtttctttttttcccgtgtttgtggggtatattctgtatattaatctcctttcactttagttattgtagatactttctttagtttgttcacattttctaggatatcctttattgaatcacaatctttcatttcgatgaagttaaacccatctaattgtgacactgtgatttgaggatttagcttcatattcaaaatgtctttgtctactcatagactgcaatgacttcccacattttattttattagctttttacctcttatatttaagtctttatctggagtttacttctg

SEQ ID NO: 3243 - DNA, 4001 bp, Homo sapiens
aaattcataaaaagcatttactttataggcagtctaaataggtacattttattgaaggtttctgtcactaggacaatcctcaactgttctctttgccaagtcagtatgaagcagcaagtcctcctcccgcaagacaagacacatacttcagcttgagaatctgcacagctaagcagaatgcaggcccaaatggccaaagggaatccatctgacctgaagataattataaaaagctttgtttgggcagcttaatactagtcttaaaataatcagattgactcaaactccatatacattttggtagccttctaccctacacctcttcttcatctctttgattcctcctacctgcattactgacccaagttaatctataatgtgacaagtgttttaaggaaaaaaacaaccatcagacccacagattaatttgacagggatgaaatctgtaaggcctttatatcacataaaatgtcttttgtatggctgacaagtttcaaagaaataaactggtaaaatttttaaagcgtgtgccttgtttccaacttaactcattttcaaaactaaattttatttttttattttttagagacagggtctctgtcacccaggctagagtgcagtggtgcaatcatagctcactacagcctcgaatctcctaggctccagcaattctcccgcctcagcctcccaagtagctgggactacaagctttccaccacacctggctaatttttaaaaaaattttagtagagataaggtcctgctgtgttgcacaggctggtctcaaactcgtggccttaagcaatcctcctgccttgatttcccaaagtgtcgggattaatggtgtgagccactgcacccagccaaaagtaggtattcttaaaaatatctgtattccctcttaacaattatgttcacccaatgaggcatgagaaaacacaggcccctagtattttacatccaggttctcttttgcacagtgatttgtgacatgctaaccagtttaatttacaagtttctttttttttgttttccagctgtggatatgccctgtggagtgacaccggtacaaagaacttcaggtttcctaggtccccaaattctctaagcactaacagtttaaagacgtccttaccatacaccaccgtttgctctcatcattaccctgaacgcacttgtgtataatcacaaaggagtaacacggcacatgtgaataccgttaggattcttcacctctttttaagaagcaaaccaaaatacattaaaaaatgccaattacatagtaaactacatatttgccaatttttaaaatttatactatcaataattgagtttatttcaattaataatgttaacaatgacacatttaacattatgttagagctcaatttgtatatattaacatgtatttttaaataatttacgtatttatcgtcgaatcatgtatttttttaaagggggatgctcaactctctcaggcaaaaatgagcacctttccgaacaccgtggggagaggcagggatgcaggcagacatatcctaaactcaccctcccggcagcatcaaagtagccttcggccagggatttgttataatcagcataaggattcgggaaggccctttgagccatgacgccggaagcaagcctgcagaacaggggaaaaacagaaactaggttgagataggggcctcggccgagttgcgagggcggcggcggcgcccaggtatcccccttcctccagctccagggccatcgagccgtctcggcggtccgagtggacctcgggcccactgcggcccaactgctaggacatggcgccttcgcgaaaaagctgccagggcccttaacccacccggacaaagaggccccgttttgcaaccccgttcccacgcccgcgacttgaagcaagtgcgcctcccgcgtcctgaagcccttctcggccctggcctctcaccccgcagccccggacagtaacagaagggctattttaccgcccagttcctgccaggagggccaatcagagccttcgccgttcccgagacccgcccccttctctcttacagtttgttaaagacacaggcgtgtaatttctaaaggataacgcagggtattttaattactgggtagcagaagtgaggacctagaatcacgcggagatgtgaccaatatttcctacccttctttaatttttcttatttttaaaaagtcaaatttaagtccagagtcataagaagtatatatttttttaacctggagaagaaacagactgcttttagatctgaacatgctggtatttctgctgttcgcaatagataaaatttggcggggggtggggggataatgtctctccagggacttgccaatcttttcttttcatttcttaaaacaaacaaacaaaaaagcaccaccatcattaacaacaacaacaacaaaaatatgcccaaaggacaggatatcaaatagcagttgataatactttggggaaagcacatgaaaacacaaattacagctcttaggaaatttattctgttccttagcctaaattggactataatactggataacaaagctctaaaaaatactgaaaaccaacacagcaggagatccacaacattcaatttcaatgttttaacagtccctgctatctgaaacatttttctttcatttaaaattaaatcccacctggtacatattaggcccattctattgctcagagaattttggagttcagttaaaaagtcagcctcactctctccttttccttctctccggtttcaatgaagagtcctagctccagacctccaactggagaagctcagtctccaccccaactccctccctccttggcctaagtttgtccttctgaggctgccatcccaaactctactcctaatccctccccacacccaggtttgctcttttaaaatagttgctttcttaggaaatgtagttgctttcttaacctcatcaaattcatgaagatttagccgaggcccatggtgagtcttaagctggatatctctcatgttttaaaagatgggtgtttgaaggagcaactcacaagagagaaaaggaaaacgagagacattttatcaattattttttctttaatgattaaaggctatccatttatcccactcacagtctttaagcaattaaatattactgttgttaagcaaggcaggatggtaattgtatattttcatagtatgcctctatcttattttactaatcctttcccctaatgatggacattgtttctaacttccatactacaaataatattcttggaacatgtgcttttatgaatctgtgtgagtatccctgagacatacacccagcagtcaattgctggatcatatgagattctgtacttaatttccccaatgttgttagattgctttccaaaactgctggactagtttatattccctctaacagtatctattgttcactccaagagtattcactccaacatatcaattgtttctgtcatttccatctcctctccaacacttggtattatctagtgttctaatgtttgccattctaatgaataatgtagaatctcactgatgtttaatcttttagtttttctgtggctaatggtgttgaactttccttcatatacctgttagacaattgggctttacctgttcctttatttatttttctattagtgattgcattgttttcctgttgatttgaaagagttttgtttctttttttcccgtgtttgtggggtatattctgtatattaatctcctttcactttagttattgtagatactttctttagtttgttcacattttctaggatatcctttattgaatcacaatctttcatttcgatgaagttaaacccatctaattgtgacactgtgatttgaggatttagcttcatattcaaaatgtctttgtctactcatagactgcaatgacttcccacattttattttattagctttttacctcttatatttaagtctttatctggagtt

SEQ ID NO: 3244 - DNA, 4001 bp, Homo sapiens
gaacgaaagagtctctgagggaaaatgtgatatagttctgtcaataaggcggtatttccgaatataaaagtacaggaaacatgaaaataaactcagcacaagcaaacctacacattcgtgttgttttttaaatgtacatcagaaacaagacggtaaaaaacaacagggcaggtagcagtcatgtggagtcaggtagtcccccgggggtgggccatgaaacagtatctgcctcatttaagatgattctcatctggcgtttgtccaaatgcttactaatgatttcaagtcaatgagtggggagaagcagcaagtacagagaaaacagattgtgtctgggataactctcttcctcttttgcagttaagtatcaaaaactgcacagtatcaccaacgtcacccacacaaccacattcgcgaagtcattaaagtggccaagtcgaccatgtaggaagtttgtcacggcttcggcaaaatcataataacctaaaactacctaaactgaatcccatatttggaagtcatagacaagttaggtttaatgtgcatggatactataaatggtgaattacaaaagaaaaaatcacaaacttattactagtgaatcaccaggcaacaacagtgtcaacttggttaggacagaatcacacagatcttggaacccaggagataccggggtaggtggccaggatggagagggctctcaataaaggtctctgtaaaaacagccggtcggctacgaaaagcacctactgcgcagggaggaggctgcaccaggacaaaagctggtcaggcgtcaactcaggcaaaagctatcgcccccaagcgattctggagatgcaagagaggcatgaaacaaaacaaagtccaagaaacgcggacaaccgggttaccgctggatctttcgctttcccaacgggaagaccaatgtcgaaactagactgcgtttaccaaggtccgctcctaattatttcattagaggaaaaaattccagggagcactggataggaggaagggagatgctgcctttcagatcgtagaaatacaacaagaaccaaaacagaggaattcccaccaaatcctaccaccctcgtcccttcgcctgcaaagcctctgctctcccaagcccgcttctctcctcaaattcttgccaaagaacaatctccccatgcttaccaccgccccccgctcccccgactccgattcctgaacaaggttactttcccaaagtccttggacttcatccagagttggcgcgccttaaaaagcagcgcccctccaagtccccgccccacccaacaccccgtttccagtctcaccccctccgcaccaggccccgctccccaggccccccggacatacgcgccacgcctgcccgccttaccatgtaccaggtccccaggatgatcgtcccggtgcggacatggcaacagccgcagcaccgggtgctgtagaaccggtcactgcggttccgcttgaaactcatggacaccatcgtaacaggcgggcctccttcttggccgggcccctgacaaacgttctccacccgcagccaaactcaaacggctgtttcacggcctccaaaacccaacgacgcgtcttcaaacccgcccccggctcgtgcccctgccagcttcttcgcgcctgcgcactgagcgcagcgacttcggcttacccacccctcttcctccacacaggccaatggggagcggaaggctggatggaccggacttctgattggaagaacttggggattgacaagacctcacgcccaattagaagtgcaactcgcctcagcgagtctccgcctgttacgcgaaggcaagggctggttctcgggcctaggatagttggggataggtatgtccccgtagtgcactattcccgagatgagacccgcaagaaaagaggcatttaatggaaaaagggagacacgagacagcgcggatggcagaaagcgggcacaaggggcttttctgagcaatgtgtgccacgtactggatgggaagcgtcacaggctgataacgtgacctttgcgcgcagctcaattattgcgcgggctgggggcggggcctgcggggaagggacagagccaagcccagccttgagccatcctcgcccctgtggcggaaatgggagggtgcctggaggagtggagggattggatttacaccctcttttccctccgaagcctccttggtgggggcgaagaaagaccatccaaccctgccaaaggcaaaaggattaaggataaatgaaagcaagataatgtagaagaactacttagctgctgggtttttggagatgagtgatttttttttgtagggagaaattatgaaacacattgaaatggacaaaaaattactgaatgtcttcaatgaaaaaacagccatagtttggcacaccgtcccgggcattctgttgctagaggggctgtccgcttttctttgtggtgctctgcacaactcggtaagacccctcgtattgttatcttacccttccttgggaaaagccattttgcatcgatttgtaaattcattccccagtcctgattcaacaatatagatgggtgctttaaattctgcttagagctggttctaacagcttactggtccccgggttaatgagtaaataaattttttacacgtgttcattttgtatttctgtgagacctgtgacttcaccgttaaaaaatgtatttatcatttaatgctttggtaaacacacttcttttcagagaatagaaagggcttcccttctgccagggcatattcttagccagagaccacactgaattcagagtaaaggttatttctttggcatggcttctttgaacactgcctgaaattatgtatgtatttgttgattatctccccaataaaatacaaattttaggagagcagagactattcaccactgaaggagttgtccatggagcttattttcaaaccatctgggaagcagtagttaagcccgcccacgctaaaggatggggtgtggctggctaactcagaatgaattatgacatttctctacttatgtagggagtagattatcttaaccccgccccacaatttcgtatcccttattttgttctaggcacagatccaatcactttattttcaatcatttcattcctacaactaactgagataggtactcttacgttatttaactctacagagaagttaaattacatatccaagattgcaaggccagtgtcacaactgagattaaaacctgttgtgccaatagtttccaaactttgctgcacattggcatcacctgaggatctttactaaccactgatgcctgcttactattccagaccttctgatttaactgtcatgggtgagacctgggcattgacatttttaaaatgtcaattttaaaattaggtgatcctaatgtgcagcactgttattctgtcttgatatgaaatgtggcagacagaaataaatacaatacaataaaaaagaatacaaagataagatcaggggagccgggcgcggtggctcacgcctgtaatcctagcactttgggaggctgaagcaggcggatcacctgaggtcaggagttcaagaccagactgaccaacacggagaaactccgtctctactaaaaatacaaaaaattagctgggcgtggtggcacatgcctgtaatcccagctacttgggaggctgaggcaggagaatcacttgaacctgggaggtggaggttgcggtgagccgagatctcgccattgcactccagcctgggcaacaagagcaaaactctgtctcaaaaaaaaaagaaaaaaaaaaaatcgggaaattatccgatttctctaaaagccaaaatgaattcaaaatcaggtgtacctaacatggcatcagatcagctcgtaagggctgttctccctgtactgggactaccccaggcaaggaaccagggaggtgtaaatcattagagacctgcaacataaacgcatctgatagcaataatgtaagcataccctgagaa

SEQ ID NO: 3245 - DNA, 4001 bp, Homo sapiens
cacccaatgctttccaccatcgtgcctgtgcacatggtttaaaacaaaaatatgggggagtcttttgagggacagtatctaaggaaacaggggtaccagatgcctcttcaattgtatggttactacatagataagaaatgacactggatttagaaacagaagcaataggttctaggctctgcccctcaagaactgtgtgatcttgaacaggtcctgtaacttctctgagccacaagtgtcctgtttgtctgttactctgatgctaatagtgcatacctcacagttaggttaagggctaatgtctgcataaaagcattgcaagctgcaaagtgctaatcgatgaaataaacttaaaccttaatttctcataatattcttaatgggtccaaacacccaccttggcaaattttgagcagccaaaggcacaaagcctccaacagccttcaaagcttcacctataataaggcacctagctgctcacacaccacgggagaggcaagggaggggcacccacaagaagggtacacaagcctcggggtgggggaacttgaactgttgagagagggaagttcagtcccctctctaaacactgccaggctgggacggatgggggcagggagactaacagaagatgcggggctttgcggcaagtttaggttcgggagctgggccctgcaaaggcagtttcctcccgggtcttggaaaggctgctggcgacctccaaagaaaggagccagaagagcgcacgcagggtgaagagtctgacgtaggggcggctcttcctcgctcggggctgtggcgccggcccgaaaagttgaagcgagaagcatgaactttccgcttcttgggccaggccggaccccgccgcggcttgcgccggttttcccttcgctcagcgcctgccggagactcggggccgagctccccacgtccgcacctgagagcgcgctccggggctgccggcgctcgcccccggccgcttctcctctaacccagagcaggaaggaagaaactgccagcaaggaagtcccagcagtcaggggcctgcctctctctgcatccctcccggctccgatccccagtccggggcaaacctccgacgccccgcgcccggcccgggctccttccccttcagcacggcgaaggcggctcctcccagtcccggcccccaccaatgtgcgtcggtttttaggggcggtggagagggcaggggttgagaggctgcagcgcgtgccctgctgcttgtggctttagtggggttacgtgtggggagagcgtttcccgccccccacccccccggagctctgcaaaccctgcggccgcaccagctcagccccgctgctgccggcctcgacgttgagacttgcatgcaaacaaaaagaaaaagaggaggggcccgggaagagcaggagcccccctgcgccaagtggggcgcgcgcctcctgcagctctccgcatagggtggtttcattgggggggattcacacgtgacccctggctcccccgccaaccaatacaaaccctccggccgtcacttaggtgagggctccgagttcacgtcctttgtctggatgttctcagcaccccctccccccacccccacctttgcaaccttgacgttgactcctgcacgggctcgggcggcgggttagcgctgagcgcccgcgccgccggctgccctcgcacccggagccggcacgaagcaggcgcccgggcccgcagccaccgccgcgagacagacgcccgccgcaggcgcagggtactcaccagtgaatggggaaatatatagacatgaagtcctagggcaggctgacacacgcccctgtgatttaaaaacggtccctgcgtcccgagtgaggatgacacgggcgcagacgggcacggcaggcggccgagtgcggacaccgggcgctcgccgtccgccttcccaggacagccccacggctagcgacgtcggcaaggtggacacaactccccgctctccactgagcactcagccccacaaagagcccgggaagccgtatttataggggcgggggcggggcttggccccgagaggccccgccctccctcgcccactcctggaataacgtcaccaaaatcatgaatggcttcagcgctcgcagctccggcgggcggcggctcgggggcgcgctcggctctgctcccggggccgtggttcgctgcggctgcgagcccggccccctcccgccgctctcccacgcgcacacgcgctcactcgcaccggcccggactccgcgtccgcgccgcttcccgctcacagccccctccacgcacaccccgaactccagcgcggcggaggtgggcgcaaggagggcgcgggggccgctcgggacatgacagctcggcggctgctctgcgccggggtagggcacccgccactcctccaccccagccgcccggcgccagcgccctccttcccatccactggctgtccccagcccacctcggacccctctgaagcgtttgttccccatactaggcctctctctggaatcctcgcccgcagccttgcgatcagcgaggggaaacaagagcatggttaaagaagaagcggtgggaaggtggcagagacgcggagccgggggaccgagtgcccacggggcgcgttggcttgcgaagggctggtctgcagccctgagttccgtggaaggttttatttgtgggagcaaggatgtggtgtcgtcctgggtaggatttttccattggagacacacatacgcccggtctgcagcgggggcagaaggtgtgggcgggcggtgtgcacgccgccccccatccttgactcccacgtcttctccgaggagtcgctcatgacagcagaaacaaagagctttagccgaacgcctcccacactgcccaggaattgcagctctgggcgtctgtccaggcagtcaaagctgcgcagccccccagagccacatgatgggagtctcactcgggacccagcgctgccgctctgtggcctccgcttcaatcacgcctgtaaaatggctttagaaccctcacctacctgtgtataggggctgaggaaagggggcgcggggagatcaaaaactaagcaaaattaaattggctttgaagtgaatcagctttttaaaagaaaggcagtgagtgtattgaatccgtatatatgtacttgaaagtggaaacgcatagcttatctcaggcaaaaggatgacagaattaatggcgaaggttcgacaggggtaggaccctgaaggaagccgtgagagaagaccctcataattttcatcagtccccgcaaaaccagcccaaacaaaaattataagaattgatgagaataatttatttaaaaataactgggctattttcaatcacttatatgcttatatgtacaacctgagttaaaatagtgtgcttcctatgaaaacacagcttcatgacaagcccctggctgccccctccaaccagagaaattcccccacctcccaagctaaacgcattctcttcctctgggggtgttgcctgatggaggggctaaacgggagatgctgcagggatggggttattgttgatgtcctgcacagagggtggggaagcttctcagtgtcactagccaggtgtggcacattgtcatctaggcagccacaggagacgccaatgcttggagagctagtttccaggctgagacttccaggcactcagaggaaaatgtctgggctagaccccgggtgggcaggatgaagccttctgccacttcttcccagtagcaatctctggtgaggctgggatcaaagactgttgcgccacttttacacataacagacacactttatgtgtttgtgattattgccatgtgaagctttcaaaactcagaaagctatttccctccctccccattttcccaaatatctaaatgtcaaaatggcctcattttggagaagagggtggggagtaaggcctccaccagctgttatctggcctctggaaaaatcctctacattggagtgcattga

SEQ ID NO: 3246 - DNA, 4001 bp, Homo sapiens
ctcagccctggaaaccatcctagtggtttcacttaatgtgcaataaagcagctctctggaggcagcaggaactgccccactgcatcccaggcatatcaccaagcagatgctgcaaccttcactcatgcatcctctatgtggcttttgtgtctgtctctacctctgctctcaattacttacgtgtgtctgtgaggagtgtggagctctgctgatgggcctgtgcctcacagccccttccatctctcccgcctagttctcccctctgcagctgggctcaggtactgggattggacagctcctaaacatgagtttgggggaggagatggaagtggagagtagcaaagggaggaggcccaggacagcagaggcccctctaaggtcgtcaaagcggccagggactagtccaggggatcgtggggccacagaaggggacttttctcagtactggaactcgagctggggcgaaatcggatccacagagaggggtaggagggtgagtgattaatgaggaagattaagagattaaaacttgttctgggttggggaggggacactcactcggctgtcctataggttaccccccaccccagcttggaagcacagaagctcctgggtgctcgcctcttcccacccgcgggtagaaccctccctgttcacgatccttctcaagagatgcacggaggccagccttcaccgctggccccgcggggccaacggttttccttttcaggcagtctcttgtgtttcccaccttctcagattcctttgattgtccattcagacatttcggggccctgcgctccctccccttgtagagatccccacattccaaattcgctgtcttgggaaggcaccccattcccgcttaaggatgcttcctcacacctcccctttcagatttcccattctcacccctcagccctacccccaccttatcttgcacccacacaccccatcggcgggttcctccaccccgggccgcccccgctcgaccccgttccccactggtggcacggaggcctgctcaataaacgacctttagtctcggattgccggcccggacattccactgaattctgtgaatgtgtagcagggttggaggaccctcggaataacccccttggggaggtggacaaggacaatctcagcgaagagcttgctcccctcctccccacccttaggaaacgtccgtgaaccggagtgagagggcagtgggagttcagggagcaaagtccaggcggaggagcgtgaggcggggcttccgtccgtcccgcacacttctgggattgttttctctttcagaaagcgctactgcggagtgaaccggtccttatatcttagtttcgtgactttgggggcggcaggcctgtgagttgttttccgccctggacgctgttttgcaaagatctctgcgcgcccaccgccaccctcccgggcgtgcgggccgggaagcagccagcggtgggaaactccgacgccctcctcgacacttttctccccccaactccccaagactcacttctagggaagtcctttttcccatcaagccctgggaaagactggccaggctgagagagggacccgtcctcctctgtgccaaaggcgggagcaaatcctggtgctgtcgcctttggatgtgagtcctggaaatggcgggggtgaggaaggtgggcaggggcaaggtttggccctcaggcgagaaccgacgccttgtcccggaagcgcagcacggccgagtgcgtccgggggtgcagacggcgccctggggtggtcctgccgccacctctcctttgactcaggagcgccgcgccgcgtccgggcgcgttctcagtcgcgcgaagccagagaggaccctgggcgtgattctccctccctggcacagacggagacccgagtgaccccggggtccgggtgggcgtggggaatggacccatagacccgggacgagcggcgcggagcccgcagctggccagcttcagccaccttgggagacgcagtgcagctgccgctgctgacagacaagaccaaggctcggctgggccccaccccagatccggcctgagcgccttccgcgctgctcggcctcaaggcgtgagtcaccaagggcaagtcccgtgacttggtcctcagggtctccggcctcggcacattaatcttcagacccggctttttcgacgccgagctgccgcccagccccaatggcagggccttccagggagtcccagtcagactgctccccagctcccgcagctgctcggtccctgcaaagcccccgggagcgtttctactctcccctgagcccacgccatcccgtcactcctaggaaacttttcgcgcagaaactcctggagaacagccccggccgccaggtactcgcccgcccggaccgcaaagcccacagagcttcaattcgcaggaaggggagtggggagccctgagctggggtgttcctggaagaggtcggggagcggggggagaggcattccaggctggaggcctggaaacgtttggaagctttgctaaccttggagaccatgtcaggaaagaagcgtacccaggccgtctgctgtgtgcccaccccgatccccatcagtgccccacgcactcgagctcttcttcggcgtctgcagcctcttcatccgcgcggagaggcggaggtctcccggaaacagtgtccgactgtggcaccccagagcgtccaatgcgagctcaggcctttcccgcaagtctggagttttcttatccagttgaggccgccttcgctgtactcactctctgcctcccaccccatcttctgccacccgacctccatctttgatggttagcgccttcagccctcaacagcttcgcacaaccaacccctagaagccgtggagtcagaccggccagggtgggacctaggttttaactcgggttctggctacacacgctgcgcctccatacagtttgtcccaggtttggcagcaggccggctaccttcaggaattctttgctttggcttctgtctgttcctgtctgttgggcaagtttctagctaccccactgagagaaccatagaacaaggaccctggcatggcatacagacaaggaatgtttgctgaattaatggagctggtgccttgcagcttcccttttgttccttgaagttgcccttgctctcctccacatcagctccctctcctcctcagctacttattccccaccctggcttcttctagtcgcagtccccaagtacttgctgaatcctgtatggacagcctaagcctccatttctgacaattcctgtggccccactccatttgttttttagacttctccctcctttttgtccccatcccccaagttataaaactataatgcaattctttggatttttctttaaaaaatcacacttgttcaatcctgcagcagccactgtccaactctagccttctcaccaccgctgaattaggaaacctcctaagaggcccgcacccgcactgtatgctgcagcatacaaagacagctgagagctcccctccaggaaaccttcccatcaccaaaaagagtggtgtgggaggcctggtttcacacatatagggatcctctacccttctcctttggcaagacattgagggcccatggccatagaggacaggcccttcttcacaatgaaactcagaggatttttgaagaaggcaggacacagcatgagtgtgaggcaggaagaataaggcagaagagaggtgctttttaaaagtttttatttcaaaaaataaagctgcagttcatttcacataaatatctggggagggaaggggagtgggatggggtgggggcttggcccctacctcctcttctctttcacactgtattgtaaaagcaaaggggatggctaaggagagaatgaggaagtagtagtcagtggggaatgttcttatattattcaaagggcccctcagcccacccttcccctgaggactgtaggatggttggggggagtctgaagggggtgtgatccc

SEQ ID NO: 3247 - DNA, 4001 bp, Homo sapiens
gcctggacaacatagcgggacctcctctctaaaaaaaaaagttttttaaattagcctggggtggtgctgcacgcctgtaatgccagctagtcgggaggttgaggcaggaggatcgcttgagcccaggaggtcgcgactgcagtgagcggtgatcgctccacggcactccagcctgggcgacagagcgaggccctgtctcagacaacaaaacaaacttacaaaaaaaccgggaaaggtgagcgtctggactgtgggccggaagaggcccaagtggacctccttcctccaccctggaactctggccagaggcagagcgcgaggtgaggagtccagggccccagagcccaggattggcggcggctttgtcttcaatcgtccacctgtatctcctcgtctgacaggtggggccgggagtcagggccggcagggccgaggcagaggccgggatctggagcgccttcgggcagtgctaagctgcacaggacttccggggacaacgcgcgtagcgaggcgacgtcggcgcgcatctcctccacatcgcgcttgagcttggctcgccggttctggaaccaagtgaccacctgcgcgttggccaggccgagtcgcgtagctagcccgtctcgctcggacggcgccaggtacttctggaagacgaagcgccgctccagctccagcacctgttgcgcggtgaacgcagtgcgtgacttgcgccgtttgcggccgaagggaccagggcccagcgcgtccggacctgcccgccctgtagggatagggagggggtcagtttccagcctccgggaatcaggctgggcctggaaagaaaagttgggggtggggtcgggccggtggcggtgggggaagtagagggagagccaggaaggcggacggagaccagaactgtgatcccttatcgggagtcaggcccaggtggggatatggggcgcaaagcgggctggccacaggggtgcgaaaggcagcaggctgagggcatattgtaggggcaaggaagtgaaggaagggagggatgattcagaggtgcagggtcaaaccttctggggtggagcctttgaggcttttaggagcctcaggctgagcaggctataagttgagggtgacatcagaggcgagtaagagtcagggcagccgacccagcgtggtggtggtaacaggacttagatcatgcccttccatggatcgggtcgggcattcggtttacagttccttagtgacaccagagcccgctcctccggccccaaagggagataatgaggtacagagagcgagaaaaggcagagtgcggaatcccgcgcccagtgctgcgccaagggctttctgctccttgactcccctcgagaagagagtggcttggagcggagcttggtcacccggaaagactcgactctccagcgctttctgtgccgcctttgcaggctcactcgtttaccgcctgcggctgaagccttttgtctctttctctcctgcctttctctatcgcgattgccccgcctacaaggaacagagcaacaggtcgctcagttggcgacggtctgcccttttcccttggcactggcggccttccggagccgccgcggaacctagggactaacggaggagaggtgagaagtcgcaggtgcgagtcctggcacgtgggctgaggacaggggaggattagggtgggtggcctgggctgggacaaaggtttgagacggggaaccaggaggagagaggtgaggaaaaggctaagtcagagtccgcgaccttgccggctctataccttcagagggctgcagagcgcgcgcgtcaagtccgcggaaagttttactagtcagctcctccagcgcgcacagcggcgacgttggacccggacccgactctggaagctgcggcgcagagggtgctcgggggaccatgcgcggggctaggatgtctgcgatgcttaagagtgtccggggtgttcggggctcgcgtcccgagttcatggtcggccgggctggggcggtccggctgtccgttgcgctaggctccgcaaacgcctgggccccagtgctcggctcccaatccgggcccccagcctcggacccgcccccggctctgggcccgagtcccgtgtgcccctcctcctgcgcccccacctctccaccccgggccgcggtggatctggagctcctagatgtccggggagggtatttctacaggctggggcaggcgcggagagcagaagccgaccaaactacccaccagagcagggccacggggctgctccgcgctgcggggcgctgcaccgtgcacagtcaggccgggccatacctccagacgctgtatgccgccgactccccgcctagccgccgctccggctcataaactagtagacgataaaattgccttctctggccccagcggctggggatttgcaaagttctgaggaaggctatcagggctgactgtgctgggatctctgatcccagctaggacctcagtctcctaacctggctccctcttccccaccccacccctgagaaacgttgtttctggtcctgacggctggaagtgattagtgctgcatgggtcgggggcgcaacacttgggaggacctggcctggcggagcgactgcaactgggaatagtggggatgccacgaagaagcaagcacaggtgaatggacccgaggctgccccacctgacgaaatcagaacacacagagaagctgccgggagacccgggccgcaggagagaagacccagggaactcccagctggtgcaactgcccaggaggggtctttgtcagtgaggactggcaaaatcagtcgattttgtctgtctttatcttctttttattaagctcccatagttcaggtatgtatggtttccccagcctgcagaggctcagaaactgccaaggggagcaaggtgccctgaccagagaggggtcactccccatagaagagagacttgaagggcagacttcacggacccagctggatcttgggacattcctgacaacccaggtactaactgtgaggcctggtatactcattcctatttaatctgggccctttttatctgccacacttattctggttctgggctcatacctgggtaagcacccacagccctcctttgtaggaagaaggcagctcagggacagtggggcctcagcagttgaggcccagcagggtatgggttttgttcctacattccaccccaaacagctggaggattcacaccttagagcagggaagccctgccactcctgaggagcttgctgctttgctgcccagggaagtcagaaactgatgtgcttctagctttttaaaacagtgtcaggaaaaaccaggccagtccctcctggactgtccattatgtcactttccttgtagacccctgcatctcccaccatctgtgcagtgtccacctgtctattccctggggcaactgctgcatgcaattggggttccctaaacagggcttaggagatccaaggcacctgggccaaagactccttgacaaagatgggaaggcaccttgatagggtcttcttggtaaagggctcactccaacaacccccctcccccacccgcaacattcacataatgccctcctggaaagctgagcaacacacttaaaggctgatgggccactgctggatcaaagagcagagccaggccatggtggaaagctgagctgcctcaggacgttgttaaatggttattaatggtgaggggcaggggagggcctggagagatcttcgggctacaggcctcagccctggaaaccatcctagtggtttcacttaatgtgcaataaagcagctctctggaggcagcaggaactgccccactgcatcccaggcatatcaccaagcagatgctgcaaccttcactcatgcatcctctatgtggcttttgtgtctgtctctacctctgctctcaattacttacgtgtgtctgtgaggagtgtggagctctgctgatgggcctgtgcctcacagccccttccatctc

SEQ ID NO: 3248 - DNA, 4001 bp, Homo sapiens
atatattaaaaatgaaaaatttgtacatgaattaatgtttccccttaatacataacacatctgtatgtcataggaagatagtaggcatggtggtagtaagacagtaagaacacaggctggaaacacaatgctaattgtgtgatatggacaaattacttaaacttcaatgtgcttcagtttcctcatctgcaaaataaagataataaatgtatccgcctcacagtgatgctagatgactgagttggcacatataagtccccggattcagtgcctggcagagtacatgaatgcagaggaataaatttcaaatattttcactgtttttttaactttttaaagccctttcacacatactgtcttttctttttcctcccaacagtgcaatgagattgtttgaataagaaatactcactttagagataagacaccaatagtgaagttgtatgattaccctaagatatttttaagtggcagagtttggactagaatccacccataacctcaaccccaggacaaactgaccaaatctccatggatccagtttggaagaatcttttgggttttccccattgcttcctcctggttgtcagcaacagccagcctaaagacctggtgggggcagatgcagacgaccatgtgttcaaattaaaaagtaggagaagcctagctttcacagaaactgacacatagttggcactccagagattgcagctattgatgactgaaacacaagcgctattacgtttttctcagttacagaacaaggtactactccataaaatcaagcctactaccaaaaacaaaagtcagttaacattatgcttatctgtcatatcaagcatatcaaagtacaatgtgcaacagaaacctaaacgaaaaagtgatgatgtatttttacttactctcaaaaaatatgttttacaaaaagggctttcatcaagtcagttttttgaaaactaacccacgtagttatacttcatgagatgacgtttctttgaacaaataagttaatgatatgaataaatatttcatcttggtaatgccttcaacacatatcttcaatacttttcttggacttaaagtgacttcaatccctaatctcatctactgccatgtacacaagaaacacagttaatgaactttaaaggcagatgcagtatttccagggaagccacctgaaccagggaagtacaagaaagcaaaacatctccacaaccacatctaagtgccttatctttcaacttcttttcttcaaatgggcaattagaagctacgatacaccttaaagatcaggtttggcatccgccctggctagggcctacctttcttttcgcggcactgccactctggcacctacaggcaggcctttggcgcctgcaggactcgcagggaagacaaccccagcccctgctctccacggctctcgtcgaagccccgcacgtggtgaccacttgagacgttttagtgcatgggatttaacagggtcagacctcaggttgcgttccgggacagtgcagctcccagacccgctgaggtcgcaggaggaaggttttgacgctcctagcgtaaacaccgacgggaccctcttcgccccgcggctacctcgccctcgccgctcgcgcggcccctcagcacctgacgcctcagccagcctccaggagtcgcttccccgcgcctccttccacctgagccagcgacgctaccgccacctgcaccgggaccccaaatgccaggccagtggccgttacccgaggtcgcggcccggggaaggtccatggctcaggaggaaaagcccgggctgcagctccccttcctgcacctctgagatcccccggccgccgccattttcctcgcgccgtaaccccacctgatagttccagcctcccacctgtgacaagcagggcacgccgcgcgacgccgagtggggtgcgtgggcaagctggggctccgtaggggtcacaacctccgtgcggaacccgccgttaattcatcccgtaacgcggaggcgtccggccgtcgccctagtaatgcgtcccggaaggctacgtcctgattggctgcaggcgccgtgacgcaacggcgtccccggctgcgtgggaaacccgggtccccggcgccccgcgcttgctccacagcccgggataccccgggtacctttctttgagagctcctttaaagaggcctcgcttatttcctcgtctggcctcctggagaggagggacccacggaacggtggggtgtaggggtgagaaaacaacgaaataggaaattagcggaggtcatttgtccgagggaacctaatggttcattcaacccctagagctgcaaaatggaaaacagaaatctgggagtttaatttacaagcctaaatttggtgcgcgaagtcacaggacaaatcagtagtagaagcagttatagaacccaggttccctgatcaggagcacaaagtttttctagcacactcagtgtttccccagtcctagaaaatgtttcctcccagttcccatagcaatttcatcacactgctcttaaaaggtctcgatcacctatcatggtgtgtctgtcctgtcccctaacctactagattgcatgcccctgaatggtggggactgtggttaaaccccttttcatttcccttaagcaattccctcctcaacttggccttcaacaaatacaataagaatcttaaaaataataaacatagctacacatcacacacagccactcatcagtagttcatgtatgtctatacgttttatccgtttattcaacaaagcacagagtgaatatttttaaaattacaaggttcctgacctcacaaaatttatggtgtaataataatgaccatctacatgttggctgcatagcttcaatatagctaaattatatccccaaattgcctgtaaatcaaagattcttgtgctcttttcctaaattagcttcataatttctctaagtttgttccaaaacattttaatatttaagatgtgctaaaattgcatcagaaagtgaagaatgactacagagagaaacaccagaacaaaagtcaattctgccaattatgcctatgactttaggcctcctttttacctttaaaataagattactggaataaaagatctcccaattcttttttgttgttgttaagagttggcctggctatgctccagaaccttcaagggctctactgtggttctttgggggcttgccggaggttcctcatagcctttgcagctccattgcagagagctctagcattgtgaggtgtgtccggtgatacagcccaagaggcaaggttgcccttaccgccctaaccacagaggacagtgctgggctctttcttttttcttttctttgctttttttttttttttttttttttttgagacagggtctcgctctgtcacctaggctggagtgcagtggcatgattgtggcccactacaacccctgcctcctggactcaagcaatcctcccacctcagcctccagactaactggaactacaggcatctgccaccatgcccagctaattttgtgttttttgtagagacaggatttcaacatgttgccaggctggtctcgaactcctgagctcaagctatccacccaccttggcctctcaaagtgctgggattagaggcttgagccaccgcgcctggccctgagcccgttcttgatctgagctactgatcagtagccaccttccacgtcaactgctaaagggataggaacagaattcccaagggcaaaatatgctgatttctaaactcagagatctgctaagtgtcatgcttctttctttttggcagaggtgcaaggtgtagtaacatgtttttcattctggggaaaatgtcttgacgtgcccaagatcattggaccacttcagcatccaaaatgatgtatagtttacataatgctattgtaccaggatcattctttgttttgatacatgttctatgcttacacaagatgttgacataaggggaagctaggtaaaga

SEQ ID NO: 3249 - DNA, 4001 bp, Homo sapiens
aaaaatttgtacatgaattaatgtttccccttaatacataacacatctgtatgtcataggaagatagtaggcatggtggtagtaagacagtaagaacacaggctggaaacacaatgctaattgtgtgatatggacaaattacttaaacttcaatgtgcttcagtttcctcatctgcaaaataaagataataaatgtatccgcctcacagtgatgctagatgactgagttggcacatataagtccccggattcagtgcctggcagagtacatgaatgcagaggaataaatttcaaatattttcactgtttttttaactttttaaagccctttcacacatactgtcttttctttttcctcccaacagtgcaatgagattgtttgaataagaaatactcactttagagataagacaccaatagtgaagttgtatgattaccctaagatatttttaagtggcagagtttggactagaatccacccataacctcaaccccaggacaaactgaccaaatctccatggatccagtttggaagaatcttttgggttttccccattgcttcctcctggttgtcagcaacagccagcctaaagacctggtgggggcagatgcagacgaccatgtgttcaaattaaaaagtaggagaagcctagctttcacagaaactgacacatagttggcactccagagattgcagctattgatgactgaaacacaagcgctattacgtttttctcagttacagaacaaggtactactccataaaatcaagcctactaccaaaaacaaaagtcagttaacattatgcttatctgtcatatcaagcatatcaaagtacaatgtgcaacagaaacctaaacgaaaaagtgatgatgtatttttacttactctcaaaaaatatgttttacaaaaagggctttcatcaagtcagttttttgaaaactaacccacgtagttatacttcatgagatgacgtttctttgaacaaataagttaatgatatgaataaatatttcatcttggtaatgccttcaacacatatcttcaatacttttcttggacttaaagtgacttcaatccctaatctcatctactgccatgtacacaagaaacacagttaatgaactttaaaggcagatgcagtatttccagggaagccacctgaaccagggaagtacaagaaagcaaaacatctccacaaccacatctaagtgccttatctttcaacttcttttcttcaaatgggcaattagaagctacgatacaccttaaagatcaggtttggcatccgccctggctagggcctacctttcttttcgcggcactgccactctggcacctacaggcaggcctttggcgcctgcaggactcgcagggaagacaaccccagcccctgctctccacggctctcgtcgaagccccgcacgtggtgaccacttgagacgttttagtgcatgggatttaacagggtcagacctcaggttgcgttccgggacagtgcagctcccagacccgctgaggtcgcaggaggaaggttttgacgctcctagcgtaaacaccgacgggaccctcttcgccccgcggctacctcgccctcgccgctcgcgcggcccctcagcacctgacgcctcagccagcctccaggagtcgcttccccgcgcctccttccacctgagccagcgacgctaccgccacctgcaccgggaccccaaatgccaggccagtggccgttacccgaggtcgcggcccggggaaggtccatggctcaggaggaaaagcccgggctgcagctccccttcctgcacctctgagatcccccggccgccgccattttcctcgcgccgtaaccccacctgatagttccagcctcccacctgtgacaagcagggcacgccgcgcgacgccgagtggggtgcgtgggcaagctggggctccgtaggggtcacaacctccgtgcggaacccgccgttaattcatcccgtaacgcggaggcgtccggccgtcgccctagtaatgcgtcccggaaggctacgtcctgattggctgcaggcgccgtgacgcaacggcgtccccggctgcgtgggaaacccgggtccccggcgccccgcgcttgctccacagcccgggataccccgggtacctttctttgagagctcctttaaagaggcctcgcttatttcctcgtctggcctcctggagaggagggacccacggaacggtggggtgtaggggtgagaaaacaacgaaataggaaattagcggaggtcatttgtccgagggaacctaatggttcattcaacccctagagctgcaaaatggaaaacagaaatctgggagtttaatttacaagcctaaatttggtgcgcgaagtcacaggacaaatcagtagtagaagcagttatagaacccaggttccctgatcaggagcacaaagtttttctagcacactcagtgtttccccagtcctagaaaatgtttcctcccagttcccatagcaatttcatcacactgctcttaaaaggtctcgatcacctatcatggtgtgtctgtcctgtcccctaacctactagattgcatgcccctgaatggtggggactgtggttaaaccccttttcatttcccttaagcaattccctcctcaacttggccttcaacaaatacaataagaatcttaaaaataataaacatagctacacatcacacacagccactcatcagtagttcatgtatgtctatacgttttatccgtttattcaacaaagcacagagtgaatatttttaaaattacaaggttcctgacctcacaaaatttatggtgtaataataatgaccatctacatgttggctgcatagcttcaatatagctaaattatatccccaaattgcctgtaaatcaaagattcttgtgctcttttcctaaattagcttcataatttctctaagtttgttccaaaacattttaatatttaagatgtgctaaaattgcatcagaaagtgaagaatgactacagagagaaacaccagaacaaaagtcaattctgccaattatgcctatgactttaggcctcctttttacctttaaaataagattactggaataaaagatctcccaattcttttttgttgttgttaagagttggcctggctatgctccagaaccttcaagggctctactgtggttctttgggggcttgccggaggttcctcatagcctttgcagctccattgcagagagctctagcattgtgaggtgtgtccggtgatacagcccaagaggcaaggttgcccttaccgccctaaccacagaggacagtgctgggctctttcttttttcttttctttgctttttttttttttttttttttttttgagacagggtctcgctctgtcacctaggctggagtgcagtggcatgattgtggcccactacaacccctgcctcctggactcaagcaatcctcccacctcagcctccagactaactggaactacaggcatctgccaccatgcccagctaattttgtgttttttgtagagacaggatttcaacatgttgccaggctggtctcgaactcctgagctcaagctatccacccaccttggcctctcaaagtgctgggattagaggcttgagccaccgcgcctggccctgagcccgttcttgatctgagctactgatcagtagccaccttccacgtcaactgctaaagggataggaacagaattcccaagggcaaaatatgctgatttctaaactcagagatctgctaagtgtcatgcttctttctttttggcagaggtgcaaggtgtagtaacatgtttttcattctggggaaaatgtcttgacgtgcccaagatcattggaccacttcagcatccaaaatgatgtatagtttacataatgctattgtaccaggatcattctttgttttgatacatgttctatgcttacacaagatgttgacataaggggaagctaggtaaagaatatatggaaaaat

SEQ ID NO: 3250 - DNA, 4001 bp, Homo sapiens
actttatgctccatttatacaatgggaacctaaaagaccattgaaagttatgctttcaagtttttcttttgttttaagcaatactattccagcactggagtaaattattatattattttagagatagtggctctctatgttgcccaggctggtctccaactcctggcctcaagcaatccccctgccttggcctcctaacgtgctgggattataggcatgagccaccatgcctggctcaagtttttaataaaatgagaatatagtcataaactatgttaaaatgaaaaagtagaacatagaagtatatatatatatatatatatatatatatatatatatatatatatatatcaggtactatatatacaaatatgtatgtatatggtatataataaaaacaagaaagcatatataatccaaaattgattctcaaaattggtgtacctaacatacacttagggaattgattataatcacaaatgtcctggttcagcctaggcctacagatcagaacttcaagtcccctaggaggcaggaatgtgaacagttacagttgtgctctcctcatcctgtgatatataattgtttcatcttgtatttgtctgtctcccaagctgcaatgtaagctccaactaagacatgtaagtataggggagccgagggggaaggacaggaaaccacgaaactttgcctccaagtcagggtagcaggacatagacggaaaggaagacagaaagacaatcagtgcttgcacaactcaagactgggcaaggggtatttcaaaaatacatgtgtgtatatatatatatatatatatatatatatatatatatatgtatacatattttttttttttgagattgtgtcttgctctgtcgcacaggctgtagtacagtggcatgatttcggctcactgcaacatctgcctcctgggttcaagcaattctcctgcctaagcctcccgagtagctgggatcacaggcgcctgctaccatccctggctaattttggtatttttagtagagacggggttttgccatattggccaggctggtctcgaactcctgacttcaagtgatccgcccacctcggcctcccaaagtgctaggattacaggcgtgagcctcaaagatatttttcaaaggaaatgctgagtgttttgccatgttagctaccccttcctatcgccagtgggaaatcaatttacaatattaatttctccctatgcacagacataagaggactgctgaaggtgagttgggagaaatgtcgaatctgctctaaggaggatggggaaggtgtgtgatgaaggttgccgaggggtcaccatcaggtcaatgtgtactcaccctgaaaagcatagctttcgtggtaaatctcataggcttttctgtgggcatcactgagggtctggagttgtgacgctcttgattcctggtggggaagctccttgatcacttcctccaagtcactgaaggtgaaccagatcccaactaggtccccgaaggagtggaaggcgaatgtggcatagtcggcgaagaggtcagcaaaggcttcggttctccggagggtgctggcagggagggtctggtggtgcaggatgaccatgggctgaagccgtgcagtcttgagggccttgaggagtcgccggtagcactgcactgttttctcgtctggattctgggtgcttcctgctgggaggagctgtgcccatgacagaaataccttataatgggtgatctgactggcatggagactgctgaagtattctggcaggaaagtgggcagtggctggtgacaaacatacatgtctttgtcccctgctacaaagttagaactctggtctcccaggagaccactcaggttgtgcagcaagtcattggttagaggaccagcggtggaaatgaaatttctatcagactcccagtctgacccccagcatgaaaaacttagcagggcaataaagactacatgccaagacagctccattttctaggaactgttaggaggtatgtggaacccttactttataactgcaactgaggttgtaaaatactaagtgataattaagacttaatatttaactgggttatctatgatcacaaaatcagtacacggttcactaatgcaatatttaaaaatgtaaagatcagggccgggcgtggtggctcacacctgtaattccagcactttgggaggccgaggtgggcggatcacgaggtcaggagatcgagaccgtcctagctaacatggtgaaaccccatctctactaaaaatacaaaaaattagccaggcatcgtggcatgcgcctgtagtcccggctactcaggaggctgaggcaggagaatcacttgaacccaggaggcggaggttgcaggagccaagatcatgccactgcactccagcctgggcaacagaatgagactccatcttaaaaaaaaaaaaaaaaaaaaaaggtaaagaccaacacaaaaacctcagacttcctatacaagttaagcagaggaacccggaaaatgtctgaagaaaacgattaccaattttttttgttttttttgttttttggtgaccgggtctcactctgttgcccaggtgggagtgcagtggtgcgatcacagcttcctgcagccttgacttcctgggctcaagtgatcctcccatctcagcatcctgggtaggtgggaccataggtgtgcgccaccacgactggctaattttttgtatttttagtagagatggagttttgccatgtcacccaggctggtcttgaactcctgggctcaagcaatcctcttgcctcagcctcctaaagtgttgggattacaggtgtgagccagcgcacccagccacacattattttaaaatttgtttacataatacaaaaataagtattttgccccaaattttctctttaaaaatatgctgaacatattttgtaagagattcaaacaatatggaaacatctatgaaaaacttgcaaattccttcaccctcccccctcctcttcctataataagtatcttcagcaatatgtatctttccagttttctttctctgcatatcttaatggttatacaggagtcagaatgcctgggtttaaatctcacctgacaaaaattacttaactttgtgcctctattttgtcacctgtagaatgtggataattcatcataggctgtggggattaaatgggtctttcttgtagcatgtatacaacagtacagctcagggatcattattattacgtaaatacaaatggaaacgtgtataacatttaaaatatagaacaatttaacatatatggaattatgccatatgtattttcagccttttcttcacttaatagctcttagagttctgcctgtatcagaacatatagacccacctctaacagatgcatagctttccacagcaagaatgtaccataaattaacatcttgcatattaaacaccggttggttttacatttttgtgttgcaaacaatgctgcaaatgaatatccttatatacaggctgggcatggtcaatcacgcctgttttgccagtacttttggaggctcagactgtaggactgctcaagcccaggagcttgaggccagtctgggcaacacagggagatcatctcaaaaaaaaaaatggtttttgattgattgaaatgcaaattgtcttccaagttaaatcctacatagagttagatgtgtgcctgtatccgtctgccttgctaatgcctattataaaacttttacatttttgatactttgacgtaaatattatgtgcttttctttttctgattatttaagaggtgaagctcttcttgttaattgggcatttttcttctgagttttatcttattactgatataaaaattcttaatgggagtttggatatcacatattaaaacgtgatagaaaaattttcccatcttttaatttggtttatagtgtctgtttttttttaatagactcccatgactttccatagactgtagagggtgaagcct

SEQ ID NO: 3251 - DNA, 4001 bp, Homo sapiens
gtccatttttaagaggccactactcttcaagagaggttagattatggagaagtaagtcaaaccagcttattttgttacctaaagcaagctctggtgaaaactttggtgttgaaaatgactaaaattagagaattccacttcggaattctcaaaaacagccacagaaattgaccaggggaaataatgttaagttgggttcttattcatcttgatagttcttgctcctggcaccatgtttcaaaaccattaaaaaaaaaaaaaaaaatcctctggcctccctaagggtcaaagagaaaatgtgggcctatatttataatctctgatataaatagctgtctggagaaatgatggctgggattcatacatattcgtttcatgggaacatggtactttcttggcactggcaactagcaacactgtccacaaggagaggaagaggagtgctaaaccacaacagaagtgggcagggctcagccacagcctgatagttctgtcctgacaaagactctgccttacctctctgggttgaggtctacgatgcccatcactaacaccttcttgcctggtctcatgccacctttaatgtgcccacaaaatggaactatctgaaaagggtgggagaagaaaaatgaattttacagcctgttagggaaaagccaagacctcagaccctgaaggcctgacccactggaaaatgcaataaacaaatgaataaaattttaaaaagcaatgagaaaggaggaaggtacaggcagagacacagagcaaaatcatttaccagtcgtgggaagtacacgtccgcttgaactggagagctcaaagagttgtttaaatggccatcatctagtttctaaaaatagaagtacacagattggctttccatgggctcttttttggggggctggaggaagaacccacacagatgtggtggaatccagcagccttccacatgcacacagtgtctgcagatgatgcctcttcaccgtctcttagataatctcatcacccccgaacaaaacccatcctttccacccggtagttaagcctctgaagatccgcagacccttcagatccagatcaaaatcaaggtcgaggtccaccgaagagccagagccccacgccggaggagggcaggcccctctccaaccgtaaacgcttctggaagcgcggtgggccaggcctgtccttcgggacgtgactgaagtgcagcggccgtgctcaacttctctcgggagccccgggcgccgacccatttccaagggggaatccccggtacgtcgggggcggtggcggggcgcgcgccccggacacactcacccacgcgcacacctggctggcggttgcacggcacagagggggctgtcgggcgtccctacccgccatcctccccaaactccctccccagcccagagccccgcagcccgggagcctctccagcccctaacaccggccgcgcgcagccagcggctgctaacaggtaccgggcgccttcccacgcgccgggcgccggccgggcctgcggctgctcagcaccccagcactgctggagcaggcggcggcggagtgcgggacggcggggaggggcgcctcgcgcgcgccctgccacactcaccaccacggcatcgctgtcggccactgatcccgccatcttcttgcccggcgcggcggggtacgtgggacgcggcgcgcgggcggggatcccggggctgtcctgcgcggggcgggggcgggggcgcgggtccgagctggcggcgggcgcgcgcacacacgagggggcgcgcgcgcgcgcgcccggggcccggcgccgacctggcaggcagagcctgggaggaggggaggggagggaggcagcgcgagctgggagggcgaaggtgcttgccgcggcccagaacggccccggacccgggccgacggggctgcttgctgccgctgccgctgccgctgcccgaccaagaaaagtggcgagggccgtgccgcgtcggccctgggcagcatttaaaggcctccggggcccggctcgggaaccgggaacagggcggggacccggcggggctgccgcggcttgctcagcgggccctgcccctcggccattggacggtggcggaggccggggcgggagggacgggcctgtccgggtccgggagggcgggggccctgtcggctctcaccggccagagggtgggcagggccggggctggagaagtgagggcccgagccggtcaggtgacaggtgctcgtgccacccgcgcccctccctccagcctccttcctcctgccacgtcctgggcgctggtggggcgatgggaggcgaggtcgagggaagattgggtgctgggggtggtattccagagtgggagacttggcaggatttctttcagagaattccaacaaaatcgggggaaggattcattctgctctctagggcagaaagagaatggaaggtctgaaggcttgcagaaataaatgtgtgacctgaaagaacgaagcagagaggactcaaggtagggacctttctatcccaggaggctagatacagaaaggtcgctcttccctgtggaaggacaggcaggtctaggggtccctggactctctcgagcaggagtcaaagccttaccaaatcaaagtgggcgcagtcactgtcctcagagagcctccattgagccctgtttttaacaagtcacttgcccagtctggggtagtcagcttctcactgaaaatctcctcataccctttgtggagtacttcccaggggatacacacctcttttattcaagccagaaattcctttatggcatttccacactaggacgattatgtaacttctcagataaagctgtatcaacatatcctctattaggtgacatccttggctgaaacattccattgcatgaatcaccggggcgttctatgctaataagcagggagcatgtgtgacctactgcagtcccagagggcccctcagaggctcctttttttttttttttttttttttttaaattgagacggagtctccctctgtggcccaggctggagtgcagtggcgcgatctcagctcactgcaaccttcgccgcccggggaggcttctttcttctagtcactgcaattggctgtgtggcctagaacatcaatgtggcttttgtgtcttagttttccctttatggaccagagctaatgatggtaatctcagttgagcagggagaattacctgcacacgcctgtaagcctcactcatatcctctggaagtggttcttgaactagatagaggctaaagcgcagtacgcttgtggctgcagcacactttgtttaccagtcttagctcaaaatcacactttattactttaaaatgttaggcacttataggaaatgattgacatttgaaagcatactttagtatgtatcaatttctgagagtctggtatagagaagaagcattaaagtgcagtagttctttatcattaactgagtgacacaataagggtgacactacatgtgatggtggttaaagagccggtgtctcgcgttcaaatcctggctctactattcactagctgtgtgatcttggaaaaattactaaacttctctgtgccttagtttcttcatctgtgactcagagatgacaatgatgataataatgcctatctcaggttattgggaagattaagtaaataccttccttaaaacagtattggggacatagtaagcacttattataccaaaatactgagtgcctgctgtataccaggcactggggatccagcaggctacttttttgctgagcttacattctagtgggcaaaggaaatcaataaacaaaatatgtcgggtgacaaaagtgttaggaaaaagtaataaggccaggtgcggtggctcatgcctataatcccagcaatataggaggctgaggcaagaggatcacttgaggccaagagtttgagacaggcctgggcaacacagagagactctgtctctacaaaaataaaaaaaaaaattagctgggtg

SEQ ID NO: 3252 - DNA, 4001 bp, Homo sapiens
ttggcccacccattcatgcccccagtgggagttctttgctcagtactaattttggagaaactgagtgtgtgtgtgtgtgtgtgtgtgttttattaagaaagcagtagtttttcttacaaagatgagcaaatttaaaaagataattaatagataaaatcctgaattgctattcaatagctgtgagaccttgagcaagttattccttctccttggatctcagtttcttctaatctgtatgataagtagcaggcaagtgagaaagtctgttagtagtacagtcattcttaagagcaacatggcatgcttgtcagggacggaccagggctggaacttggaaggcctgttgcatggatttgtggattgattgaaacaaattctatcagcatggtccattccttcagggaatggacctgacaagataattaatggaaactaattaatataaacccctcaaccctttaactgtatctctcaaccacaattattcccagaaggcctttaacttttccacatgaagaagcctggcctggcagggagggtgagtctcctctatgaaacagcccgtgacagactgttgggggctcaaaggaaatggcagagggggtggtctccttccttccccagcacagaattccatcatctctaattgttaggacatgatcaagacctctaccagccttttagatactcttgtcttttgtctttttttccctttcttttctttccttttctcttttcacagctgtattgagatgtaaatcctacactatagaatttaaagtggacaatgcaattgtttttaatatgttcacacgcaactgtctctacaatctaattttacaaaaatttcaccacccccccgccccaagcccatacccactgattagtagtcacctactgtccctcccatccgcttccccagccctggtaactactaatctactttcagtttatctggacatttcatgtaaatagtattataaaatatgtggtacttttttttctaaataggagaaaggagacctgatgacaccctgatagtctagtactaaaggctccccttctcctctttaccccattactccagaaacaacgccctcccccaggttgctgatgtatacaatccctcaatcaggcctgtgagtgtggaggtggtgcgcgggtgccagcggcagggcacagggcctttggtccattagaccatgagactgaagttcaagcacatctgggcacggtggagcagcggcttgtgtgctcactaagatgcccgtgtgactgccagcagtcagttgacagattaggtcacccttggccatagggcctgagcactccattcctagaggaccacagggtgccagagctcacattcaccttccctgacgtggctggcccaaggctcaaaggcctgtaagacttctctggcagagacccctgccagaggagttgaggagcgtcacacccatattcccttcaagcagcggcagagagcaggccttcccctgaggttcctgaatagttctactcccccggccacagccccaaccaggggtaaagaatggggctggggctctcagaggcatggggtggtaaaaacaaccaccaagttttgggttctcatcaccctaaaacgtgggggaaatttgatagggcaaagcgtttttctccaagcttccagggaaagggggccaaaggagtagggagggaaggtggcatagagcgatggagggtcctgcatcaagggcgccgcgacgggagcgctgtgtactcacagtcgagtgagaccggccgtggggccggggcagcgcagggcgccgtcgggcacgcagttgcagggctcagggcagagcgcctcgcgcagcgctcgtggcagcggcggctgcagcagcagcagcagcttcagcagctgcagcgccgagaaccgctgcttcatggccggcgaactgggcttctgcggcttgccagtgtcttggacggcctctgagtgcggcccgcacccctctccccgccccttggctgcccttccacacacccttccctgccggcccgcccctgccctccccctcttaccgcgcaccccgctgagtctgctctgccttgacctgcgacagtgcccagtgacccaataacctccttcctgctactttcccctgtcttgtcccctaccatctgcaaatggccctagctataggaggtaaagagatttaatggcaaatgttttggattagaggtggggagttctgaattgagtgagttgtgacgcttcccggaaccccttttatttcatttgtgaaagggtccgatggatactcgctatacccacatcagaaggcgtaagagtgcctggctcagacatttttcctctcttttatcctcaacccctaatcctttccccttctctttcaccaaatccctccactctacaagtaatctttgcccatcctcccaactaccccagtaatttctcttggtggtaaatgctttcttatttatggtatagctatttggcttggtcctgtatctcttctatagattgggaggtccttgagagcaaaatccaattcagatttatttttgtattccttctggcttctacatggtaagtcctcagtaaagatttgttgaatgaatgaatgaaactgcctaatactggtagcagctgccccatagaaggcccaggataggctagaccttgtaacaggtgctctgcctcacatcatgtttaagctccacattgaactagcagggtgtttgcgatgagaaaaatgtcccaagaggtatgtggcttccctgaagtcacacggttttaaagtagtgaaacctggaactcatgtctatcacctaccacctctcaccaatgcaaaaagctgctatgatctacataccaaagaacttaggagacaaaattttacggtaatcatggggatccataatatcccctctttgatttgatcatttcttccttccaaggattctgtttggattctggaaatcctagcagttttgctggaagaggtggactttgaaagctgggaaggcatttaaggctttgaagagaggaaatataagaatagatttctttcactctgaagccagttctcaaggatgggctccttcattcaccattctacagtctgttgctcaaggagggtagattattattattttaaaaacttgtttggctttggccacattgtgctagatggcacaaaaacaatgctcatgtctataatattgtcttctctggatcctctcttcaactgcttatagatgactcctcaccctttaatacctctgcatgggctgtccccactattttctcttctttttccattattccattagataaactcccagttgtccttcaagactcagcccaatgtcatttccactttgattcttctctgagtcatcctagttgagtagttgtggccataacacctggttctacagcaggtaatctaacacactgtaattgtgggtttaattttgctttcccctctctattcatctcaatatcaacagagcatgtcatagcttctagctcctagtaggtgttccatatgtgtctgttgaataatagagtgaataagtgaggcccagatttgtagtagatgctcagtaaactatctgagaagagcttgataccctcacttgctttattctcaaccacgctggatctatctggatatgtaaaaagtaattatacatgacgactttgggtgtcatgttctctgttctcttttagttttgtcagattttggtagggaagttggggtaggcactgggatttttaaaagttttcaccatgtatcttgaatggaaggagagaaagaatgaataactcaaggtgcctgaatggcttttctttcaagtctcatgttttatgtgacttttttctttttttaaccctgtagtgtacctgttatatataaaaaaagtttgctcccacccacccctgaatctttgaaaacaatggatattccagaagaatcatttaattc

SEQ ID NO: 3253 - DNA, 4001 bp, Homo sapiens
atgagaacacttcaaaccctcagtactctcgaatcaccgatcccaccctctttttctattactcttgggagataaccccacctatgttagagaaaacagaagtcttcagaaagacgccacctcagctgtctccaagctattgtccctacttctttcagagtgccctccgtccaactgcaagttaaaatatagcacaaaattagtcctgccctgagtctgcattactgtcatctcgttctagtggcagtaatgacggtaataatcatggtgttaatgcttcacatactatttcatttgatccccctaacaccctgtgaaatgagcggtatccctatttctcggaagtagaaactgggctcccaactggtgagtgacagaatggggactggaatgggcatcaggggccccatctatgatcactctactaccctgcttctctcaagatcaagaaaacagatttctaaaatagtgatgtcttcaatgaaatgctgtatagctgtaaaagaaaattcactgaagcacacatctacacaaataaatgttttaaaaatgtgagtgggccgggcgcggtggctcacgcctgtaattccagcactttgggaggccgaggagggcagatcatgaggtcaagagatagagaccatcatggccaacatggtgaaacctcgtctctattaaaaatataaaaattagctgggtgtggtggcgggcgcctatagtcccagctactcgggaggctgaggcaggagaatagcttgaacccgggaggcggaggtttcagtgagccgagatcacgccattgcactccagcctgagtgacagagcgagacaccgtctcaaaaaaaaaaaaaaaagtgagtgaaaaaggcaacttgcacagtgacacaaacagtatacaccaaggaaaacctaaaggaaagacggaatcccatgcactgttaagaatacataaatgtgtaatgaaagtataaagatatgcacaaaagtgagccaaactccattaaggaaagggcttcttcgtggaggaaaacaggaggagggaatgtgattggaagaggaaactgaaccaagagacctcaactctgtaaggtgttatttcttgaggtgggtggtagatatttggaggttccttttattaatttcaatatcttcattatttttaaaagaaggaaagatgaagatgcaaagcaaacactctgagtatgtaagtccacaaagtttcaaagcactgcgcctgccaccatgtggctcctgaagatgttacaggcacacaattttcagaggacaaaaggggcattaactctgagaccaatatcacatgaatgttacccacagtgaaagcccaaggagcccctacttgatacataaccaatattaaaatcatatccatttccaaataatgcttaataaaacagaagacataaaacattatgctaggagcccactcaaaggaagacgagaaaagttaagggatataaactataagactagtaaaaacagatgggaaagactgggtttcaggcacaattaacaggtaaatgaggacctgtgaattgactttaagacccagaagtaaataagcaaaaagaatacagtaaaatggaactccgcccatggtattaataatttcacttgtaaaacttagtacttttaataggcaaatttattagagagatcaatacctcttttctggttatatccaggttagagagaaatacctaaaaatgaaaccatagtgaatcctactagatgcacaaaaatacacccttgtgtaaaaatcacttctatatgtgcacacatgtactatttatgtgatgaagataccagacaactggtgtgctcaattatgttctatttgtgtttcatttggagggggaacagctcaatattgtgcagcagcactcaccatgtcatgtatcttgattcgatgtgtccctcatcagctggctgtccaagctaagctctccatgctcatagatggcaccctctcactgtgtcctcacatgcaggaaggggcaagcaggctcccttgggcctattttataagggcagtaatctcattcatgaaagctctgttctcgtgacctaatcatctctccaaaggctccacctcctaatactcttactttggggttagaagttcaacatatgaattttggggagacacattcagaccacagcagcatggtacatgagacataccctttactgcatactcacctgtgtggcctcattccaatcacttttccccttctaacaactaattgtgctatattttaatttcccaaccacttccctagactcagcacactcttgtgtttccaggatctaccatttctctatgtggatgaacctccagcctctctcctcacataggactcccacaatattcccatttggtggagccttccagagctcccccagggaggcagtggaagctgttttctcctctgggatcctactgaactttagacaaatctattttgttgcacttgctgtattgtgtgttgtttatacgttggttgctcttcctcactgaaatgtgagctcttcaagcctggcaacagtaggtacctaagaaatgcttcttgaatggttgaattcagttcagaagcttcatacaaacatgatagtgctaataaaattgtaaaagtaccttacaaattgtgattttttcttactaacgtatacacacatgcacatatactgaaatccgccccccttccaaaaaaagtcctcggttcagtgacagagtttgctggtgaatccagctggcttcaccttggtgaagaatcccaccttggtgaatttttaaaaatgtaaagtctgaccttcagcttctgaagctgagcaatgaatgttgtcagcaccctaaggtagacctgccactcaagcatcctcattcaccaacttttagaactgacgtgtaaaaccacaactccaacttgcaaactaaaatatctagctttcataagtaatgtgttctctcctagacacaggtcaaatgaaaacctaagttataattagaaggttgtctggtgtgcctgaattcataaaaatagttatacagtctgaatactcagtgactacaacagccagattcacctcccccaaactgggggcagagctggcagcaggaacctggtacttgggcccgagggccacgctgcctggcccccaggcctggttgccagcttcacctctgtgactgcccatacaactgctgcttccatgctcaccgggcctttcagatggtcatgtcctttctttacatacacatccagagccactccatcccctttaggagactacagagctctactcctgtgtcaagtttgaagtttcactctcagaggataatctgacttcttttctttccaagttgctcttgggtccctcactgtagtctaatatggcccacaatacacagataaaatgaacttggttataaggatgaagactacactggatggcattctctaagtggggcatcactaagtccaaacactgacacattcttctgcttgtgtttctgcttatgtgaagccatgtgctgggcatgtagtaggtactgggcagacatttttggaatgaataaagaggaaaatggggacagcataagatgctgaaaggaataaatttcagtaagtttcaaaatatggaaaattttaaaaaattttataaaaaattaggtattttgagtgagctctttagcttgacacatgtaggtttctaagatgcaagcaacagaaaccaccttgggttaattttaagtagaagagatatttaataaatgatatttgaatgctcacagactctgcaggattaacaaagaaccgagcttataacaacaccttgcccagcaggggaagtctgtccccagccctacacctttggacacagtgtaccacatggaccaatgctgggtactgggctgtgctgctcacaccaggttctattgctgcccctaaacaatgggtgtcatgagtgctgttacaacc

SEQ ID NO: 3254 - DNA, 4001 bp, Homo sapiens
tgatggctgccagggactggcgggaggaggggaatggagaattattgtttaataggtacagagtttcagttttgtaagataaagatttctggacatgtatgatggttacggatgcacaataatttgaatgaacttattactctccctccaaaaagtaaattactaatggtaaattcaggatgggaaggggataggatgcggagagacactggaccagagaggtttgaaggtcttaaaaggaaactattatctcctttattacactacatatccgttattcttaatatctcacaaatactttaaattttatatcaacttactagtcaatacttttttttaaggaaaaaagtccatgatgaaggagtacaaattattgttatcaaatcttgagctttgactcttttttgttacttgtgaccaaatggcaggcgtgcacttctgtaatagagcgatgagctgaattaacttgcttgtgtcatgaaataccatttttacgggaaagaacaactgacaaactagggttatttaaacctgtattgccggacacttccttgaaactgaacaaagtgagtctgtcactttgaggaaaacaattgacaatattttgctcccaatgataaaaagcaagctttcaaccgaaaatgagaattttggaaaacttgtaaacaccaccttgtatctgacggcttttaacataaagactttcctaatgaaatcaatagcgatggtaacgaatgttattcggcgctattaatgaaatgcgtcagcttgagatctgccaaactcagtgagccaatatcttccaaacgacaaatatatggtgttacaatgggtaacagctgcattcaaactgcaagacagaccaaggaattttaacgtaactgtgtgcaaaggccactgacaggagctttagctgcattcaaactgcaagacagaccaaggaattttaacgaaactgtgtgaaaagtccgctgacagtagcttcagattccacgtccaaaccagcctttgagaaacttccacttacgtagttttggtgtagtaataaagaatacccataattatctgaaacagctattaagacagtactcacttttccaactacacatctgtgtaagatcagattttcttcatataaaaacataccgcaacagactgaactgcaaaggagatgggagaacgtagttgtctctactaagtcagacaactcaagagattcgcaaactgtaaaggacgccagtcgtcccacgaactcttttgttttagcaaaaccctatgttgcataaaaatgtggtatgtacgttaacataccacggatttattcaatgagttaatagtaacttcagtgtctcggttttcctttctagtacagtctatggagatagccaccattccaggtcctctagtcccaagaggggtcctgagaccaagacgtctgcgacccgctgatccctactgctagaagataaatgattagctcggcaaatactgatttgtcttatggaactctcggagcagcggggcggcgtcagcgcctgtgccaccgcggacacccgggagtgaacagcagccgtctcctccgcgggcccggacgcagccacgccgccacccgagcgctgggggtcggggctccggccgaccgggggaggccgcggggaaagcccggccgcccgcccgcgccaggcccggcccggcccggcccgaaggcccgccgggagctgcggggcggacgtggcgggggccgcgcggtgcggcccgtacctgtgggtcatcccggccgccacgcccagcatctctccgctttcggccgccgccgtctctcagcccctcgtctcccggcgccgctccagccgcgtcctagtccctcgccgccgcggccggctactggcgggcccggagcaggaaggggaggaaggccaggggccggccgcgcgggggcgcgggaggggggggaaggcgaggcgggccgcgcgggaaggcgggggaggggcgggagcggctgggcaaggaggggcggggactggcggggcgggcgccgaagggcgcggactggagaggtaggcgcgggggggcggggcgttgcggggcggggcgcgcatcagaccccgccccaacccgtggctcgggcccgcccccatttcagcaccccaggctagtctgggaggctggcgcaaacgcagcgggtggctggggtaggggctcattgggagcccacggagcgcggcggcggctcgggggccgagttccctacaacaaggatggcggtgacgggcgcagggagcggggcccggctctccttgcctcgaggctcctctgattccactcgcgtggctgcgcggccctggcagcggccttcgtcccgggggtgggagctacacagggttccgccccgtcctggcgaggacgcctgagggggctctgtggtaaggctctgtcgggcaggccgggcttccgggaggacctggtctggatcggtcaccgctgggtgcctgagctccgcatggagcctgcagcctttgtttaacttgtgagttaagaaaagttaacctttcttggagagtttccagtcttgcctctgcatcctgttcttccttgctagctctcattttcttcacccattccgtctatcaaaacctgaaattttggggccggcgcagtggctcacgcctgtaatcccagcactttgggaggctgaggcaggcggatcacctgaggtcaggagttcgagaccagcctgaccaacatggagaaaccccgtctctactaaaaatacaaaattagccgggcgtggtggtggcacatgcctgtaatcccagctactcgagaggctgaggcaggagaatcgcttgaacttgggaggcggagcttgtggtgagctgggagatcgcgccactgcactccagcctaggtaacaggctccgtcccaaaaaaaaaaaaaaaaaaaagtgaaatctccaaaggatttaatagatttaatagataagacaagttattcatcctgggcataaatgatctctctcaggatacctgattctgtaactatagctactctctagtaatagaatgaaaactttggtctcctgccagtcgaggcatgtcggaggaaaacactggatctatttgatgtcctcacatgaaagtaaattccaaacaaagcaaatagttaaatgttcaaaaaacaaaaaaaaaaaaaaaaaaaaagagagaggttatgaaaataccagaagaaaacaagggaaaaaaacaaaagtaaggttggagtggtgagagacttttcaaagagcatataaaccataaaattaaaaattgataaatgtaggccgggcacggtgactcacgcgtgtaatcccagcacttggagaggctgaggtgagtggatcacctgaggtcaggagtttgagaccagcctgaccaacatggtgaaaccccgtctctaataaaaatacaaaaatttcaccggttgtggtggcggggttcctgtaatcccagctacttgggaggctgaggcaggagaattacttgaacctgggagacagaggttgcagtgagccgagatcgcgccattgcagtccagcctgggcgacagagcaagactctgtctctaaataaataaataaaaattgataaatgtaactacatagaaatctaaattttctgcatagcaaataaatataacaaaccccaaccaagaaaaatatttgtaaaatgtatgacaaaaagttctaaattattaaaaaagttctaattattaaaaaaatcagtacaaaaatgttcaactcagagaaaaacaggtttctacagaaaaatacaaatgatttcttaaagtatcataaaacaaaaataaaatacaatttttcacaaatgcaaagatgaaaagtttgactatatattgttttgatgaggatatagggaaacccttttttcctcccctagaggaggcctctctatgttacccacactggtcttgaactcttggacttcaactatccttttgaatagca

SEQ ID NO: 3255 - DNA, 4001 bp, Homo sapiens
aatacacctaagctgattaaaaaaaaaatccaggcataaacagacaatggtttacctttcttggctaacctatacttctgaataaggaaaatgatcattttctctacattaggagacaaaagtggcagaaatacaagtcccttctatgaccagataactacatcaccagaatgggtgacaaaatatttctctttaaacaactagaacaggcaatacttaagaattattcttcctcttttaattaaattctaagcaaaaaaaaaaaaaaaaaaatctagttgtttgaaagagcattgtaactatgtaaataactacttccttggcatatacgttattttactcatgagtactttggctattgtctgaaaataaagaaaaggttggtttagaattttttttatataacttaatttttttaaaaaaggaaattcctccaaaccccgaaatctgaaattaaaactgtttttggtaacttcactcttggatccattgtagactggagtctaccaataaatgttggtttcagaggtcacttccaattgtctatctggttagcaatatagagctcaatattttcactaacctcacatacaaacttcttaacaatttaaactctgagacttttaaattgtttaatccagtcaattcaaagttaatacattaaatgtagctaagagacacctgacatagtaagcgataagttctaataatgttagtgtcaataatagtcctttaatgctaccctcttcaaaaattggtgagtcaacaattttaaaataaatgtttctttagcaaattacagttactgtagtatagctgtctgtgacaaatacaaatttaatagagaagttgaagcttgtcaatttgtccttgttacatttaaatagagaatttaaaataaactctggaagttagtttgtaggaaaaagaacaatagtacacaaagtatagatagccttcccgccatctaatcagaatattcaaacacttaaatcaagacctccaaattaaagtactaaacagtaaatgtaatttaaaaaaaggaagtctctctttactgcagccttctgtcatcagtaaaacaggaacatcccaggaacagggaaaatctaaacccttcagttaatgcagtattttaacacataggcttaatgttgtagaggctttcagaacctcaaatctaagaaattttcagtagttgcaacaaaaaaataaaattgtgttgttttagggaaattcactttgaaagccaagaactctaacctttttagttaaaaaggtttccaggtttttgatgtccttccttcctaggctacattgaatagttccactgcattcctttgttacaccatttcagtaacaatctccatggcacccctcccccaaccccaaaccaccacaaactacccaccttcatcaaaacacagacaaaaacatgttccaatcagccaaagaaaactctctttaaactaagtggaaaaatcagttgttttcaatttaaaatatttctggtgattatataatttttaaagacataacaacactgtaggtttggagaaggggtaaaacaacttaaaggatttgtgaagaaatgggcaaaagtattctggttttgcacagttccaatcagtacaatcttgatattgtgttcagtttttaattacagactaagaggctacttttcaatgagtacttcccaacgctgcatccacttaggcatgaatccccactgcacttactagattagatgtcttgacctttagccaaccatgactttgcactcaccttagctcttcctctggtaacccatttactctcaaactatcggggcgatctcgtcttctcctgtagagacctgaatgtgaaagctctttaagctgtaatgcagtcatacttctctccacacatcaattgctgacactttaaagcatttatgctcagcagtgtggctgccaggggaaagcagcgtcccttgccgagggacctcagcacacctgactcagccttagaaacctccaggcagaccaagctgctgaagcacagcttcctgtttctcactggtacacaccctcctcagcaaggcacaacttgccttatctctgggcctcgcaccttggggaggggggaagcggtgaccaagaaggcaggttacttacttgtttattaataagcaaaatttaattgttatgaataatcacaccaattcctttaaaaaccttgccaggaccactctgaactaaaattgggctaaaaagctccagtaaggtagtcgctaaagaagggtcctgctgttttatttgccaggaaatccatcaacacttcacaggcagttgtcagtttaaagaaccgcctggttatagtgagctccttagggacattttccttaaaaaggagaggaggggcagaattctaaagggaagcagtccaattcctcccccttaccactccactctaaatcctcttcagaagggaaggaagtgtctttggtccacccacccctcattaaatattactgaagaattcataactgaaaggaagatggtttcttccttcattcattgtaattactggctgtgaataatgccctctcgtaggaaaggccaccccggctgacacaatgctgttggctttaaggtggaatgggtcctatataccctgtatttatctgtacatttgacctcggaaagtgacaatgttaggaaggttttgggtgtggggatgtgtacaacagaggacaggtttggggaaagtccttcgtcatccagctcaaagtgatgctacccaacagcaggcacagcacggccctccaatccacttcagtcccactgggaacacaggaccacaccacaaatacaggctacctcccagcaagatcttagccagtagtttgactaaatggttctaggaatttttctctgggcaatttataccagcctcttttccttttagaaccttctcgacaagaacacagagaaatgggtctgataatatttttacactaagagctagagagttattcccatctctgagagaatctgctctatatatacaaaaattaaggcaacccataggaaagggaagtctacatcttattccttcacttaggacacagatgctagttcccctgagggctaccatttgttacgctaggtccacggccccaggaaaaacaaatgacttttcataattgccattcaaacacagcatatgtttttaaagatgcagggaaaaaatttaccatttttgtcactacactagatttaatgagtgatgaaacacgttttaaaaaatcagttgacagttacatctgtctccgggagggtatacaaaaaaccggtaatactggctgcttctgagggacctggggagacagaagcagaaggaagcatttccactacacacaccactctacaccttctgaactttgaatatattgccactcaaaaacaaatagaatgtagaagatttaaataccaaacaatttagtttacagtaatagaaacatttcaatttagaactcctgaagtatccaattctttttgttttgttttgttttgttttttgagacagagtctccctctgtcacccaggctagagtgcagtggcataatctcggctcactgtaacctccgcctcccgggttcaagtgattctcgtgcctcagcctccccagtagctgggattacaggtttgcgccaccacgcccagctaatttttgaatttttagtagagatggggttttgccatgttggccaggctggtctcgaactccaagcctcaagtgatcgaactgcctcggcctcccaaattgctgggattacaggcgtgtgccaccgtgcccagccttcgttttttaaaatcaagacaagttaaaaaaaaaaaaaaagaacagaaacaaccactaatcttccttgttttcccccaccatcaacacagaatagacgcctaatgaataaaacacaaatcaattgtatattcattgtaaatacagaaatcccaac

SEQ ID NO: 3256 - DNA, 4001 bp, Homo sapiens
tttaaactcattataatatagattgtttctacttaagttcaaatactcaagtagaattaggaaataggtagatacatcataaaaacaagcacacagttacttcccacacacaggaaaaatccgctagttttagaggtaatataatatatattttgcaagaagtattccttttcatcacaagcagggggaaaaaggaaacagaacaatcaccttgctgccccctgaaccagtcaggcttccctttcctcttttgcctttgaccctctggcacaatgcctgttgtttttttttttaaatgttgattttatatttaatactacagatgacagaaattactttaaaaaagtcattagtgacagttatagctaccatcagattagttataattaattagctaatttttcagaaaaagattttcagtaaaaagtgttgatgacaagaaatatgtaagtgggggagtatctatctatctatctatctatctatctatctatagatagatagatagatatttatatgtaaaagtcaggacaggcatgactgatgaagctgatctacttccacaaatcaacctcacacagcacaactgatatcttgctttccattattcaagtatgcaaaacaaattgtttggtcctaaaatgcagcaatgtataaatccaaaaatcttcttgagagttcaccaagcagtcaaaatattggttactgtattattacaattccccagttactgtcaaacagagctctctgtgagttgtgaagataagtgacatctgtaccacagagcacggattatggaagtagagaaccgggtcagttaaattctcattaactcttacttgacaaatttgggatacgcagtaattctaagctcacaactttgaatgaggtcaataatcttgagctggtctgatggctactctgcattttcttaaaaaaatgtgtttgctaaaacctatttaataatataaattagcctagctttttagagttaacagtatgttctatatgtgtattgagctgctacttatacgatatatatatttattcattcaattaagaaacccagttagcttacttcaaattgttgattattacacaaaacaaaaatatttatctttaccaacagtctgtaatttgtttttttcactgtcccaacccatctgccccttatctttgggccgttttagactgcagaatttttctaacgtaattactgacaatgacaacactaagcctcccttgcggacgacatgatgaaaatgcagttagttaccaagtgatcaggaacctactaaagacggggccgccatgctctcacagtgagggcagcacctccctcccatctgcgtgtcgctgcatgtcttaccgacaaggcagtctcctgtctccctaaacatgctgcgctgcgagcccctcggagccctaccaccctggaaaactcccacccaaagtccagtcaataaaattgtatgggccagctcaggatggctcctgaacagacagccaagaacgctggacctggaagagggcactccaggagaggagacactcacaatttcgcataaaagtcacagaactccttgtagactttcacgtcactgtgcctgcgctgcagtttggaaacagccctctcgtcctcggtcccattggcctcgtggacagtgttaagggctgctcgggggatttcttcgttctctgggataatgcaggggcgcgctcggcctgagaaggccatcgtgggtgcttgagagctctgagcacagggacgagaatggcaggacacagagccaggagaaacaatatccaggcctccctgcttcccagccagggtcactcccactgttcccacgcacgtcagcctggcccgccagggtcactactgctgcttcatgttaagagctcagcagcacagtacacagttacatggcagtcaggatttactgaggcattctggaagttctaaaataacattccacaaagtagtgacacagtctttgtcagagcggcagtcccagtggactatgctataaacactgcaccaggagaccggggctaccttgtaagcctccaagagaaagaaatatccacacgtgccttgcatatttgccacaagacttcatcaacaatgccgtgcttttcactctggagggcataagaggcttttggagaccttgtaaaacatcccctgacaagctctccctgaggctgaggctgctggcacactctgaggagcatttgaaccctgcctggacctgggcttccacaaccctggccatgactgccagctatgcctgatgggtcccttccccaggaggccatgagcccctaaaactaagagctatgtttgacttctatcacctttgctactggtacatagtcacaaatgtactcagtccaatctcagcttcaatgaatgggcacaagtggaaacagacaagggccagtgtttagttataactcttctactggactccagctaacctcaaagcttaggtgagccgatgtttctcagtctctatcatgactaaggaaactgttacatactttggcattcttgctatattcagttcacactcctgtctcctgtgattgagttagcaatgcgaaaggaaactaaatcactaagccaaggaaaaagtcaagctggaaactacgtcaggcaaacttgcctcctgttttattgctaaataagatagctacaaagataacaacctacatccctccctcaccatttgcccgcgagaaaactccttatggaaaaaggacagacacaaactcaaagtcatccctttgaggctcacttgagacaaatgcataactgattgcttcctctgccctattgttcacgtaaaaatgtaggttcactgagccagacacaattgtgtattcatcggaaggctgatcaaggactcaaaagactgcaactttttgtctcttatctacttctggcctggaaaccccctacttcgaattgttccaccttactggactgaaccaatgtacatcttacatatattgattgatgtctcatgtctccctgaaatgtataaaagcaagctgtaccccgaccaccccggggcgcatgttgtcaggacctcctgaggctgtgtcatgggtgcgtcattaactttggcaaaatacatgttctaaattgagtaagacttgtctcatatactttttggcttacagcaatgatgacaatcatgatgtagcactagagacaactaaagggctcagaatctttctcacgtccccatcctctcagggcagtgtgccacccaccaaaaccaagagactgtgaaataaaatctacagaacaggcgcaaggcacactgatggacagtcacggaaccagcagcgacaaacaaaatgcagccagagacaccaagtaacaaccataaataatgatatccaagagtcagtgagtgcttcctatcacatcccttaatccttcccacggcttctgagataggtgttagttacaaatgaagaaactgaggcacaaagagactgaataactactaaggaggtggtggagtcaagatttaaacctaggcactctgagtccagagcctatgttgttaatccctatgtgagaaaatgttaaacataattactgggaagcacaatggttagccagaaaagatgagggagtgggtaccagataggactggaagcaggggaccaagtctttctactttgaaccctaaaaatctcagaggataggtcaagaactcaaaggctgtgggctacagatcctgcccaggcccaaagcctatggctcatgaaacaagggaaccaccatatttaaataagaaaggaacaacctcatggtttaaaatttttcctttcaatttatctatatttcctaattttttaggttttttttttacaatgaccatgtgaaacagtgaggaggcagggagggaggggaagaaagagacagacagacagatggatggggacagaggcaggctgactcagaccagaaatttaat

SEQ ID NO: 3257 - DNA, 4001 bp, Homo sapiens
tttattctattttcattctatcagctatgcaaagtgccttgttgtttgcaaactaaaaagcatgtaccctttttatcaactaaaagaccaaattaaaatgatcatcctctttttaatgttttctttcttatccatgaaaaatacttgtgttctcctgttcattataactattccttatttcctgattatgtatgtgaatgtacatatatacacacgtgtacatacacacaacatacatctatataagagactgccttacacatgcaatcggtatcactcttaatgttcttgaaggttaactgtaaaatcaatgcttttgcaaatacatttaaatctctaggaagtccactgtataaggcaagtcatgtagtaaagcaaaagattcttctgtgggtaaataatcaccccttaataaatgttttccaaatgtaggtctgaggcattacagttcctttaagagtggcctgctgggggaaattccacccaacagcaacagaatacatattcttctcaagtgcacatggaacattctccaggacaggtcaagaaggctgaaattacatcacgtatcttttctgatcacaatggtatgaaactagaatagtttctaaagtaacaggaggacatggaaaattaacaaatatgtggaaattaaacaatatgctcctaaacaactatcgagataaagaaaaaattaaaggggaaattaaagaagaaaataaaggagatatataaaaaaatcttgtgacaaatgaagatggaaatacaacatactaaaacttatgggatgcagcaaaagttagtgctaacagggaagtttacagcaatagacacctacttcaaaaaagaaagatctcaaataacagcctaatattacacctcatggaactagaaaaataacaaactaggcccaatgttagcaggaggaaggaaataacaaagatcagaacagaagtaaatgaaaaagagactagaaaaacaacagaatcaatgaaactaagagtttgtcaacaggtacaaaattaggaagagtaagttctggtgatctattgtacagcaaagtgattataattaataatactgtattgtatatctcaaaatacctcaagaggattttaagtgttgttaccacgaaaaagtgatatttgagatgattgataggctaattaccctgatttggtcattgtacaatgtacatatgaaccaaaatatcacattgtactccataaataaatgtgccaattaaaaataaaacttaaaaaaatgaccagttttttttttttaaacagcgttttacatgttaatgaataagagtaactccttacttagttatagctgctttcttcttaccatgacaggacaaaagttcactaaacatattgctaaatagtacatttccccaccaaagaccctaggcagcagaaataatgttttaaaaaattaatgtaataaaatgccaaaagcattactaaggtcttttatagaaggctctgcaggatataaaccatatgacactaaatactgtttatcaattgtttttaaatttttctttgcaaacaaaaggcatagtttcccttccacacccaccctactttgaaaccaataaaacaaagttttcacatatttcaataattaaatacacatctacaagatataagaaccacaatcataacctctgcagcagggagaaaattttaatcagcatggctgaaggttactacaactcacccaagaccctttctgcatagagagtttcaacaaatatcctttagatttgcttcttaaataactgagaaaggtaggtcataaggaaaacaaatccagaaatacaacaataccctgtgtttggctgatttaggcaatcatgtccatttcttctcttaaacttctctcaaacttccactcctttgccttagtcactttacacacacaggcccagttctgcaaacctacgcactctacctgagccacctccagctccccttctcttaattcaagagtaaagaacctccctcctggctcctactcttatttaacttacttatcagggcttgggaggccagtttcacatcactgcgaattatctttgaaagcctctatttcctaaactgtacagaacttcctcatcttagctttgtctctgttgtcttgaactatatttgagccaatgaaaccaagttcagggtttttttttttcctgtatttagtcaaatcatgtgacatggtgtgttacacgataaccccactgttctgaagcaataggacaacacccctaaatgtcataactcatatcctgctaagttgttttatatactttatgaagttaagaaattcacccaaaaacttactgaaagcacatataacatgcagacaaatatttagaaaaatgaataactgatcatcatagaaagaggtaactttaaaaaaatgatagcctctggccctctggatctctataataactacatgtttgaattaacggagcttctttatgtgccctctgaatgctactctggggtcaagcagctactctacactacatcttccggtggcaaggtgcaggccagcttagggacgggcacgccaggctctggctgccccagcagcggaaattattctttctgtcccagatatccctgacagacacagtgcagaagcagcaaggccagtggtgctaaggcctcacatatccgactgagtcacctcctgggactcctcagtgccaagtttccactggagaataaagggatctaatttagttgaaggtaagaaagaacttgagagcaattaattcagccttccccttccatgaatgagggtgtccttgcctgaattcactgaaaatacagcaagaaagctcctttacccaattcctttattatagaggaatcatttttaggataactgcatttctaggatggtaacataactagggcctgaggttaatctttaaaaacaagaaaacggccaggtgcagtggcttacacttgcctgtaatctcagtgctctgggaggccgacataggagatcacttgagcccaggagttcaggcccagactaggcaacatagggagaccatgtctctgaaaaaacaaaaacaaaaacataccaccacaacaaaccaaacacacacacacacacacacacacacacacacacacacacacacacacacaaaccccaagaaaacaactcatcacttttgcttgttatccaacactgagactgggtactagccactcttagagctggtgacaagctataacctgagggcaccctggcaggtgactatttacagggaagggtttagtgcttgaaagagtggaaaagcacatccaagacaagctaaaggcagagggagttctaaaactcagggttctgcccagcactcctgggggaacctcacaggcttcaccttcacgtactctgaaatccaacggtcccagctagtttgggagctctcacacaatactgaatgtaataaaattccagccagaatgtttttctggctttgatttatttactttattttgggaggtgggagtggaaggcagatggaagctggaagtgaaaaggctgctttcgagtgggaagcagttccctcccccattcccagcagggacagtcctatgtcatggacataaaccccgggaagcagctgcgatctctcttgggagagggaaaagagaatggaagtcttctgagctacagccccaaaatacaaaattccctctaggaaggcagctcgtgatgctgcagttaaaatctaaaggaaggaaactggatgtttttctgagtcccagcagaacatcctgggcagactggcattgttgttaacttctctactcatggatgggtcccatcaaccctcctcttgaagccatgcgccactcgcataaggacgtaccatgcttgaaggtcttctcgtaatcgacctcatccctttcttctctcagcagatattactttattacttattcatgaagaaaacagtttatctg

SEQ ID NO: 3258 - DNA, 4001 bp, Homo sapiens
aactattccttatttcctgattatgtatgtgaatgtacatatatacacacgtgtacatacacacaacatacatctatataagagactgccttacacatgcaatcggtatcactcttaatgttcttgaaggttaactgtaaaatcaatgcttttgcaaatacatttaaatctctaggaagtccactgtataaggcaagtcatgtagtaaagcaaaagattcttctgtgggtaaataatcaccccttaataaatgttttccaaatgtaggtctgaggcattacagttcctttaagagtggcctgctgggggaaattccacccaacagcaacagaatacatattcttctcaagtgcacatggaacattctccaggacaggtcaagaaggctgaaattacatcacgtatcttttctgatcacaatggtatgaaactagaatagtttctaaagtaacaggaggacatggaaaattaacaaatatgtggaaattaaacaatatgctcctaaacaactatcgagataaagaaaaaattaaaggggaaattaaagaagaaaataaaggagatatataaaaaaatcttgtgacaaatgaagatggaaatacaacatactaaaacttatgggatgcagcaaaagttagtgctaacagggaagtttacagcaatagacacctacttcaaaaaagaaagatctcaaataacagcctaatattacacctcatggaactagaaaaataacaaactaggcccaatgttagcaggaggaaggaaataacaaagatcagaacagaagtaaatgaaaaagagactagaaaaacaacagaatcaatgaaactaagagtttgtcaacaggtacaaaattaggaagagtaagttctggtgatctattgtacagcaaagtgattataattaataatactgtattgtatatctcaaaatacctcaagaggattttaagtgttgttaccacgaaaaagtgatatttgagatgattgataggctaattaccctgatttggtcattgtacaatgtacatatgaaccaaaatatcacattgtactccataaataaatgtgccaattaaaaataaaacttaaaaaaatgaccagttttttttttttaaacagcgttttacatgttaatgaataagagtaactccttacttagttatagctgctttcttcttaccatgacaggacaaaagttcactaaacatattgctaaatagtacatttccccaccaaagaccctaggcagcagaaataatgttttaaaaaattaatgtaataaaatgccaaaagcattactaaggtcttttatagaaggctctgcaggatataaaccatatgacactaaatactgtttatcaattgtttttaaatttttctttgcaaacaaaaggcatagtttcccttccacacccaccctactttgaaaccaataaaacaaagttttcacatatttcaataattaaatacacatctacaagatataagaaccacaatcataacctctgcagcagggagaaaattttaatcagcatggctgaaggttactacaactcacccaagaccctttctgcatagagagtttcaacaaatatcctttagatttgcttcttaaataactgagaaaggtaggtcataaggaaaacaaatccagaaatacaacaataccctgtgtttggctgatttaggcaatcatgtccatttcttctcttaaacttctctcaaacttccactcctttgccttagtcactttacacacacaggcccagttctgcaaacctacgcactctacctgagccacctccagctccccttctcttaattcaagagtaaagaacctccctcctggctcctactcttatttaacttacttatcagggcttgggaggccagtttcacatcactgcgaattatctttgaaagcctctatttcctaaactgtacagaacttcctcatcttagctttgtctctgttgtcttgaactatatttgagccaatgaaaccaagttcagggtttttttttttcctgtatttagtcaaatcatgtgacatggtgtgttacacgataaccccactgttctgaagcaataggacaacacccctaaatgtcataactcatatcctgctaagttgttttatatactttatgaagttaagaaattcacccaaaaacttactgaaagcacatataacatgcagacaaatatttagaaaaatgaataactgatcatcatagaaagaggtaactttaaaaaaatgatagcctctggccctctggatctctataataactacatgtttgaattaacggagcttctttatgtgccctctgaatgctactctggggtcaagcagctactctacactacatcttccggtggcaaggtgcaggccagcttagggacgggcacgccaggctctggctgccccagcagcggaaattattctttctgtcccagatatccctgacagacacagtgcagaagcagcaaggccagtggtgctaaggcctcacatatccgactgagtcacctcctgggactcctcagtgccaagtttccactggagaataaagggatctaatttagttgaaggtaagaaagaacttgagagcaattaattcagccttccccttccatgaatgagggtgtccttgcctgaattcactgaaaatacagcaagaaagctcctttacccaattcctttattatagaggaatcatttttaggataactgcatttctaggatggtaacataactagggcctgaggttaatctttaaaaacaagaaaacggccaggtgcagtggcttacacttgcctgtaatctcagtgctctgggaggccgacataggagatcacttgagcccaggagttcaggcccagactaggcaacatagggagaccatgtctctgaaaaaacaaaaacaaaaacataccaccacaacaaaccaaacacacacacacacacacacacacacacacacacacacacacacacacacaaaccccaagaaaacaactcatcacttttgcttgttatccaacactgagactgggtactagccactcttagagctggtgacaagctataacctgagggcaccctggcaggtgactatttacagggaagggtttagtgcttgaaagagtggaaaagcacatccaagacaagctaaaggcagagggagttctaaaactcagggttctgcccagcactcctgggggaacctcacaggcttcaccttcacgtactctgaaatccaacggtcccagctagtttgggagctctcacacaatactgaatgtaataaaattccagccagaatgtttttctggctttgatttatttactttattttgggaggtgggagtggaaggcagatggaagctggaagtgaaaaggctgctttcgagtgggaagcagttccctcccccattcccagcagggacagtcctatgtcatggacataaaccccgggaagcagctgcgatctctcttgggagagggaaaagagaatggaagtcttctgagctacagccccaaaatacaaaattccctctaggaaggcagctcgtgatgctgcagttaaaatctaaaggaaggaaactggatgtttttctgagtcccagcagaacatcctgggcagactggcattgttgttaacttctctactcatggatgggtcccatcaaccctcctcttgaagccatgcgccactcgcataaggacgtaccatgcttgaaggtcttctcgtaatcgacctcatccctttcttctctcagcagatattactttattacttattcatgaagaaaacagtttatctggaaagttctctttcaactacctcccacctatatgcttactcttcaggccttcagtcccaacaaggtctgtttgatgtcagtccataaactcacatccagacagccactttccttctttttgggctctttcccccgaagagtttgtaaataggctccagtttctgc

SEQ ID NO: 3259 - DNA, 4001 bp, Homo sapiens
tgcgtcaaacaaactccaggagaaaggactgcggggagccaccgaactgcataaagggaggctcttgggagtggaactgtggcagtttccttctctttatgtttctgttatcttttatgtttccaggtttctccttattctctaagacgagtagtattgcctggacgaggaacgccctacacagtgcctgccaaaggctgactgtcatccctgtgtcatttgagggtaagagtttctcaggcccttggagcccacagcagcaagggaaggctgacccctgctcgccaccacctgccttcccagcggttccggccgggctcacctgacggcctccgtctccagggaaaggcccaagggactcaggggcaagaggacccttgccagggagcagtggcacctcggggcctcccattccagccccgcacccttcacggctctgttctcctcgacatccctcctgtgcctgaaggaaccgcctctcacccacctccacctcaatgctgctgctggggctgctccggaccctgttcctgtctctccccactttcttttcctagaaaacaggagagtgagaaccagccagctggcagggatgctctgaggaaaatgggaggcagccccgctagaaccctagggggtgaccacaggcagccagtgggcctgcagatgccactctccgggggatgagtccctccatctcactgcagaggggcctgggccaaggcttagaggtgactccaagtcaggggagctaactgggaagagaggcttggggagaagaaagggaagtgtgtctggagggcaggacttacaaagtgacaagttacaggctatttttggttcctgggctgccctgagaccccaggccacagccttaatggcgatcacagaggcagctcccctgtgggcctcggatttgagactgcaatcctggacactgccctgtaccctccaagcccctttccccagcaaagccacaggtcactctccgggctggggctccccaagagccccaggtcatgggatcctgaagaacagcatccccctgccaggacttggctgggggagaccagggcctcagggacagccccctcccacccagtcctgagtcatgcacttgtacccagctaggttccagaaagggctgcagggacaaacactggccggacactggtggacctgtgactggcctcctgagtggctcagcctctgtggcctctggtgacctcatctgtgaaatggcaacgaggggcctgagagcagagggtgggccaggcccaggggagcgccctgtccccaaccaacccctgcacagctggtgcttgggcgcagctctggccaagttccaacatacccttcaacatttttaacatttttaccaccccaggtttacagaggaggaaacggaaggctccagagatgacactcaccgggatcggggatcgcacagcgcgggctcggggaagttgggggaggcacgcaacctttgaaccttttgcccgtggttggtgtctgaccttggacaagaccccctcccgcagccctgggcgtcggttgtgagcagacggctgtcccatcttgcagcgggcgggtgggcaggagctccaccttccgctgcaggcgctcgcccagaggaagaggcgcgggggctgggggacccctgccccgacgggcgctgccgccccggcagctgcgagaatccgacgcgccagggcggagcggggatcgtggcgccgcggggctgtacgagggcgagctgcgcctcggccaggggtcccgcagtcccgcctccccggcccgggggcgtgggtgggggccgttaccttcccgtcatggtggcagcgacgccgagccctgggttgccggggttgccgcgggtctccctctgctgctgcagccgccagccgagcgcccgcccgccagcccgggccgcggagcagggagacgcccaaaaaaggccaagagccgctccgcccgcgagaggggtgggcgggggtggcagggtggggcccgcggggcggggtgggatggggaggtcaaggctgagggtggtgggggtgttggggaggtgacggtgggaggttgcgggagtataggtgggggtgggggtggcaggtgggggtggcggcgggtagggttggaggggtgggggttaaaggtggggctgacggtggggttggaggggtgagagtgaggcgggggtgggagtgggggtaaaagtaggggtaaaggtagagggtgggccccgctcccgcacagccccagctccagggacacggagcgcggccagcggcgggcgcgggtcaagtccttcccaacccgggctctgctcgccacctcctggattccgggcatagctttccttttaaagggagtaaagttataataaacgcgaacaagcacccccacccccacagccccgccgggacgccccgcccggcgccccctctgcagtccctgggccgccccaaccgcaaacgcgtgcaggagatggtaggcgtgggggcgatgctgagaccacctccctcccgggctttcctagcccggagttcccaccgcggatctgggcactgactccctcccgaggcacccgggaccgccgagtccacgcagtcccgcccccagggaggctaaagccgagaggcgtccctcttcagtcgcaaagctgctttccccgggaaattccgatttcatcccccgttgcgggccatcgccctaacttggcgaaagatatttcttaaacgacaaaaccaaatgcccagctcccaggtttccaggggaaccaggcacgcctctgtataatgaagcgctgagaagctaccattagaggcgttaagatggaggggtaatataaactatttagggaatctcttcggaggaaattttcaaacaaacaaaacaaaaaacccccgccctgcctaaaggcagatatttccagctggacagtggcgtgcagctcatctttggaagcagcccagatgtcacactgaggtttgggagctgggcggcctgatgtgtaaatgtggtgctactccggtcttggcagcagagaaagatgatctagaaatgacggtgtgaattagcaacccacaaataaactggtgccgttcagaaagatgagttgatagtatcctgcagttccacctgcagaaataagctgggaaaagacacctgttcctaagtggctggtattgtggagtgcctttgcagttgttactttttttttttttttttttttgagacggagtttcgctcttattgcccaggctggagtgcaatggtgcaatctccgctcactgcaacctccgcctcccaggttcaagcgattctcctgcctcagcctcccaagtagctgggattacaagcatatgccaccacacccagctaattttgtatttttgatagagatgggtttcaccatgttggtcaggctggttgcaaactcctggcctcaggtgatccgactgtctcgagttattacttcttgttgcgagcgtgtctcagctgattcggcttaactgtaatttgatggttgattaagcttaagtatggataatttcttggctcacctgctcatacagggagaaaggctttccaccattactgacacagaggtgtaggcatgctggggccgtgcaccagaaatccactgctggacggttaattgaatatcagggtcttgtgggaaccaaagaggatgaaaagttgaaagcattacaccagaggcccatgctctccacagaggagaccacattcctgccttttagcccaaaagcctccctgcatatgatagctgagcacacacggatctgtatgtggccaaaccaggaccctatgcagctcccagtgtgcctcatccctgggccagggcaagctcagtaacagctggtaggggttgtgggcatggcttagccctgctggagatgcagaggcttcaaggagccagggccagcctcccacagttcagccaagagggcagagttgcaggaaagagctggcaa

SEQ ID NO: 3260 - DNA, 4001 bp, Homo sapiens
caatatccagagccacagccctgtccccatgtgaccacagggaatggagaaggccttgcagctctcaggaggcctcagggtctcctgccacagcccaggtcctggggcaggagctagcatgccttcccaacaggtaggctgttcatcctgcctgttccaagaatggccccgtgtgatgtgaggccacccagacggccactctacaaggcctgtgccccaaatctggttaaggcctgtccctttcagggcactgggaactggcaaaacacagagacctgccgaatatcaacacaaagttcaaagccttcagccgcctcctgcgagaccaaagttaacttgggaagtggctgtgagaaccccccgggggggagcggggaagcacctgcacagccggagccctcccgggcggctccctgggccaaaggaagaatagtgagcaggacaccgcccctggcacccacaggtttcacaacacattgaaaagtaaatgtctctttttaaaactaggagcataaaaccagctgggcacgatggtgcatgcctgtgggcctagctcttcatgaggctgaggtgggaggatcgcttgagcccaggatttcgaggttacagtgagctatgattgtgtcactgcactctagcctgggcagcagagcaatctcctgtcttttaaaaataatcataataaataaataaaaataaaaatatgagcctgccctcagaactgtcattagacacaccctctgaccagcacaaaatggccttacttctccctgtgccacacggcagctcagtgagagaagctggcggaatgtcgatccacaattctctcaacatttgcagaacacacaagagacccagggattcttttcagtctgaggggaacacagtgcccttcttgaaagtctgatttactcaggagtagaggtggaccatcgagcttcacaattttccaaagatgacctggccttggagttcgggaggaaaaggccatctcactctcgcctttgctctgggacagactccattcatctcatgggtttggctacccgagggcagcccccaccacatatccaggaatgccacattttaacacctcaacacatcatgccgtcgagtatccagcaagaagcctcctgggcgcagagctcctcacctgcggggcacctgcctctccctgcctctgagagtatctcttccacatactgagggtcactttgcttcttttttcccattgtgaccttcccactggagcttgttccactctgtccaggggaaagagcagctgcccatcccaagcccagcctatccaaacgtggcctcgcccgcagaaggccccgcgtgcggccacagtgggctgaaccttcaccgtccccatgccgcctgacggagggcagcccctccagggctgttccttgaccccaaatgagcaacattagcacaaccactcagagtacagggaattgcaggggcagcgcagcgattggcaggtggaaaggacctcccggggccctgtgcccatcacagagtctttacctctgtggctgagatgccgctccgcctcctcgggtgcttccttccctgagcgccgccagcaacttctctgagggaaatagcagctgcctggcccgcttggcacagccacgtgcaagactgagcagccgccaggagtgtccggccaccacggggcacccaggcacggcagcttcacctctccctgggcaggaggcttggccagaggtccttagctggaggcagaggccggaggcaccttggggtcaggaggagacggaagaagccgcggaaggaaaggcggcctccccagggaggtgctgctccgggcccagagccaggcccacaaaacaaaaggagcagcggctgccctctgaatccagagaggccggcagaggggcagccccaaaatgagcatttctcgaagccctgagcgcaggagcccggccgagtagcctgatgttcacagtatccacggacagactgcaaaagaagccccacagtgaaaagaatcctggcaactaattacgtgaacaacccaagaacagctactaggatgctgtcttgccaagtactattttccctgaaaagaggaatatctcaggactatttatattaaaataacataaatgaattattttataattttctgctataaaactttcattgtattagaaatgcccagaagtagaaagaagaaaaatcacctccagaagatgggtactgcaacactttgttcacttttaaccatgtacatttattttttgcctgattgtgatcattttgtggtttgcaatctttcctttccttcctttcttccttcctttcttttctttccttctttctttctttctttcttcctttctttctttctctttctctttctttctctctctctctctttccttttctttctccctctcgctctccctctctttctttctttctttttttttttttttgagacagagtcttactctgtcacccaggctggaatgcagtggcaggatcacagcttactgcagccttgacctcccaggctcaagccatcttctcgccttggcttcccaaagtgctggggtgatgggtgagagccactgggcagcactggcctctgtttgcaatttcatatcagtttcttcataaataaatggcagctgtctgcctctgcatcgtatcagtgcgcatcagggctgccctgggtcttgtagctgagaggcaccactcacaatgtgctgtgccccaggatctccctggtcttgtgctatttggaagaaggagtgctgggatttatgtaaactgtgtacatgatttctgtgtccaacttttatgagcacaactggtttgcattttcagtcaaattttatacccctccagcgggggactatttgcttttacacaacacggagcccaacagagagccagctagagataaagcaggcactagaagatgtgttgaaaccagtgatgtattactctatagccactttggatttttagagacagagtctcactctgtttcctattctggagtaaactggagtgattatagctcactgcagcctcaaactcctgggctcaagcaatcctcctgcctcagccttctgggtagtttggaccacaggtgtgagccacaatgcccagtcccatgtattgttacatttttaaaaataacctacccgcatgttataaatatgctatatgccagagtgtaaactgctcagtaaatatttacagtgtgttgttgtaaacattcttggtaagtttcacacttgtatgaggagctgcctaaatgtagagtgtatatcatcctgttttgctcaaagaatctcaaatatcactttacccaacatatctattcctgaactggatttgtataaataaaaaacagtttgaccagtacctgtagctctaactacttggcaggcccaggcagaaggattgcttgagcccaggagatctagcctgcagtgagctatgattgcaccactgcactccagcctgagtgtcagagtgacaccctgtctctcatacaaatatttttttaaaagaaagaaaaataataacagactctgtttgaaaaccaattcactctcaaactcatttttcatattccagatgttacagtatggtatgaggccaccacttctcttgttggccttctcagtttctccccaacctccccttttccctagtttataagacaggagaaaagggagaaagcaaaaagttggaaagaaacagaagtaagataaatagctagacgaccttggcaccaccacctggccctgctggctaaaataataataatattattaacccctgaccaaaactactggtgttatctgtaagttccagacattgtatgagaaagcactgtaaaactttttgttctgttagctgatgtatgtagcccccagtcacgtttctcacgcttacttgatctattatgactttttcacgtagaccccttagagttataagcccttaaa

SEQ ID NO: 3261 - DNA, 4001 bp, Homo sapiens
aggctgggtggggtggactgggagcccagggctaagcagaggaaacactcagcggggagccctgcccagggagacaggcagcagcctgtctcgtcccatctctttggtgatggtctgacctgtgcatcgaaggctgaccacagtctgaattcacagcagcccacaaagcggtgtttcgtccctctgatgggggcttgcagaggggaagtggcttgccggcagtccaggctgcaatgacagcaccgctgcccctaaccattaggcagccttgacccatagaggagccagatgcctgggagagggctcgggccagggatggagtggcgctaatgcaaaggaaactgccaccacctggccatggcgctgccaccacaggccctccccgaggccacacatgcccacctgccacctccacagaggcctatgacctgtcctagatgctcgactcacccacagccacgggacccaacactgcccaggccccggcccatgccacgccctttcctcttacggacaccggctcggtggccgtctgaccagtgagtcgtgaggaaccagcgagtctagactgaagtttgtgtttctaaagggcaacagagagtgaagcggggcccatctcagaccaaactgcaacaatcagtatcagaactcctcaaacgggggacagaaagggagaagaaacctcagcaaacctgaaaccaaccagaaagctgtttaaaatggagtctcagtcccagagagagcgaggggcacgcccttcggcccgggcaggaagtggagggcagtgcccaggctgaggcccccgggctggaggcaggaggcaccacaggcccacctggtgccatgagatatgccacccctgccgtcactcagggccctgagcccagtaacactctgccgtcactgtcctgaaactcttcctttttgagcaaggggctgcacattctcatttcatacatgggcccctaaaatgagggagtggccccagggccaggagggggtgctgagcctgggagacaactccatggcaaactctgagactgagtcacactccccaccctggcggtcttccagggagtgagaccgtttccccggtctcacttccagctccagggccaatgtcccctggtcaagtgacctaagacaagttagcagacactcagccttgactccctaacctgcaacatggggctaaaactggtttgagccagcacaggcaggcccccaccatgccaggcagagtggtcagtcgtacctatgagctgctctctcgtggggccaggtgatgcctgcactgtggggcacagcacaggcctgagggacagcctggggtggagggcacccaccttggccccttcccacccccaggttctaacaagggcccctcactcactgggccccctctcctcttccagtctccagggcctccccgcacacaccttcctcctctcctgccaacctgaaaacagcacacctgtgtgcccctcccatctaccatgggctgtcctctctgcttgcccatgcgtctgccctggagccctgttcctccagtctccgggtcctcacccccagcacatgcaacacgacaccctcaaagtcatgggcccccctcccctgccaccgtcccaccggtacctgctccctgttctcccctgcctcacaggccctgtcaagggctgtgttcctccctccttttacctctcctccacagcccccttcacagccctcagcccttccccagggcttcagccaagcctgtctccctctcccaagcatcactcaccccgccttcttcggccctcagctctccgccctcaccgtggttttagcagtcctagggaaagtgccagccgagaccagccagaccaagtcagagtactgtggaacctggattcctggggaatggggtccccatgaggaactccacattggactaagaacagaccctgttcctggaagcagcaggaaaccatctctggtgttagaacttcaggcatcttgaaacactctgaagccgggggcaatcttttcaggtaggggaacctgcctagagaaatagctaaaaggtaatattattaggtagttgccctcccctttgcttgaggacattgatggccaggtgctcgggccagccctcaccctccatgtgagggccacagcagctggccactcgctctcctgaaggaagggtgcggcccacccttccctagggctagggccaccaccatgcctgcttctcctccatatgaggatggctccagcctcctcctcgaggggctgctgtgtccatgaacagtcaccatgccctctctgccccgtgccaccagcatcctgagacagccctgtggaatcagtaagaggagaggggctgggcgcagtgactcatgcctgtaatcccagcactttgggaggccaaggagcactttgggaggccaaggagagaggatcacttgagcccaggagtttgagaccagcctgggcaacatggcaaaaccgtctctaccaaaaaatacaaaaattagccgggtgtggtggtgtgcgcctgtagtcccagctattcaggaggttgaggtgggaggatcacttgagccctggaggttgaggctgcagtgagctgattgcaccactgcactccagcctgggtgacagagggagaccttgaaaaagagaaagaaaaaaagaaaaaagagagggaggggaggggaggggagggggggaggggagggaggggaggggagggaggggaggggaggaaggggagggagggaggaaagaaagaaaaagaaagaaagagaaaagaagaaaggaaggaaggaaggaaaaagaaaagaaaaaaagaaaaaagaaaagaaaaaaggaaaataaagaaaagcaagcaaacaagcaaagcgaagtgagagagagaggaaggtaggaaggaaggaaggaaggaaggaaggaaggaaggaaggaaggaagggcagggagaaatgtgcagagtgaatttgctgcaggcaggaccccggctgttcggtgcagagccaggctcgcccaggatgaggaccctgccagggctgtggcccgtgcctcctcccctcctgctgccacaatgggcacaggcaggatgccagcttctcttatgcaaacctctctccagcctctgcttcagcctggctgtgcagggtggggatggtggatactgggaagccaggtgcccagaggagccccagaagctgtgccatcatcagcacccacctggccgaagcccgctggtgaccccaattcaaaggcaggccaggtgcgctgtcctgccctggttccgggctgcgggctgctctggccccaccgcctgcccacactgccactcgcaggcctgggttggggaggcagagtgtttgggaccctcactctccttcttcaatcttctgagttgactaaaatcaaaacaagagtgggtttctctgctgagggtggggagcaccctatccagacccagggttcaccagacggacatgacttgttacccaggactgtcacagggctctgcacttggccttcaaacgtgggcaagccacgaggcctccaggcctctctggggctgcagatccgtcctcaacagcgctggccagtgtctctgacgctgggtaaaatgggtcttcccctcctggaagagatgctgccccctggtggtggatctactctgggagagaaaatactcccagctggcctgatacccaggcacaggcttctcctaaacacaggtctccccacctgtcaggatgtccaaacggagttggtgggctggatccagaaagcccccaagagagatgctgaaactctcaggtgggtaaaaagagtagacctctgacgtcccagggtacagcccttgctgccatcctgggggcaccctcctaagtgccaggggcaagccatggtcaggggaagcagaaagcggtgacaccccggccactgcacctgtgggcaggtgggtcagggagggtccaggcactcaggatgaacag

SEQ ID NO: 3262 - DNA, 4001 bp, Homo sapiens
acaggaaggggaacatcacacaccagaggctcttgtggggtggggggtggggggtggggggtggggggagggatagcattaggagatatacctaatgctaaatgacgagttaatgggtgcagcaaaccaacatggcacatgtatacatatggaacaaacctgcaggttgtgcacatgtaccctaaaacttaaagtctaataataataaaataaaaaagaaaaaattaacatgctgcctgggctgctatacacaagatgcattgacaccatcagaaacagactccaaatcagtatgaaacctgtctgaaattagagcttttttgaagcccttgccatatctctttgctctagtggcttttcttttaagcaggtacaactgaaacatgttacactaacaacaaagaactgacaaaggacatgaaccagaagttcaaagaaaaacagtgtgaatagtcacatgcgcatgcatgctcagggctgccccaggcctgtcatcatcgtgcctgtcctgcctgcatctcagctgtggtatcagtactgtgaaaatcactccagaacagccttggggccatcagtgccctggccactcgcagcctggtaccacagttatgccacacgcatccagggctgtccagaggttgaccagggagggtgcctgctccagctctgccacactcaggtgagtgacttggcctcctgagtctgggggtccccacctgaacagcaggctgccccagacctgccatgccagcacaagcgggagcccagcatgcagcagggactccacagatggccgtgctgccggcctgcagttcccgccctccactcggtgccctccttcctcttctgttctcagcaaaagatatctttgatggctcagtcctctaattgccactctgggagccttccctgaccacacacaaggagctgagagtgggctatgcttgccctgggtggcactggccttcctctgctcctgggtcctccaggccctcccctacctctgcgacttatgttcctggctccctccctgcccccccgccccagcccttctgcccagccttggcctcctccccagggtccctatctgtcaccttgatgccaaggaccccaaggtcacagccctattgctctctcttccccgctggcccctcggcactgcaaaggcaacattttcaggagctcctcctcatgcccctgaccccaagagtgaggggaggtggctccaccaccatccccgtgcccctcccaacctccccatccagagccaactcattctctgagatgccctgaggaccatcctgaaccccactgctggagtcagtctaacctgggttcaaatcacagcatagccatgtttggggtgggtgagtccagcaggtgtctgctctgctcagaacctgtctgctcatctataaagtgcagcatgatcacccccgtctgaaagcagtgctgggggctacacaggctccctcgtctctaacataggtccctgggcgcaccctgccaggagagctgatcacaggtgacatccaaccctgttagataaagtcgcacgcgcccaccctgtcgccaacccagggcccatccgacgccggggcagagcccacggcgtcggagggccccggtcgggtttccgagggaaggcctgccctgccgccgcagctttccggccattgtccccgccacccgccccgcccctggccacctaccccgtggctggcggcgggctctgccggtgctggcgccgccggtacagccccgacgcggccagcgcacccagccgggccgccatggcgcggggcagccgccttgaggtcgcgggcgcgggccgcctggtgcaggggctatgggaccacctcggaggggaggcgcggccgcctggggccagacaccaagacgggacgggcgtgtgggcgcctcccccgcgctggtcgcgagctcacgttacgcgctgggatctccaaagggcagcagagtcaactccaaatagaaaggatattgttcgcgccgcgggggcagctcctgaaagctgaggctggcgggggttgggtcccgctgggaggggactggtctgggaaggccccagacagcactgaggtgaggtccacagtggcggcaggacacccaggaggtctccggctgccacctgccaggaggaaagcctgtgcccgtggacacactgaggagggcagagtcagctgaggaggacagggaggacctggcgcctttaggatccctgccaacagttaggaaaccgaggaccggagccacacaggcccacattctgctttgctcccttctctgagaccctctgccacaaacatcaccgtggggcacccagaccagggcagagccgatcctctggatctggccaacaaatggtcaggcaccccaaaagaggtccttattttagagaaaaggcaatcctccagcttccaggggagcagacgcagagggacctggtggcaaccaccaggaaggcaccatgtaccccgcatttttacccagagagactggcaaagttacttgtgattcataaacacccgcggtaggcatccaaactgtgaccaaggtaagcctggtcagcagtacaataaagatccagagcactcatggaaatctttagcattgatcccatttccctgaaagacctttctagaaaggtcagaaagcttgagcagtatcttcttctgccttctgaaagcaagagctggcagccgtcactaaagacagcagggcactgatcctcccaaactagggtgggagaaagccttggaggggctcactggcattcagataccaggcccacacgccactgaggaacacactcacccagcaagtcccaacaggaggaggtactcattaagcaccctggcagtcaagtgacgacaagcattgggtacagtataatttgtaaatgtagtccaattccaaagttgcccaacactgatcagttcaacaaatagtttttaaaggtggccccaggggctaaagggcatggagaagctgagcccagaggagccaaaatgaatagggaataccgctgactctctgatgtaggtagccgaatgcttaagaaaacttacaccgaaaatgttcttaacagcagctacaagtcaatgccatagggcctagaccctctcaccactcccgactcagcccatccatgtggaaatcctcaacactagaatccaggactctcatgcagacccgcagttttctgtaaggaggaaacatttatttagggctccaagggtcacatatagcactggaaaggaggctacagccacaagtgttttgtgcaacataatctgtaaatgaagttcaagcacaagtttaccaagtactaatcaattcaacaaatatttactataaaagcggacatcgaaggctagaaattgagagaggcttagagtctgattgagcccaaatcccaaatctctgcacaaccttaccacccattctgcagcctgtcctgctgcagggatgggattgggagccacagatactgtaaactgaatctagaactctatacaaagtattatacaccatgaccaaatgggatttggttcagtgctctggctctagatatttgcaaaaacaccgagagtgatgtcagcagaaagtggtggagtaaggacctccagaagttcatccctccataaaagcaatgaaaaacctagcaaaaattatcagaatctactctttcagaactctgcaaatccaccaaaggttttcagtaaccctaggaacatttggtcaagaaaaacagatgaatcttggtaaacaaacaaacaaacacaaaccagtgaggtttgtgttgttttaacttatcctagtcccttattcctgctccctaactccatggcttccttgaataataatagctcgtggtcccagtaaggaggtagcagaatggaatattatgaacaactgtatgccaataaatgaaataacctactgaaatggagagattcctagaaggacactaccaaaac

SEQ ID NO: 3263 - DNA, 4001 bp, Homo sapiens
ctacttaagttcaaatactcaagtagaattaggaaataggtagatacatcataaaaacaagcacacagttacttcccacacacaggaaaaatccgctagttttagaggtaatataatatatattttgcaagaagtattccttttcatcacaagcagggggaaaaaggaaacagaacaatcaccttgctgccccctgaaccagtcaggcttccctttcctcttttgcctttgaccctctggcacaatgcctgttgttgttttttttttaaatgttgattttatatttaatactacagatgacagaaattactttaaaaaagtcattagtgacagttatagctaccatcagattagttataattaattagctaattttttagaaaaagattttcactaaaaagtgttgatgacaagaaatatgtaagtgggggagtatctatctatctatctatctatctatctatctatagatagatatttatatgtaaaagtcaggccaggcatgactgatgaagctgatccacttccacaaatcaacctcacacagcacaactgatatcttgctttccattattcaagtatgcaaaacaaattgtttggtcctaaaatgcagcaatgtataaatccaaaaatcttcttgagagttcaccaagcagtcaaaatattggttactgtattattacaattccccagttactgtcaaacagagctctctgtgagttgtgaagataagtgacatctgtaccacagagcacggattatggaagtagagaaccgggtcagttaaattctcattaactcttacttgacaaatttgggatacgcagtaattctaagctcacaactttgaatgaggtcaataatcttgagctggtctgatggctactctgcattttcttaaaaaaatgtgtttgctaaaacctatttaataatataaattagcctagctttttagagttaacagtatgttctatatgtgtattgagctgctacttatacgatatatatatttattcattcaattaagaaacccagttagcttacttcaaattgttgattattacacaaaacaaaaatatttatctttaccaacagtctgtaatttgtttttttcactgtcccaacccatctgccccttatctttgggccgttttagactgcagaatttttctaacgtaattactgacaatgacaacactaagcctcccttgcggacgacatgatgaaaatgcagttagttaccaagtgatcaggaacctactgaagacggggccgccatgctctcacagtgagggcagcacctccctcccatctgcgtgtcgctgcatgtcttaccgacaaggcagtctcctgtctccctaaacatgctgcgctgcgagcccctcggagccctaccaccctggaaaactcccacccaaagtccagtcaataaaattgtatgggccagctcaggatggctcctgaacagacagccaagaacgctggacctggaagagggcactccaggagaggagacactcacaatttcgcataaaagtcacagaactccttgtagactttcacgtcactgtgcctgcgctgcagtttggaaacagccctctcgtcctcggtcccattggcctcgtggacagtgttaagggctgctcgggggatttcttcgttctctgggataatgcaggggcgcgctcggcctgagaaggccatcgtgggtgcttgagagctctgagcacagggatgagaatggcaggacacagagccaggagaaacaatatccaggcctccctgcttcccagccagggtcactcccactgttcccacgcacgtcagcctggcccgccagggtcactgctgctgcttcatgttaagagctcagcagcacagtacacagttacatggcagtcaggatttactgaggcattctggaagttctaaaataacattccacaaagtagtgacacagtctttgtcagagcggcagtcccagtggactatgctataaacactgcaccaggagaccggggctaccttgtaagcctccaagagaaagaaatatccacacgtgccttgcatatttgccacaagacttcatcaacaatgccgtgcttttcactctggagggcataagaggcttttggagaccttgtaaaacatccccctgacaagctctccctgaggctgaggctgctggcacactctgaggagcatttgaaccctgcctggacctgggcttccacaaccctggccatgactgccagctatgcctgatgggtcccttccccaggaggccatgagcccctaaaactaagagctacgtttgacttctatcacctttgctactggtacatagtcacaaatgtactcagtccaatctcagcttcaatgaatgggcacaagtggaaacagacaagggccagtgtttagttataactcttctactggactccagctaacctcaaagcttaggtgagccgatgtttctcagtctctatcatgactaaggaaactgttacatactttggcattcttgctatattcagtccacactcctgtctcctgtgattgagttagcaatgcgaaaggaaactaaatcactaagccaaggaaaaagtcaagctggaaactacgtcaggcaaacttgcctcctgttttattgctaaataagatagctacaaagataacaacctacatccctccctcaccatttgcccgcaagaaaactccttacggaaaaaggacagacacaactcaaagtcatccctttgaggctcacctgagacaaatgcataactgattgcttcctctgccctattgttcacgtaaaaatgtaggttcactgagccagacacaattgtgtattcatcggaaggctgatcaaggactcaaaagaatgcaactttttgtctcttatctacttctggcctggaaaccccctacttcgaattgttccaccttactggactgaaccaatgtacatcttacatatattgattgatgtctcatgtctccctgaaatgtataaaagcaagctgtaccccgaccaccccggggcgcatgttgtcaggacctcctgaggctgtgtcatgggtgcgtcattaactttggcaaaatacatgttctaaattgagtaagacttgtctcatatactttttggtttacagcaatgatgacaatcatgatgtagcactagagacaactaaagggctcagaatctttctcacgtccccgtcctctcagggcagtgtgccacccaccaaaaccaagagactgtgaaataaaatctacagaacaggcgcaaggcacactgatggacagtcacggaaccagcagcgacaaacaaaatgcagccagagacaccaagtaacaaccataaataatgatatccaagagtcagtgagtgcttcctatcacatcccttaatccttcccacggcttctgagataggtgttagttacaaatgaagaaactgaggcacaaagagactgaataactactaaggaggtggtggagtcaagatttaaacctaggcactctgagtccagagcctatgttgttaatccctatgtgagaaaatgttaaacataattactgggaagcacaatggttagccagaaaagatgagggagtgggtaccagataggactggaagcaggggaccaagtctttctactttgaatcctaaaaatctcagaggataggtcaagaattcaaaggctgtgggctacagatcctgcccaggcccaaagcctatggctgatgaaacaagggaaccaccatatttaaataagaaaggaacaacctcatggtttaaaatttttcctttcaatttatctacatttcctaattttttaggtttcttttttacaatgaccatgtgaaacagtgaggaggcagggagggagggaaagaaagagacagacagacagatggatgaggacagaggcaggctgactcagaccagaaatttaatgcatccggtgggggtggcatggtaggaggcagga

SEQ ID NO: 3264 - DNA, 4001 bp, Homo sapiens
tacttaagttcaaatactcaagtagaattaggaaataggtagatacatcataaaaacaagcacacagttacttcccacacacaggaaaaatccgctagttttagaggtaatataatatatattttgcaagaagtattccttttcatcacaagcagggggaaaaaggaaacagaacaatcaccttgctgccccctgaaccagtcaggcttccctttcctcttttgcctttgaccctctggcacaatgcctgttgttgttttttttttaaatgttgattttatatttaatactacagatgacagaaattactttaaaaaagtcattagtgacagttatagctaccatcagattagttataattaattagctaattttttagaaaaagattttcactaaaaagtgttgatgacaagaaatatgtaagtgggggagtatctatctatctatctatctatctatctatctatagatagatatttatatgtaaaagtcaggccaggcatgactgatgaagctgatccacttccacaaatcaacctcacacagcacaactgatatcttgctttccattattcaagtatgcaaaacaaattgtttggtcctaaaatgcagcaatgtataaatccaaaaatcttcttgagagttcaccaagcagtcaaaatattggttactgtattattacaattccccagttactgtcaaacagagctctctgtgagttgtgaagataagtgacatctgtaccacagagcacggattatggaagtagagaaccgggtcagttaaattctcattaactcttacttgacaaatttgggatacgcagtaattctaagctcacaactttgaatgaggtcaataatcttgagctggtctgatggctactctgcattttcttaaaaaaatgtgtttgctaaaacctatttaataatataaattagcctagctttttagagttaacagtatgttctatatgtgtattgagctgctacttatacgatatatatatttattcattcaattaagaaacccagttagcttacttcaaattgttgattattacacaaaacaaaaatatttatctttaccaacagtctgtaatttgtttttttcactgtcccaacccatctgccccttatctttgggccgttttagactgcagaatttttctaacgtaattactgacaatgacaacactaagcctcccttgcggacgacatgatgaaaatgcagttagttaccaagtgatcaggaacctactgaagacggggccgccatgctctcacagtgagggcagcacctccctcccatctgcgtgtcgctgcatgtcttaccgacaaggcagtctcctgtctccctaaacatgctgcgctgcgagcccctcggagccctaccaccctggaaaactcccacccaaagtccagtcaataaaattgtatgggccagctcaggatggctcctgaacagacagccaagaacgctggacctggaagagggcactccaggagaggagacactcacaatttcgcataaaagtcacagaactccttgtagactttcacgtcactgtgcctgcgctgcagtttggaaacagccctctcgtcctcggtcccattggcctcgtggacagtgttaagggctgctcgggggatttcttcgttctctgggataatgcaggggcgcgctcggcctgagaaggccatcgtgggtgcttgagagctctgagcacagggatgagaatggcaggacacagagccaggagaaacaatatccaggcctccctgcttcccagccagggtcactcccactgttcccacgcacgtcagcctggcccgccagggtcactgctgctgcttcatgttaagagctcagcagcacagtacacagttacatggcagtcaggatttactgaggcattctggaagttctaaaataacattccacaaagtagtgacacagtctttgtcagagcggcagtcccagtggactatgctataaacactgcaccaggagaccggggctaccttgtaagcctccaagagaaagaaatatccacacgtgccttgcatatttgccacaagacttcatcaacaatgccgtgcttttcactctggagggcataagaggcttttggagaccttgtaaaacatccccctgacaagctctccctgaggctgaggctgctggcacactctgaggagcatttgaaccctgcctggacctgggcttccacaaccctggccatgactgccagctatgcctgatgggtcccttccccaggaggccatgagcccctaaaactaagagctacgtttgacttctatcacctttgctactggtacatagtcacaaatgtactcagtccaatctcagcttcaatgaatgggcacaagtggaaacagacaagggccagtgtttagttataactcttctactggactccagctaacctcaaagcttaggtgagccgatgtttctcagtctctatcatgactaaggaaactgttacatactttggcattcttgctatattcagtccacactcctgtctcctgtgattgagttagcaatgcgaaaggaaactaaatcactaagccaaggaaaaagtcaagctggaaactacgtcaggcaaacttgcctcctgttttattgctaaataagatagctacaaagataacaacctacatccctccctcaccatttgcccgcaagaaaactccttacggaaaaaggacagacacaactcaaagtcatccctttgaggctcacctgagacaaatgcataactgattgcttcctctgccctattgttcacgtaaaaatgtaggttcactgagccagacacaattgtgtattcatcggaaggctgatcaaggactcaaaagaatgcaactttttgtctcttatctacttctggcctggaaaccccctacttcgaattgttccaccttactggactgaaccaatgtacatcttacatatattgattgatgtctcatgtctccctgaaatgtataaaagcaagctgtaccccgaccaccccggggcgcatgttgtcaggacctcctgaggctgtgtcatgggtgcgtcattaactttggcaaaatacatgttctaaattgagtaagacttgtctcatatactttttggtttacagcaatgatgacaatcatgatgtagcactagagacaactaaagggctcagaatctttctcacgtccccgtcctctcagggcagtgtgccacccaccaaaaccaagagactgtgaaataaaatctacagaacaggcgcaaggcacactgatggacagtcacggaaccagcagcgacaaacaaaatgcagccagagacaccaagtaacaaccataaataatgatatccaagagtcagtgagtgcttcctatcacatcccttaatccttcccacggcttctgagataggtgttagttacaaatgaagaaactgaggcacaaagagactgaataactactaaggaggtggtggagtcaagatttaaacctaggcactctgagtccagagcctatgttgttaatccctatgtgagaaaatgttaaacataattactgggaagcacaatggttagccagaaaagatgagggagtgggtaccagataggactggaagcaggggaccaagtctttctactttgaatcctaaaaatctcagaggataggtcaagaattcaaaggctgtgggctacagatcctgcccaggcccaaagcctatggctgatgaaacaagggaaccaccatatttaaataagaaaggaacaacctcatggtttaaaatttttcctttcaatttatctacatttcctaattttttaggtttcttttttacaatgaccatgtgaaacagtgaggaggcagggagggagggaaagaaagagacagacagacagatggatgaggacagaggcaggctgactcagaccagaaatttaatgcatccggtgggggtggcatggtaggaggcaggaa

SEQ ID NO: 3265 - DNA, 4001 bp, Homo sapiens
ctagctgcttcagtggcctcagacgtcataaaatggttgagagaattaaatgtgttaatatgcataagccattcatgtttggcaaatatgaaatgttaactgttatgacagggttctccctttcccatctctattctgtgcttactgttcctatcatataccatgtattccctcaagtgaacaaagattcctaaccaagacacatcaaagtggcatttaccttgataaattaactatagtccaagatattgactttggtcaaaaatgtgatcttgttagggttccagaattgatccaattcatgtattgagccaatgcatgtattttaatagtgctaaaaatatctctcttcatccaggtattgtatatacagtgtgaataaaacacaacaaaggtattaattcaacaaagttttcatcaattacatgacagacattgttcttagcacttgggaatcatcagtgagtcaaatgaataaaggtgataaggagggctattaaaaaaagtagatggccgggcgaggtggttcacacctgtaatcccagcactttgggaggccaaggtggacagatcacctgaggtcaggagtttgagaccagcctggccaacatggtgaaaccccgtctctaccaaaaatacaaaaattacctgggcgtggtggcaggcgcctgtaatctcagctactcgggaggctgaggcaggagaatcgcttgaacccgggaggtggaggtttcagtgggccgagatgggctgggcaacagagcgagattcagtctattaaaaaaaaatgtagagctgataaagggaggattgtaactgtgtatgtgagaaaacttacattgcaattttaaatagggttgttaggctaagcctcattaaaaaggcatcatgtgagaaaagatgcaagaagctgttctaagcacctgaacacgtaaaccaataaacagacctcagtgaggatgtgacatttcagttgaaccccgaaagataagaaaaaatcacacagagtgagaaaaagtgaaaacaaagggatgtccaaaaatccctgactgccagcttattgatttacaaagagaactatagaccatctatcagatattcagatgagcctgtgcaattattcactgtaggtctggtgacaagccaactcttaagtttgcttggtgaatacataatcagaaaaggactgagttacatgatatgaacgtctgacggaatgggctctggggaagacacttccttaactcaggagagcccctgctcttaagccgggataccctctctcccctagagaaggcgtggattcatctggcacaggtgtgcccctctttttttattctatgctccagtagcggatcagaccccgactgagtaatgcacggtatttcaggatatttcacagtcgttgggatagtgtcaagcctttgaagttctggttaaattttgttccttcaaaatcactttgaatctttctactctcaccctttaatgactaattttttgaagtttttcctcggaagacttccttaccttccatgttcttgggacacttcgctacctctgcactgccaaacacggctccccatcactgaactgaaagcgaaaacagcacaatcccatctatctttctaggcaggcgcagcttcttcataagacctcgccaagaccctattattttgtcccctctctaatgatatacaacttactcagaatctcattacggtcgtgtgcatgttttacttcgcccttttggctcccagggggcgtgcacacagctagcgtccaacatgttttacgatatttaccctccctcctgtgttcgggatcaaccgttcctaacagtgaaattaggtcgtcccaagtgctgaggagaaagtgtgcacacaagaggcttcaacaccggcggaggcgacccgcaagtcctgacccaccgccagaaacaccgcgcgcgcccaagaccccacggccgcccacgcgctacggcccgcaacatcccggtttgaagcgtttccgcttcacccacctgcggcttccggtcgtacccacggcctcgtgagggctcgagctggaaaagtgcgtcatacgaccccgagcaaccggcaggccttgcgcgcgatgctgccccgccccctgagggccggccccctgaagcgcaagagaaggaggggcgcgcagggatcgcgcctagtctctccgcctgcggagccgtggggtcccggcagcccgcaggagtgctaagtaagggtccttcagggcgggaaccaggttccaggcagggacgcaggctacgttcgaataaaagtaccgaaggtcataaggccccagttcagatgggacttccccgcgtgacagcacagagataacggccagccctgggcgaaggtaggagagcgggcgtgccaggttggaggggtcatttcgtggagcgagtttagggggagcccccagaagcccagagcagtcaggtcacacgacgggcaggaaggagtaccagcaaatactttttattgagcatacaggtattacgctgggtctttacatatctcctccaaataagtgagtccaaatggcaggtaactcgaaaggtgagaaattcaagtcagctttgaaagacacattgcatttaaaggaaaaacggtattcgcagatgataatacaggatggagtggatcagaaaacacactgaggctactgatcattcccatttgccaactcactgcagttggcaagaaaactctgtgactccatgagatgggaaattacaccagcagtcaaggtagcaaggtaatagtttcggctaagttttgctgcataacaaactgcctcaaatagtggtttatatctctaacgtgggcaaggtgggtgattcttctgctagtttctcctgggcatattcatgtggcttcattcagcacaggttggctacgctgggcggtccaagatagccttattcatgctctggcaggtgctgcctggctgctagggcatctcaattcaggcctaatcttggaagcagcgcctcagccatattctattggccaaaacaacaacaaagccagcccagagttaaggcgtggggtaatggacttcacctcttgatgaaagaagcccaaagaatttgtggtcacctttttcaaccttgcacagaaattaatctctccttcagttaaaatagaaaccactaagacttgcctcttggagtaagaatcattcagtgttcagtttgctgatgctgatacggtaaatgaccagggcttcatataaagctacaatgaagacataatgacacctcctttctttattatcacaccttttaccaaggtcactctgagtaagtctatcttgtattatgcaggtgggaatgaattttgttcagagttaactgcactaggaattttcctagttattattaaaaacagtcacagaatattgttgctctttgcttatattacttccttctaaattccctttctctgaaatctgagatggtacaactttggttttttttcctagtttcttgatgaagaggttttaaagaatcccattccctcctccctgctccaggacttctgtcccttggttattcttacctttacctacttcttcagcttctccactggaacctttcaagtgacactcaaacatgctgtactctttaacaatcctccagtgacctcatttctctttccacttgtcatcctgtctgctacccttctgagccaagcttcttggaaaaactgctatacatccagtatctactttctcacttcccattcattgtttcaacgtactccaaaatggcttttccccattattccagcaaaagtgcttttgctaaggtcacgggtgacattcatattgctagatccactggacttttcagtattcatctaagtgttcatttgactacctcaacctggagattcctgtggacaactttgacattaccctgtcaactcctcagtcccttttgccaggttttcctccagcctcactgccaa

SEQ ID NO: 3266 - DNA, 4001 bp, Homo sapiens
ctttcccatctctattctgtgcttactgttcctatcatataccatgtattccctcaagtgaacaaagattcctaaccaagacacatcaaagtggcatttaccttgataaattaactatagtccaagatattgactttggtcaaaaatgtgatcttgttagggttccagaattgatccaattcatgtattgagccaatgcatgtattttaatagtgctaaaaatatctctcttcatccaggtattgtatatacagtgtgaataaaacacaacaaaggtattaattcaacaaagttttcatcaattacatgacagacattgttcttagcacttgggaatcatcagtgagtcaaatgaataaaggtgataaggagggctattaaaaaaagtagatggccgggcgaggtggttcacacctgtaatcccagcactttgggaggccaaggtggacagatcacctgaggtcaggagtttgagaccagcctggccaacatggtgaaaccccgtctctaccaaaaatacaaaaattacctgggcgtggtggcaggcgcctgtaatctcagctactcgggaggctgaggcaggagaatcgcttgaacccgggaggtggaggtttcagtgggccgagatgggctgggcaacagagcgagattcagtctattaaaaaaaaatgtagagctgataaagggaggattgtaactgtgtatgtgagaaaacttacattgcaattttaaatagggttgttaggctaagcctcattaaaaaggcatcatgtgagaaaagatgcaagaagctgttctaagcacctgaacacgtaaaccaataaacagacctcagtgaggatgtgacatttcagttgaaccccgaaagataagaaaaaatcacacagagtgagaaaaagtgaaaacaaagggatgtccaaaaatccctgactgccagcttattgatttacaaagagaactatagaccatctatcagatattcagatgagcctgtgcaattattcactgtaggtctggtgacaagccaactcttaagtttgcttggtgaatacataatcagaaaaggactgagttacatgatatgaacgtctgacggaatgggctctggggaagacacttccttaactcaggagagcccctgctcttaagccgggataccctctctcccctagagaaggcgtggattcatctggcacaggtgtgcccctctttttttattctatgctccagtagcggatcagaccccgactgagtaatgcacggtatttcaggatatttcacagtcgttgggatagtgtcaagcctttgaagttctggttaaattttgttccttcaaaatcactttgaatctttctactctcaccctttaatgactaattttttgaagtttttcctcggaagacttccttaccttccatgttcttgggacacttcgctacctctgcactgccaaacacggctccccatcactgaactgaaagcgaaaacagcacaatcccatctatctttctaggcaggcgcagcttcttcataagacctcgccaagaccctattattttgtcccctctctaatgatatacaacttactcagaatctcattacggtcgtgtgcatgttttacttcgcccttttggctcccagggggcgtgcacacagctagcgtccaacatgttttacgatatttaccctccctcctgtgttcgggatcaaccgttcctaacagtgaaattaggtcgtcccaagtgctgaggagaaagtgtgcacacaagaggcttcaacaccggcggaggcgacccgcaagtcctgacccaccgccagaaacaccgcgcgcgcccaagaccccacggccgcccacgcgctacggcccgcaacatcccggtttgaagcgtttccgcttcacccacctgcggcttccggtcgtacccacggcctcgtgagggctcgagctggaaaagtgcgtcatacgaccccgagcaaccggcaggccttgcgcgcgatgctgccccgccccctgagggccggccccctgaagcgcaagagaaggaggggcgcgcagggatcgcgcctagtctctccgcctgcggagccgtggggtcccggcagcccgcaggagtgctaagtaagggtccttcagggcgggaaccaggttccaggcagggacgcaggctacgttcgaataaaagtaccgaaggtcataaggccccagttcagatgggacttccccgcgtgacagcacagagataacggccagccctgggcgaaggtaggagagcgggcgtgccaggttggaggggtcatttcgtggagcgagtttagggggagcccccagaagcccagagcagtcaggtcacacgacgggcaggaaggagtaccagcaaatactttttattgagcatacaggtattacgctgggtctttacatatctcctccaaataagtgagtccaaatggcaggtaactcgaaaggtgagaaattcaagtcagctttgaaagacacattgcatttaaaggaaaaacggtattcgcagatgataatacaggatggagtggatcagaaaacacactgaggctactgatcattcccatttgccaactcactgcagttggcaagaaaactctgtgactccatgagatgggaaattacaccagcagtcaaggtagcaaggtaatagtttcggctaagttttgctgcataacaaactgcctcaaatagtggtttatatctctaacgtgggcaaggtgggtgattcttctgctagtttctcctgggcatattcatgtggcttcattcagcacaggttggctacgctgggcggtccaagatagccttattcatgctctggcaggtgctgcctggctgctagggcatctcaattcaggcctaatcttggaagcagcgcctcagccatattctattggccaaaacaacaacaaagccagcccagagttaaggcgtggggtaatggacttcacctcttgatgaaagaagcccaaagaatttgtggtcacctttttcaaccttgcacagaaattaatctctccttcagttaaaatagaaaccactaagacttgcctcttggagtaagaatcattcagtgttcagtttgctgatgctgatacggtaaatgaccagggcttcatataaagctacaatgaagacataatgacacctcctttctttattatcacaccttttaccaaggtcactctgagtaagtctatcttgtattatgcaggtgggaatgaattttgttcagagttaactgcactaggaattttcctagttattattaaaaacagtcacagaatattgttgctctttgcttatattacttccttctaaattccctttctctgaaatctgagatggtacaactttggttttttttcctagtttcttgatgaagaggttttaaagaatcccattccctcctccctgctccaggacttctgtcccttggttattcttacctttacctacttcttcagcttctccactggaacctttcaagtgacactcaaacatgctgtactctttaacaatcctccagtgacctcatttctctttccacttgtcatcctgtctgctacccttctgagccaagcttcttggaaaaactgctatacatccagtatctactttctcacttcccattcattgtttcaacgtactccaaaatggcttttccccattattccagcaaaagtgcttttgctaaggtcacgggtgacattcatattgctagatccactggacttttcagtattcatctaagtgttcatttgactacctcaacctggagattcctgtggacaactttgacattaccctgtcaactcctcagtcccttttgccaggttttcctccagcctcactgccaactccgcagtcccctttgccagctaccctgatctagtcagccctaaatgttggagttcctcagatctttatctcacactacattttccttaagcaatttcattcattctatggctctaag

SEQ ID NO: 3267 - DNA, 4001 bp, Homo sapiens
ggaagtagatcagttcatacttttcaacaccaatccattcagaaagcagccaccacagagcctctgaaagctgagccatcatctttttccccctttaatgtcactcaatctcctatcttctctcagtcatgaatcttaccatctctacagctttcacaaggcctttatcaggtaaggaccccaaagcacatcagaactctcactttatgcatgttacagtaaccatagctcacatccattcttcccgttttatatgtgagtaaacttcagcatcgtaaaagaaaaaaattttcctgagttatatcaaaaagagtttgacaggccaggtgcagtggctcacccatgtaatccccacactttgagatgatgtggagggagggcatcttgaggtcagcaatttgagaccagcctgggcaacatagaaagaccctgtctttaccaaaaaaaaaattagccaggtgtggtagtccttgtccatagtcctagctactcaggaggctgagttgggagcatcgcttgagcccaggagattgaaactgcatgagccatgattgtgccactgcactccagcctaggcaacggaacaagaccttgtctctaaaaatatataaatataaataaaaagagtttgaccctcaggcctccggggcttagtcacattcttccttttttttttttctttgagatggagtctcgctctgttgcccaggctgaagtgcagtggcatgacctcggctcactgtaagctctgcctcccgggttcacgccattctcctgcctcagcctcctgagtagctgggactacaggcgcccgccaccacacctggctaatttttttgtattttcagcagagatggggtttcaccgtgttagctaggatggtctcaatctcctgacctcgtgatccgcccacctcggcctcccaaagtgcggagattacaggcgtgagccaccgccccagccgtcacattctttctttaaacaatccttaaagtgtgaagctactccctgtaccctcacctataaacttctttaagaatgaaaactttgtgtctgcaaacccataagcattagcaaagagacagcacagaggcactccaggcatgtaagtgaataaatgattacccttagtagtagagtatactcttgcactttgaattgttttctgtcccactacctacgccttagtggggaaagacttgtgttagttaagccatctgcactggtttgtcatcgttttgtggctaactgcattaattttctggctgataagctgtgcttagagttctgtgaaccctaacctctttcaccaacagggcccctaggctggagaagagaaggtggttctacccagcaacataaatttatcatcttctcatttcgttcaagttctaccccagttcttcctcctgctttatttctagcacatccacaggtccatctggagactggctcattgctagtagccctcaatcactcctcaccattctcaattctctccccttcccaaactcctcctgtctaactccaggcctagtactagtggcacccgacagccctgcctttacctactggaaacttccagagcttggcaggcacacctaactcctgcctttcagacctgtggctcccaaacgcggagggagtctccgtgggccccaccaccgccagcagtttcctccgggccacgaagcccttcgccgcccccgcctctacccctgaaatcaagtcccgaagcccgccccactgcacgaccacctcaccctgggcgcctcaccctggtagggcttcgacagcgagtgctcccgtttcaagtactcgaacgtttgacccgccccgacttgctgtggcccctgcccagaccccaacaaaagaagaaggagtaacatcctggacccatcccgagccgacaaacatcgccgccactgctgccacgacccaaggggtcccagagtcgccgccatctttcccaccaacgacccttcatcaaaagcccgccccgtcgcccaacccattggcccgaagagccatctgccctgcgtcctattggctttcgtcaagcccccgcccctgcaggtgactatatcaccgattggctggcttctgtatcagttgccttgccaacccagaaaaggggcgtagccgaatgcccagcccccccccttatttgcatttgccctgagttccactaggcttgctgggatacgtagtttatttgtattttgttttctgcgtacgagagtaaatttaaagagataaaacgtttcttctggtcccaaacattctatcctctctgcaatagtacgctcctgactgcagctctctgaatcaatttggaagatatagcagtgaaaggagaaatagacaaatccgtaaaatagctggaaaactatcaatttataaaagacttgaacagcactaccaactaacttgacctgatgatatttatagaaactccacctaacaactgcggaagacacattctcttcaaatgcaaatgactcctttgccgtgatagtctgggccatcaagcaacctacagatataaaagaactgaaagcacacaaattaattaattctaaaagccatcacctcctttcctcccttcctcttttttttctttttggtttgagacgaggtcttggccaggcgcggtggctcacgcctgtaatcccagcactttgggaggccgaggcaggcggatcacctgaggttgggagttcgagaccagcctgaccaaggtggagaaaccccgtctctattaaaaataaaaaaaaaaattagccaggcgtggtggcacgtgcctgtaatcccagctactgggaggctgaggcaggagaatcgcttgaacctgggaggcagaggttgcagtgagccgagaccaagccattgcactccagcctgggccacatagagcaaaactccatctcaaaaaaaaaaaaaaaaagagagacaaggtcttgctctgttgcccaggctggagtgcagtggcacaatctcagctccagcctctccctccctggctgaagtgatcctgccaccttagcctcctgagttactgggactacaggcacatcccttcgtctttatccggcaccacaacatgtgtccagactggtctccacgtagccactaaagtgatccaaactatctaaccatggtaagtgtcagggttaaatgagtcaatattggtaaacctcttagaacagtgccttgcgtgtagtaagcactatttctttcttttttcttttctttttttttttgtttttgtttttgtttttgtttttgagacagggtctctctctgtcacccaggctggagtgcagtggcatgaccacagcctcaacctcctggactcaagggatcttcccacttcagcctctcaagtagctgggactacaggtgtgtgccacctcaccttgctaatttttattttttgtagctatggggttgtgggggaggtctcactaagttgcccagatttgtctcatacttctagacttcagtgatcctctctcctcagcctcccaaagtgctgggattagaggtgtaagccaccgcaccaagccataagcgctatttcatcatcatcattcttattaaccgggcctttgatggctcaccatcacctgtggggaggagattcaagcccctcaatttggcacacaaagccccctgccatctggccctggccttattgcccatgactcttttcctccatctttatgctccagcttcccttccctcttttttttttctgcagtccacttccttctggaggtccttctcaaacctctcaggcagggtagattctcctgtctgagctctcaaagtgttccatgcacatctcatatagagcaattgacagatctgtgtttatgtcttcccaatagacttaaccaaagttaacactctcttgctttcctgagcatgaatatatttaataagataaacataattatgagcctactttacaggggatcaactttttaaaattaaag

SEQ ID NO: 3268 - DNA, 4001 bp, Homo sapiens
tacagaacaggaaactaaggctcagagaacttaattaaggtcatacagaagaggcaggagacaaacatctgtagaagatcacacactacatctaaaaagtcagaaatagatgagccattgtaacgaacaaaaacaaataaaagtaaacagtaatcgctctgagagaccatccttcatgtcttttgtgttcctacatgtcttgctggatatgccaaaaatgtaaggccttgaccactccttacccaggtcatttgttaaggctggatttataggaaacaaccttgagagataaggtaatgccttcttctgaaataaagagaaagctttctgtaaaagcagtggattctccaatgtcagaattcttctgtattttcagcctcctgtaattgttccttgcatttaatgagtactcaggaaatgtctgatgtgagaagtcaaggacaaagagtagggtagtaaaagaataggtaccaggaatgaattacccgactattatatctgtgacccttgattattctaaaaaataaaacaatatcaaacacatttaatagaaataacagctaacatttcttagtgtcttctatgttcccagtaagttcttaatgctttttgttgctttaccccttgcaacagcactttgaggtaggtaatattgttgtctttgttctacaaatgatgaaactggggcctagaggcattaagtagtagtttgcccaatgtgtcatagctagtaagtgatggaagcaggctctgaaagctgtctctctggctctgacacacgtactctcaaacacctccttaggaagttactgctaccttttggtaataaatgggagcttttataggatcactggcttccagttttcaccaagaaatgtagaatgaaaaataataccatttgccctagcaatcccattactgggtatatacccaaagaaacagaaattgttctaccataaaaacacatgtacatgcgtgttcattgatattcatgataaagacatggattcaacctaaatgcccatcaacggactggataaagaaaatgtggtacacatataccatggaatactatgcagccacagaagaatgagatcatgtcctctcagggacatgaatgcagctggaggccattatccttagcaaactaatgcaggaacagaaaaccaaatactgcatgttcttagttgtaagtgggagctaaataatgagaacaaatggacacaaagaaggaacaacagacactggggcctacttgaggaggagagtgggaggagggagaagatcagaaaaaataactattgggtactacacttagtacctgggtgacgaaataagttatataccaaacccctgcgacatgagcttacctgcacttgtacccctgaacctaaaataaaagttaagggaaaaaaaaatatttgcaaagaaaagggccttgaatttgcttctgatacatacgcgatataacctgaggaagatcctctcagcaataagactatacatgatggggcaagtgtcaactgcatacatttgtcaggaccaaatttgtagctcataatttttatgcaactgtttttaccttggcgagaatcaatgctacaaatactattccaagtcttagtatatggaaccaaactcaaaacagatgtccagctaaatgcattaaagatcacaagaaaggaattgacaaagctgaacaccatagttcttcattgctaagcatctgaggagcgtctggtagctcccctgggtcagtctttctattatgatttctagaactttattttttcattttttaaaaaattccaggtgttgagaactcaccttttctagtagttttccctgggaacacttggggatctacaaacatctgaaattggaggatgctaatgggcaagaatcaagagaaaggtaattcagagacgacaacgaagtgggaaagaaattacagggtcaaagcgaaagaaaaccaagctgcttgggtaggaaggtgcaatgcaagccaattgtttactgtatcttgtccgctcccagagctgcgcccgagctctcgcgttaactaggcaacatcgttgccacggtaactgggaggcgcgggagggcgacagctccctggactcccggtaacccttacgtgcccggggctggtccgtggggcggggtgagagatgccggaatctcgcgagagctcccgggggccgttgggtagcgtcttcgctgttgcccttagggacggctgtgggcctgctgggggtgggggcccgaagcgccagagatggctgctcagcgagggatgcccagctccgccgtgagggtcctggaagaggcgttgggcatgggtttgacggcagccggggacgcgagggacacggcggacgcggtggcggctgagggcgcctactacctggaacgtatccttcccgtggaggcgcggcccgctgcgctggcgggtaatgggtgttgggacgaaggcgagggcctcccactggcggcgccttttgagccttggggccactccggaggagcctctgttggacttcaaggtgctgtttttgccaccacagtcttcctgagagccactcactgaatttctcgcccttagtagcccagggtgtcctgtacctgttagaagagttgggagaccttccaaggcctcatacttagtaaccactcagtacattttggatggagggttgctttttatgttaagacagcacaacaaattgcttcaaccctcctttcaaataatgggtttcctaaataagccctcaatctttcagaaagccgtcccaataaattcaacggaggaacgttaggagactagggaaagacctctgccattggactttaaggagctgaagctcagaatacccaacccacgatcctgttcgatggtccagttaatgcttaaatgcttagttttgatagcattatcttcctgagtagttccaagtttgactacttaataataaatactaatagtatagttgcttttttttcttgagcaaataaataatgatctggtgagctacacagctcagagatattaggaataaagcagatggtgattagcgatttttatcggaagtaccagaaaaattgaataacaatgtgtggataattaggtccactatttcttgtgtaaggctttagaacttctttcctctagttatatagattaattcctactagggagacggggagggttcatgagaaaaagacatgtaactcctttattcagggaggtaagaaagagatgattatctgttcagttcttaaagataccaaggaaactccaaaatctgccaaatcttatttgtttgtccaactgtaatcctctccaggtttaattcaagatttcagaaatccagcaatgattcatttcgtgagctttgacaagccgattaacctgtcctgactcaggctcagtacacatccacactacagagagctttgaagaatttagctgaaagattaaagaaaatatgtagtattttattgggtgcaaaaacgacttttacaggaatagaaatttgaatcgcttgaaatgaatttgaaagaaatatatgggtgctttagtgtcataaatgaggttttatactgttttcgtagatgtaacaggcagtcttttccagtgatattcctctttaacaacgattttcataattcttcctaagcttatctatatccagtgcccttgctactgaatggtaaccaggcatcttgtaattttgtttgcattaaaattatttccgtgaacacatagtttaattgttaacatgagattgacacaatgaggtaactttttgcaaacatctttgtgaaataaatggtaggagtctaacataacacaactttcagcaatgaaaatcaggtttacttaatgtgcagggagatcactgagtcacacctgccaagatgtagcagtttgcaaacctgtcttacaaagactttttcaaataatcacacttatttgaactttaacacatataagcaac

SEQ ID NO: 3269 - DNA, 4001 bp, Homo sapiens
tcctgcatggctgatatctgctgcaaatcttgaataaatttccagttcagttgggcagcaaaaactcaattagctctaaaggcagcttgtgtttcaggattccgccactgcccattttccccaatatgtcaaaatatggaataggtgaaatcagccccttatgtatagtacatggacacatctgttgtgactacaccatgttcgaactgctactaaatatcagctattgtatgaatttatggtgttgaatgagcaccagcaatgtgttttaaataatttgtgtatatgtgtagcccagtttgttttatattggtcaataaattctaaagacaattttcactgtatttgttttaaaagaaaaatccctctgaaatactggtgaattcaggcagctcttttcttaaggatcctttaagataaagaccacttctgcgatacttgtgttatgttatataaagttattttgtttttgtttttagctagggagaacaaatcactcaatattctgtttttaatgagttagaatgagaatggaaaattagatgattaaggctatatctataatgttttttaaaaatgagattttcatcatgcattccattggtgtgaaaacgaaagtaagctgctgcttggttccagttgtgctgaaatttctgctaaaaatagcacaagggggaaaaaagaacttgatgattacatgtctttttttgtttttttttttttgtatttcagctttttttgttttgttttgttttgttgttgttgttgttgttgttttggtcagtgtagccacagctagaaaggagtaatttcaaaaatgttttagatatatgcttggcacatggttctttaacatttataaaagtagattgtgcataatgacagattttaaatactgtaagcattattagatgatataattgttcttttgctgtaaatttaaatattcatacatttttgtagagttaaaatatgccaatttagttttcctttggtatatattgcctttttggaaaataaatggttaacatttcaaatagataaacaacgtcactattttatgcttaacctccatgtttgtggattatttaaataaatgattaagtgcctatgaatatctccttgcaccaagaaaatgttgtgttcccagtacaattttgttatcaaaatatataaaatagaaacactaaaatatgcatgattttaaagcatttatttttatttatttttgattctgaaatgatttgaggtggattttttttctttctgttttataaaaatgactaaaaatagaaaaatttaaaagtctcacatcaatgataaaaattatttttcagaatatagaccatacccaatacctggcttctgagactggaatcctaagacagtgtgtcagggtgagagaagatggagagaagctgcccactccacagcacagcgcaggatcaactcttcagtcttaaccactaagataatcaaaaagagcatttaattttctaaggtggagaaaggaaggaaggggaggaagagggaagcaagaataaagaagaaggaaaggaaaggaaagggaaggggaggggagggaagggaagagagaaagacgatgctaataatctgttttcataattttattctgaagagactcatctgaaagttcctgttcagaagtccattgatttgcaaacatgaacacctcgctagttttccgcaacttataactgtcagcaagtgtaaaggacatttctagattttgtcccttcttggctttctgtaaaccaagtgtgactccagatacccaactctgttactctcttttcggttactcttgtccacgcacagcatacatttccagcagtaaccaggtactcaagtataacctaataaagcaaccccacccacttcaggctttgatagatccataacttaccctgtcttgcttttcttcagcacctggtagaaacagaatgtgagctctcatgctcagaactgtgctttcgtcttcctcctcagccaaggagactcttaggtaggctttctgttgactcactcattttctgacatcatgaattttttcccccgcaggacagaggatattaatcaccaatctctgcttccactgtgggaaagaggtggtaggtagcccactgaaattcttttgacagaagtctcttcaccaattttttgaagtgaaaaactaggtaaacatgcaaacatctaaaacagattttacagttttctctgcaacacaaaacacctgaacttactgcagcaagcactctatctcctacatgataatatatataaggtggaggctgtgaaatcaacattgtctaaacaattgaggtcagaatttaaaacacccttccttaagactaatgggacctgtgttctcagccctgagcctgcagcttgctttccctatgtacctgtgaaacgttttggcttttaaacaacgacatgaagttaagttgcatatataaaagcacttcaaatttcttcctttatttatatggaccaaaggggtggagaatccattttttcccacatagttagctttttaaaactctagtttccattagtggatttagaatcatttgcctcagcagctcaccaactcctcctttggatattctttcttcattttttggttttccttccacctcattggccattgatttccagtttcctttgctaagctttcccttctttctcccatgtcttaatattggagtgcctcgaggtgcagtccttggccttctcaatttgcattgactctttggtgatctcatccagaagcacatatttcaatgtctccgatgctgatgactcccaaatatctctatccagttcaaaaactgcctacttgacatctacacttggataactaatagacacctgaaacttggtttgtccaaaacttaactttttgccttctcctacaaatctgttcaacccagagatttccatctcagttgatggcaactccattttgccagctgctcaggcctaaaatcttggtatccttgaaatctctctctccattagaaaatctccttaattccaccttcacagtgtttgctgaatctgaccacttcttaacacctcaactactcccattctggtctgtaccaccaactaaatgatagccggagtctcctgactggtttccaagttgcttccacccttgcctcctccatagtctgttctcagagagagccttaaatttatataaaaaaattgtttaaaagagaaccagaataatgatataaaatgtaactcagatatgtctctcttctgctcaaaactatccagtggcttcctgttttgcataaagtaaaaggctatgtccttataaaagccaacaacactgcatgctgatctggcccctgttaactctctgacctcctcccatacaatgtttccccttattcacttcatcccaagcactgtgtccatgcctgaacaagccaggcatgtctttggtttagggcctctacctggaatacttgttcctagatgtctacatgggaactcattagccttgatcacaactaaattctctatgagatcccccatctactctttgtaatactgtagtctaatttacttagttatcacttttaatgcttagttgtttattgcttctctctctctacccctcacccctaccaagcaccctcaccccttgaataaaaggtactgcaaaacaggaatcttaatttcattgtgatatactgcaagtatctagaataatacctggcacgttctaggcacccaatacatatgtgttgagtatcaagtgaatttccatctttcctttctattggtgcattgtattccatgcaagggacttgggagttggtgggaaaagggttggaggcagagagagaactttaacatttttcttgttcttctttatattgatacagtttaacctccactacactttttaatgtcctcctactaatagggttatgtcatttatctccattgcaaaacta

SEQ ID NO: 3270 - DNA, 4001 bp, Homo sapiens
tctggaatacgtgtgggcgctggtgcgggggagagggaatggcgacgcggaagagcaggacagacgcggagggtcagagagcagctttattaagcaagctggtggagggctgtgggtcccaccacccccgggctcggcgccagggcggaaggtccgggggtgccgttcaggccacgtcgacgcgagcgaagctctggtccatgcccaggctgttctccacgtacacctcgtacttgccgctgtcctgaggcgtggcccggcgaatggtcagcgtcgtggtggtgctgccgatctcgaagaacaccctgcggaagggcggcggggaggagggcggagccgtggtcagtacacgggcgcactgggcggggctccttagccagctctgttcctcgctgcccagtccccgcccccgtcactccagccagatttctgggctcagtcccacccaggttccagccccaggccctggccgtgccgcaggtcccggccctcgcctgtcatcctcctcgatgtcctccccgtccttggtccagcctacgtcgggcgcaggctctcccaggatctccgcagtcagcgtcacggtggtgcctttgcgcgccttagtgttgtcgggtcccttttgaatcttcgtcgggactagcggaaggaaaggggagcgaaaccccgtgaaggacccggagatgaggcagggcatcacctcaccggctaatacccggcactaaatacagatgcatttaaactcgcagtgtgacgttgagcaaatcattagcctctctggtttcatctccttggctgttaaagggacttatccctgcctctcctacttctcggggtcgaatagaggatcaagagagataaggcgggcgaaagcccctgaatgttcacacatctcgcggtgcctcagagaccgctccgggtagtggaaattgccagagttgggagccagaagacccgggtccaaccctggctctgcctctggcttgctgtgtgaccttggggacccggagccgcgtgatggaagtccacagctgactgctcagcccgggtggagctggatcccgaggtagggaaggacgcacttggctggcgcggcgatgcgccccaggccgtgcccagagctgggctggcggggaccctgtagctaggcccagaggtaaacacgcgcagctggaccgggctgcgggctctggctgagtggtgctggtctgcgccctggcgctgcgcccggggcgcgcgtaccttccacgaggatgcgcgccgagtcggagcactggccgaaggggttggtgacgttgatgctgtactggcccaggtctgccagctcgccgtcgcgcaccaccagtgccaccacgtcagggtcctcgaagacgtagcggtacttgggaccgtcacgtagctccttgccgtccttactccagcggatgaatgggtccgggaaagccgaaatgcggcaagtgagcttggccgcgctgccttcgatcagcaccacgtccttcagcggctccagcacccgcggcggccccttctcgcgcagctccttccgggacctacccgcgggccgagtcagggcccagagttcctaagacaggcccggccacagcccttaccgcgagcgcaccatctcctacctgccccctggaccggccagacccctaaacgtgtggcttggtagggaagaggactgctcctgaactgctgccctgataggatgatgcattcctcccggccactcccccatacctcagtaacgaccctcccctgagaccactcattctaaaggctcctgacgctgctcagcgcttactcaaaccctactcaagagtgcgctctctgcagctcccttcctccacagggctccggggttccctctcacctgtggccccggtaagaggcctggatacgaatggccgcactctggacctgtgggtcattgatgtccagggtacatccaggagctggggccacagccactggctttttggcaggagctgctttagacatctggggagtgggcgacaaatatgggggtccaggttgagacagaggctcccaccttcagcccttttcctccctggtcagaacattcagggagatggaggaatgggggtgtctgcggcttctctgaggatcagactcaccgtggaggggttgacctagggacttgagtcgactggctggattgcaggcagcacagagcccttctggatggcacagtaggggtgcaggcaggtgctcagccctgggcccggttttatacatcgctcccctccttgccttgtttggcgtggttgccccaagccccccggggccccatccgcctccctctgactcaggcaggctctttatttagcctgtggatgcctgggatgctggctcagccgctgggctaggcccgtggggagaaacccgagcagctctgaggtgcaccttgcgtcagcacctggacagctggacagctggatgctgccctgtcccctcccagggcagggggtatccatcccactcccaggaggaccagattcagcccctagctgacaagagatccagcttcctgctggggcagcttttcaatcaggttgggctctggatagtcagacaacacaccctgttggttaaggggtttgagtgtttctggggtttccctgaatacagccagagtagcatcggacttggtcctcagggcccctacagctaacggcaacagggccacgtggctgtcaagaccaatccagaagctccttactcttcccctacccccaaccccaggagtccagggttgtcacttccacactgtgccccctggcggtaaactgagataaaccgggaggggacgggaaagatttttgagaatagcagcccctccatgccttccccatccccactcactcccctcgatgtcacatggtgggggctgtttagactgcactgtccttggagattagcaccactactggccccaaccctaggtctgcccaattcctttttgggggcataaattggtgcataggggcatcagaccacctggggtgaaggggttcagttaacccctctggggattgcctggaggccagtctgcccaggccgggcaccgggcagaagcattgcttccattcattggaactacccgccctagtgtgggggcactgtcacgttttgatcagagcaattttgacatagctctgctgacataaattacctttgctcctccgggtttggaacaagcagttcacatgccatttccaatggagatgggaagggagctcaagatcagagcggggacgggagaggaattttaccatttatcaagatatgagttcaggcacctcatttttatacaaaacacttgcagtgtgtaggggattggagattcttacaggcaaactgtatatcttcatcgctaaaatgacaggtaggcaaggtgtcgttctggtcccttccagctggctttaacatcctgttattttatgatgatggggcttgcctcttccctggggtcctgagaagctagagaggctgggctgggctgggcaaaagggttgtctgggctggagccaaggggccctcaacctccatcagcaacacagcagtgacaactctgtctaccctggtcagaggctttgttccttttactttgccaagaacagaattttgaaggtggggatgagggaaacatttcctctggagacaaggaggtctgggtccctgccaaccccccaatccctcgtccccaacctcagggcagagcagctcagtcctaggtcccagtgaccattctatggcacgggtgtggctagaattgaggtgctttagcacccagcagacctcctaacttgccatgtggacaagaaggtccaggctggtgtgtccctcagccctaggaaaatgctggacacagcagactagagcactcccagctggtgctctccatgtgctctgatatgtgctgtgacatggagggcaaggggtgtgagcctgtcctagtgtttctttttgagatggag

SEQ ID NO: 3271 - DNA, 4001 bp, Homo sapiens
cacatttccaggagaagcactgaggaggattcccagcactgaggatcagcttggctaagagccagcaagtctgtctggctatggcagaagaaaggagatacacagcacattcccacaatgagcagggagcaggtgaagctcaaggggcggtggatccctcctctgttcccaggatcagccatggccctaaaactgcacaggatggaaatatttcttatcagtccccgcttgtgctctgctcagtaaagaaaataagtatgcccttaataaccttacttccagcaaaggaaacacatcattgtcacaaagtagggaaatcttagccaagctcccatatcacaagctccgttctatctaaaatgactcattgccaggccagggagtgaacataaatccaagacggtcaggccaagacatattccctcctaagatgtgttcctttacaagatgaataaattaatctgctaatctgtttttctctggtacagaagaatgtagcctaacagcatactaagtgaacatttaaaattttgctgcatggctttaactattccataatatcttagcgaaacctggctctcctaatctaggacttatatataattaagaatttaaatatatttaacctttagatccattcctgttcactgtgacttttaatttttttaaaaaatacatcagaattgtcaaatgttatagtaaaattaacaaaagacaatgtgctaaaagtatggatgaatatatgtggaaacaaagagacatatattcaaccaattagagtagaatcaataagcattttacaaataccaataatgttctgcaattctgatataactttcataaagataatgttttataatctctctgttcttgctatgaatctcaaggattttttttttaaaaaacgtgactctcattcaacttttctggctttcaatgtctgttgccataaaattgagtcatctacataccactttgaaattgttcttttgttaccacttcggacaggtgcaatgataaacgatgctcttgaaataataataacccaaatgttcactttttttgccagaaaaagtgtatatattccttcacagactatacaaaatgtgtatcacatttaaacagctctaacataaagaaaaaataggaagggcacatacagctcactttcaggtttgtattatatttccaaaccttttagatgttagtatcatgaaagcaagcaaaatacagcttgtgggaatactcttatattggaatatttaatgataacaccataagttggataatctgtctcttctgaacagcagtaggacatgtttaggtactgttaaataaatatttcagaaagtgtctttgaacatgcatgttcctatattgaagaagcatgttagagatacaagattattcaaaaactatttcctctatctttcatatcatgtatgcattatctctacttgaaatcatatttgttgtgtccctttccgaactaaaatatcgaggtacctcaaagggtggttttcctaaaggacaagtctaagctaagttttcagagggcaggactctgtccaaggtactgaagttggcgttatccgggactccctgtctgctggcgccacggcgctcaaattggctcctttaggtccccttctaaattttaggagaggcttcccagaccctggaaaggtgtttctctgagttccttgaacctagagtcctccgtgcaccccgctacgagccccgcgctgagtctcggccccgcacttgattgcgcagcctcaccctccgcagggcggagctgccagggacccactctgtcctttgggccccactcacctcctgactcggcggctctactcccagatggcacaagggcttccctccgcactcacccgcctggccccttccgggttccctcgaacgcgtggagagagttccctcgagtacgcggagaggaaacgctcaggctgctcccgagcgagtggctgtccccagcttccgcgtcctggaggctaccgtgcctctacttaagcagtgggagtgctcggcgcctctccaagtctacgtcaaagctcctggaaactgccgccacctctcgcctccaagtccgtctcccgcaccctcctcttctctccctccccggagaatttcggttcaggaaaccagcgggcttggccacacacactctcattggccttgacccgcacccactctgcacctgccggaattgagcctctaatgcggctgggcttcccgctcccacctcgcgggtgcgtgccgatgcggcgggaactgcaaagttagggcccagctccgcgctggtccaggggacagcaggggttcccgctcaccacacgggcctcgtccgagaataaaggggtgtgagggaagactgtggactcttggggtcggaggagggacatgagctgcctctcgacactcagcaagggctcagaggaaataaggcgcctcctcgagatattccaggtgtgaatttctcctgcctgtagccctgggccgaaaggagaaaaacacccccgagggcagagatgaggatagggacttcgccctgctggaagctccccctgactgttgccaggacaccccgttgtttccagaccctggcctgggtcactcaggagactgggttgctgctggcatcgctttggtcagcacctcaaccccccaacaaccccgctccagatttcacagcagggtcccagctttccaagaaaaaaaaagcgcctgggattccctttgattctcacctcacagctacttactatcccagtcccagattagagccctgtcactgctccagtgctcctctgagcataagtgcccatcttaactgaaacacacccagccaaggggcctgaggcaaaggtcttccctctgcaagtgtttccacgttttgcccctttcctgaaaattccttcagcccctgaaaaccacttgtagtctccactaactgaaggcttttgtgccagctcaatagtatccatggttaccttccgaggggcacaaggctttgtagtaagatttgccgaagccacagagaaccagccccttccccaaggtaccattaaataggaggtctgaagaggagttctggggggctctgagctattcctcctgctcagaaatgatggagtgtacttcagtttctccatgtgtgagctgtatctaatgtctgcttctattcaccccatagggctgtggaaaaagatcaagggtgaagtcttggacttgcttcctgaactttgaggagctcatgcctttggagaaaacatacttcaggacatcatccaggagaagttccccaacctaacaagatagggcaacatttaaattcaggaaatccagacaactccagtaagatactccatgacaagatcaaccccaagacacataatcgtcagatcgagaaagcatttggaggtgactcgtgaatgtctggaaaaacgagttgtacaggtatcctaaagccaaagggtcaggagtgcagtttcaggggtagaagacagtacaagcaaaggcaggaagggagtgctcatcgcagttcatgcttctagggagcgaagtcaaagaaaggactgtagagagggaaggccgaacagaacagaggtaaagatgtgtcccctggtttgggacgtgtcaatagttacattactgttgaaaacattcatatataaacatgcagtgcttactttattttcaagtgcctatgtgttaggcactattttacatgctgtgtatacagaaggaacaaaacaaagtccttgtacgcatgtagcttacatgctagttgagtctggagtgatggaaaaaaattatttatattttaattttaaaattatatctatacacatatatagtgtatatgtatacgtgtgcacacacataatatatgatttatgcttctagtttctatgttgaatggtgagtttacagctatctatcaaaaacaaacacacaactagctaattaaatacacaagt

SEQ ID NO: 3272 - DNA, 4001 bp, Homo sapiens
agttagggaaataaatgactcagttcttcatacatgcaaaggtaagttagttattacaaaagtttttgctgttgtttgtgctgaaagaaaagcatatgcatttaaacattttttaaaaaataaatcactcaataggcttaagaaaaatactttagttcatagttcattgatctgacgttttgatttaagatcaggggatgaatccaggatgaaaaccaaagaaaaaaaaagaaaaagaaagaaaaatatagaagtgaatcatttaccatgaaaaaggcatttccagcctcagctaacctcaactagtttttattgcattatttttgaaatgccaagaaactggctttggccataatacttgctgtccaacaaaatcacagctgttaatatgcaattgcttgcaacaattagctaaacagcattatttgacaaattcccttgaaagagacatagatgctatttaagtgtctagcacactgaatcaagtaactatcagttaggctggggccgcagctggagggaggagagaagtttacaaatccttgtccacagaaggtgtttcacacccagccttaagtttttgaaaaacacacatttgtcctgatcctacaagttcatcatccctgttttcaggaagaactgaactgtggaactggccaaagaggagggggaaaaagccaccaactctagattcatttttaaggagatcaggaggagaggaagaaaaatagaaacgcgtatgtgaaatggtaatgatatacaacatggagaaaaaaataaacatcgtggaacctgctagcaatttccaccaatttccaccaaagcagtgaaccccttaactgacagaaattcagtacaatatacacattaattaacaactccaccattactagggctgctgttgaaagccaaaaaattaactacaatattgaaaaacagaatgcttacaatatctgagaaaaatagagtgaaaaggcaatgttagctaagctcttagctacatccactcttaatggcccccagtatttaaactatcatggattaaagccatgaaaataaaaatttcaatttgaaattttattagcctgttgctaaaatggtcaataaaaacatcaacacgataggctttgttgacatagttggaaaactgctctctcatttttaaaactttatttccacttccccagctttgaagatttctatgttaggaaaagccaaactaaatatactggctatggtgttgtaacaatgctggtttctggaatggtgccatgtcctccccctccctctcctccaactcctttaaaaatatgactatttttgaaatgcagcccgaggagggagcaatcaagggttcagaacaataagcgcccttcacacattcaagttcccagacaccaggtgaacgagcgagctccttgtcgggggcggggccggctgtcctcaccgaattcgcagcgccatcttcctcccgggaccgggccggcttcccttctgccagcgagggagactcgcaggcaaaggcgggtgggggtggcgttcgcttcccacggtggaaagaaccggaggcaaacactgtctggcttagcccgcagcctggaacacaatgtcaggagacctggggctggagagctggaaaagtcccgggcagcctcaggataacccggaatcccgaagtgctgtcttggggaattattcccaagtgcacaagggacaggctcgatttcttggaaatcctgcgatctggggacgcatccacagaggagctgaactgtgccctgtagagaccagttctcgcctccgaccggtctgtgtgcgcacgctcggggcggtgatggtcccttttgagaagagggttgttttcgagtcgggccacagtcactggccatggactcgcggggaaggccatgtcctttctcccctcagccccttccccgttcccggtttacatctcaaggggaaagcgcacgcggggtctcccagcaccgtcaccaccgctgtggctgtcagccaggcgctcgcagcggcgccctttcggccctggggcagttcctgagacttcctgccgctggcttggggatgcgggggtgcagcccgggcccgggccaccggcggcggacgcgcgtggcggggcggggcagaggttgagaaccgctgactgcgaagtccgggtgcggggaagggaagggagcgaggtgcgggggaggcagaggggccggcagcccctaggcggctactccttgtcgtccacgaggtcggcgagctcctggagcactcgcaggcggccgctggcgtcgatacggcgcttctcgcggatgaggtcttccaggctgtgaaacctggcggtgtggaccttgttctctcccaggtgcaccttgagatagtactgctgctgcgggggctgcgtgcctgccggcacctcccctcccgccttgaactcccgcttgccaaagcggcaccaggcggcgaagctctccgagttcgtccagcagatctcctcgctcttgaggcccaggtggccgcaggcgttctgcaccaccagctcggccaccagcgggcggtagcggtaccagctattcaccacccggcccacgttggccgcgcccgcctcatacaggctgtcctggcggatctcgccttggtgcaggtggatgatctgcccgccgcccacgtagacggcccagtgcggggcgggcgcgggcggctccggcgcgggctgcagccacagcagctccagcaggtcgccgggttcgcagagcgctggcagcgcggtgaccgcgtagacgcttaggtcggcgccctgagggccaccgctcactttggaaaagatgcattcctggccccgaaaggcggaaaactgagtctcgttgaggaccagctggtgcagcaggtggtggtggtggcggctggggctctccgggcagggggtgcaacccgggggggccttcacgccaaacttgtcgggctgcccgcgttcgtccaggtcttcctcatcatccgagaagaagtaggcaaccccgacccgcagttcgtccttttcaatccccgacgggtcccctgtgggcaactcgctgtagttgaggtgggtgatgcggtccagttggttgcccatcaatgaggtggcgaggcgagggccaggagcggggatctgcggaggcacagagaggcagagacaccgtcagagtccgggctgcccctttcggtgtccctccccaagacgtgcagtgcccctgggacctgccggctagcttacgtgccctcaccggagtcaccctttccagccgagtcctccgtgcctccccaggggtacgaggggcggagaagccgccacaggtcaggcgagagcagacgccaccacacagcctccgaccccttccgggaactcggtccaactcccagaagaaaacacccaggctggctggagagcttgcggggtcccggtggggaggagagtgctggctgtggcagtgtgggagacggacacccaggaaggaccgaggggtgggctgaaagggagaagggagcctaaggccagtgagctgggagcaagctcccatttctgtccccaccctctccagcccacctcccagttttgcactaggttgccttcctccccttacagcggctcgcacaatgacaatcagacacattctcaggcattcacttgacaccagcaacattttggacacttgggagtccagacactggcagcctggtatactggtgtatgtcacatacacccacaatgacaaaccttcgcgacgacacactggcacacttagaccccacacattcgtacacaatttcagctccacgcttgcacgctcgccgttgcacgtacgcccaagcacccgggcacacctgccctcacaggcaggtgcactctgccccttacttctcttgccttgtccccatcagggccaatgggactgcgccagggcgaggctgctctgtctaaaataacctaacaaagaggcaggggaaggatggagaaagccagt

SEQ ID NO: 3273 - DNA, 4001 bp, Homo sapiens
agaaaaaccaaatttccctgaaaatagaatatagttatattgtagaagtgacaattgtcagcatattgccagtagtggaagaatgtggtattggcatgtgtttgctagttggtttttggtttagggaatattctagagacatccaaaagacttaatgcttgtccagctgcttctatatagtgccatagtctaaacaagtaattcaacaaaatgctttgaaaccacattacttgctcattaaacatttgaaatattttcacagaaattaaatatgaggtactgagaatgtacttgcacagttatttacatatccaaatatttgaaacctcttccagaatctagatccctgtaataaactgccttttaaaatgctgccatggggctgcgtgtggtgggtcatgcctgtaatctcagcactttgggaggctgaggcatgtggatcacctgaagtcaggagttcaagaccagtctgaccaatatggtgaaacgctgtctctactaaaaataaaaaaattagctgggcatggtggtgtgtacctgtagtcccagctactcagtaggctgagataggagaatcacttgaacccgggaggcggaggttgcagtgagccgaaattgtgccactgcactccagcctgggtgacaaagcaagactccatttcaaaaaaaaaaaaaaatgctgccatgtggacaggcagttaaatatgtggccatacatggtggcaacaaatgttctacacctttattatccagtagaaatatgtaagctacatgtgtaacttaaaatattctaatagacacattaataaaattaaaaagcaggtgaaattaattttaatagtatattttatttaatgcaaaatatccaaaacattatttcaatgtggagtcaatatgaaatattactgagatgttttacatcttcatactgttttctaataatatatgaattattgaatgaagtacgtattttacacttacactgtatcagaatttggactagccacatttcaagtgctcttggacagcacaggtctattattctccaggcctcagtcattttctgaaccaactggaggcaagaaaacgagtgtgtcattgaaatagtgtccaaatgccctgagccggtacaggccatacatcattacttccatcttttggggggtcagtccattgaaagtaatagccatatctgaacagcagccttctactacttgctgagggttattagacaatgcctcttcaataagctgtgcgattggttttgtattaaatacatctcttccttcataatcctctgcattttctgcatgaactcctgcatatttcaggcatattgccagctgcttatcttcagataacttccaaatcacactttgatctgcacaggtctcagagttatcgagaagtctgttaagtcttttcatcaactctctgcttaagacaatccctccttccacagtcacgtattcgaggtctccaaatataacagtgtggcccagatagaagggctgggatgcatcccttgtaaacaaaaggtactttaaattttcaatgacagcaaacgtagtgggaagtgcaaggaagaaccagttgtagttgtcaccatacttttcaaagacgtatttgtaagcggtcctcatctgtacccacctgtcattactttctatattgaacaaattatcatttttagtatcgtagagctctgctttgtcacagtgtttggtccaggtctctttcagtacagcccagtaactctcatcttcggattctccaaagatgatacagaaaacacgaatacttttactgagctccaagagtatcacttttgaagtgtttaagaaatcgttcctgttaggtggacgaaggtgatggtgctcgtggtcttgagtttgacctctgtgtcgaatgtgaatttggccaaacatagttatcaaaacccaggaaatgctcccaagcaacatacccttaaaaaatgatgtcccactagcggaaaccattttccaggcgttaggacagtgtgccagggtcaaaggcagcctgggaccgggtcctggggtcccgcgccttccggagctggcggctgcgctcccggttgggccactctagctgcgggaggtcgcttctcggtggcgtagagaagggggcggggcaggagcgggacgcggcggccactgcgggtggggtccgggctgctgcgggtgagaggtataccaggagttctgcacgcctggccttccaaccagcaataaagttgaaaatgagcagagatgagtcacagacggctctaaagtgagccagacatcagcactgagccaaaaagaataaaattgagttttacctcacgatttgtgtattcagcccctggtacaacacatcccgtatgttgattagcatggggtccttcttaaggcttttaaaattctccttataatattcgttttagtatttgtgtgtctgtgtgtttaatcaaagaatctcttctatactctctccatcagtctgtaagaatgtaaaactacccagagtttatttaaacctagcacccacggagttcatgagaacacaccacttccttgatgtcattatgactttttgatcaagcggtcaaataggacatttgaagcctttctttcctcttagatttattttcttgttcttaatatatgttaatccataatttttaatctacaatccactgaagaaaattctattgatgaatactcttgaggtatatatgtagtccttgtattaaaagtatcgaaactctggcattttgatcaacttttaaatatgcaaagagcctttaatgtgctaactgtatttaactcatctccagtgaactagtttaaaatatccaaactgatgatgactttatgagtttttttttttttaattgatcattcttgggtgtttctcgcagagggggatttggcagggtcataggacaatagtggagggaaggtcagcagataaacaagtgaacaaaggtctctggttttcctaggcagaggacccttcggccctctgcagtgtttgtgtccctaggtacttgagattacggagtggtgatgactcttaacgagcatgctgccttcaagcatctgtttaacaaagcatatcttgcaacgcccttaatccatttaaccctgagtggacacagcacatgtttcagagagcacagggttgggggtaaggtcacagatcaacaggatcccaaggcagaagaatttttcttagtacagaacaaaatgaaaagtctcccatgtctacttctttccacacagacacggcaaccatccgatttctcaatcttttccccacctttcccccatttctattccacaaaaccgccattgtcatcatggcccgttctcaatgagctgttgggtacacctccaagacggggtggtggccgggcagaggggctcctcacttcccagtaggggtggctgggcagaggcgcccctcacctcccgcaccgggcagctggctgggcggggggctgacccccccccacctccctcccggacggggcggctggccgggcggggggctgatctccccacctccctccaggacggggcggctggccgggcggggggctgatccccccacctccctcccagacggggcggctgccgggcggaggggctcctcacttctcagacggggcggttgccaggcagagggtctcctcacttctcagacgaggcggcctggcagagacgctcctcacctcccagacggggtcgcggccgggcagaggcgctcctcacattccagaccgggcggcggggcagaggcgctccccacatctcagaagatgggtggccgggcagagaggctcctcacttcctagatgggatggcggccgggcagagatgctcctcactttccagactgggcagccaggcagaggggctcctcacatcccagaccatgggcggccaggcagagacgctcctcacttcccagacggggtggcggccgggcagagg

SEQ ID NO: 3274 - DNA, 4001 bp, Homo sapiens
tcttcctttcagctaaatagtgttaacaggtggtggctgggtgaaggcaggagagtgcctgttgctggccttaggcctcagataaataaggaaatgactgaatgaacaatttaaaactacacacactagtcagtgtaactatctagtaagttaaatacgccatgacatctaatgatggcctctgagacagagagcaggctagagccggagcgtttgacgtgattacagcagagtggaggcggttccttcctggctatattagctgaaacccaaagcaaatcttgccccagcacaaggcacccctttctgcgcctgtagtgtgtcagctatgtgcattttccttcaggatgagcaaaaatatttcgtcatcctccccgctcctcaacagcgcagaagatgccgaaaagcaattacaggaccttacagagctgctccgggggccgcgggaaacttaccagcatcctggaaaagacaaaaccagtggggtgcacttggcctctcctggctgcagggtgtggccgcccccacctttcaccttcccatccttaggaagcaaagtgacccctaagcctagacaaagctctcgaaagcccaaagcctcgggcccaccggccagctccccaccccgctgctgggccggacaggtgtaggggaggcggacccgccccgcagccgactcacccagctccagggcctggtcgcacctgagcagcgcggcctccggctgctgctggcgctgcaggctccgcgcctggcctgccagcctgcgcagccggcactcggccgggaagcacttctccagcaggccgctcagcaccacgttcacgcgccgcacctgcggccgcgcgggccctggctccacgcagcgcttgcagactgtgagcccgcagggcagcgtcaccggcttatgcagcagccgccggcagcgcgggcagccgagcaggtcgcggggcgcgcggggctccggggccggccctccctcgccgggcgcctcgggctcgccgcccgggttctccgcggacagcggccggtcgcgcaggcccacggcgcgcaccaggccgcccgccagctcttccagctcctccggccgcagcgccccgagccgcgcggcgccgcggaacgcgcccagggcttcggggaggcggccggcgcgggccagcgcgtcccccagcctcaggcacaggccgcggtccggctgcgccagcccggctagcatggagcgaaagagctcggctgccatctcgtagtcgcccgcgcggaaggcctcgtcgccctcctctaagcgctgggcgatcggctccgcgcggtcgcagccaggacactggggcggcggcggcggcgggaccggctcggggctcatcaccgcggggctgcgacgacgcgggtccggagcgaaggcgcggagcagggaggatgcgctgctgctgggaactggccggcgggagcgcggtctcagccctcgccagcagccacgcgcgtctgggggcggcgcgctgcgagcggctgagaccgcgggcgggggcgggcgcctggcttgggcagcgtcctcagcgcggtgtgggcggcgagccccgcagggctgcaatcgttccggggtgggggccgggacaggcaccgcgggcgcaatctgagcccctgcccacgcgcagcggcctctcagtcccgccggcttaggtaacccaggtcgctgcggtaacgcagtgaccgcgctccaggtccgcgtctcttgcgatgcttcccccactcgcctgagggctcctgcgcgactgcgcgcgcgtcctctgcctgccgcctccccgcagaggtgccggggccctgggagcaggtggccttggccgcgggctgctggcgcgccggcaccgcggcacctgctcttccccagaggcctggccgcccccacaacctgtggctccgcttaagcaagaacccaggaaaagtcaccaaacgcatcacgcatctctagcttcgacttaggaaattgtcctaaatgactggggaggctgaagtgggcacccagaggccccgcctcagcgagcttcttctcttaactctaggctgaggcctttgagaactcattttaacagagaacgtggagggccaagagaaccagataccaggaggaggagggattcgagaagtggacaattgtattgtgcccttgattaggaagcagaaatagaattagaaatagaattctaattaatagaattagaatagaaatagaaagggtgccctagtatggagtactgcagacataagttgctggggagagggagctaaacgctccgttggtgtacaagcaaggtttaaattaaaatcctctgtgcgtattaaccgggttcataatttctcctatatagcctatgtatttctcctatgtagcctgctcccttcttcctgtcgtcacagtatctgttttatcctgtgtatttgaatacaataaaatgcattacaatattctagaattcatactactgttcatatttcaagaataaatttttttaaaaaattggagaggtttttctacatctaaaactgctggctaaagaaaatatacaatacctcgaccacatctggctttgggaaaggagaaatgcctcattaagtgagagaacattttagaccagttcctaaaagggaaaaaggggcaatttttggccagccctctagttctacaataaacaaatgcagagtacccacctccttttccatgaaggatttcccccagctgtctacctaacttaattgataacagtgtactgtttgggtctctttttcattactgaattatttcaaattcactttttcaatcactgtttggatttttatctgctttctttatagaataacaattcacttatatttgagggtcatttatccatcaaattcacaaccaacaatcaggaagcaatggggaaaaagcttcagagcacagaccatacagtaaagattgtgaaaccttatgatctcagatcctatttgttcttattttagacaaatatctagcaagagaacagaaagaagcttgccggaggtatgcctgctgagagccagaagtgtttaaagcaaaaatgttagtgtgttgtgaggtttataacacatagaaataaaatatatcacaaatataacacaaaggcaggtagaggagaaatggcaggatactgttgtaaggttctaatgctatatgtgaaatggtataatgtcactttaagaaagactgtaatgagttaaggatgtgtcctctaaccctaaagcaacctcctaaataacacaaagagctatagtttaaaagcctatagagatgaaatgaaattgttaaaaaaaactctattaatccaaaagaaggcataaaaagagaggaaggaaacaattagataaaacaaatagagaacaaatagcaagatggcaggtttaaacccaattatatcggttaatgttcattaaatattgtctaaataccataattaaaaggcaaagattgtcaaaaggaagacccagatatatgctgcctaccaaaaaagaacttttaaatatgaaaatacaaataaggtaaaggtaaaaggatggaaaaagatgttctagttaactctaagcaaaataaatctagagtgactatattgatagctgacaaagtctattacatagccaagaacattgctaggagaaaggacagccatttcataatgataaaggtgttagttggtcaagaggacataatagtcctaaccgcgtgtgttcccaataacagagctttcaaatatttgaagcaaaaactgatagaactgtaaggtgaaataggtaaattaataattatagttggatatttaaatatccctttttcaccataaaaagaacaagatcatgtcctttgtaaggacatggatggagctggaagccgttatcctcagcaaaccaacacaggaacagaaaaccagatgctgcatattctcacttatgagtgggaactgaacaatgagaacacatggacacagggaggggaa

SEQ ID NO: 3275 - DNA, 4001 bp, Homo sapiens
acctgctcttagcgtcccatgagactaactgtactttatttgtacagggctcacctgtatctgggctgttttgtggatggctttgtaggatcatacttttgcagcagaaaagaacttagacatcatctagtcattttgcatacagggcatctgaggctcagagaaagcactgactagcctaaggtcacacagctctgggaagtaactatgttgcttggtttgtcatccatggatttactcaatgctggctgttcttggtgtcgtgtgtccctatggctgtgccatcctcgtgttccctttccctgcactttggccacacataggaaatatctaggatatgcctggatcattgctcacctgttccagggccatatttggcactgtgggtccagcctgtggcctctgtgaagcccagctcccggcagaggatgtgggcagcctgcagcgtgaagtcatcatcgcagatggtgccccattcaccagctcgctgtatctccacgcggccctcgtagggcttcctggggaagccagccagccggaaccgaagcccctggctcccggccttcttctcagggcccgtggaaggggacggagaccccaagcacgaactgcacagcaggcacagcagcagcccccaggggctccactgccagacactgacaggtcgcatggcagggaaggcctgggtgccccagagacaaagtgtgcgtgagagaaacagattgagtggggcccagagtcagaaagagagggagaagtcacgaaagaaaaacagacactgagtaagacagagacagcgagagacaacaggagagaaagagccccagggaccaagagacagggagagaaacacattaaataagggctgaggcacaggtcatagaggcacagcctgagagacccagagataagagacaactatgagagatcgagagtcagagaagggtcaataaaaagagatagagactgagcaagagacacgtagagagagaggaagacccagacagacaggatgtgagaggaagggagactgtgggaatgagagagagaaaaccagaaagacacagaggagagagacaacggatagaaagtgataggcaaagaactaagcactcagtataggggaaccaagcacaccgcgggtgagaaggagagggattgacaagagccaaggggcggacgtgggagggatccagatgaccccatttactcagagggaggacagacagctgtactgattgtgcagagaggcacgtaaggggccctaggcggccctgggatcacagatcccctgaatgggagcccagagtcctaacccagcagattcccaggcagggaaggctggcaccaaagctcgcctggagaacctgctgcacgccctccccaacacgcaggctctcagatgccctgcagggtcaagaggcccaggagggccaggcctcaaggctgggcgggggatggggtagggttgtcccagcctcctgccaacaccaccatccctgtcaccgggcaacgggaggccaggcgctatggctcctcagccaaggccttctctgcctagggctgagaacagcccctctacagcaagcccccgtcaacatgcttcccccaacccaaacaatcaatccaacaaggcagctttgttctgggttggggacccaggggcagcgcctcccggaggagccccctcccttagggcgctcctggcggccctgttcgaacacccgtagcccccgcctccggtatgtgcctcctccgtgtactctgtctcacttgccctttgacaagaatcaaactctcagttgggtggcttcccctcgactccatcccacaccacccgttttccctggtccctccacatcctctccatcccctactcattccctctgcggttagcgtgactccccctaccttggccgagcaggaccctaagggctgggagaagagtgctggtcctggagatcagtcctaggacttccaaaaaaaaaaaaaaatgctcggccaggggagactggacccccctctctcccccttctccgttcgtccctcccacatccccctgagccctcccacattccgccttctccttccattcctcccggccagttccctcctctcctcctctgggtcctccctccccgtggagctggccactgccgcgccccctccccctccctggccctcccggctcgttcaatgaagctttctcttcccgcggcatggaggccaggcctctgcggtcagggagctgacatgcaagcggcggccgggcggcggggcggccccggtggtggcgggaagcggttcaaccccagccctccctccgagtcccgggccagcggagtctaaacagcccggctcgggcggggctgggggcgggcccggccagggtaaataaagccccggaggcccgtgtgggtctctccggtgcccggggcgctttcggggtgatgtcatggctttcactctgacgtcaccttgggcatatgacgtcacgcgcagccaccacgcccagaggccagggccctcgcgccaaaaccgaggactttcggtggagccactggcgcgcccccacgacggcgggtaggggcctggggtgctgcagctcccggctaatccgggggtctccaccattccttctcgctcctctccctcaccccaccgcgacccccccagcggctgccggcgggggccggggaggggcggaaactcctccagggaacccggccccgcctcccgccccgcctcccgccgcagggccaggaagcgcggaaggaaccgccgggggccatggacggagcagtgatggaagggccgctttttttgcagagtcagcgctttgggaccaaggtagtctggcgcatggatgccgaaccttatccgggctagtagtgggtgagagagcccagaaacagggagaggtgggcagcgggctggagagcggcgccgggagttggagagcctgtgactttcccgtgaagttgctttgcacactcccgggaagcgtctgtagtctaggggttctggtcctggggagacggagtggcatcgtccttgggaaacttcgcccccaaccccgtttggaagccccagatcccaaatcgacttgcgccgcaacctccttccccgtcgggacccgggccgcctgcgcacgccactccctctcgagcactctctctctctccctagaggtggaggaagacctgggccgtgctctacccggccagtccccacggcgtagcgcggctcgagttctttgaccataaggggtcgagctctgggggtggccgagggagctcgcgccgcctggactgcaaagtgatccgtctggctgagtgtgtgagtgtggcccccgtcaccgtggagaccccccctgagcccggcgccactgccttccgcctggacactgctcagcgctcgcacctgctggcggccgacgcgccgtccagtgcagcctgggtgcagacgctgtgccgaaacgcctttccggtgaggagctgcggcgatgcggggtgggggcagttacagaggcagagaaatggggctgcctcagaccgacccccgctccccgctgaggaaattacgggtttctcgatgctctctactacagaaaggcagctggactctggcgcctaccgataacccacctaagctttctgccctggagatgctggagaactccttgtacagccctacctgggaaggtagacgcctcagaagcccgggcagggatggagtgaagaggaggagggccgagggcctttgggaagtgggtggatacccaggggcccatggggaagtaagaagtaggaaggccctgagatctggcttccgagtgagtgcttggacactatgctcatgagtcctctgggtccccactgctgcccccgtccctcccccgcagctgtctaatcgtgtatgccttccaggatcccaattctgggtaacggtgcagaggactgaggccgccgagcgctgtggcctgcatggctcctacgtgc

SEQ ID NO: 3276 - DNA, 4001 bp, Homo sapiens
cctgactttcaaaagaaaaaaaaaaaaggagaaaaaggattcctcaattcctcaatctacacataagtaatattctagaataaattattaaatagaagtttgtaagcatttaggaaaaaataaggtgattcttagagacctaaaaggatttcagtaaaaatagactcaaactactatgattttcttttttgacaggattactaaattggaaggctggagaatggctgtgaacatagcatatctggattttatcaaaaactaacagaatctcccatgatttcattacagataagaaatatatagatagataaggtgaaatgttggttacatcattgaagtgttctgtttcttcccagttggtggaaggaacatattttacagctgatgattagaagcttgatgaaaatctacaggaacattttgcaagaagagttagactttggttttaaacatttccacaacaacttttagccatttggatgaagccagaaggcaaagctgccatgtctgttcagcagaggaggctgaggggaaatgacagatggaaagtcacatcaggactcaagataatctcatgggatcatcatggcttttttatggcttctaaattatgtatcaaaacaaatgtaataggtaaacgtcacctatacctgggttggaaaaggctgctctatcagtaggaagcatagggaagacctgaactggttttaagtgatgacaagttcagtataagcagtgggaagctgccgcagtaggaagacagtgtaatccgagcacgcttcagtcggggttgaggatttctacagtagctggcggcatcagaccccatctgaagtagtgtgcccgcggaaacctatccggacatcaagaggcctttcagcaatactgatctagggaaccactgaagaaagggaggatttttggctcgcaaaatagattacagtgagagggtgtaaagatttccaaataaatgcctggctgtcaatggcagtttctcaaaaagatcaaagtagatgttccagggaagggagacgttaagcacaggcagtttccagggtgatgcgtttccctggaagccggactggaccccagggctccagcgcaggtggagaggttgggcctcgccaaaagagatcctgggaaacttccaggacttccaggagccccgagggctcgagcgttcacatacgcgccccgccccggggcggcccgggcagagagactggcgcggtctctcctggcgcccttcggccatcgcgcgccgccgtccccgggcccccggaccctgggcgcccagcctgcgcgggacacacccaggcgccgcctcccaggggcggccgcgtccttactgaactcggaaatcgctggccggcagcgccagcgctggaatcgcccccgcgcctgggagtggcctcgcgaggccggcgcgcgccccggggccgaggaatccgcctgcccgcccaggcgtcggccacgagagagcgggagcctcgctggtccccatttcaggtactcccttggggcacctttcgtggtcccacaagatttcccaactctccagctttgcaacggcctccatattttcccgcgcgtcccgacccccgggtcctcccgtgccccggacctgctcagatgtctcccaaggctattcatcagggagcaccccaatcccggcctgctccgcccggcgcccgcggcccctcacctgtagaaggccgcgttgaccctcttttcgctggggaagcccagcatcccgcagaccacgtggctgttgtgggcgctccagcctttgtcgcacacttgcgaccagccgtcaggaagcctgacttccaccagcccctccgtcacgggcaggggtcgtctgccccacccaacggcgggtcgaattcgcacctcctccacttgcaggtgatgctctacctgggggcggggccacaagcagggaaagaatcccagtggcacctttcatgtgtcccgccgcccttaaggaaccctgcttggtgtgcctgctgtaaacccagtggcgggatgggcccgaggcggcgctgagagagcggccacgatggccgcagtccgcggtgtggactctcttgcagccagcagcgcgtgggatgtgctgtgctcccagagaggattcagggcactaggaaggaggccctccctgtgcctggagcaggagggagcacttcaaaaaggaaatggctttgaaggaggagaaagtcagaaggaagatgtctcaggaaagcaggaacatttgaggagaaggagagcaccaggtgccccaggggtgactagggatgaagctggagaggctcatgccaggtttagccccttgaatgtgaatgctaaaaacctgttggattttacagcatctgggagctctatcatttgcttttccaagtctcccaccaatccaaatgatcccccaggggtaactaccttctaatgtctccgctaaccaccccacagtactctcggctatcctgggtagtgtgtgtgtgtatgtctaggaaatgcagacctcaatgacattggagtccgagaagccagggaggcgctggtctttgcagatgaccccagcatcctcatcgtgcgtacagtcactgttcccccagccccgggaggcacattcagtcacactctgctcggtcccactgcagctcaagttgtccagccagatgcggcctgtggaaggggagatgaagggacagagaagcttggggagggaggatgggggagtaatggggatgtagggaagagtgagtgctgaggcctcccacttggccatgatgatcccatctttctggtatgataaggggtggagacgggacaggggaccctggcagggaataggaagggggcataagattgagggaaaattggtgtgatctggggatactcaagaacctgatacggtgaataaaaaaccaagaatcaaccctgaagttctgatcagtctctacccattcattgatagctacaattaatcaggtacctactgtgtgccaggtgctctgccatggtgtgcacatatgtgatcattcttagaacagagctgccagaacactgttttatataaagaaactggggtttagagaagctgagcaacttgcttaagaccataaagccaatacgtgggggcttaggagtttgatctatctgtgaggcttggatgtctaagatcctttcttcacatccttgcattctctcttgtgcccgccctgtctgtgctgccatatagccccttgttcttctctctgtctgaaacctgttttttttttttttttgaaacgaagtcttgccctgttgcctaggctgaaatgcagtggcatgatctcagctcactgcaacctctgtctcccaggttcaagcaattctcctgccttagcctcccaagtagctggggctacaagcatgtgccaccatacctggctaatttttgtatttgtagtagagacagggtttcaaccatgttggccaggctggtctcgaactcctgacctcaggtgatccacccacctcagcctcccaaagtgctgggattataggcgtgagccactgagcccggcctgaaccctgtggagtatcactggcttcctctcagaattgggcgcagcctcaaaggtcatctgtcctagccaatgttcaaggacatctcattcacatcccaacaggacttacccagttgttgcggagacacctagctcctgccccaccagactgtgtaaccatcaaagtccttgtgactcttcatgactttcccctaccacatctgattcattcctttggtgccaaccagaaaaatccttcagccacacgactgtccttcccatatttaaaaacaaccattacgccattgctatgcaaggtttttactttccatatcaatcccctgattcttcagcaattcctccttgaaacttggcttctgaatctttcacatctaggcagctctcctctgaaagtatttccattttctactgtccctcttaaaacacagc

SEQ ID NO: 3277 - DNA, 4001 bp, Homo sapiens
gacagatggagaccgattcgtcatggcctcagatggcagcctaaggagttagcgttttgtcctgaaggtccgggagagccattaaaagcttctaagcaggaagtaaaacattatgaaacctctgttttattaaatgaatctggctatggcggacatttcatatgccgggcagcagctgaggtagaaagggcttctatgatggtccagatgcttggtgatcaggtcaagctatggctgtgaattgattgccatggagaactgatgaagggacagtgcatttccatcatcttgagtctatgagaatggatcactccagcaataacgctgccagtcaccacacaggctcaaggtggggccacagtagcctctctgccgtgcgttaactcctgatcccgccctttgagatgagagtccttgtagctttatctcttaaatgtccttcttggatttaggaaagctgaatcttcatttgtttccacattcatccataaaagaagggccagaaatccagggagaaaaaagtgattccgggattgtgcccacgtgtttccctgccaggagcctcagagtgtcagaccacactggctggctgtttcaaaaagtctctgacagccaccttttcccaactcagaaacaaaacagaacaaacaaaaaaatccatgactttaaaatcccaatggaattgcgcttcctataaatgtgtgtttgctgattgtttttgcatgattaatggttcccagggttacataaaattctagggacccctctttcccatggaaagggaaagaggatcaagtcaggaaagggttagggggcccagagacagatgtcgcctacttccaaccatgctgtgggctctctctgagtcctggtttaggaattgaagttccggtacctattgttctcatccctctaaaaggaattaggctctgaggattcctgtcaggatccaacttggggagttccctgtccctgaaaatactctcaacatcacaggctggcccatgcatctaatggcaattccttagcattccacatgtttgtttgtttgtttttgtttttgtttttgtttttgagacggagtctcgctctgtcccccaggctggagtgcagtggcacaatctcagctcaatgcaggctctgcctcctgggttcacgccattctcctgcctcagcctcccaagtagctgggactacaggcgcccgccaacacgcccggctaatgttttgtatttttagtagagatgggatttcactgttttagccgggatggtctcgatctcctgaccttgtgatccgcccgcctcggcctccctaagtgctgggttacaggtgtgagccaccgcgcccggccacgcattccccatgttaataaaatattggggggaaaattattgtctacattagaattttataaatgtgaaccatagtttatcattcttacaagaattccttgagaaagcatccagttacactgaaaagctggcaagacctgtctaaaagcccagagcgaaccagcaaacagaatcaaaactccctgtcttgttgcacagctccagtctccccaaattccagtcactgcccccttcagcaagccagggcctgagaagcccgatgggggacacattgacctgtgtcaccgggaagctctggaagcatcgtgattccccaccctccctgcctgccctttaccttagctttcagaggaaagtctcatctccccatcagaaggcacattgtcaggacctggctcagcttccattaacttcagataaaggcccctgctcatgcgaacctgggtctcctggtggattctcctttttcttctgattttctagttctcagcaggctgggccactgctgggtggctgctgttaggacaggcatggctggccccggtcttgcccttcatctctcttccctcctgttccttccctcaggctgcctcctcgcctcccatcctctctccctctccagcttgctttcatccatgccctgcgcatgggctctcctgggaaaggccattgttgggcggcaggattctgatgccccccacggggactatgacatcagcatttggtggtgttcagaggaggagagaaagagatgaagaggagtgagccaggtttcaggagggggcacgcaggagaccagccctggattcagacttgagcctggtccacaccagaggccgatagaaggcttggattacagcaggggcaggttctttcacgaaatcaaatttctccactgatttctgaattcatagcaagctaactagaagagatttttaattcagaatgctgcactccaaaaaactgagaaagacattgagggagggaatatggaaatttgatggtatctcggctaagtttgatattgagatttttgtaataaatgttgttgaataaaaaaggcatcaagatgcctaaatcagagagataaaatgaagaataattacagtatacaatttttgaattattgtccaatcaactaaaattagaagtttttaacatgctaaaatggaaagttattcaacagaatggaatcctttaaaatatgatggaactgccacttaagcatcagaagtctgctcaggtgtgaccctgggagcccaaacttttcacggaacagcaaggaacatccctgtgctcctccttcccagtctctttttttttcagagggagtctcgctctgttgcccaggctggagtgcagtggcgagatctcagctcactgcaagctccgtctcccgggttcacgccattctcctgcctcagcctgccgagtagctgggacaacaggcgccagccaccatgcccaggtaattttttgtatttttaatagagatggggtttcaccatgttagccaggatgatctcgatctcctgacctcgtgatctgcccgtctcagcctccaaaagtgctgggattacaggcatgagccactgcacccagcccgccttcccagtctttacatagatgcttaggattcaagggggttttcttctcattagcaagacttaggcacaatcactatgcctagtaccaaatctctacattcaggaaagaaggtgcaacttagaaatatcagttcatgaaccatgggtcatctcactctttgggaaaacacagagtcaagccaactctcttgatcttccaggcatacaaaacctgccttgcctctccccagtttgaacagtgcttttgaactttgatggaaaagccacatttggaaggtaaattcttacagggaagagattttttttcttttgtctctagttcatggtaccttggatagatgtgtgttcactgcagagtcctacaaagtatgctctaatgttcaaaggcagggtagtaggttctagtaacagcgtgggatttgcacatgctttgttgactttttattatgcaacagcaccttttaagtcatgtgctaatctagcacattcagttgtcctatatgagagtgtgattgttcctaaaatattcaccaatcatttgttctaagtgctaggctcttctgtagtattttcagatcttccttattaaaatttgggagctaaaaaacatccacttgcttctgaaatcatgattctcatcctcaaaagtgtacagtattctactgagactgaaaggggtgttactgaagcctgcatgttcaatgggctacaagattctggcttatgtaacactcccgccagccttagtagagtaagatcatgtagctttgcattttcccaaccctgtgatcttgggctgcacaaatacacacctattagcctgaaacaaaggaattcatttcccctgggcttctctgcaggtcataccacccttgacaaactgcagtccctactggccattacactgcagagccgtgacaatgatggatctcctgtttggaagagaatgacccaggacaaaaggggtgaccaaaccatggtctaagtgtgatatctgaagctgcttaatctgcaaaaggaaacccagtgtgaggaatgg

SEQ ID NO: 3278 - DNA, 4001 bp, Homo sapiens
acaaggggacacgtggcgggtttgacatcctctctgcagcttcattacaaggagccttcggtgaaggaagcaccacctctgtttacaaagtccccaggcttttatgttatttaaactttcctgtatatgctacatattctacaatgaacatgcttttataatcagaaaaataattaatatccaataaaacataagcagaaaacagacataatattaaatcagtattaaatccaaacttccacatctgtagggaggtgcaggagagaacgagggttggactgggccccaggaggcctgggttcctctccccatcttccaccactcccctcccaaggtgctgtgcaaaagtcccaacttcatagcctcagttttctcagctgtcaaatgggaatagcgatgctgtgctccccacctgccaggcttgtgtgagagagatgccatgataataacacctgcgtctcaggctggcgagagagtcagtcctgcggggcatgagacagagcttcataagagccccacctgtccactgggaagatgcgagtgccattctcagtcagcaccgggcaaacttaagagacattccagcaaaggaaacaagacaaagccattataatccctgactaaccacaaaaatggtctacttaatctgagtgtgggtgtcattcacctgcacggggctcccgagagaaggtcctgctcctgtccccatcatgtagagggatgttgtggaccagcctgatgtctctcccctgcaggcctccggtccattcaggaaatacttgcccaaagggccaagctgcaaaacagtgcagaggtgggagcaggatccacgcctcctttctccctagagagccctcactgcattgccgcctggacaccagccccagaaggacctcttgtccctgaaggaaggcactgccctgaggatggagctgactgaagtgacaggcgacaagtgcttggggtccagcagcgggaggttggcctgcctcgccactctatccccctaggatgcagaaaaccccgggtctccctgccccctaagcatgctgaaccctctctcactgccatctcagcctctgcagctgaggaccacagcaggtgtccccgacgcaccatttggagcagtggtttgacacattatcctcactgcagcccaaccccctggcctctggaagaaactgcagggttctgaattctagcccaggccctaccctcgggactcactgccactcagggttattcgaacgccctccactcctgctttgggcttttttgtgaaaataactacttttgtgcaacaacagcaaaaaagccttggctgctaggatgagatctgaaaagggcagtagggacagccgctggctttggggtccacagaagccccacagcacacacagcatgttattggagacagcactggttaaatgaccacattggaggggtcccttcaactctccacacctcgcttcctggcctgcacacaaactggacagacaaggatgttctagcagagtgcctgatgggctggaggcactcacgaagctctgaagtcccattttgaagattaagcaatcactatgcattttccatccaaggcaaagaaaaaagcctttaattcttgaataagttctacagcctcctctataaatgcagccttctgaataggagcctgtgaggagcaagcggggccggtcacctatctggggaagcgtgaatgcacaaacccatcccgaacaaggcgctctgggcgcaaatgttccccgggtcccatcagtacgcgggcacctggggatggaaggaggaagagcaggggctgtgtttgcagatggccacatggccggcccttacccatgaccaagccgagtctggggagctcttgccctgcgaggtctcccagctggagctgcgaatgccgtcctgttcccccatggcccgccctgtatggtgctgtctgcctcctcacccagcatcaggagagaaatgtcccccggcaacaccggctcagaagctgggaggctgggctgggtgacactggagcctgggcaggcggtgcttccctttacaccagtcccgggagccccggccaagtcacaaggctcagcaaaagagcagagtgttgaattgcaaatgctctcctacctggggaccagctgacaaacaacatccaggatgcaaaacttccagaagatgccagtttctgtcacctttgtgaaggggaaactagagaggggggaatgacccctgccggccagccgcggggcactgtgtaccctgccctccccactccagctcctcagaggcagtagggctcggagattgaataacttccccaaggccacgaagttcccgggatgcttttctcctgctctacttgtttccagatttatcctctttgtcttgggatattctgtctccagaggaggttggtggcaggtgtggagggaaagaccacctcgtgctgagtgctggaaatggtgctttctagacagtaattcctccactttgtactctaccactgtctcgcgtgaaaggttctggagtcctctctgttcctctgcatcgcctcagcaccccgcagagcatcaggagagccgggtccagtgcgatgctgcactccccacatggccctgagcacggcacgccactctggaccctctttcccagcgggccccaaggccacctgcaggcactcagccccatccatcatcacgacagctctccaggtgaatacctctcacatatcaggacctgtgctagacattgaagatgcatgccgggtgcagatgctcacgcctgtaatcccagcaggtggcctctaggaagcagagaaggcaagaaatgaattctcccctagagctcccagaagggaatgcatccttccagcatctgtatttcagcctagtgaaacccgggttgcacttctaccctactcaactatcaggtgataaacgtgtattgttttaagccactaagtttccagcaatttgtcactgcagccctagaaaactaacacaccaaagagtggctggaggagaggatcaccctgcggcccttgggtgtcaagggtgtcagctgacccatggcaatcagcccagagggacccagtcagaggaacaaacactggaactgtctctcctttcactcaccttccaccaccggccaagctctgtggaggccagagctcatcgagaacgctctctctctctctctctgacacccacacacacacacacacacacacacacacacacacacatctctgttgttcctatgaaggtaaactctgcttctctgagtcagaaaatcctcctgtgactcaatcctggagtgaggaaaagagggaatgacctctgcatttttaaatattctctctagtccacgtgttggcatcagaccaaaagctgcatagggattagtaactgtcaaagacaattcaggctgccataacaaaataccatagactggttagcaacaggaatttattttctcactgtactagaggctggaagtccagggacaaggtgctggcatggtggggtgctggggagggccctcttcctggggctgactcctcaccatgtcctcacatggtgaagaggggacaggggaggaagagaatgctctctggtgtctcctctttaagaacactaatcctatgggatcagggccccacccttacaacatcatttaaccttaattactcccttactccaaatacagtcacactgggagtttgggctttaacatactaatttggggaacacaactcaatctatagaacaggttattttaatgaaaggttgcatgcaaaatacaagaaggccaggacccagagcacacaaagcaaataggaaacccggggtcctggccccagacaccccctggccagccagaaagccttgtaatacttgacgctattgcccaaaatagagcagctctcacatccctggactcagaactgctgctctccataacttcccacacctgttagagtcctc

SEQ ID NO: 3279 - DNA, 4001 bp, Homo sapiens
gcccctcctcgctggcaccctgtggcactttaaaatcataacaaccacaatgattcgtggaccccatattatgttccaggggctcttttttatctcaattaatttttgcaacaatcctgtgaatgggtatgattatcccttcattttacagatgggaaaactgaggctcagaggattgaagtcttctgcccaagttctacatctgtgagtggtcagaacaacaactgcaaagcccagtgctctgtgccggcctcggcgcatctcagaccacggtggcctcaggaccttcttctgaaatatcttttcatctcctgaccctcccctgccgtctgttctgggccctttgtgcagctgaccacgcaaagagcaggagagcaggacccacagacttccttctggctgggccaggccaattgtccccacctaatccagggcaggctccttctcagtcacttccaaggtcccccctacaaccaggaatccctgcggtctctcacctgaaccctcgcgttctctcccacaccacaagactcagcaggtccgccccttgtccccctgtgcttttctaaaagaaaggaactgctgataagcgagacctgggtgggtgaaagaactcgctcagggtcccacagagctcaggcagagcccagacctcccgacccgagtccagggctatatccaggcctggctccacaggaccacagggccccacatgcaaataggaataataagcgccaaaacacacaacccatgcacaaaaacactcaataacaaatgctggcaaacgtgaagtgctatcaaagtatataatcataaatccaactgttacacctttcaacaagaatctgggagcaagaaaagtgttcatgtgtggatgtgcttatttctcaaatactatacattcctcaactgcttactttcattaataagacccaaattacggaacaaaggataaacagtcaatctcacaatcactacccctagaccaccataccacaacacccccaattaaaaaaacggctacaagctttgatttcccaaaacacttctatcctgtgggaaactgccgggttctaaaacatctccaaattaatactgccagttgtcttagttggtttcctgcttgctgatcaaaaacagggttgacatctgctttctccagcaactactgaccacacaaattacctactctagctccacagcacttaagttactcccaaaacgttacttctcatcctgcattttcctggccttgcccataataaaattacgtgcaggagcagctgacggagctcactaggcctagcacctcctaggctgcaagaaaggtgcagaggcctcgcaggggagagctgtaatatgagaaccgggattccaacctgggctcagcctgccctgccgcccggcaactgtatgaccttgggcacagaggtcaacctccctgagcctcagtttcctcaactgcagcgctggaatcctaactccgggggaaagaaaggctctcatcccagtccccggcgcaaagctggggatgatcgcgcagagccaggacgcacccgcgctggccggctggagctagtccccgcggttctgggactgcgcggcagcccccagtggcccctacgccgctcgagatcagccaagccgggcccacaccgggcctcgcggcgcgtcaggaaagccaggcccgagggatgctcgcgaggccctcccggcctccggggcctgtttccccgcctccctcccccgaaccacttcccgtagagggccccggggacgtagcccggccgtcggtcctcgggccccggggccgagcccccgcctcgccacgcgtcctcagcgccccggcgccgcgccccgccccgcctaacccgaggctgcggcccctgctccacagcgggaggctggaggcggcggctactcaccgagcggcgccgcgcgtggccgcctttgtattgcaaacacccagcccgccgccggctgtcagcgcagctcgccttcgggggcggggcaggggcgggggcagagggcaggggcggggcaagcggggcggtgcgagggggactcgggacgcgctggtggcccggctgctttcagggcctgctggccggccctgcccgctcacccctggccgcctatcttagcgttcctgggggtggggccccttaggccgcctttctgattttcctttccagagccaaactcgtgtgtttcttcaacactctgacttgacctatgccgatgactgggggagtgaggacggaggggtgcagagaaaaggcagccaggtaaaagtccaggtaaaccacccagggcctggccgcgatcacgtcggtcctatgggtcccgcttatcaccagtggcgggatctgagcccgtccttgactttactgaccctcgcccttcgtttcttccaccttaaaggcgcaatcgcgttgacctatcgccatctcttcttagcttctccacgccgggccacccctgtccttcatcctgatggtgacagcctccactcccgcctctgccaagcggtggtccaggtgcggaacggtggctctgaacaggagggacaggcagctccctgcgcctctccagccgggaggcaggcagcggataaacaatgagccacataacgtctggtggtgaaatgatttccatcaatgggagggtgtcatatttgaactgaaactctaaatgacaagaaacacctatgactacaaagatggggaggaggcagggctttctggagagcagaaatggcaggtgcaaaggtcctggggccggtgctgtgggctggagggaaggcaggggccaaatattcaggtcttgtaggccaaggcaaggagtttaggtattatttaaatgttattccaaaccaattctttttgagacagggtcccactctgtcacccaagctacagtgcagtggcacaatctcggttcactgcagccttcaccttctggcctcaggcaatcctcctgcctcagcctctcaagtagctgggaccacaggtgcatgccaccacgcccagctaatttttcaaactatttgtagagaccaggtctccctatgttgcccaggctggtctcaaactgctgggctcaagcagtcttcccaccttggcttcccaaagtgctgagattacaggtgtgaaccaccacgcctggtccaaaaagaattttaaacctgggaattatatgatctaatttacttctttaaaaagtcacccctccactccatggaaaatggactgcaggagtagaagccagcagacaggtggcactgcaggaaaccgggggacatgatggtggctcagattacaggggctactcagcaagaagcggaaggacttcagagagatttggaggcaaaacccacaggcttactgatgaatggaaccggtggaggtgtgtgatgcgatactcaaaggcaagtctcagtgtggagatggaaccgctgctctgctgagatgcagagggccagggaggaggccagcttagaaacagcatcgaatgcggcagcttagtgaattggataagccagcaagcttgagatagatgtttggggacagctgcttggagagctttgtccaggggcgcggctcccgtccatctggtcaagtgtggacacgctcccgctgggcttggggcagctcctatctaggcagcctgtcccatgctgacattgcagacgtgggagctacacaaagagaatcttgcagtttgtaggtgagctacctccacaggggttttctcagagaccagagtttcaagtgcatcacggctgcccaaaactgctgaggttgcaaggccccagaaggaagccctcctgcaccctcccctcccacctccagggaggagctggcctgggaagaagtctactctatgtggaaaggctttccaggaagccagtccaacttcaggccacttaagtttattttttgtgtaaaataagtccattattcaaatgtggagatgggaggtctgaaaatataggacaa

SEQ ID NO: 3280 - DNA, 4001 bp, Homo sapiens
tacttctgattttactttaaccagttaaccattccaaggccagggccagtgccccaaatattcatctagtattttcctccctttttcaccagtgcatctgttgtcaaagattattaaactcgcacagggattcttgattttccagatgaaaagtttatagaatcccggctttttctaattcctacctcctttctcctctgctccccatatccattcccttctaaacttctaccattcaccagctgcttggagaaaaaggaaaagcaaagcgccagactggagagaggcactccaggggtgggttagcccctcagagcacctgggctgtgtcacagaccctcataatcgaaaagtcaatttcaagcaggtgcgtgcgcccggaatcgtcctaaaagcctctctgctgatgacaggactctgaccccagtctgcccccaggaaggggctatagaaacgaaaggggcctgaatcggcgctttcgccgctccacggacctcgaatgcagcaggtaaggaagttaacctgggagctaagttgagggcggacacgcttaacgcggagaacctggagctcgcaaaagctcgcagttgagggccatcgcggagggaagtctttcggaaatgcgaattctcattccaacatctgcagcgcttagaattcgcggacagaagcgcacagccaagtgcacacactcccggaggggacaaaatggggaccgggaaacggccaaagggaaaagctgtgggggtgccgaggactcaggcacttggttcagaaatcccgcaccgcacctctcacccccgcacagggccagcgcacggtggtcacccggtcccggggagcggagctgcaaggacttaagtttcacactcacttatctgcaagcatcgcccagcaggaaagccaaggaagtcaggggaggggagcggggaggtgttctccttacctcggtcggctcccacggtcagcaccctggcaatcggcaataatcccgagagagtgagtaaggcgaggagaaactcggacattgtggtcgcccggtaaggaagcctgcgctggagactgctcggcggcaccttcggcccggcggcggcggcggcggcaggggccgcttggagcctggaatcgagcggcgtcatttacaaatgtcactggaaattcttcagctcaatgagtccagccagtcagccttctcctgcctggagcaggatgtggaaggtggagggatgcgcgcgtgcgggagagaggaggcagagcgtgtgtgagcgcgagcgagacgcccgtgtgtcttgacttttcaatgcagggtacgtctgatcttacatcacgcaagaggggcagtgagagatgccagcggatgggaattcactgattaatcaccgaatccaccacacaccccttcgtcgttcacataaatcacatctattacttaataagaggcatttaacacaacaggaaaataccaccgcgaacggagagcgccacaaatcacaattattttaatccccttgaagggaaagtaactcgaagctggttctgtggggatttgggtctttggagaagggagagacttctgcattggcctgagccagccaggcgcctacaatgctccgcagttcacagccagctgagaaccctcagccgagcacagggctgcttctgcaggcaaaacaaagcttctcccttcgttcctcggaagcttccttcccgggaaggaaggacaagccaaggaacagagcttctcttagggaaatggtttcctcggctctacacagaatcccagtacttcctgaattgcacttttaacttttatgctgagcagcacctggggacaaagaggcaaaatttagtgactcagcagaaacagaaagcaaaacaacccccaaagtcattaaccgttgcgtaagaagggaaggttaatggaaaaggctattgaggtccccaggcagggaacaataaagcaacgaattggcagcgtttttctctggggttctgtctttaaaagggtacttcgagccattttaaacaggctttgagggttttgttgtttttgttttgtgttttgttttgttttccttttccatatactacaggggcggtgtaagaactttcccgagccatcggaggcatcaacgggaatcactggaataataatattagtaaagttgtttttatgaccacttaagtttacaacatgatcatcccagtccctaaaattttagtttgccattacaaagtggctacggaattaaaactcagaaatcttaatagttgtagacttactttcttccttgtaacatcaggaattctcttctaagaacaagagttgaaaaggttttatatttaatattttgaaactggacatgagtggagaggaaaactatgagaagggaacagaactaaggaagagaacgattgaaaagtgaaggaagatgctttaaaagctttatttactttgctgtttgagacttataagtgaatgccagcattactatctacctatttatgagagtaaaattatccagaaatatctttagatgctcctttgaagccattaaaaactggactagatgaaagaacacagagatgactttgcagaacattgtcaataatctgtggatttcacctttttattcttactctgtgattataaatgtattttatgtcactttttccatgttttaaattataaagtttactttcccttgaaaatacaaccattttgtgtttgaaatatgactcctacattcaaaagtgtatgcttaatttttttttttttttttgagacggagtctctctctgttgcccaggctggattgcagtggcgcgatctcggcccactgcaagctccacctcccgggttcacgccattctcctgcctcagcctccggagtagctaggactacaggcgcccacgaccatgcccggctaatttttttgtacttttagtagagaagtgtatgcttcttttcttctaaagttgttacatgtctaatttttcctagatgtttttattatttcataatatagtgtacaatatagaataaaaagatttttttacatattttacttcatactgaaaattcacaaactttgaaatgagtggcagagtttaaagaatatgtgtgtgtgcgcgcgtgtgtgtgtgtgtgtgagagagagagagagagagacagagagagatttgaatgatgtgccaagtaataaatgtttctttctcgagggtccacagacctctgtattgtatgacaaacttattcactgggacaacgtagcaggtgtctttcttacatgatcccattcagtcaactagaaggtcagctattaggagatctgtatccacttaactcttggcaagaaaatgaggagtgcttacaaaccatactaaggacatccagattcttcctcttctgaaagattaccaccaatcgccctccacttcactgcaaagtaaaggaaagcagccaggaacagtatgacccaccaaagacttttaccacatactaaagtgccccaatgctatgattaaaaatcactaactcattcacttctgtagtacgtgcagcagccctagattccatggtcagcttggaaaagggaaaagctaggaaagatcataagagtagcaaatactcaggagattttgtattctaaatatacaacattccaaatacgtagagcctcctaatagcctgttaaatgaattagccagagtaaaaaccatatgatctttttagatcatctggttgacttttttatttcattgagtggaaaaaaatcaaaaatgcattgtctgcacattgtgaccagaataataaagcaaaatagaattcttaagtaatcaccaattaagtcagtaatcatgaatgacataggactcaaaacagttactataaaatagtgatagtaaatatggaagattagttactaaagtataggctggagcaccaataaaaggtaacatgataagcctaatttccactgtgaattaatcttaatga

SEQ ID NO: 3281 - DNA, 4001 bp, Homo sapiens
aaatcctatagctatatttaggacatgagatacaaccctaagcattgtgcaaactctgcacaataataataaaccctctttctgcgttaccaacactgagaaagggtgttcaaaggaaggttattaatgatctctccttgcctctcctgcctttctgaagacttttgcaagacctgtggggtttgttagggtttccaaacttcttcccaggaagtctgaaatgggtgctgctaggagttgctgtataattacttacttgattccctctaaggagcttacgctaagaattgaggaaagaaagcagattaaccatttgaatacatgccacggcccatccacaagccctcccctcactcctccgtaaatgggggcttccacattccccacccatcaaccccaatatgtgatccaggaaaatcaatttattgctttggctaatcctacaacaataggggtttcattttcattgtagggcaattaagttgtccgacgggagggaaggagcaggaggggaaaggggggactctcccatccccacagacagattagtccctgcggtggcagcagcgtcccctctgtctgtctggtggtcggtcacacgcagctcccggctgctacctagcaacgcaaagccagggggagagctcgccggttccagcctcctcctcgcccttcccattcatcctcggccgggtctctgtctctctgtctctctctgtctctctctgtctctctctgtctctctctctctctctctctctctccctctctctctctctctctgtctctctcctctctctcctctctctctctcttctcccgccccagtcgttctcttccctccttctttccttattcctatttgcttctcttacgctctctcctcttcccttcttactagttttattctctccgcttctttctccctctctttccctcttctctgtttctgttaaaacataaactatcggacaacttgagagaagtttaaagcacttcatactagaaactttctgcattcgatccccaaaactctggccatgcagacgggccccattcatcaacacaaaagcccccagctcccagctggaaaggaaaacttcaagaaaagactccagtccctcagccactctctcggccaatcccacctcccggccttatcttggctcgtaaatgatctgtatggtgagagcggtctctgggggtcaccgcgggaccaagtttcgccggtggtgggaggagtgctctggcccgcggccctgggcgcgcgaagggatcccgggaggggcgctgcaggtggaaagctgcgctctgagcagagcccgggaccgcgccgcccagcagagaactccgctagggagggcaggctgcaaacggcggagaacctcgttctcccgcaaagtgctttccaggagcatcggaccaacgcccgtgggaacaaagacagggtctccgtggggtgcgctgtcaccgaaactggcggggctgctttctcaagtttgctgccgctcagttcctggcgagcgaagaggggcgctcccgctccggcttcgcgaagcaacctgagcgccccaccgggagcagctcccgcgccgccgcccggccctagcccctgcccggacgctctcccctccggcctcccgcggacccgaccctgccacagccggggaagtgggggctccacgagaggctctggctgggctcttaccttggccactggccggcgctaggcaggcgacgagagccaggagcagcgtgcacgccactgctgccggcccgcgatccatctccgcgacggtccccggcctcgccgttccttccccgggaggtgggcgcgcgtagcacaccgcaccggcagcgcctctgctagcgaacgctcctttaggtctgcacctccgccagctcctagtggccaaaagcctgcccccacgcccgaggcatcccgttttctacccgcgccagtccccaccctccagacagtgcataaagccctttagacccgaccgccccggaacaagcatgcgggaatccagcgggcaggccccctgccgcccggcccgccccctgcactttgcagcgcggggaggagtgggcactcgaacacacgcgtgctcacacagggacactcacacaggcgtgtgcacactcacacacgcactcatacaggcgcatgcactcctaagtgtcacaccaactgacacagattcactcatacacgccagtcacacacgcgcgcacattccacagtcacacttcaacgccgacatacacagtcccctttacgcgtgcatacaagagcacactcctgtgcgcacactctcacaggcacactcacacgtgcacacgcgctgccctcgcctctccgcagggtttgccccgcacagaagccggcgaggcggctcacggggaaatctgcacggacgcagttttactaaatgagcaatggaaagaaatggacgaggaggaaagtcaagaatagagaagagaaagaaaaaataagaaatggaaaaggaaagcacaaccagacaagtaaaaatgaaggaaagagaaagaaagggaaagaggcgggggtagggaagggaaggagtaaagagcctgctggatggagatctgtgaccttcattcctggcctgatctctctaggctccttcggatatcttggtttcccctgataggatacaggctgctgagatggggtgctttgtgtttttacaaattagagagggaggtggatctttgttggggaggttggatccttatttagcaattattcagcaccacatctacaggtgtcatggccagatcgtgcttcttacaagtctgctcattttgaagcaaaattgaaaaagagcgaacgtcttctccatggttccggtacccttttataagaaggagaaacacgagaggttcagggaacccctagcctcccttctttggggccgctttggacaggctggcaaggggcccggaagccaaaagcacaagtggccttacacccgccctcagcgcacgtcctcagcctgtacgtgacatcagagcccacagggaggggtaaaaaaggagggttgatgcaagttatttcccggtggtgggaaccctgtgtgagaaggggctgtttgcgggcctgaggccatcccatcatctccagctccagcccctgaaccagcgcggcagctagtcccaggctccggatcctggtccaagaagtcaggagccctttccctccagcgaaggggccgtgacgcatggaggagacagccctgaacgcacgtggtcgctggacaggttcccgctgcctcccttccccaggggcgagaacctgccaattactgccagcccctttccccggggcacaggtcgtccggggctctgctgaccccaacagtccggatcgcgtagcttccgtgggctgcagtggtaggcgcagctttaggtgtgggggctaggggagggaaaggataggtgttactttggaaagacaaaaagagataaatagacacaaaaagagaaaacttaggcttaaagaaaaaaaggtggagcgggcagcgttgtgggaaagagtgggagagattcctggattgggaaatccagaggtctgtgctctggccaaagtcactggttctctatttgcctccctgcatagtgttgggcgctgtgcggcgcggaggagacaggactggggacaggagagccggggtctggggagggagggggcgaccggaccggagcgggaggagggaggcggcgagggggcttgatgctgcactccagtcttcgcgggtgatttatgccggttccgggcggccgaggcgatggtacgagaccgcgccggggtcaagccggtccgacgcccgctggggccgcgctgcatagtcaatgagcgtccccgcacctccgacttacaaagagcggccgccggctggcgggagggaggagcgcgagtgcgggaggggctgggctccctccagtgcgcccgtgggcgcgcaggcgcgagcgtgtgt

SEQ ID NO: 3282 - DNA, 4001 bp, Homo sapiens
gagaccaccctttctactaaactatgttctctctttattcagttctcctcaaatgcaacagtgaagataaaagaaaatgtggaccttcccctggcctcacagaaatgctgaggattagaaaaataagagtaatgggcacaactttctcaaaagaaactctgaaagccaagagatgtatatagttctgtgctcagaggcatgatttcggaaagttaactgttcaagcccaataagaaaatataggcagactccaaattacaagtacgctccattccaaagattataactaagttgttaagaaatcataaattatttcctccacgtaattttatggcgagattaggtgttcaggctggtccatgaaggtccgcataaccgtagatattatgactcctgtagtaaccaacaaagcacttactaggcatcaggccctatactaagtgcttaatacagataattctgcaatattcctaacactactactactcccaccttatagctaaggaagctgaggcctggagatgttaagtaacttctctaatggcataatgcagataatttgaggataaaatgcagataaatctggagtaggctgcagtctgggcccagcctactgcagatccctggctctcagtccttacgcgagctctcaaagtaccttaatttacaagcatcagtctttcaaaatcattttttctccaatgctaaaagctcagcacctatctccccttctctggtggtcagaatactattaataaccaaatgaacactttcaccaacttttcttttcccctccactacaaaagtctataccaaacctatctctgataaacctcaaaccatgagagcatttattcgcctatctgacacccacttagagtttaacttgcctttgcatccccagattccaacagagtgccttgcatgtgctcattcattcaaagacacttacaggacgggagcggtggctcacacctgtaatcccagcactttgggaggccgaggcaggaggatcgcttgaagtcaggagttcgagactagcgtggccaacatggtgaaacccagtctctactaaaagtacaaaagttagcctggcatggtggcgcacacctgtaatcccagctactcgggaggctgaggcaggagaatcgcttgaacccgggaagcggaagttgcagtgagctgagatcgcgccactgcactccagcccaactcgcgcaacaccttcttaaatgctgaaggaaaactccattcaagagaacgcaggcaaaagcccaaagtgatcataatccagcgtccagctttaagtcatccgtggctcacccaaactcccaacccactcctcgccgccccatccctcgcaaaaagctaaatttccaatatctaaatgctaggtggttactgatcaccaacggtgaccgcacgtgggacaccacccaagctggccaagtgtaaggaaaagaccaccacccgacttcccaaagcagtcttcaaagcccccctcatcttcgttgaccatgggtaccccgagggcagtaaggtccaggctgaagtggcgggggcaggattcaagccggaggcaggccatgcccacagccgtgaccttctgaaggcgcttaaccctgtcacccgaaaacccctggtagggagcgtggtgcggagcccggggaggctaggtcctggggcggggagaagggtggcgagcacaggcaggacccggtccctgccggcacccacgaccccgggggaccctggcgccgcagcttgcctggagaaagggcctgggcactcacccggccacgggcccggcgcgagcggcgggcagataggaggcggcatgcagccggcccgggccgccagggaggaggcgcagggagagcgggaggcgcggggccgccccggcacgcagcaaccaacgcgcggatctcagcagggctgccattgctcgaacgtccccgcagcgggaagcacgctccgccagaaggacaggaggagcatgtgaccgcagggtagcctggcgcggcagagaccaactgccgggcgtgccaaatgtggggggagcgacggattgttttaggttggaagatggaaaaccgcacttctccgaggacagaagacccaatgtaatatttacataaacgatgttgcttgattcattatcgaagcttttcttttccgtcttccgtctccgatctgggcatcgtgttcattcgctgcacccctgcactcctctgttggtagagccgcaagaggtcaactcctcccaggttggcgcagaggcttgtgggaggccaactagtaaaaataccgagaactctcgaggagagccgactatgaagatcccaggacgtgggaaggtttcccccgcccccgagtgcagatgttgctgctaacgttcagccctgacgccatgtccaataggaacggcccttcactctcagaaacgcgggccggagaaaccgtggaggtcttttgcaccttgccgtttgcctcccaggttcaacatgataggatgtggattatcagggcctgggaacagtgtaaaggaacgcgcaggtccccaccctaagcgcgtacgcggggcctcgctttagaaaataaatgaattctaccaaaaatcctatagttttaaagctggaattgaactgactctcttccccaaccctccacccctaccgcgcctctcccttcagtaaatgcacatatacatgtgagaagtaaaagaacaatgtaattaagagtctccagccaaatatggggagaaaactggcaagttaaacccatcgctggcgaagtggctcacgcctgtaatcccatcactttggaaggccgaggcgggtggatcacctgaggtcaggagttggagaccagcctggccaacatggtgaaaccccatctgtactaaaaatacaaaaaattagccgggcgtggtggcgggcgcctgtaatctcagctactcgggaggctgaggcaggagaattgcttgaacccgagaggtggaggttgcagtgagccaagatggcgccattgcactccagcctgggtgacacagcgagactctgtctaaaacaaaacaaaaaaaccacgtcgctgccttcacagggcttacagactggatcggttccctgtgcacacgtgggaagctgagaacagccttccactccctctacacctgcctgtcccctacctatcacgaggcaaacgcggcgggtatttcctctggaagccctcccacggtcatttccgaagtgactgtttatcccactggactccttatcagttaatcccacgaactccttatcagtagggactgtgatctcttattgtaggccatacacctacccagtgccagacacacagtaggtctcattaaatatgtgttaaattaatgtctattttgagatgacctagctcacctctcctttgagagatgagggaacgaagacacccgctccaagcccccaaaagaaacaaggtgaattgattgactctgggttatattactgagcactgggaatacaagttattcacctattcaacacgtatttattgaatacatatccagtgccatacactatttgaaatcctaggaatacagcagagaacaaaacaaaccaaccctagattctaattaagctctttaaagtttaatttgggaagacaaaaagaactgtgatgcaaaatacgccagggtaaagggattgagggtgtcatggggggagttgctttttttttttttttctcaagacagggtcttgctctgtcacccaggctggagagcaatggcacgatcttggctcactgcagcctcgacgtctgggctcaagcgatcctcccacctcagcctcctgagtagccgggattacaggcccaagccctggctaatttttgtatttttagtagatacgggtttttgccgtgttgcccaggctggtctcaaactcatggcctcaagcaatctgcctgcctcgtctcccaaagtgctgggattacagacatga

SEQ ID NO: 3283 - DNA, 4001 bp, Homo sapiens
gaggatctcttgagcctgggaggtggaggttgcagtgagccgagatcataccactgtactccagcctgggcaacagagtgagactgtgttaaaaaaaaaaaaaaaaaaaaaaaagaagaaagaaacaccagtggataaaaggcaaactctggaaattttcattcttctcattcttctgccccataaccactgacatcaagacaaggcttgcgattcactggccacctctggcccttgcagggaacacttgtaaggcactgtggtcaaatgcatacataagtgactgtcttcacaggagggagttatactcaagctactatatttagcaaatgtctatatttagccaaaggtcctttaaatgccttgtacttcttttgtttattaattaatgtaacagacatagacaaacacctagtatgtgcctggctctgtgctgagctcttgggatacaaaagtaagatatttcctgtctgggtgtcaccttctacaggtggacaaataatgataaggtatcctgactgccatgccaggcgcgggcatgccatggagggccgtggagccagggagacttaggcctggtgcgatgtgagagggctgagtctggaaggtctcctggaggtcacagtgggcttccaggaatgaataagggtttgcctggaaagcccttttctgtatcatacagagaaaaacagaagtctttattcactcagtagtcaacaaatactgagtgactgccacatgtccgtaagagcaaaatcaggtatttacaactacaaacacctaaggattggttacagagtagatcccccagaatatctgacggatacagccagacaccacagtccaaatggcttggaggtgtttcctgtgggaagaatcacatgtggaaaagccaacacggaaaagaacctgtaaggcgggttacaaggcagagactttctttgcattcatacacccacctggcacacagttcaaatggtacaaagggaacacagtcaaaaattaagcttcctttgtccccctggggccgcaacctattggctccccttttcccaagctgctgctctctgtccctgtacggctttctggatgtcatgtacattctttagccttaaggtagaatccttgcggaaggaaaaaaaaaaaggcatttgtacaaatacccattctagtgcgccttcaatttgtcacaggtaaagttcatcaccaaacatgatcttagttacaataaactctgtccaggaaactttaatgaagacgtttcagtgtgcctggacccgtttccaggctcagtcctgaaagaaaaatcacagtgatccccaagttcatctctgagctgcaccttgagtgacatcgatggatggatgacaaatggtcacctgagcgactcggccatttcagcagggccatgtggcctccggcgaccgtccactgcctccaggtcgggcctaagcccccgcctcctcccatgccgcacaacaaagcggggcgctcgcccccacccggccagcccgggccacctcgcgcgctggcggcgcccggctcctctcccgagggcgcagcggccgacggtggccggggtgggggagggcgcgcagcgtcgcgggctgggcccggggctggagaacgggtgcggggtccgcaggcctcggagatcggggccggggcgcagcgcctggggatcagcgccccggcgcgcgcctgcccggcccacccgcctggagccggacgcgcagtggcacagacgcacagcgggacagacggacgccggagagaccctgacagccgtccggcccccgcgcccgcccggcgccccccggctgccctcccggagcgctcacctcccgcgcgatctggttgagcgcgtcgtcctccgccgtgagccgctcccggttggggagccgcttgcgccccgatccctgggtgcccatgtccatcgaccgcgtcgcccgcagctgccgcggggcccgttgctccagccgctcgcgccgccccggcccggccccggccccggcccctccctccgccgcggcgtcatggcgtcagcgggcgctgggccggggacgcggggacgcggggggacgggggccgcggggacccgggggaagccagagccggaggtccgcagcgcgggccagggactgcaggggccagggacggcggggcgggggacgggggcggggggcggagacgccaggtgtcagggacgatgggggtccgataccacggggacgctgcggatgcccagggccgggcacgcgggacctgagggaccgggagccccggagggtggactttgcggggactgtttggcgggccggtaatcgcggagcgacgcgcgccagggcggtgggcaccggttgagtggggacctgagcggagagcgggggggtaggaaggctttcagaggcctgagttgccttgaggggtttgcacggaggggtgagcacaggatttggttcagcctggcgctccccattccgcggtgagtcggggtggaagtccctcgccggggtgagagctaggctctggggtcaggccgagaggtgctcggatccgcccgccaccgccgctcctgtgaccttggccagcctcctgggcgccggcttcacagcggcatggtgtggatgtgtgcgtttctgtctttacacgcgtgttctccgtgctagcatccatccttctccccgctgtctgccccctgagatcaaggacttgtcacttctctggtgggtccccagcctctaggatcggggcaggtgcgtcgcagctctctcctagttgttgaaaaagtaatgaacttacctgtgctctctgaagctcacagtctatgctccagaggtggatttaaaagtaaagcaaatcggaggattaggtaggggttaaaagcccctgcctagggcacggcaggagcaccgggtgggaaagttactggtgtgtttggggtatggggagaacttcagtgtggctggacctggggaaggatgggagggagggtagtgatggtagaggagaggaggctgtactgaagtcacctgtgatttttttcccccagtgataaggacagttaacatttcggtgtatttcccaccaagtggtgtgaccagattgctttggattcttaaggaggtggcctggaagctgtatgaaggtgggaagaggaagagggcccttccacccacagtggcagggaaagctgttggaggtttcattgcagggaaaagacagcgagtccagtgacatgggagggagggcagatccaggtgacattgctctgggtgcctgagctgacgcaggtgggttggcagggctgactgtggcattgttcatgactgaactccgggagcagaaactgcacctgcacattgtaggcactaaggaaataggtgttgactgaatcttccaggccatatttacattacttcagaggccatactccttaagtgacatagtcctccttgggggaaaccttgagccgtggccacttgcactgccttggtcttgctggtggctgctcactgtttcccagcccctggggcactgtggggactgtgcgtctttgccgaggctggtccccatgagttcactcattcctgcacccacacctgctgcctgccagctgctgagctggaggctggggcatagctgtccgagaggcagacacggctgctgcctctcagggctgacttgagatgcctggagctccttaactaaagccatatccaagttccaacgtctcctttctaaaagaagtctccctttgctccctgtccttcattggaactttgagccactttttgctaacacctaaatcctccatcctgatgtgttgaggccaggagggcaggcgctgaccccatcttcctcatctttaagccttcaccagggactggctgtgccagttgcttagtggagtgcagtggttgaacttgtggaacagagttcagttcccaaccctcctccccactttccctgttggattgttgtccagagacaggagattc

SEQ ID NO: 3284 - DNA, 4001 bp, Homo sapiens
gaaaattcacactcagagggatcagtgaagaccaaaactagccccccattggacagggcaagtctcactgccaaaattctgccacaaacttataaaaacaaaacaaaacacaaaccttccggtcttcaaagcttattgggttctggaactgggggtgagggacagtgggcctgggctgatcacataactactcagttggacacagtccagactttcctctcccttcctcccggcagcatctcgaagtcatctgaacccagacccgcccaggaggctcccagccttaagtaatagaccctgtagccagtgccttagctgctccaggtgtgcctctacctactcctctgattagcctgtccctagtttcctcacatcctgttctcaatgtttactcttcccttctccaaggactctaagtccagcaggcagctcttcacctccatcctcctcctgccatctatggtgtcccaggctgctcctcagaacactggcaccgctcaaccacattcccacccttccttctttcaagaacccttccctgatggtgattcaagggtctctcttcccaggcccctaggaactaattagttgaaggggtaaaaaccggctccagagggctggcccactgccagagttttaaacgaagtcacagaaaaaccacactaaaatggacatttaaaaaacagcaaccatctgacaagcaaagaactggcttttcagtatgagttcatcagactctacttctacacctctctctggcatttcctaataagctctcccaaggtcaaggcagtctgattcatcttaaatcttacacacacacccagtagatgattaatttctacctgatgaaagagtgattgtttggggctcatacttttaccaagatcccacgaacacctgattaagtggaaagctagggttttatatttcttttccaaagtgcaccctttcacttttattcccattcatgttcaaccacaagctgcatgaaaatgtgtatttgcaaaccctctccgcctcatcccctgcccaattttaatgccaaactacagccgtagccccacgactgcatattgagctggacaacggcaaaatcctagaggcaggatcctgtccgcgctgggcggacccgggagactagccaaagtggatttggcgtctggagtcctcggcggaggtggtccccaggtgctgagcgggttgagtgctccaaagcaccccagccgctccccggtggttccaacagcgggtgagggcaccggctctggccacccggtccttgatgctgtattttgtaaaatagcaaactagcagctccctgtgactccaggccaggcgcagacctggtcagagcctgtctgcagcccatcacctcgggcggggagagaccatgtgccttttcgtccttggaggtggcgtcccacaataaagcgtgcttcctagcgcatgagggacgccgctcgccgggccactcacggacccgcgcccactgcgcccgctcccaccgcgctggggtcccgccagagcccaccccacgcctcccgggcacctgcgcctgccattgacctcggaacgagctggaagcccctgaaaccccgccgcagtcacgaaagaaagtttcggaagcgctttcctcttaccagcttctgcgcttccgggctcaaacagtcgatctcccggctttgagcggccgcggggctggtcatcctgccgggctcggcccgctccacccggcgggaaatgctcggggaccgcgccgggagcccctcgcgggccgggccagggggcgcgcgctctgtccgcggagacggagccactcgccgctaagtgaacgctcgcgcttccggggccaggagccagcccgccggggagcggctcgcggcgctgggctcgggcgcggccgacaggggcggggcgcaggtggccgcgggctgagtcgggctcggggtggaagggcgccggggaagcgggactcgggcgcctccgcccgtcccacggcccgccccgccccccacgcagttccgcctcggaggggccctcccggctacgccccgccccgtccccgccccatgactcgccccaccgcccccgccccatgacccgccttccccgcccccctgcgccgctccgcctcggagggtccctcccggttacgcccctttccccacccccaccggctccgccccacccaggccccgccccacggcctgtcccgcccttccgcgctcccttaacgcgagccccgccccgccccccgcgctccgtctcggaaggatcttcctggtcctgccccgcccctcccgggctgtccatcaccacccctccggcccccgccggaaagaggacctggaggaaaagacccctcaggctccggccgcagctccacccgcaggggccgtgggaagcgggcgctccggggaggatgccgcgcccagtaggggtcgacccgaagagggggtcccctccggggggggacctgcccggggctgggcgagggtatgagttcccggctcccccacatccatcaccctcaggccacgctgagcttcctggacgcggaagcctaggccccagcaccgctgcacctgccggccgggcaccccactaacgcggcatcccgagaagggccgacttccaggacgacgcagctgcgtgcacacagccccccttggcccggtgcggcggcccgcaggggagaacgagcttgcagggtgcgggtgcgggccgctggggccgatctggcgtcgcagaacccggggtccacaccgtccaggctgcggccgcgacgaccccctgccaggcgccggtctcctccgggagggctccagcccgcgccacctccaggcacagggcgccctcgtaactcccaatgaaagtcctgcgggaaacggttcccgacctcgccaggctgggggcagaagcgacgggatgacgcggattgtaatcggaaggtcagcctgtcctggccacgccaggaaatgtaaaatttaaagcacatttacattttacagccctccaattcccaattcccttttctctgcacgctgacccaacttggtaacgtgagctcgcgcctgtgagcactcaccttcccgccgtgacccgggcccagggcttcagggcaggagttgtcaggagggtgtgcagcagggaaaatgggtgctgaggagccgaaggacgacttgggagggataggggagaaggaaaagaggggccgagcaaaggcctagagaaccgctggggaagaaacgttgaacttaagatgaacagaggccaagctgtctttgattgacagcatctcaggctcacaaaagcaactttcaaagataatgaaatgcctacctttcaatagcttgttttctccctgtaacgcttatttaaatgttgttataacaattctttctttctttcttttttttttttttgagatggagtctcgctctgtcgcccaggctggagtgcaatggcgcgatctcggctcaccgcgacctctgcctcccgggttccagcgattctcctgcctcagcctcccgagtaggtgggattacaggcacctgccaccatgcccggctcatttttgtatttttagtagagtcggggtttcaccatgttagccagcctggtttcgaactcctgacctcaaatgatctgcctgccttggcctccgaaagtgctgggattacaggtgtgagccaccgcgcctggcctatcacaattcttgattgtttaaagtgcaattatttggagaaaataattttaaatgttctctgggaatttattgtagaaagcagttagacttttaccagtggtcacaacttcactgatgagaatgataacccattaataaaacagccctcttcttctgagacttgattttgaatattctgatctagataggcagattctaaagctactcaacaccccgaaccctgtgaccacatctcccagagcagggtactgggactggtttccgttcccttggcatgtccctgaggcaa

SEQ ID NO: 3285 - DNA, 4001 bp, Homo sapiens
tgggcagacatggcagccatctgatgcatggtctgtttctgcttttgcttcctgcgctgcgtgacaaagcactgtctgagctgcctgaggctggctgggaaacacttccaggacacgtagagcaccaggaccacgatgaggaaggagaagatgagggccatggtgcccgtgaccaccttgtggatctgcacggcgttctcggcgtgctcgccgcctggaagagccacggtggcaggctcgaatgtgccgtcgtgctgcccctccccgccgtccgcgagcgtggtggccgagctggcagggggccccagatcactgcggttggtgacggccgagagcaggtggccgctggtgggctcggccccatcctcgcacaggtggaaggcgtacacggcgtccaggacgtcctcgccctgtgcgtactccgggctggcgcactgcaagttgccatcgtagcgcccctggaagttgttgagccacgaggctagggcacacacgttgcgcccgcaatcccacaggttcccggccagggtgatgcttgtcagggacttccaagagttgaggatccggggctcgatgtaggtgaggcggttggagtccagctgcagggactgcaggtgcggcacggtctcgaacacatggggctccatgtactcgatctcgttgcccgacaagtccattttctccaggttccaaacccagtccagcgagctgaccacaatggccaccttgttcctccgcaggcagagcgagtgcagggagatgaggcgcgggaagtgggcgaagttcaccttgaccaagtcgttgtgctcgaggtgcagctcggtgagcttaaacaagccggcgaaagagttgcgcgccagactcttgagctgattgtatccgatgtcgagaaacttgaggctgcggcagtcctggaagatgcgcacgggcacaaactggatggcgttggcccgcatatgcagcgtggtgagcttccgcagcccgtggaagaggtcgggcgcgagcgcctgcagcttgttgtacgagaggtccacgctgcgcaggttgggcatgggccggaaggtggtgttgggcagttgggtgatctggttggaactcagcgtgagttccttaactcggcgcagtttctgaaaggcgtccccctgcacggagcagatgtgattgtgatccagatagagccacgtgagctgcattaaccccgtgaactggccggcgcgcagctccgagaggctgttgtagcgcagggacaagcccagcaggccggacaggttgtggggcgcctcggtgaggttgagcgcctcgcagtacagcagccgcccctcgcaccggcacagctgcgggcacccgctgggggcggcgggcagcatctgaaagcaggcccccagcagacacaagaccacccccgagggcctcctcagcagccagtatagacagagaccgagcagcaggaaatccattagcgagaatctttccagagagactggagaatgtccattggaagcgctcggtcagaaatctacatcatattttattccgagggaggggaagcgggggagggggagaaaagggcaaaaaatcaaataaatacatagaaataaagaaggacccccctccccaaaaaccacacgttcacctctaagcatgcagaaagctgggcagcatagaaagttcacagccacggaaagatcaaagagatggtgatttggtccatgttagatgctgcagcaaagaaaagggaggaaaaaaaaaatcttcgggaaagaatttaattaaaaagtgtcttacccacccttttccagagagtgacaacctccattcagctgctccctttgtgtgcaggctaattatatgcagggcgagagaagacccctctgtgtttccgaggcagccccggtccgcggccggcggatctggcaggcgcacaatgtctcactttgctgctcggctcggggctgcaagggcggccggcaaggcggggaggcgacttctaggacccgcaagtttcccaactacgtgccggagcccgagcttcgccttcctgccgccttcctttccctctgcagttcggactgtgacgttgtggggggaaaaaactccaaactcggggctcgcgactccccaggatctgacagtctggttaatgtccgtcattggaaacgaccactgaccggcgccaccttttactccgcggaaacagcctgccattcgcgccccgggcagctgcagagagcgggctcactcatgctttgcgggcggcgggcggcgggcggcgggcggtggggaggtgcggacggcggcgcggggagcggcgagcggcgcccgggctccttccctccaccaggcagtgtgcggcgcgagcttgcacaggcacctactgctcactgagtgtcgtaagctgctcacgattgtgcgtcttccccgagcacctcagacatgggcagattgaaaaggggtgggcataaaaccaacattttaccgaaccactaaagtaatatatgttttttgatgaaacggaaaacactttcagcttttttgtccatatttcaaaaaaaaaaaaaaaaaaaaaaaggaggggggagggaggtggaggtaggggtagcatcatccacgacaagatatttccaagtgggaaactgaaatgttctgtgctctcccccttgccttttggggatatattcttttcccctttaaaactgtctacgtgtaagagatacgtaggaatctgtagagaaatcaacgtttggacctttgctttagaaaagcaacttgagagaagacacaggaaggcaatgatttggggcttggctaagatttttggggttttttccccctcttgcgggtactggaattctgcagtcagccagcccttttttgaggtggagaggggaaatgctttccaaacccacctagtttgggaagccatccaagtcccggtggtgtgagatccagtgtggcaaaaaggtatgtctgtgtgcagggagacttgactgagatccctccggggcttcatcaggctccacagatacatatggggtacagagtggattaaagaacgattgtactgtctgacatggggagggcttaccctgacttgtgctgttcatggtgattactgggccctgcagtgcaccccactccaagagagtgtgaatgtgtagggacgtgatagtttaagccataatgaagcctacccgtctccatacacacatcctaattaatctttgagactgcactaagttgtgccactttttcctctgagtatgacgagaagcctttgcctcattatttctattcataatcatttatagataggagtccttacaatgagctctccccccacctccccacacacacaccttgtgcctactggtctgtagagggtctgccctggggagggtcagttggtcatctgtttaaacaaagtcctccaagatggctgagaaagcctgcgggaagtgagtgtgggcaagccttccttcttgacaaagatgcccagggagatggtagggagagtcaaatgtgagtctccagctccactgtttgaattcccatcgtttctgcctctaaggaagtcaaaatcagtaggcattatatgtagtggcacttactttgataggaatgagggtggattaccagagccagggtagatagactggacaagtaactggattggtccttagcatctaagctgaagaggccaaccaatggaatcaaagtcaccaaagactggtggtacttttcaggaaaagtcatatgaacaggggcatgaatcattccattttgtattcatctgagctctgccctggtcattcatctctgagatgtatcatttaattggaaggaacacaaatctgaaatgtcctagacatcacatgctgtcttaggagttagaagagacattagaaaatcaacccccttaattttgcacgtgactaaactgaggccaagagacatcatggtttatccaaggtcatacagcttgcaactggcacagatggttt

SEQ ID NO: 3286 - DNA, 4001 bp, Homo sapiens
tgtgtacttattgcataataggatcgcaatatgtgagctctgaaaaaacagcattgagactagtataggcagccaatgaagcattggatgaagactaataacggtacgaggtgctctcaagttgttaataagcatagattattgcatactgtggctccctgcccaacgatacaggagctaagacatctaaatactcataacagagaacactccaaagttaagactatcaaaattcgtattatttgcctaaaaagcaaaataatattgtgtagtatcactttgccattattttagagttgtttttgcaaattcgaaggataaacaaggaaagaagcagccaactactatttttctctacatcaccctgatctcttcacatttctcactgacttttttctcccctatctccattaacttcagaaagcctgcaaagttacaatctattggcacttacactgcatttccaagtcattgcatgttaagggacttctttcctccgtcaacagtagatttattatttcttaatggagagaaaaaaaaagaaacaactaccatgtgttgcagtttctttttttttcttaaatttttaaatttttaaccaagaggcaatcaaccaaatccctaatctaaaacccatccttcttctcaaacagttaagtttttcttttttttctttttaatttaaaacccgatcttgctctctgtcctcttgccagctacagactcattgaaatacattccagctctcccagacaggagaaagggggggaaaaaagccagtcacactcgaaaaaataagactggcaaatgactgctggaaattcggaagctgtgttcaggatccagcttcaaagataaaacaagcccttgtgcaacctctgataaagtaaggaccccacccctacatacacgcagcaaagtgttaatagtcatcctgacagctaccagaaacacaagcctcgttaatattatcaagaaatagaagcaaacacagtatttatctccttctgaattcccaagctgtggatacgcagacagtagaaacagtcttaaagatatttctctagagtctgtttaagttcgtgttgtgcatttatagattaaaaaaaaaacactgcaaaaaggaaaatgatctaaaaatataatagcaactatagtgaatcaactggcaaactcaaaggctgctgctctttgcctgtttccccgtcttttatctgctaatgccacgactgaggataggaagccaagaggatcagctttgctcagaaggaaacaacaaaagttcacttacccatcctttgtcatccaaaaacgtttcccccctctctcagctttcttcttatttggtctcttgtgcggaaaccaccaccaccttcatgacacagtgcggctgtcattcacaccattctgatcccgcatgtgagctagtagccccatacaaacttccccgagaggacaggcaaaaaaaaaaaaaaaaaatacatatatatatatacatatatatatatatataaaaaatcagcacagggtgggatggttgtgggggcagggaaaaggaagccgttggggggatagggatgggggagggcctctaggctctgaggaccattgtgtaattcaccagagacccatcagcagtaattggcaatctgtgcaaaagagctacagcccatctcggaggtaaccaacttctctgtaaaaagagaggaaaaaaagaaaatcttcagaatacctggcattccttattgtgctggcttttgccattcccagataaagcaattcatcctctggattttcagttcttgaagcaagtaggcctcctgtgctgtatgagaccccagtttaaaagctatgcaggctaggtttatccatttagctggtcaggtttaaagtgttttgtagctgtgctgggaggcagcccttgtctaattcagaaggctttccagagactgatgatgctcagagcttgttggtgctaatgcttgagtttgtgatacactgagtgccctccgctggagaaaacagattgcacattaaagacgggaacaagtgagcctgtcagtggtgtgcagccttcccttgctcagaaagggaaattaaaggcacagaatcactatttttttctctccaataatttaaaaggtttatgccaaggagttcctttcagttatagcaaatattaagtaaaatactgcttctctaaatgttatgcaattaatagtttttcaaagttgccatgacctgaaatttgttttttctgcacgtcactggagatttatcatcttttgcaaatgacagaaattgttgaaatttaagttttattcactgttgctgttggtttgttttatttatttatattgttttaaactaaccgcttatggaagaaatcttattcaagggaaaaatgcaattttaatcaattttaaacaggttacatttaacatgtttaagtctgattttcaaattctcaacctttgacataaaatgcattttacaattttgtgcattttattgaacagtctagaacactactttctaaaagtttacatttttagtcttaaagcagttataatctatagtatattaccaaatgtgaaggtaactaagagataagagtagaattctagcttgacattcttagtgcagccattatccttaaatcatctacatttagaatgcaaatcatttcttatgcaaatcacttattgtaatgtgcaattccagaaaaacaaaagcacttgagttctgcattatcatggtattactctaaaatgtgcagaatatcctcagaattagaagggatgacatgataaaacacctgatatatatataatttaaaaggacctacacactttctttaagcttggacagacgttgaaaaacatagtgcatcacctccattttttcctcatttttactagtttattccataatcctctggcagataacaatttttagaataatccaggagaatgaatcaatgtaatgcagggagagactgctaggtaagactgctaacctaatttagcagacgtgagaaatttaaatgaatttcacataagcatttagaattgctgtggatcatcgcaaatagatatttttagaaagagccttggttttagattgtttgccaaaatattaataattaagggggcttatcatataaataacacatataatttgactcagatgtatgagtaggcagttgcaggcaattgtctcattactaagatttcttgaggaacagaaaggaataatatgtcccccaaatatattccttttccactaactgatacttgaatttctatcttagaaatgtgtgcctttggcttaaggcttaatacctattaaaatgcaaatgcacgccaaaagaggcaggattattgtggttgctgaaaataagtatatcaatataaatgtacacatacgatttgttcatagtggtgtagtttaatatagaaacacaaaacccacccaaatatcaatggtagaggatgagtgaagggaaaattaatatattaataaaatagaacacacactgccattaaaattaaaataaagggtgatatatgctgataggaaattagaccaccatgtataaagtaagcaaggtggggcagagaactcagatagttaagggcagtgaaagggagtctattactgtaaatagagcaaaataaaatattcagagcagactttcctggaagatggattatagaagtatttgatttcatcttttattataaaattgtctgtgttttctaattttaaatataatgaatatgtcatgtgtgatatctatcaatatacgtgtgtgtgtgtgtgtgtgtgtgtgtgtataactttttctttgtttgaattcaggatatgaaaacagctttgctagaatgttgggaaaaccccaggatattctctacatccatagtgtaataactggcacatctatagtgtaataactggctaaaatgcaaattttgttcaaagtaccaggatctaacagg

SEQ ID NO: 3287 - DNA, 4001 bp, Homo sapiens
cctgaaattgtgtacttattgcataataggatcgcaatatgtgagctctgaaaaaacagcattgagactagtataggcagccaatgaagcattggatgaagactaataacggtacgaggtgctctcaagttgttaataagcatagattattgcatactgtggctccctgcccaacgatacaggagctaagacatctaaatactcataacagagaacactccaaagttaagactatcaaaattcgtattatttgcctaaaaagcaaaataatattgtgtagtatcactttgccattattttagagttgtttttgcaaattcgaaggataaacaaggaaagaagcagccaactactatttttctctacatcaccctgatctcttcacatttctcactgacttttttctcccctatctccattaacttcagaaagcctgcaaagttacaatctattggcacttacactgcatttccaagtcattgcatgttaagggacttctttcctccgtcaacagtagatttattatttcttaatggagagaaaaaaaaagaaacaactaccatgtgttgcagtttctttttttttcttaaatttttaaatttttaaccaagaggcaatcaaccaaatccctaatctaaaacccatccttcttctcaaacagttaagtttttcttttttttctttttaatttaaaacccgatcttgctctctgtcctcttgccagctacagactcattgaaatacattccagctctcccagacaggagaaagggggggaaaaaagccagtcacactcgaaaaaataagactggcaaatgactgctggaaattcggaagctgtgttcaggatccagcttcaaagataaaacaagcccttgtgcaacctctgataaagtaaggaccccacccctacatacacgcagcaaagtgttaatagtcatcctgacagctaccagaaacacaagcctcgttaatattatcaagaaatagaagcaaacacagtatttatctccttctgaattcccaagctgtggatacgcagacagtagaaacagtcttaaagatatttctctagagtctgtttaagttcgtgttgtgcatttatagattaaaaaaaaaacactgcaaaaaggaaaatgatctaaaaatataatagcaactatagtgaatcaactggcaaactcaaaggctgctgctctttgcctgtttccccgtcttttatctgctaatgccacgactgaggataggaagccaagaggatcagctttgctcagaaggaaacaacaaaagttcacttacccatcctttgtcatccaaaaacgtttcccccctctctcagctttcttcttatttggtctcttgtgcggaaaccaccaccaccttcatgacacagtgcggctgtcattcacaccattctgatcccgcatgtgagctagtagccccatacaaacttccccgagaggacaggcaaaaaaaaaaaaaaaaaatacatatatatatatacatatatatatatatataaaaaatcagcacagggtgggatggttgtgggggcagggaaaaggaagccgttggggggatagggatgggggagggcctctaggctctgaggaccattgtgtaattcaccagagacccatcagcagtaattggcaatctgtgcaaaagagctacagcccatctcggaggtaaccaacttctctgtaaaaagagaggaaaaaaagaaaatcttcagaatacctggcattccttattgtgctggcttttgccattcccagataaagcaattcatcctctggattttcagttcttgaagcaagtaggcctcctgtgctgtatgagaccccagtttaaaagctatgcaggctaggtttatccatttagctggtcaggtttaaagtgttttgtagctgtgctgggaggcagcccttgtctaattcagaaggctttccagagactgatgatgctcagagcttgttggtgctaatgcttgagtttgtgatacactgagtgccctccgctggagaaaacagattgcacattaaagacgggaacaagtgagcctgtcagtggtgtgcagccttcccttgctcagaaagggaaattaaaggcacagaatcactatttttttctctccaataatttaaaaggtttatgccaaggagttcctttcagttatagcaaatattaagtaaaatactgcttctctaaatgttatgcaattaatagtttttcaaagttgccatgacctgaaatttgttttttctgcacgtcactggagatttatcatcttttgcaaatgacagaaattgttgaaatttaagttttattcactgttgctgttggtttgttttatttatttatattgttttaaactaaccgcttatggaagaaatcttattcaagggaaaaatgcaattttaatcaattttaaacaggttacatttaacatgtttaagtctgattttcaaattctcaacctttgacataaaatgcattttacaattttgtgcattttattgaacagtctagaacactactttctaaaagtttacatttttagtcttaaagcagttataatctatagtatattaccaaatgtgaaggtaactaagagataagagtagaattctagcttgacattcttagtgcagccattatccttaaatcatctacatttagaatgcaaatcatttcttatgcaaatcacttattgtaatgtgcaattccagaaaaacaaaagcacttgagttctgcattatcatggtattactctaaaatgtgcagaatatcctcagaattagaagggatgacatgataaaacacctgatatatatataatttaaaaggacctacacactttctttaagcttggacagacgttgaaaaacatagtgcatcacctccattttttcctcatttttactagtttattccataatcctctggcagataacaatttttagaataatccaggagaatgaatcaatgtaatgcagggagagactgctaggtaagactgctaacctaatttagcagacgtgagaaatttaaatgaatttcacataagcatttagaattgctgtggatcatcgcaaatagatatttttagaaagagccttggttttagattgtttgccaaaatattaataattaagggggcttatcatataaataacacatataatttgactcagatgtatgagtaggcagttgcaggcaattgtctcattactaagatttcttgaggaacagaaaggaataatatgtcccccaaatatattccttttccactaactgatacttgaatttctatcttagaaatgtgtgcctttggcttaaggcttaatacctattaaaatgcaaatgcacgccaaaagaggcaggattattgtggttgctgaaaataagtatatcaatataaatgtacacatacgatttgttcatagtggtgtagtttaatatagaaacacaaaacccacccaaatatcaatggtagaggatgagtgaagggaaaattaatatattaataaaatagaacacacactgccattaaaattaaaataaagggtgatatatgctgataggaaattagaccaccatgtataaagtaagcaaggtggggcagagaactcagatagttaagggcagtgaaagggagtctattactgtaaatagagcaaaataaaatattcagagcagactttcctggaagatggattatagaagtatttgatttcatcttttattataaaattgtctgtgttttctaattttaaatataatgaatatgtcatgtgtgatatctatcaatatacgtgtgtgtgtgtgtgtgtgtgtgtgtgtataactttttctttgtttgaattcaggatatgaaaacagctttgctagaatgttgggaaaaccccaggatattctctacatccatagtgtaataactggcacatctatagtgtaataactggctaaaatgcaaattttgttcaaagtaccaggat

SEQ ID NO: 3288 - DNA, 4001 bp, Homo sapiens
aagaaagataaagtggtgaaaagccatcagactcatgatagtctactggaattgccttttcttttcccctccttgtctgtggccctccaaaaaaaaaaatttttttaagccagaaaatagtattacttattgctgataaaaagtcatatgatcttagagatggactaaattttagaggtcattaaatacaatcccatttattttatgaatgagaaaaactgaggcccagaaatattaactggcatgccctacggattagctagttagtggcaggaccgggaccagaatccagtttcctgatcatcagttcacttcccattagacttggctccctgccctgcaaagcataatgtgccatttggcacctaatggctaaattcttttaaaaactatgcccagagtacccctatcatagccaggaaactcacaatgcccttttaaatcgtatctatgggcacatattttttccaagtacagacgatcaaaaatatgctttgacctcctaaggattgggagtcacaataaaacagcagaataatcaaagatctaataagaacttcaagctgtccctttattttgtcttgatgtaaatcagtttgacacagacaccccttctcctaccacccccccagacacacacttccaagactaaacagcaatattccataaaaagaccagatctagccagtgttattatctgtctgacatttgggttattcttgtgagtaactcagaaagtaacgtgggtgtctgcgattatttgagtacacatggcaaaccataattggtcaaaaaataataaaagacatttttctgcgacaaaaatactgtattgcatgacaacatggcaacatgacagcattccgtggaccacaatcctttctccatttgcaaaaaagtaaaaaacaaaaattcaaaatgaaccaacaaggctttcttgcagacagcaactactacttcatatttaaattaacttaaaggagtactgagagtaatctaccagtctgtcttccccaaatccacgtaaaaaaggagtactgagagtaatctaccagtctgtcttccccaaatccacgttatatatcaatttatattcagtcttgtgagacggagcagaaacgtggcaaaagatgcaactctgtatccttttctacaaccaagtacaggtttttgacaatcctcggagttttgttttagagcttggctatttttgaagtaaaaacttcaaatttcatcaccaccttccaaaatttattacatgagtcaaatctaagacaaattccacttatcactgggctgataaaatttgaagcttatcagcacaagtcatgccttagggtctaaatctaaaacctactctcttctcttctactatatatattcccattaccacatggctgtgtaaatgctaagcaataagggaaaatattctagttgccattcccctaagaaaccaagaatcaggttaaaaattattccaaaagcaatttaaaagatcccatgaaagaaacatactcgtactcatagacagacacccattgaagcagacagcagtgtgaatggagggggtgtctaaatgctacaatctcataaaactcgactcagtaaggacagttagggaccgtggaggaactcacccactcggaagttcgtggccgtcagggtgtcggcagcatgaccattctcactaatgagagtggtggtgttccccttctcacagctgttctgacagctgcccttggtgcaggtcactttacagatgctcggagtaaagaccaccttgatgcggccagtgtggttactcactaggagcggaggcagggagaaaaagaacaacaaacacatcagcttagtatccatgaacttgccttggaaggtttaaaaaaacagaaaaaaagaaaagaaaggagcaagaggggaaaagagagagcccacaacccgacaggtttaaggaaagagggaagccttcagtgctcgctgctctgtattcagtggtgtctctgaaacaggagtaggaagcttagcaaacagaactctgggatgcactccaaaaccacatttgaagtcgagtcactggagtgggattactaaccacaatgctgcactttattcacgggcagacaaagagcaataccgagggcacgacagattaaagagccaaccctgacaggcagatgtaatgcaaaggggttggccgtgcacctagcggtgaataaactcttgtgtcctcaacttgcatactttccctgtttctccacttattaagtcactatttgcagcccgacccctggaaatgttttaggcatgcggcatgtctgaaaacatctgtctcaaatctcctggcactctcggctgaagtgatcaaatgctgtgacgcagctgcgggagcccatttctttttcacaactccagggcactatttctccataagaatttaggcaacatatattttgttttcctgtgaacggggcccatctttaaaggggtaagccaggtcacagggataaatggttgcctccctaaaaataacacccttgggctctcactgtctctattcatagaccacctggagtagccactggggatggagctttctttcattagcgtggccttctcttaaaaacgaaatgctatcacctgaccacacagccgaggctatgtggtatcacaaaataagccctagactaaaagtatatcctggtttacaatcccagctcaaccacggtgtgactccggacatgccatttcagtccagttcagttcagtttttccaaaacttgagagaattgaaactggcattttctacacacttctaactttcaacgtctctatcagaggtcagcaagctacagttcagggacccaatccagcttgctgcctgcttttgtaaataaagctttactggaacacagccaccctcattcatttctgtactgtctatggctgcttttgtgctatgacggcagaactgcactgtctctgtgcagttctgcttcacccagacctgcccttcactgctggatcgcaacctgaactctctggcaaattgcaagacacacactgttttgattgctacatctgcgataggcccctagccaggtccttcctctttccaggagactaggcagaaagcaaagatggtagcagtagctgaagacagccagtcatctgtcaggctttaaggccgtcaagaagcagtgcccttctgacgccactccatgactggagtggccaaaggggagagaggctctgggccagccttttttataccatctttgcccaccagaaaagcttgtctctctttatactgctttggtttggctaatattatattttcagaaaatcatcccaagatgcctctataagaccctcaacaaattaaaactgtggtcataagctgagcttggaaacaaagaactttaaccaaagaagccattccaatttcagggttggaatggggccccagaggttttctaacgcaaccatctctcatccactgtttgcattccacgtatcaagtggtcgtgtaacctttacttgaaaatctctagtgacgggcagctcattacccacaaaagcacatgatagttatggcagttcccagcaagtactattttttattgagctgaaatctggcctcacagtaacttgcacacattaatcctaatttggttccccatggcctcacaatctaatgcctcttccacatgacagcccttcaaataagttatctttgagataaatgccacttaatcaaagaaagctaaaattaggacttgaacccatcagctgggttggtcatctcacttagaagaagaaaaattattcctctggaggagaaagccctccattcttttcaaatggttttccaggacagtttctccttcaccggtggttctaaccctggaggatcaagacatgttgtctgaaatggcaagatgtcctagtggccaagcagaccttctggcaccttgcaaaatgacatccaataggatgctact

SEQ ID NO: 3289 - DNA, 4001 bp, Homo sapiens
atttgttggtatcatgttcaaattaattacattggttctgccatatggcatatcctcaaatggaaatttttttcctagctcctgattcacagatgtgccagaatgatgaatatctctgttgagttcagagaagtcttggatgcacagcacggttctgtacaatgtattgctgctggcattgatactaacattaccctgacccagcccttcctaggtggtaatgaagcctgggtggattgtatttcagacttcaacttcccccgagccctttcaagtggcccttgtgagatgcccccatgtggacacctccccccactttgcctactgtgcagggccactgtgaacatggcaacttacgtttggtgcacctctgggagccaggggccttactccagccatgacagcaccgccctccacagacattgaccctgaaacaaagcaagatcgctgagtccagcagcagaaagacccccttcccaagaacccaagcttccagcatgttccagaaaggccagcctccagcttctgcaaccctctggatgagagagagtcctaacaggtaccctggatgcccaacccaaagctgcccaagcagaggggcaaggcccatacatatatcagggaatgctgggagaaccaaaaagcctgcataaacctagggctatacaggaagggagaacagggcccaacaaatggttttcttacccccaaattacagtagagccaaatttattttttctattatctgggccaacattttaaattggaaatgagtttcagagagaactgtccaaaaaggagtgagggcacatggcctggaatcacccctgaaaaaaacatgccaactaagcaaaacaagttttcccctacaccccaacctgagatgaattcccacaacgggaaggcactatgagcgcccagtaacagaaacattccaaccaaaacttttatcaataccaagacaccccaccccaggaaagcagaccccacaggtgcagcgaagtccaagcccatgatttctctgatgctgcaaagttccaggccacagaacaggagctggatctttacggctagcccgccctcgaaacatttttttcattagctagaccaaaattaaaactcagttgcagagtttaattgatgctgagggattaaactgtagtgacctcaagtttacgcccatcttctagaagcagttgggtttgcgcgcagaaggttacgccccaggcagaaatgccttttgtgtttacccgcagctcggtaacaatgcactcggagtttcacgtcagtaaaagttcctgggcttccccgcactcccctcttcccgcggcgcccagagcaggcggaggcgggaggagaaagccgacccaccgcgcgcgaccgccctggccaccgcggggctccgagtggccctgaccccgcaggtccctccgcgggcggtgcgcgcgaggcgggcgggcgggcggaagggggtgtgggcttacccctgcagctgctgcttctggtgaacctgcagcctagagcctccgccgctctgggtctcctgcggcaccttggagcgcacaacttgcctgccttgtttggtgaacggggcggctgccgggtggccgccgggattggggtggagctgcccgccggggaccgcgggacgcgcaggctccggcggcggcggcggcggcggtctgagcccctgcagggccgcgccgcccggcttgctcgtgcgccgggtcctctccgaggggaccccgggggaggcacggctgggggcgccggcagccgccgagctgcggctgtacctggcgttgagcgcgacgttgaatgtccgcgaacgcgggggcccgctcaggggcaaggcgccggctgccaggccggggcccgggtgcaccacgtaggtgatcctccgcagccggccgtgcgccgaggacgcgaggagccctgcccagagcaggagcccccacctgagccaggcccccgccatcgcgggccccagcgggcgcgaccggtcgcgcgcggtccggccccctcccccggccgtgcggctcgcctttccccgcgcgttcgggctcccccgagagctgccgagagcccgggaaaggcgggaggagaccaagtcggtggcgagggaggaggctctgcgggcagctgagcggccccagaccccggccgattgtggctgggagcaggaggagggcgtgggggtggggagcgcggagcccggggagcggggaggggcgaggggagcgggccgcgcaaggtgagggtccgcgcgtccggccgggggttgcagcgcgcgccgcagcggggcccggcgagggtggccgagagcgagcgagagcgcgcgggacactccgaggcagccccggcggcgaagtcttttaaaagtttctctcccgtggccccgagtgtcagacctgagcagccaatctccggcagacgtgacgtcaggcggcagatcctaattggggaaggcgtgcgaggagcccgaaggcgcgccgccaccctccacatccactggggttgcccccgtgggtcgccgaggcggaggtccccacgccccggtcccgtgtcccgggagaggacaaagcgctcagcaaagttactgaacgatcctgtcctttcagaagccccatgcgtttgatattgtttggaagccccggcattttcttatccgtgtttgctgtgatacttgctgcggggttgaattcagataccaaatcgggccccagaaagggctgtcggggcgcgctgaggtctccatcggaaaccgtttaggtggctccctgtggggctgtaaagtccccgtggctgcttctcggtgtgcagcctctggtaccctacttctcgcttggcagggatgggagtgcagggcgggcagcagagggcgcccgcgtgggacggggagaaccgcccagggacaaccgcagagacagccctgtccctgggcctttagggtaggactagagttcaggatccctgaaaaccctaagccattattgtttttaataaaggcgaatcagttcacgggaccgtaatccgaccgggtcacccaacttggagatgacctgacccattaagagagatggcagaatgtaccagggatagagtctggggggtcatagtgctctttggggaaaaccatgaaataatgacatatttacttttagcatttgaattcaaaacaatgtcgcatgattttattatgtgaatgcaatagaaagtccacagtcatagcagtcttcctctattttttttttaagcctttaacttaagaatgatggtgtgtttccaaggctttggttgttcttgttcttatttacttgtggcttatccttttgttttgttgcctgcatgcattggctagtagacaattggtagcaggtgacaatggtttaagaagcattaatggaaaaataatttaaccctaaggaaacttaacccattaattactttttttttctgcacattggagaaagacctccaatatttgatttggcaggcagggcctcagtccagctgcctgagcactagctgcttgtgagaacacagtttgagaggcactgtcatggaataaatagcgccggactggagggaagagccctcaggtccagtcctaacactgccattagtaagctgaaggaccacaggcagctcacctctccttctgcacctccacttcctcctctgtcacagaggaattggatgaaaagtccctgccagccctagcagtctgtgtctctaagaacatccagggtccttctggacaggatcattctaggtcagcccctgagccaggccaaagtgaactagctgagaagattgaggattgaggtgagtcacaaggctgcctcccaggttggttcaaaggtaatgagttacctcaattgattgttcacagtcagttacggatccaattccttgttctactctttcccgtcttcttgatactgtacttgactagtcttaagaaaagtttaaagaaaaaaaaaaaaagaagaagctgt

SEQ ID NO: 3290 - DNA, 4001 bp, Homo sapiens
ggagtcagaaagtcttcacgcacgattgggtggtgttggctggtgaaaacctcaggagtccctgatggattggtttacttcaagctgttagctctccaagcaggcaaaaatgtaaactaagcacctggcatctctccaaggacacagaggggctccttcagtgtttgggtaatagaggccacctgcacaagcctagccgtgcacatgtgacgaggtgcatgccatcaccagcatcatgaagcggacactcttgccaaacaattgacccaaatggctgggggttcaaaattccagtgcttccccaaacaaggccacaagtctgctctgagggtgagagaaaatcgatcagagtagctgctaggagtaaggaaggatacaggataacaaaacctgtggggacctagcacagggggaacagagttaaacctggtgctttttgctttgggtcagtgataaagggcagtgattgcagagattgcaagaattagggaaatcctgaaatttgtgaaggagataaaaacaggactgaagcagatgtcgatgggaaccaagaggttagtgattgaaaagttagtgcattttcactgtagttagttgctgcagtgaacttttccaccttggattgtggggcaggcagaataaattatcaaggcaataaaggatcttattttaaaggattcttttggtagttcctagcacacagggtcaaaggagaatagagaagtgtgactcagagcagggttcatttccaggtccttgctgtagataggatgatgccattcacactctgagaaatctcttcccatcgctctccgaaggaagtctaaaccagatggtaacttagcttagctgcaaagaaaataagagccaccaacaatttaatgtttttcaaactgcctggacaatcttttccttcctcatacaggcacgataacagaagtggccggtggagggtggcccattgagtgcccatgatgcagtccaaccaagaaacaaagttctctgcacacccctcgcccaggcaaaaagagaaagtaaaagcaaccggttgctgccaaggggtgtggtgtggtggggctggcactaccctgaacatcaatgaaggctgtctgtttctggtcctgcttccgcagtgagaggcagcaggtccccaagcaggcgacctgcccttcaccgtgaggctgtcagccttgggggagcggggtcatttggagctgataaaccaatgagaagaaaggtttgttgctctaggcggtgggtgagggcatcatagctgactcttggtcttggtcactttcggaggagatggtttatttaacctgacttccttcctgatgcgcaccgtaggcgcagtgaaatccgggaatcgtggggaatccttggcgctgtgggtggaggctcctcttggccctgtggccaaggtgaccaagggccgaaggaaaagcgagaacgggagggacgggacgcaagagggcagatggggaaccccatactccagcaacattatataagagaggcgacgatggagcagcgcacccggccaaaaaagcctccgtgcgcctactctacggtgcaccgcgtcccctctgcaccagaagggccctgtcctcccacatccaccgcgccctcctccgggcccccgagggcactggggcgcttcctctgccagacctcccctgcgactcactcttccggctccagagcccccccgccccaacagcaaagcagccgtgacctgccccaggggcgcagccctgccccaggctggaaggcagcagagctgtggcgtcgaggcacccagcggactgcggggctggcgtgcccgcggttacctgcgcggccagagggctccgcgagatcgaagaaccagaagagcagcatgaggagccccgccgggcggcgaggggtcgcccagcctgtcctcatcctgagctggcgcaagccttccggccgggtcctcgggcgcacgcggctcccgccccgcctgctgagcgcggcctgccccgcccgcacctctgtctaggcctctgggggcgccccggccccgcccccgccgccctcggccaatcagacgtgcgtctcctcggccccggggcggagcgggccaggtgtgggaaatgaacagggctgggcgctagatacctgcgtggggtaggacccgcgaggaagaggtacgtgcggatcggtgggagagccaggcaccagacaggctcctgcactggagggttcggtccccgcctcttcatcagccaagctggggagatgcggcccttactgggacttggcaccgccctggtgggtgggttctatcagtttagaaccttggcctctgcctggcgcactgtggtcagggacgacttctccattccagcctggactggaaagggacccatgatctcttctaccccggaggaggaagtgagcacctgccctgtgggtggctgcggccaagcctaagaattcagtcgtccttggcaacgtcttgggtattttgacagtgcaaacaaaggtggaataatggtacactgcagttctacccatagttgttaaagaattaaaagcaagaattactagaatgaccaaacgacacttccaaggatgacttatgctttataaaaagttgacctttgcgagtaagctctttgcttaataatttaatgataataataattagctggtagaaatgtagaagtctgcatgcagaaccagaaatttcatgtcccactcactctcttcctgtggacactgctatcattataaagaggccaaattcttaatgacctaagttgctcaaatgtgaatgttttatacttttaaatctcgtctttgctgagcacataatgtgtacttgaggtggcctccatccttgttgcatgaggatgcaaagacctaggttgctcttcctgactcccactgccaaggtttcacagttggctcccaaacctgctctgtcctctccccagggtctggcctttcagttccatagatatagtgagcacctgccatcacaggatctgggcacgccatggaacagaaggacaaaaagacaacatctctgccctcccctgaatactggggagactgaggcactgtgatggataatattgtcagctcgattgatatgaacgaatgcaaagtattgttcctgggtgtgtctgtgagggtgttgccaaggagattaacagtggactgggagaggcggaccagccctcagtctgggtgggcaccatctcatcagctgccagcatggctagaataaaagcaggcagaagttggaaggacttgactggctgagtctcctggccttcacctttctcccgtgctagatgcttcctaccctcgaacatcggactccaggttcttcagcttttggactcttagacctataaaagtggtttgtcaggggatctctggccttcggccacagactgaaggctgcactgttggcttccctacttctgaggttttggaactcggactggcttctttgttcctcagcttgcagacagcctattgtgggacttcaccttgtgatcatatgagtcaatactccttaataaactccctttcatatatacatgtatcctattagtcctgtccctctagagaaccctaatacaggcacactcagtgacacagggcagaatgaatggggaaactctgacaaatgttgagggaaggcaacatcttagctgggtcttaaagaatgggtaggaatttgagcaggcacagctggtgggagaaaaccagtgacagggcagaggccagaaaatgcaagcagagtcagaagacagtccagagtccagggtagctgccctgcggggggtgtgtctgtgagagagatcaaagtggttgtggtgggggccccagtggaaatgacagcagaaaggtgagttgtgtctgttttgtgaagggccttgaatttattctaaggcacagatggtgggaagttctgagtaggagaacctgccactgacctgatcccctctgcctctgtggct

SEQ ID NO: 3291 - DNA, 4001 bp, Homo sapiens
tcagcctcccaaaatgctgggatcataggcatgagccaccgcgcccagcccctgggtttttttctttttcttttctttttgttttttctttttctttttctttttttcttttttttttttttttaatcgagacaaggtctcactctgtctcccaggtgggagtgcagtggcccaaaattgtggaatcatctcaccattataagcctgtaagaatgtctcattagattactctttaatttttaaaattgttttaattttttttttttcaaaacatagtctgactgtcacctaggctggagtgaagtgctgtgatctcggctcactgcaccctcgacctgcctgagctcaggtgattctcctgcctcagcctcctgagtagctgggattacagccctgtgccaccacgcccagctaatttttgtatttttagtaaagacggggtttcgccatgttggccaggctggtctcaaactccagggctcaagcaatctgcctgcctcagcctcccaaagtgctgggaaccaccaacacctggcctgttttaaaattatttttaattttttattattttaactttttaatttttttaatttttgtttttttaaaatttttaaatatttattttattccatttttaaaatgtttaagtttttaaatttcttaaaggccttaccagtagcatcatgtcgtactcatcctcttcttgctattctaatcttctccctccctacatatatacacacacacgtacacacacacacgtacacacacacacatgcacgtacagcaacactccagcccattgcctcacagattgctatgcaccaacaggcctaaaattaaaatagtaatagcaatgtagtcacaaatataaaataatataaaattattctgccactaagatctttttttttttgagaaaaatacaactttttagagcaaaaatatagggcagcaacaggaaggctcattttaagctgttacgctgcgtagagctgcaccttcacatggcctgtgaaaatacctattcactgaatttggattgtaatcaataattaccagcctagaagacctctgaaagtttgatcattttcttccctctgggcaggcaaatcttccctgcatagagacactgtgagctggaagggagttccttctctcagtgcgtcctctgtgcctgcttttcccatttgcgtttttgagagttcagaactccaggaaggatcatcctatgctggagatttccccgtgaacgtttccttctgcacagagcaaatcagggagacttggcccctctgttccgtctatggactctagaggcgtatctgtctttttagtctgttagccgaggctgttagacatgttggccttagttcttacacagcttgcagagaaaataagattgttatagaaccaatactcatggtctatgggttaatgtagcattggcaagactgcccatgagggcaggcaagggatttaccgtctggcaaaatacaaacaccttagtcttttggctttcagttaacaaatatgacgtcgcatttggccctattacagctacagttaagtgcacacacatttcttttctcccattattcgatttgcacatgctcacaaatccaaaagtaatgacatacttgcattaaaagatatctaaattttgatgagtgttgtaatgaacaggaaaaattattctatcatctacaaatcttttcaaacttgggttttctttgcaaggtccttaagtttcgcctgagtccaatatttcttatgcagcagagacacaatcattgccaactgatcaccatacactggattttcatcctcaataagcccgagtgtaagatccatgcctctgcttcacactcacctgtcttcagtcagtgctcctccttagaggtggtgagcccacagcgatttatatagagtcctgttctcttgttaaaagtgttcatctcatcctattttggagagatttatgacatctcataaattataataataatcataattattataaatactccgaacttatatagggccttttattcgagaatgtcctggcattttgcaaacattaaccaatttgtttcttgccatacctcagaaggcagatcctagttgtagtttaactttgacacattgaggtccaacacttgtctttattcacatcattttctgggaatgtgggttaggtaagaaaacaaggaaggaagagagagagaaagagagagagagtgagaaggagagagagagtgagaaggggaagggaggaagggaagaggaagggaggaagggaaggaagaaagaaaaggaagaaggaaggaaggaagggagggagggaattgaacttggtgtgtcagaaactcattattggtttgtatttcaggtaagcagagcgcctagaccaggggttggcagctttttcttacagacccagacaggtttttgggctacgtggtctttataatgcctctgacattgtagcatgagagtgatcatagataatatttaaatgaatggccaagactgtgttccaaaaaaaaaactttctttactacacaggtggtggccctagggccgtaggttgctggcccctgttctgaaccaccgagagataccagttcacatgtcctcagttcagcaatgtggggagagatgatcggctggatgatgctattttacagacacccaggacctacagcgtgttccaaatgtctacatcaataagtactttgagagggttcatatgaagtttccaggaaggattctttcccaagttgtggaaagggtgcatttcatgactgaaagagggagccccctccctcaccacaccctgtgccccagctcagctgaacagcttgattttccccaaacacagcgccattctttgcactaggcattcctacaggatctttcctttttatctaaaccctcagggacaggggctgtgtctcattcgtctttataataccagcatgcaacactctgcatgatacatattagacactcagtaaaacacgtggaatcaatggcttgcttatcggctgactggtatacagtctgtttcttctgcatcccctgccttagctccctccccataccacaactcaaacacaagctccgtgagagctgtgaatctggctacttcatttataagactgagtcttcagtgcccagataacagcctggcacactgtaagtgttcagtaaatctttgttgaatcagtcaatgactgaagaattcctacaacctcacccagcaagatttggactgggcttccaatgctgggccccaggttagacgtgtgttccttgtgtttcaagcaacatgtggatatttctaccatagcacctacagcactttggtttgttgttgtcttgagaacaaaaacaaaggcttttttctcctgtattccttatggcacataaggggtattcagtacatgtttacggaatgagtaaatgaatgatttaaagcgtatttatgactttttggaagtcactcactctgcatccccagtgcagacattgagggttaagattttgttattctcagccgggcacagagcctcacgtctgtaatcccagcgctttgggaggccgaggcaggtggatcacttgaggtcaggagttcggaccagcctggccaacatggcgaaaccccatctctactaaaaatacaaaaattatccaggcatggtggcacacaccagtaatcccagctactcgggaggctgaggcaggagaatcagttgaaccaagagggagaggttgcagtaagccaagatcatgccagtgtactccagcctgggccacagagcaagcctccatctgaaaaaaaaaaaaaagaagattttgtttttctctacttgtgactgagatggtgagaccacaaggcagggcactgtgagcaagggtccagatttggacacccagggagttcctgaactttaactctgggaggggagtgtgagaacactgggttcctctcggtt

SEQ ID NO: 3292 - DNA, 4001 bp, Homo sapiens
caaaatcttgcagtataaggcgaaagaagctgccttttacccagcattcccagttgactcttacacatgtttatgaaccactgctttaagggaactggaatatgaccatggaccctacgctgcctgtgtaggccttataaacacacaagccctttttaaattaagagtcacctttcagctatacacagctaatatggtagctcataattaatctactggctatttaactctgctctcacctggcaatctaaaaagagtaaaaatttaaaactatgttgccctgttttgaccataagtaactggaaattactttcgggtagccttgtttttccaaatttagaattaaacattttagaaacactttcctttcagtcaccattctataattaaagacaacttgaacattgctcataatggcttttcattttgcttaggtcagagttttcacattctcttattcaagatcccttaccaacttaccaacctatctttccagccttccccccagaaaccccctcgtctgtccagaccacactgacccaaagacttttcattcatttctgcctctgcttttttactgaaatctttcttcccatccagcaggctcttcctttttcttattaaatcaccaagcatccttcaattgacatgtcccccccaaaagcctttcacatctgagcattctagttggatgtgagctcttcctcccaaacctttcccagactagtgcttttttcccacctatacacattgaactctcatccactgcttggcattgataattgtctcttcatgtgttttgcttccaaggcactgttccatatacctctcggtaaggtatccagcctgataggtgcattgtcagacaggaagtaagcagatcaataaatattagattatttgaaattcccatagatcctgtttttcacctgcttagcaagcagaacacactgttaattatagaaataatagttgattaatggccaagctggtcagaatgagagcccactcttccattacaggtaatcattgctctttctgattcatgattgtgctggaggtttttgtggacaccctgtgaacaatgctaaatctcagccagtgacttaccaatgagggcaattagtccccaaaacaccacggaggataacatggcggggaatcttatcttccaggacctgctctgatttgaaatagaaactggttaattttaaaacctgaaaatttcctaaagaaaaatttgctttgatattttaaaaagtttagagttatttccaattcactactcatttccctgtttcaagatagtattctcacaggctcagtacatagtttgttggcacactctctttcttaagcataaactcctaatctcacttcaatccaatttcatattgacatgagtcatgcgtatcttacatatgtaactaaatatacactcccatcccacctctaagcttggtaacaccacaattttgttccctttctttttaaaaaaaaaaatactgatcttttcattctagttattcaccctacccctggcttcaaggatcagttttggtctttcattcatttatttagaaatgggatcttgctctgtcacccaggctggagtgcagtggcataatcatagctcactatggcctcaaactcctgggctcaagcgatcctcccacctcagcctcctgagtagctggggcgacatatgcgtgccaccatgcctgggtgtttccattcttataccagggtctccgtagggaaaacaaaataaaacaaaataccaacaggagcatgagaacgtgacttagaagaggtttcctctgctccatttcttcctcaatcaactctattcttggtttcattcaaatggtagcttataagttttacaagacataagaaggccagcactaaccttgtttgcaaccttacagagaaaatctcccctctctgtttgcaaaggtcttctgtactcagcagcaaactgcacttcaagcttttacaaagcgacggcctttgtcctgtaacataggcttaacaattggagaatccattagtcagtagatcactgcgcacctggcttcaacagagtagacatcagcgtggctctactgctgtggaggaaacttttaaacaccagcatgaagactcacctggcttttcttaccttcgtcctgtaccaatgatcattagaggagctttatatatggtttaaaaccctctctttaaaccattgacctcattaggcctggttataatagtacttaggacttaggtgacccaattaataagaggatttcaaagggcttattaaccactattaattaattaacctaatgaacccccaagttgctcaggaggcatattttgatagattgtttctagatatctaaaattgtgccaaacagcttctaaatttgcgaataagaaacagataattcactttaaaaggataacaggaaatactagcaatttttattcttggattggttatttacctgaaatattgggtctcctgctttttgttcccattccaatgtcatatgatccccgtaccagtatgtcacatgatctcaaaccactatgtcacatgatcatgataggtgaacttggctccttactccaatcccacttctgagaaaaaggtgcaagtgtggccacctgctctaggagatcaatgcaaaaccagggagtagcaacgtgagtgctcatttgcccatacttgctaaggatatgggaaaaaagattatagccagggatgaaaacttcttcaagaagagagtatctttcttcaggcttatgtccaaaggaagagaggaagcatattgtgcagccccaggaacaggaaatggaagggacgttcttgaaacaggcaaagcacattgcgctgaggggaggaagaagtctggtctgggtccttccacaagcgtgtccagtttctcagactgcacacagtcctcccccacatccactgagtgaagaaaggtggaaggcagctgtacagggaacaggaagacaaaaccacaggcaacttcccagctccctggcaataaaaccacctccactcccaggagaacatgccctccccaagctgaggtctgcacagtccactggcattcacttctgccctgcctgccttcctgcttgtagaacagacgtctctggcatggcctctagccttccatccctggaagagtggcagggctgttctgagccaatggatgattcctacctgactctcaggaaagtgacccatggagggtctgctccaccaccatcaacactgcagtcaggaccactcttgaataagggatattgcaggagtctaactgccctgaggcaggccttagaaacccatagtctatgacccagcgacattgtgcccgtgacccacttcactgcagggtgagtagagccacttacctgaggcttccaggctaagtgcaatgagaaagctcaagaaagggagattaagaagttacgaatgataagttaggtaaaagagagtaggtggaggctggggctctccctacatgcactggaagaagacattgttaataaaacatttaaagcactgttgaatgtgaagaatacttatccttctgctctcagttagtggggctacgagtccttctaggtatgaggtccttaatgtccaggcttctgcaactcaaccaaaattgttttcaaactgatgtggattgttctgttcactcaagctgtgagagaacaattgaacatttatttgacacccaacattagtcaggttcctatggatattatatgactcaatcctccactggccctgtgaggcaggtattatcccttattttagagatgaggaaactgtgactcagagaagctaagtaacttgtcaaagatggcacagttagcatgtgacagagccaggatttgaatctaggcctgtaagattccaaaatccatgctcttccactgtatcgaagtgccagcacgatggacaaatgcctctgcagagcaatcat

SEQ ID NO: 3293 - DNA, 4001 bp, Homo sapiens
gtcggcggcgccactcccacggggtgccggaggcgccagacaacttggcagggttcgggagatgtcgccccctctccctcgcccagaacccagcaccgctcggaccctccctcctctcaagcccagcttctcccgacggtgcagccggacaagctgcagcccggagtcccgcaaacccgccgctccccgctctcctcctgcagcgcgggacttggacactttcccagcctcgcgccccggggcaccagtcgcggccgccaactcccgctgggcagccccagcgcagggctggccccgaggtgggcgccttgggggcaaaagggctggcgggtagatggattgtgcgcacctggcctcggctgctggcctctgggtattctcacctggaagcaagaacaatccgcaaaaagttgccgcgatgcctaggacccacattctcccggagtcccggggccgggagagggcaagcgcatcagaggaggcgacagcagcggaggctgccccggctgcagcggctgtggctgccgaggctgctggggcccgcgctgctgccgcggagacgacggtcgtagcttagaggagccgcaggtgccgctcgcggagcctgcatcgcccgcgctcgggctcccggctgcgggtctctgctcctcccgctcgcgctcccgggccgagcaccgcgcctccggagttggcggctgagactgaaggaactactggcgatcgggagcacccacaaaagtctcgccttttctccccacctcccactccaggcatcacgtgacggctgccgagttggggtgggggtggcgggcggggaaggctgggacggtcgcttcacatccccacccccttcctgtcttcctcttctcccgcctccgcacgttcctgggaaaggggcgccggggggcgggagagaactggtagttttctgagatggggaggttgggggagcggcgaggagggcgcagcaggtgccgtggggacctgccgggtgcggactagggtctgaggactgcgtgcccggctggcccttcgcacataggaaggcagcctccccactccacgtcctctgcgccttccaggactggtcggtaccccagcgactgggtccagcccacacaactgaggctgtcccgctgcgggccgcgggagcctggcgccccgggaggctgacaggaagggcgcgcgttcccgtgcgcctggcaaagttccacgcccgcaggctccgtagggtgtcctgtgcagctgtgccccctcttcctccgcgaaggccttctgtcaagaaccagctcggcgtggccaatctgggtgggggtgtggtggggacactgccttaactgtctcacttgcccgggccgccctcccttctcccgcctgcgcgcaccgctggagggtgcattgacaccgccctggtcgcctagcctaggagaacgccgtcccggggacacctgccgtgaggtcctaccagaaagcaaatcagggtgaggaagagggttgttctcctccattccttgtctcccaaacgccagccggctccattctgctttccccaaagccaccgattattagcacatactcccacgtcctctcctgaaaggccatcccagcctcggactcggcctctggctgctccccacacccctcaaattcgtcttctttccgcaaagtccaagtgacccaccttgcggactcccggggatgccccggtgctatcttcgccttccttcccgagccttgcagcaggtggtgcgggagaccgcttgcccgccggagtgcgttggtgcccccgcccccaatccgcacattcccatcccctttccgcacatccttagggagcatccatttccgtggaaatcgcctcctaagctttagctcctcttcacccttttctcccccggccacttctgggggcagctctctcacgccgggacgctgatcatttatttctgcatcctcccagcagagctggtctgtaaaggggcttaaatgactttctttgtaattcctctgcagagatcgttccatatctgcctcaggctccttctctccctccctccctccctctcccccttctttcatttctatttggttaacccctcggggagactgaaatgctttgaccattactcacctgtctgcagactctgatcttacaattggctaaattactatctctggagcaaaagggccaatttatttattccttctgggaacccattgtaagagcacgtgtgagtcatgattcaagtaactgactgggccaaaaggtccttgagcaagttattttctgttttcagagggtgcaaatgtgatataacttttattcagaaaggaaacaaaaagattttttaaagtctgaaagacaaggacattttacataattttcatttaagataaaataaaacaaattgcacaaattaaccaaataacactgatcatacaatactctttaaagaaacaattatgtgctaaagtagccatatagatcctaaaaatatttctattgggcctagtttacaagctcctgtacataagtaattataaatagttcacatctagaaaaaatacacataacctttaaaatagaatttatccttacatataaacagtctttgtagaaaaaaaaggatattaaaaagaattcttcgtagcaccattaattttatttttaaaagtgaacattgcaaatagaaatttgttttcatttttagagtgcccagattttaataaaaagagcaagaagataaaaatcaaataatattcaggatcatagagaagcactaagtaaaagacaatctaaagaaatgtctggaaggaaaaactggtattgggaatagaattcggtcatttctgatacaatgtcacactcccaatcagtgtccacacttcaggacccttttcatttttcagcagaagcagaatgacacttattactatcacctgaatctctggcaacgaatctgaaattacactaaaatgaacatttccatcaaattgagatttgtgagatggagatgaggaggaaccctccgattttttggcaggccctgttgtaggtttacagagtgtacccacaaacaatttgaggaccaggacaacgaacttcacaaaaacttcagttgggattttaaaaaatatatattatcatcaacttctaagacttagtacattatttcaagagcatggcactgattccatttattgctgtctttttttgctacaaatataatttctcttccaaaaaatttacaacttctgtacaaatattcaaaaaaagtgcaaaattaaggattctgtatcatagatgtgtttacgcttaatcctcttgaaacacaataaatggagtctatctttattgccctgtcagagaaataagctctggtgggttgcctgctgtgaatttgacaaggaaggctctggtactgcaatagtttattgttatctctatcaagcggtgcaccccccaccccccacccatcatttcttaagcgctccagtcccagctcactaagggaagagatgtcctttatacatcatttgaaccttgactggcacaggaagagaagctatcatataaagaatcactcaaagattccaagttgtctaccccaggcctatctgaactactcaaagatgtctcttcatttttttctttttcttccttctgtccttcaaccttgttcagagagttcttctctttttctaataaaatcacagtattgctgttaaatttattgaatgactctagggaaattttcgataatctattctcgggatcgtcttttgtttcttcaagttgtctcaatttctgcaataaaaagaagaaaatattagaaacatatttctttggaaaatcaagttatcctatctaatattcaattattgtctgtataaagtacagtttaaagggacagagaaaacctacaagtctttaataatcttctagtataattagatgtaataataaagccaattttagggataaatcaggactttaatca

SEQ ID NO: 3294 - DNA, 4001 bp, Homo sapiens
ttgctaattggttacaaattacttaattactattttggcaccattcgtgattacattcgcagacgtctttttagtttttatttatttaatttttaaagtcagcgtttctgtgccagggctctgaggatccctgagcgaccacctgggaacaacttgggtggaggtgccagacgccaagcgctgctgcgccgcaagtccccgagcccgggtcggcggcccttctccggggccgtccccgcggcgacccgaatggccacagagggtgggaaagggcgtttgtgagcgcgcgcaccctggatccccgaccccgcagccctttcttccaggccccggctttcaggacaaccgttcgactagggtcagtggtcggggttccagctctgcagagcttagtcgggagccagtaggcgaactggagagaggacgcgagacctttgcgcctctggacgcttcggcctggctgttctcggtgtacgcgctcctgtctagacccaactacccacgctcccgcagccccacatctatcgcactctgagcgcagcaacccagcttcagcgtggccgcaggctgcctcgcgcatcgctcacctgtcggcggcgccactcccacggggtgccggaggcgccagacaacttggcagggttcgggagatgtcgccccctctccctcgcccagaacccagcaccgctcggaccctccctcctctcaagcccagcttctcccgacggtgcagccggacaagctgcagcccggagtcccgcaaacccgccgctccccgctctcctcctgcagcgcgggacttggacactttcccagcctcgcgccccggggcaccagtcgcggccgccaactcccgctgggcagccccagcgcagggctggccccgaggtgggcgccttgggggcaaaagggctggcgggtagatggattgtgcgcacctggcctcggctgctggcctctgggtattctcacctggaagcaagaacaatccgcaaaaagttgccgcgatgcctaggacccacattctcccggagtcccggggccgggagagggcaagcgcatcagaggaggcgacagcagcggaggctgccccggctgcagcggctgtggctgccgaggctgctggggcccgcgctgctgccgcggagacgacggtcgtagcttagaggagccgcaggtgccgctcgcggagcctgcatcgcccgcgctcgggctcccggctgcgggtctctgctcctcccgctcgcgctcccgggccgagcaccgcgcctccggagttggcggctgagactgaaggaactactggcgatcgggagcacccacaaaagtctcgccttttctccccacctcccactccaggcatcacgtgacggctgccgagttggggtgggggtggcgggcggggaaggctgggacggtcgcttcacatccccacccccttcctgtcttcctcttctcccgcctccgcacgttcctgggaaaggggcgccggggggcgggagagaactggtagttttctgagatggggaggttgggggagcggcgaggagggcgcagcaggtgccgtggggacctgccgggtgcggactagggtctgaggactgcgtgcccggctggcccttcgcacataggaaggcagcctccccactccacgtcctctgcgccttccaggactggtcggtaccccagcgactgggtccagcccacacaactgaggctgtcccgctgcgggccgcgggagcctggcgccccgggaggctgacaggaagggcgcgcgttcccgtgcgcctggcaaagttccacgcccgcaggctccgtagggtgtcctgtgcagctgtgccccctcttcctccgcgaaggccttctgtcaagaaccagctcggcgtggccaatctgggtgggggtgtggtggggacactgccttaactgtctcacttgcccgggccgccctcccttctcccgcctgcgcgcaccgctggagggtgcattgacaccgccctggtcgcctagcctaggagaacgccgtcccggggacacctgccgtgaggtcctaccagaaagcaaatcagggtgaggaagagggttgttctcctccattccttgtctcccaaacgccagccggctccattctgctttccccaaagccaccgattattagcacatactcccacgtcctctcctgaaaggccatcccagcctcggactcggcctctggctgctccccacacccctcaaattcgtcttctttccgcaaagtccaagtgacccaccttgcggactcccggggatgccccggtgctatcttcgccttccttcccgagccttgcagcaggtggtgcgggagaccgcttgcccgccggagtgcgttggtgcccccgcccccaatccgcacattcccatcccctttccgcacatccttagggagcatccatttccgtggaaatcgcctcctaagctttagctcctcttcacccttttctcccccggccacttctgggggcagctctctcacgccgggacgctgatcatttatttctgcatcctcccagcagagctggtctgtaaaggggcttaaatgactttctttgtaattcctctgcagagatcgttccatatctgcctcaggctccttctctccctccctccctccctctcccccttctttcatttctatttggttaacccctcggggagactgaaatgctttgaccattactcacctgtctgcagactctgatcttacaattggctaaattactatctctggagcaaaagggccaatttatttattccttctgggaacccattgtaagagcacgtgtgagtcatgattcaagtaactgactgggccaaaaggtccttgagcaagttattttctgttttcagagggtgcaaatgtgatataacttttattcagaaaggaaacaaaaagattttttaaagtctgaaagacaaggacattttacataattttcatttaagataaaataaaacaaattgcacaaattaaccaaataacactgatcatacaatactctttaaagaaacaattatgtgctaaagtagccatatagatcctaaaaatatttctattgggcctagtttacaagctcctgtacataagtaattataaatagttcacatctagaaaaaatacacataacctttaaaatagaatttatccttacatataaacagtctttgtagaaaaaaaaggatattaaaaagaattcttcgtagcaccattaattttatttttaaaagtgaacattgcaaatagaaatttgttttcatttttagagtgcccagattttaataaaaagagcaagaagataaaaatcaaataatattcaggatcatagagaagcactaagtaaaagacaatctaaagaaatgtctggaaggaaaaactggtattgggaatagaattcggtcatttctgatacaatgtcacactcccaatcagtgtccacacttcaggacccttttcatttttcagcagaagcagaatgacacttattactatcacctgaatctctggcaacgaatctgaaattacactaaaatgaacatttccatcaaattgagatttgtgagatggagatgaggaggaaccctccgattttttggcaggccctgttgtaggtttacagagtgtacccacaaacaatttgaggaccaggacaacgaacttcacaaaaacttcagttgggattttaaaaaatatatattatcatcaacttctaagacttagtacattatttcaagagcatggcactgattccatttattgctgtctttttttgctacaaatataatttctcttccaaaaaatttacaacttctgtacaaatattcaaaaaaagtgcaaaattaaggattctgtatcatagatgtgtttacgcttaatcctcttgaaacacaataaatggagtctatctttattgccctgtcagagaaataagctctggtgggttgcctgctgtgaatttgacaaggaa

SEQ ID NO: 3295 - DNA, 4001 bp, Homo sapiens
atccaaaattttaaacagctagctcgagttcctctcactcgaaagaaaatgtaatggctttaagggaattgctctaataatatcatggcatctgcaatggctggccagagcagagcagaacagtgtgtatgtcaccgcaagtcaatttaacaagaaataagcttccccctggagaatctaaactcccttgcctcccacaaagaaaattgaattttggaggtcacaccttgggtaggttaccatagaaagaagcttaacattctttttgtcatatgctctgggaggtcaatgctgttcttccaacaagtgactaccaaagaccctcttccattcccccccacccaattctctcccccgatcccattataacaagtctttggagtcctctaggaaacgggatgtgattgtgacacttgaaaatgccaaggaccacaccgaaggcaatcatgctcaaacaccaagttttgagccccgcagtgaggagcagggcagatactggggcgggagaggggactggaggagggcagcggtagagatagtgaggatatggtgggggtcagagcgagtcagaccgtcagatagtgagctttaggttgtaactgaacgcttagccaaatgtgaatcaacggaactgctgttaccggagagaaaaacaggtcgccaagtcaagcccaggccaaatcccaactctgtgggtggatggtcccttccctgggttgtcggggtggatggctgaaaggcctagcgtggtcttgcagcggcggggaggtacctccagcacactgcacctcccttagaggctccgggtggccgcagccgggctaccgccactgccccccgccccgcagcaacatgtggggtgctgccagtccgccgcccaggaactccctccggctggagttcctggtggacgcatgttgggccgtgagaagatgctgaattactcctgggaaaggttcctccagccttgaacttggcagctcctgacctttccatcccaccctccacgcgccagcccaacacacacgagtacacacgcccctctggacccgtccaggctactcgcggggctctctgcccactaggggcaaaacgccggaggccgggaccccagttcctctggccccaggggactgccctagcatcgggtagttccagggactcagcgcactccctgccttggccaggccccgcctaagccggggccgctggcaccaatcccctgttcttttgtgctctcccgggaagcccgcctctactcacccgggctgcgcgcggattccggccgccagctgcagcccgctgccccatcccacgaacactgcggcgcccccagagtgtgcaatgcggcgccccgccagcccgctgccggagcccgggagctcagggaaggagcgagggagcgcagcggggagaggcggggggcggctaggggcgcgcgcgccactcccactcgcgccgggcactggccgccgcccgcagccgcggccggcccggcctcgagggccgcgggaccaatcagcgcgcgcggggggagcggagccctccgcggggcgcgctcattggcccggcgcgcgcggcccaactccgggagaatcggcctgagcgccaagtctgcaaactccggccagcgggagccgaccgcccggcgcaggtggggcacccgggcgccgcgctcccgcccgcagggtgagcggaactggagagatttgggaccttcccgggaagcctgttcccagtgagcgttggaagcgagcagtgtttgctcagggtgcaccgataccttcctgtgcgcgaccccctggcgcctctccctagccgccagcctcagccgggccagcagctgcgtgcgtggctgcaggcccggcagtgtgaaatgaccctggccaaatctcactccccgccatcccctgggccccgcgaaatccgccggaccgcagagctcaagagcaagtgaagctccgaacccagggaaggcggagaccacttgacgtttgcagtaaaagacctaagctgcggggcggagcatggaggcggtgggaagagccaggaaggcaggtcttaggaagtgggaatccggttatgggtttggtgcaaaaaagtccagggcataatactgccaccctctgcccaacccttcctccagttaaagcccctgcagccctcttgggacgtattggtttttctcttccttgttgtaaatcgtgtttgacccccctggacggttcgatctagagccttagagtggaagtgggtcatagtcctactctcccctgagcagcgcggggggccggcggggagccggggtgaccggggaaggtccccaggaaggtctggaaggactccacggatatgcccggaaactcggaaccagcctccccacctccccccgaacttggcctgcaaggctaccttcgtaagggcggcccgccatgtggctatttgtcgatctttgagacccctccaccttctccttggattttctacccctggagcattttttcaggcctctcctgaatcaccctgccttcccaataatctatccatcccaacataaaaacattcttactcttttttaaattaaacttccttccccagtccctctatttggaagggcctaggataacctatttttgatcgacagctgctagacctcagaaagtttttctcttagtgtatgtgcacaggcttgcccaagctcagggttcaagtaggcaaaaaataattagcgccccctcaaggtggagatcgctgccgcgctgtcttcctgcagggctcagcagggtgaatgaattgaatatgaattaatcaacctgaacttggaaatgtctctccgtgtctaggcaggttacctctgcgggttagcatctactaatgagggcatgtcccgggtgtcactgctgacactcatttagtttccagttggcagttccggtccatgtacttattcactttatttaaaaaaaatcggtgcatagtttagtgaaaatattcatatttgggttcaaagtgaagttcaacgtattaatgcagtttatgagagccgagttcctggtagagatggaacccttaggatctcttttcagaaatatattttcaaagaaggctggaaagatatgcatatgaaatgtctgcagtggttatctctgcgtgttgggataatggatggttttcttgttctttatactttacggtattttctaaagaacattaatattaatttaaaaatttttttaaaatgttgactaccaacatacaacactcctcaggcatcagaagagcgaaaatgttaaatcttccttctgcttttcccttcacatcttgtcaatcgcccagtcctgtgtttctgtctcctaggatgacttctagatccatccctcccagcatctctatttcactgccagacctcatcatgccttaccagcgcttcagcaacaggctttcactgctctgctctccagtcgaccacacgctgccctctctatttcagaatcactaatgtaatcatgtcactttcaagcttaaaattcttcagttccaaccccactgtgaggaagttcaaatggagcctggttggcaaggcgtttccttcccagtccgttcccagctttccacgttggtctcatcttctgtcctcacagttccgcaggcaggatggttctgctccacctacaactgcctgtccgtggaccttcacacacccatgtctaagatttcatagtgctagaatgctgtgcttctcttccttctcaactctctcctgccccaacagcaagttcctatctttgcttcaagattcacttcgaataccacctttttaaaaatcaagtcttcgaaactgcccggggcagaattaagcaacgccttctttctgtacatcagaagcaagcttttttttttttttttttttttttttttgacggagtctcactctgctgcccaggctggagcaaagtgacgcgatgaagaaaacatacattgtatttacactcctggagtgc

SEQ ID NO: 3296 - DNA, 4001 bp, Homo sapiens
taatagtagatttcaatatgccatataaactatccagtatgatacaacacatggtatggttttttacttgatattatttgcctagaatcagcccgatttatgcattatgtactataaacattcaccttacaaagactgtcaacagcttgagagtgtagcttcatcaattgtctgtcttaattggtctggaagcatttccattatttctaactcaaggaaccatttcacaatttttaacaagctttgtgtgcctacaagctcagaaagcttactgtgtgctctcaggactagagttctataaacctctatttaaacaaggaagcctcttttaagtcttatttcagtctggtgcctttggtcgaggtggaaactaaaattgaaaacagatagatgttttacatttaaatgggtttaacataaatgtgcattaacccatttcatgggcgattgcacaaataccttttgcaaacttggtacacgtgagcgcatatacagtaaccattaatgtcttctagagaaataaggtgcagatccaaaattttaaacagctagctcgagttcctctcactcgaaagaaaatgtaatggctttaagggaattgctctaataatatcatggcatctgcaatggctggccagagcagagcagaacagtgtgtatgtcaccgcaagtcaatttaacaagaaataagcttccccctggagaatctaaactcccttgcctcccacaaagaaaattgaattttggaggtcacaccttgggtaggttaccatagaaagaagcttaacattctttttgtcatatgctctgggaggtcaatgctgttcttccaacaagtgactaccaaagaccctcttccattcccccccacccaattctctcccccgatcccattataacaagtctttggagtcctctaggaaacgggatgtgattgtgacacttgaaaatgccaaggaccacaccgaaggcaatcatgctcaaacaccaagttttgagccccgcagtgaggagcagggcagatactggggcgggagaggggactggaggagggcagcggtagagatagtgaggatatggtgggggtcagagcgagtcagaccgtcagatagtgagctttaggttgtaactgaacgcttagccaaatgtgaatcaacggaactgctgttaccggagagaaaaacaggtcgccaagtcaagcccaggccaaatcccaactctgtgggtggatggtcccttccctgggttgtcggggtggatggctgaaaggcctagcgtggtcttgcagcggcggggaggtacctccagcacactgcacctcccttagaggctccgggtggccgcagccgggctaccgccactgccccccgccccgcagcaacatgtggggtgctgccagtccgccgcccaggaactccctccggctggagttcctggtggacgcatgttgggccgtgagaagatgctgaattactcctgggaaaggttcctccagccttgaacttggcagctcctgacctttccatcccaccctccacgcgccagcccaacacacacgagtacacacgcccctctggacccgtccaggctactcgcggggctctctgcccactaggggcaaaacgccggaggccgggaccccagttcctctggccccaggggactgccctagcatcgggtagttccagggactcagcgcactccctgccttggccaggccccgcctaagccggggccgctggcaccaatcccctgttcttttgtgctctcccgggaagcccgcctctactcacccgggctgcgcgcggattccggccgccagctgcagcccgctgccccatcccacgaacactgcggcgcccccagagtgtgcaatgcggcgccccgccagcccgctgccggagcccgggagctcagggaaggagcgagggagcgcagcggggagaggcggggggcggctaggggcgcgcgcgccactcccactcgcgccgggcactggccgccgcccgcagccgcggccggcccggcctcgagggccgcgggaccaatcagcgcgcgcggggggagcggagccctccgcggggcgcgctcattggcccggcgcgcgcggcccaactccgggagaatcggcctgagcgccaagtctgcaaactccggccagcgggagccgaccgcccggcgcaggtggggcacccgggcgccgcgctcccgcccgcagggtgagcggaactggagagatttgggaccttcccgggaagcctgttcccagtgagcgttggaagcgagcagtgtttgctcagggtgcaccgataccttcctgtgcgcgaccccctggcgcctctccctagccgccagcctcagccgggccagcagctgcgtgcgtggctgcaggcccggcagtgtgaaatgaccctggccaaatctcactccccgccatcccctgggccccgcgaaatccgccggaccgcagagctcaagagcaagtgaagctccgaacccagggaaggcggagaccacttgacgtttgcagtaaaagacctaagctgcggggcggagcatggaggcggtgggaagagccaggaaggcaggtcttaggaagtgggaatccggttatgggtttggtgcaaaaaagtccagggcataatactgccaccctctgcccaacccttcctccagttaaagcccctgcagccctcttgggacgtattggtttttctcttccttgttgtaaatcgtgtttgacccccctggacggttcgatctagagccttagagtggaagtgggtcatagtcctactctcccctgagcagcgcggggggccggcggggagccggggtgaccggggaaggtccccaggaaggtctggaaggactccacggatatgcccggaaactcggaaccagcctccccacctccccccgaacttggcctgcaaggctaccttcgtaagggcggcccgccatgtggctatttgtcgatctttgagacccctccaccttctccttggattttctacccctggagcattttttcaggcctctcctgaatcaccctgccttcccaataatctatccatcccaacataaaaacattcttactcttttttaaattaaacttccttccccagtccctctatttggaagggcctaggataacctatttttgatcgacagctgctagacctcagaaagtttttctcttagtgtatgtgcacaggcttgcccaagctcagggttcaagtaggcaaaaaataattagcgccccctcaaggtggagatcgctgccgcgctgtcttcctgcagggctcagcagggtgaatgaattgaatatgaattaatcaacctgaacttggaaatgtctctccgtgtctaggcaggttacctctgcgggttagcatctactaatgagggcatgtcccgggtgtcactgctgacactcatttagtttccagttggcagttccggtccatgtacttattcactttatttaaaaaaaatcggtgcatagtttagtgaaaatattcatatttgggttcaaagtgaagttcaacgtattaatgcagtttatgagagccgagttcctggtagagatggaacccttaggatctcttttcagaaatatattttcaaagaaggctggaaagatatgcatatgaaatgtctgcagtggttatctctgcgtgttgggataatggatggttttcttgttctttatactttacggtattttctaaagaacattaatattaatttaaaaatttttttaaaatgttgactaccaacatacaacactcctcaggcatcagaagagcgaaaatgttaaatcttccttctgcttttcccttcacatcttgtcaatcgcccagtcctgtgtttctgtctcctaggatgacttctagatccatccctcccagcatctctatttcactgccagacctcatcatgccttaccagcgcttcagcaacaggctttcactgctctgctctccagtcgaccacac

SEQ ID NO: 3297 - DNA, 4001 bp, Homo sapiens
gatcacttgaggttaggagttcgagaccagcctggccaacatggtgaaacctcatctccactaaaaatacaaaaattagtcccacgtggtggccggcgcctgtaactccagctacttgggaggctgaggcaggataatcgcttggacctgggaggtggaggttgcatgcagtgagccgagatcacaccactgcactccagcctgggtgacagagtgagagtctgtctcaaaagaaaaaaaaaaaaagagagagagagagagagacagagagagactgctatacggatagagaagatgggattctctctctccctctttgtctctgtctctctctctgaaggagcagataagcctgaaggtgcaagtcctatttatcgtccatactaagaaccagtaaacacagagagaaaaacagctaagatatacaagagagagaactagccctggaaccttgtatgagcctctggaactagctatagctttaaactgaaaccctcgaccttttcatttatgtgacccaatcaatttctacatagtataaggcaattttcaagtgaccaaaacccaacccaaagaaaacaattctgacaaatacgatgggtaatgatgagggcagtctgacaacaccccctccatctgcagggcccgtgcactggcagccctaatcttggcctctgtgatgctgtcagcaagtaaggcatcctggaggaagcctaaccatgaacaagtcagggtgggaaagaatgcccccaccccacaacacacacatcaccacatcaacacaaagggggaaaaatcaagcagtatgctatgtactccatgaacatcatataacctaagtctgttgtaatgattataatattaataatacctattttactttaagggaactgaggctcagagcagttcagtaacttgcccaaggtcacacagctagttactggaatttaaatagcattctagacttttcccactctctgatcccctggccttgggaggtggacagcacccctccacccaccagctccccccaaacgccacagggcatacagacctgaagcctcacaacccaagccccctggagtcagagcagcctccagacccggcttttgagaagccccaggtaactaaccaatgtgtaaggtaggttattcaacaacaaaagtaaagagccggggcaagggaagcggcggcacccaagctggtcgcgcgtgaagcgctgcagggggaaacactggagctggcacgctcgctcttggccccacgatcggccttgaaccccagccccagctccgcgctctctccagcagtttgacccccagtatctcctctcccctcggctctgccgaagtcactggccccgcagggctctggacgattagagacccacaccgctccagccttgccccggccccctgctcccgtcccgtccagatgttggcagctgctcgcctcgaggcagcgaccagaccccgaccccgccactgcgccgcggccccgcggccccgcggccccgcggccccgcgagctcctggctgccccagcgcgcccagaaggggcgcagcgcatctcccgccgcagtcgcgcggccccgcactcgctccggcgcggggtgagccgtcccgaacccaccaccgcccccgcctgctgcgctggcccagctcacctcgccgcccgcgcccaccgagcctctcggcgccctcacccggctcccggcccaggctcccagcgcacccgcctggggccggcgttggctgctaccgcgcggggcggggcgcggctcctccctgccctgaaccacctggggcgcgggagggggccgggccgggacaggtgagcctcgcccgcgagggagcagccccgggcccggctccgctgggaaaccgcagggctccaccacgaggttgaaaggaggcccaggcgggcggcagtgtggtagtggccagcgctggggaggcggcaaggagcctgttcccacccagccagcccggctcaggaagtgaaagaagcacgggattcggaccccacccagcttaaagaggggagggtccaacccctttcttcctagaaaaccaatgtagaaacgaggagtgcagaccctcgggagtgaaaatgattgggccaagggtgcaggtgagttagttcaggattggaagaactctgaaagaccttttttgaccattccatccaaccccgtccccaccttgcccacccgtcaagtgattccctccccctttttaaataatgacattaagctataaataagataatttcatatagtgacgtcctccccacccctggacggtaagccccaggagaggcaggaaccttacccgtccactactgaatcaccagagctttgaaaactcagggcatttaatacctgatgaacagactaggtggcgcccagtcttttgcgtccagcgttagactggtcccctcggcccagagctgctccagcatcattccaagcttactagggagaatccagaggcaagctgttagattccgggccacctgtcctctctctactgcttactccccacccactgccagccaggcagctgggatgtgggaggtctacactcccagggcaccttatagtggtcaagcaaatctttaacttctgaagatgccacagacaggagaactctgaaataaaacactgtccggccagccttgcactgtggaaacacagctcagagtatgggccactgacccaagattccatggctggtagcaaagctgatcctgggtctgcatttctaaagacagttggctggtctggggcctttgaggggctgctggttatgcctgcagtggggaaacctgggtacagaacttctgcagaagtggggtctgggtttggtcctctgctgagacttctaatctgtctttccagacctctgaggtcaagcatctcctgagccagcttgcatttattgaggcccctgacaaccgcaaaaacaaaaacaatggtatttttaggtgttccatttaacaaatggccttcactcacacacacacacacacacacacacacacacacacacacacacgaggtaatgtgtcatgctgctcctcacatgttaatttcaagactcgttaaaaaaatccattccgtgaaaaaattcatttcactgcagaaagcactgtacaactttaaagttgtatggagaacattccttcttatgactatttcagtacacttccgtgactatatattaaacctccaaggccaaaatgggaggatctctattaaggtgaggtcagggccaagaagactgctccacccctccactgacaacaagcccaacactcttaaggtctagacaccccaccccttcagtgggttctgcacatatgggtatttcagatctggtgttacctggctggctacgtcacactgggcaaggccaacctagaaaaggttatatgggatgccccacctaggtgtgccctacctcagttgctactccctctatggtggcagggaatctggtgtcccagggtggagctgtggtggggcctgcactttgggacagccacttgcaccagcaggtagggctgagcaaaggagcacctctgggtctcactcacatgaaatggacctagacctttttttgtgttggtttcagtcagtagagcatgtgatcccctgtgatttaaaatcctgctgctgtgcgtgtgatcttggctgggccagcctgctaagtgatgccacccagacaggcctgagaatcatcaggagggtacaggttctgccccagtgcttgcttgcttgcacgtgatctctccctccccaccccactctctctcctgtgcttgctgagcagccttgggcatgttcctcaattgtgtgtttttcctacttggaaaatgtgcagccatgaaatcagacaagatctctgtttgaagttttttgcttaaaaggggtatctgaaataagaagttctgatactgttgtgtggctaagttaaataatccacgtaaagtgcttg

SEQ ID NO: 3298 - DNA, 4001 bp, Homo sapiens
tggagttaaaggagaaacagctgactatgagagtgttgacactgcctccacctgatagactctagagaagcagccagaggaatttagtgaaggcaaacttatcaacatacttgaggaaagtcattgtgatgaaaaggatgaagacatcctacagaaagggccactggcaaaaagcttcattattaaagaaactttcagagatattttacaaaattgaaggtacaaaggataaaatgtaggaaactaacccaaacttagaaagaagtatgtcagtttgccaagacacacaaaaaatgtttgctctctcataagttttactatgagagttttttttcaacaaataaaacactttagctctcaatgtttctaatgttttaagttagtgtatgaaatagttttactgttttacatttccctatacagttagtaagaaagttttagtgttttgacaatttttcaaggttatagaacaactgtaatttttcccattggtgtttaagatctctttgaatggtttcagcttgcagtcatttttcaatcccacactaatgtgcaattggaagactgtattttaaatgaggtaagaggcagctctcttccttacatcctcaaacatcatcaattcatgcatctgatgtgtctgggcatagtactaaacaggctctgaccttattctgaccctatactctccacttttgccaagaacactcgcttaatgaattctccctgcaaactggttaaaactggaactgggccttgaaccactccaaaccaccaagttatgcccaaactaaaaaccctccaaggacttccaattacaccactggaaacagaatccaatatctttaccctggccctaaagttctgcttgtgccttctgcccaactctccatcctcacactaggccctcccctgcccgcaccccgggagatccacctctcacagatcggcttctcgctgtgtctgcctctgcggatgttctgttccgtgctgagcattctaggttagggcccctttacaagccctcattcactttgtcgcgtgataaacgattcaatggttctccctctggcagggccctattaaagatttcgtgggccctaaggcactttcgtcttcgtggaccccttcctccattaaaaaaagattaaaagaagttaatggattttgtaggccctaaaaatctcatttccccctcctgatgtgagaaaaaaatcaaaacactttctttgacttcatgggttcactttaaacgaaatgaaaacattctcgtggccgggcacggtggctcacgcctgtaatcgcagcactttaggaggccgaggcgggcggatcacgaggtcaggagttcgagagcagcctggccaacatagggaaaccatgtctctactaaaaatataaaaaaattagccaggcgtggtggcgggagcctgtaattccagcttactcgagaagctgaggcggagaatcacttgaacccgggaggcggaggttgcagtgagccgagatcacgccattgcactccagcttgggcaacaagggtgaaactccgtctcaaaaacaaagcaaaaccagaagaaaaaaaattctcgtggctccctgaagcctccgtggtccctcggcatggcgcctaccgtgcctggcggatcagcagcccggccctcgggcctgggggccccgcggaggaagctccgggcccagactccgcgcaggcctggccgcccagaacagtatgcggagggatgactccgacagcgatttcggagcctctctcggcgtcagtcttgcgccggcacccgccacggccagcgcaaccaacacctgcctgaggactggcccgagctcggcccacgcccagcccagcctgcgaagtggtgccggctgctctcgggctgccctccctccccgaggcgtggagaaccgtacctgtcttcggaagacggaggccccctcacctggtcctcccggctctcagcgtgcgcccgcgcgttcggaggcgcccccctcaggccggcgcggctgggcgggaggctcactgcgggcaaggcggggcctggctgcctcagggtgcgcttcaggtggcgcttcaggaaaacggtctccaagtccctagataccctgagaacagtccttctttgtcccttaggtagaattttgtctatttgttggaaatgctgtgctaaacctgacatttttctttttctaccccttcccatgaaacatgccagtagctcccccaccgaccgttttcttggttttaacttttcccttccacatcatttccttcagccagtcgctattttgttcactaaacatctgtggtgggcacgttatgtgccacgcattgtgctaggattggagtacagtggatgtacagacaatggtcactgccctcatggaagttatagctgccttcacaaagttcttttaagtcttttcaaactcctgtattccaagagggtctgtcgctctcttcatactcattctcgcttacttgaggttgattcccatagtccctttgacgaactccagatggggtaggagcgtcctggtccttaacagttggttggtctgggtcttcaactctggttaaaaaggaattctctgaattagtccacaggagagggaaagataatgctagttccaagctagaaatgtacaagcagttttccttgttttctttattattattattgttattttctcagttcattgtctagatgcaggttggaggtggggtggggcaatatttcaatgagtggcacaggataggttagatgtttcaacaggaaaagagttgcctgcttgtattctagtcccactaaaccattttgctcctatcaactgttcctcaggtaagaacagaactatttaacctatgtccttttttaaacactataatctgatattcaatagagttcctgtgtttcagtttaaagggtagcttctcaacagctctttccccccatatagtccaaattagcctttctgtctctaatctccagattatcgtttccactgatgttagaattgtccttgtaaaaatattttgatcatatcattctttgtcttaaaaatggcttatgtttccttttcggttagagggtccattataactgaccccacctaccttactaggctcaaccccagcattacctgtcttactcccctttgtgttgctataccagaataccacagaacaactaacttgtaaataaaggaaatgtattcttaaattctggagggtaggaattccaaggttgagaatcccacatctagtgagggcattttttctgtgtcatcccatggcagaaggcagaagggcaaggggtacaaaagagcaagacagcaatagggagctgaactcacttttacaacaaacccactctctcaataactaactcatttccaagataatgacattaattcatttatgggggcagagcccttatggcctaatcacctcttgttaggccccacctctgaacactattccattgggtactaagtttccagcaaatgaactttgggggacgcattcaaacttgagcactagcctcactccaaaccataccacccattgctcctacctactattaatttctttccgtaccctctatagcatttattaaaaatatgcaaagaactgtaccagaaatggggactatgacataagaattgttttctgagggtgataaactataatggtcatgagaaagcaccttgcagactttaaactacaaggagtgtaactgaccaagggcatcagctgctgccttagaaatctactgccacgactgggctccgtggttcacgcctgtaatcccagcactttgggaggccgaggcgggtggatcacctgaggtcaggagttcgagaccagcctgaccaacatggagaaaccccatctctactaaaaatccaaaattagccgggcatggtggtgcatgcctgtaatcccagctactcggaaggctgaggcaggagaaacacttgaaccc

SEQ ID NO: 3299 - DNA, 4001 bp, Homo sapiens
agtatcaatagtatagtatactgatatagcgtactgatataatatagtgatcagtgcatcatgatcagtaattaattatatcacttctttcaaagtctgttggtgacccgtcactgcagatccattagtcagttaaagcacagacagaagtgtgtagttgtgtcgcctccttgtctcctagtgataagcccatgtgatgttttataaaaacaaaaactgaaagaggaaactagccgataaaaggagcagcaaagaaataaaaaatgataatgccaggagtgaaatctgaatctaacataagtggagttaaaggagaaacagctgactatgagagtgttgacactgcctccacctgatagactctagagaagcagccagaggaatttagtgaaggcaaacttatcaacatacttgaggaaagtcattgtgatgaaaaggatgaagacatcctacagaaagggccactggcaaaaagcttcattattaaagaaactttcagagatattttacaaaattgaaggtacaaaggataaaatgtaggaaactaacccaaacttagaaagaagtatgtcagtttgccaagacacacaaaaaatgtttgctctctcataagttttactatgagagttttttttcaacaaataaaacactttagctctcaatgtttctaatgttttaagttagtgtatgaaatagttttactgttttacatttccctatacagttagtaagaaagttttagtgttttgacaatttttcaaggttatagaacaactgtaatttttcccattggtgtttaagatctctttgaatggtttcagcttgcagtcatttttcaatcccacactaatgtgcaattggaagactgtattttaaatgaggtaagaggcagctctcttccttacatcctcaaacatcatcaattcatgcatctgatgtgtctgggcatagtactaaacaggctctgaccttattctgaccctatactctccacttttgccaagaacactcgcttaatgaattctccctgcaaactggttaaaactggaactgggccttgaaccactccaaaccaccaagttatgcccaaactaaaaaccctccaaggacttccaattacaccactggaaacagaatccaatatctttaccctggccctaaagttctgcttgtgccttctgcccaactctccatcctcacactaggccctcccctgcccgcaccccgggagatccacctctcacagatcggcttctcgctgtgtctgcctctgcggatgttctgttccgtgctgagcattctaggttagggcccctttacaagccctcattcactttgtcgcgtgataaacgattcaatggttctccctctggcagggccctattaaagatttcgtgggccctaaggcactttcgtcttcgtggaccccttcctccattaaaaaaagattaaaagaagttaatggattttgtaggccctaaaaatctcatttccccctcctgatgtgagaaaaaaatcaaaacactttctttgacttcatgggttcactttaaacgaaatgaaaacattctcgtggccgggcacggtggctcacgcctgtaatcgcagcactttaggaggccgaggcgggcggatcacgaggtcaggagttcgagagcagcctggccaacatagggaaaccatgtctctactaaaaatataaaaaaattagccaggcgtggtggcgggagcctgtaattccagcttactcgagaagctgaggcggagaatcacttgaacccgggaggcggaggttgcagtgagccgagatcacgccattgcactccagcttgggcaacaagggtgaaactccgtctcaaaaacaaagcaaaaccagaagaaaaaaaattctcgtggctccctgaagcctccgtggtccctcggcatggcgcctaccgtgcctggcggatcagcagcccggccctcgggcctgggggccccgcggaggaagctccgggcccagactccgcgcaggcctggccgcccagaacagtatgcggagggatgactccgacagcgatttcggagcctctctcggcgtcagtcttgcgccggcacccgccacggccagcgcaaccaacacctgcctgaggactggcccgagctcggcccacgcccagcccagcctgcgaagtggtgccggctgctctcgggctgccctccctccccgaggcgtggagaaccgtacctgtcttcggaagacggaggccccctcacctggtcctcccggctctcagcgtgcgcccgcgcgttcggaggcgcccccctcaggccggcgcggctgggcgggaggctcactgcgggcaaggcggggcctggctgcctcagggtgcgcttcaggtggcgcttcaggaaaacggtctccaagtccctagataccctgagaacagtccttctttgtcccttaggtagaattttgtctatttgttggaaatgctgtgctaaacctgacatttttctttttctaccccttcccatgaaacatgccagtagctcccccaccgaccgttttcttggttttaacttttcccttccacatcatttccttcagccagtcgctattttgttcactaaacatctgtggtgggcacgttatgtgccacgcattgtgctaggattggagtacagtggatgtacagacaatggtcactgccctcatggaagttatagctgccttcacaaagttcttttaagtcttttcaaactcctgtattccaagagggtctgtcgctctcttcatactcattctcgcttacttgaggttgattcccatagtccctttgacgaactccagatggggtaggagcgtcctggtccttaacagttggttggtctgggtcttcaactctggttaaaaaggaattctctgaattagtccacaggagagggaaagataatgctagttccaagctagaaatgtacaagcagttttccttgttttctttattattattattgttattttctcagttcattgtctagatgcaggttggaggtggggtggggcaatatttcaatgagtggcacaggataggttagatgtttcaacaggaaaagagttgcctgcttgtattctagtcccactaaaccattttgctcctatcaactgttcctcaggtaagaacagaactatttaacctatgtccttttttaaacactataatctgatattcaatagagttcctgtgtttcagtttaaagggtagcttctcaacagctctttccccccatatagtccaaattagcctttctgtctctaatctccagattatcgtttccactgatgttagaattgtccttgtaaaaatattttgatcatatcattctttgtcttaaaaatggcttatgtttccttttcggttagagggtccattataactgaccccacctaccttactaggctcaaccccagcattacctgtcttactcccctttgtgttgctataccagaataccacagaacaactaacttgtaaataaaggaaatgtattcttaaattctggagggtaggaattccaaggttgagaatcccacatctagtgagggcattttttctgtgtcatcccatggcagaaggcagaagggcaaggggtacaaaagagcaagacagcaatagggagctgaactcacttttacaacaaacccactctctcaataactaactcatttccaagataatgacattaattcatttatgggggcagagcccttatggcctaatcacctcttgttaggccccacctctgaacactattccattgggtactaagtttccagcaaatgaactttgggggacgcattcaaacttgagcactagcctcactccaaaccataccacccattgctcctacctactattaatttctttccgtaccctctatagcatttattaaaaatatgcaaagaactgtaccagaaatggggactatgacataagaattgttttctgagggtgataaac

SEQ ID NO: 3300 - DNA, 4001 bp, Homo sapiens
ctccttccacacatcaaatatatacagcttcgtatttacagtccatgcagaggagaactgagaggcttggggtcagctttctcctcttctctcccaggcacctgcgagcccacccctaatctagagcatgtggaagatgcctggagatgactatgcattgcgggtctcctgggaagtgaggaagggaggtggggaacaggggtgaggtggagaagtgactttctaagtcagctgagagaagcgttctgggcgagggggagttgtttcttctggaagccccgctaccggcaggccacaaagccacgctggaagagcaagctgccagtagtagatggttccaaggtttcccacgcccctgtaatttctgcagcattggcgggttgggtgggagtctccggtcacctttcccgcagatcagatcgccccgtctaactggactgttcctactctcaggggcactccttcttgtatgctgaacttctaaaaggaggccagcggggggctggctctctgtaaacggtggggctgcgttcattggcgtccagggtttcttctaaatgtaactgctttgattccgcctatccctaggatttcaagtcaccggttccacccaggtttgggttcgactggactttcaccctaagttcaatggtagccctgctcccaggccgccgcagccctcttagcctctgcccgcaagccctctttggatgaactgacctgctccctttggtattcacaccctccccctccaatcaggcaataacaacctggggtccaatttttaaacagccaggctccgacattttctttcccgcccaactctccacgctgacacttctgagggtggggtgccggaaaaggtgtccctcaggcggtgacggaccgcacccacaggacatacagggcacacccctcccaggtgaaggccagcggcccccggggagttgaggctgagggaggtcacttcggcttcgcgacaccgtgagcgcttatcaggagttctcagtaggaagcgctttcctgcagcctcaggcagagaccgtgcgtgcaaggcgggaccgaccgcaggtgcagaggccccgggcctgcccaaggtcagtcgaggcgcgcggatcgctctcgccgccaccccccaccccccaccccccatctcctccacccccaccccgcacacggggcagaaggactgcggccaagcaaacgatggcctcatttccagatcgaattggtcgcaaatacgttccctcgccagaaactttaaaaggccagaagaaaataaaccggattcagctccctctcatctccaaatctcggttggtaatactaatgtttctcttgctgatttttttttcttttttaacgaaaccttctcccttgtaaaagctgcgcacttctacccaaccgcgcaaagcgcggcgggagcttcggtggcgctgcgcgcgtcaagtgggccccgcgcgcagctttgggaccagcgaaccaagagccgtccccccctgccccgctgcctacatctgaccccagttgggaacccagtttttcctccatagtcctgtagactgttcccctcattctgttggtctagaagggcacaaaggaccggaggtgggaggggacttccctggcttagtccccgccctgcgcctgctgccccgatgctcccagaacctgcgcagctagcggatcccgtccgacagctgtgctgggcgcccgagagagcgcacggctcagcccaccccgtcccttccccggccaggagccactcacaaactcaaagatgaagagcaagtcgggcaaggtggtgaagaccgagaagccactgggcagggtgctgccccccgtcgccgctgcgggggccatgacggcgtgctggcgtcggccttgggacgggacgagcgccgctcagactccgcgcagacctctcgctggctccgcggagcccagtggcctgggcgcccccgcgcgcgggttaagagcaggggagcccggggcagaagagggaggagccccggccgccgcccaaccccgccccccgccccacgccccgggagacccggcccgagcgccgcgggcaccgccctgaacctcttcgaggccccgctgcgggcgtccagagctggggactgtgggtctgactcctgcgttccagccgtgggtgccacctcttgcgggaagcagggcaaaaccactttggtcaggcgctcctcgtgcctttctcccttcgtaggtgaccagcatctcgtaagaatgataaccatcagtaaccgggaccccaaaccttctcatcaaggcacctctcgggtcaccattactttaactttgaatttgggtctccttcatttttccgctggatgcgttaatgtgcgcgacccacagctccaggcggcggtttcctggcggaactggaccaccgccacaggctgggggtctgcagtgggggatgggaccggccgcggccgccggccccttccgcgtccactgagccggcgctggttcggcgctgggatcctgcaccgggcctctctgcttggtgctgcgcgtctgcctgagagtaggaggttgctcccagctgtgccggccccagcagaaggctgctggtggtggtgctggggcaggtcggccttgaatccatgcgacaggaagggacgttaccagaagagattcatcgctttctcttggtctgggcagcccgggccttttgagggtgggaccgctgctacccccacccccaggttctttgcctgcctgttgactgccggtgtttcatgttttgtttctctgtttcactattttttattttttgccttaaaaaaaaaagtattaccatgcagcagttgcccatttattttaatttactattaatagtgtgattgctgtgtttcctcctacaaacactgaagcctgaaatccgcccgagtccggattctcgcctgccaaaagggaattggccccgcaacctccagcttagactcccaactcttctttctttccattggcagctgctgcaggcaggacaaggggctccccttctctccagtggggccttcacctctccctgctgcacaattcttcctccttcccagtccctagggagagaagtatattcgtggacgcattttccaaagcaaaagtagcacgcccatcagctggccattctaagtgcctctggaaaggggccaggcatttgaaatgagaaaaccccactgtgcctctgtgagctgccagcccggacggctgcaaccaaggtgccattgtgtcgggtccccagggcagcatctctctggacacaatgggctgtgggactttaggagcccaggtcctcatccaccttgggcatctcatagctcgttagttggacctgctggcctctgagaggacatcttcttcctccccaggagaccgtcctgggaacaagccttaaagcaaggtggccacaggaagccgcagcctgaagagaggtgagatgaccctcaggcagtccagcgaaagctgcttggagatttcctatcagcacatactaattaagaacaagaagatcctatcaactcctaataatgtccttacctggcctggagggcttttgtttgtggtttggtttggtgatttcctacttatttcaagcctttgttgctaactcattcctacttgggcctgagcctttggggaaagctcgctcccaggggcaactcagtggagctcagcagtcccagccctcctttgataaggcagaggggcagcaatctctgaaagaggcttcagaggatgaggaaggcagcccggccagggtcaagggggtttgtccctatctctgtgaccccctcctcccacctggagttctccgctcgacgttcatcttcctgaccagactctaccctcggcagggcatcctccagccacccccatctgcccctctccttccccaccctagcatatgctcagcacccaagcagagcccagcctctggtgagtgctcattaaaccttagccaatggtggatg

SEQ ID NO: 3301 - DNA, 4001 bp, Homo sapiens
ctgcctcttaggtggggtttcagctggagccactcagatcctaggcccaccctgcctgattctctttctggtcgccatcaatggctaacccgttcgccagtttgcctaaaagtggcttgagggggcccaactttgcaagcagaagacgagaatgagaagggctgaaaagtagatgcactttctatcttttcccccctgctcagggacagcactgccaaattcagggcaggtaagaaaataccacccacaagctagatacttcagaaggtgctggaaaaagaaaacactcctttgccttgattggaccccaggcttgactgtgctcctccgtgaagaggatgtggtaccagccagttccgagggaacttgtgcagtgcggaacgctgcatacgcacagctctgcagatgggagcaggcaggatccccagggatcagggccacgactcagtcgtagggcgccccagagagtaacacagcgacaggttctcatttgcaaccagggtgccgcacacgactgttttatggcagatgttgccatagctacctggtgtgggagaccccacaaaagtcaaagttcaaagtcagcggacgtgacaattaagaaaacactggaagacctactctcagagggaaacacagtctcctcacttcaaaccagaaaggcacaaatagttggacaaaagaagccgcgtaattaaaattcatgtgcaacatctccctgggaagcctggatattttagcgacgtccccccaggcctccacactcaagtgggttttgttttggagggaggaacccccttggcggcataagacggggcaccgagtggcatctgcctcttgagtacagctgcgccccgctgtgcgcccggtgggaggctggcagccaccgcagcccctgtgctcgctccccgctctcggtccggtctgggtctctctcggcgcggtccggtctgggtccgaggccggtctccccccccctctctgcaggtggcccctgtgcttgctgcccctctctcttctcggtccggtctgggtctctctcttctcggtccggtctgggtccgaggccggtctccccctccctctctgcaggtggcccgggtcgggggtgccgcactcaccagctcgggcaggaagaaggcgaaagggatggtgaggaacagcgcgacccccgagggcacgtcggacggggcgtagctggtggcgggcgggtcgggcgaggccatgctgtcagcccctgccgggtgctccgcggcagctcgcccgcgcgcagcctgtcaaatatcacctcctgcccgacacacccatcggacgtcgcctgggagggaaaaaaaaaaaaaacgttccagccgagcaggtccttccactcgctgcagccagcagatcctcagtgggcggcccagcggcatcggatggctctgcctggccggcggggggcacagcgctggtgcaggagggagcagagcgggagtctcctcctagacctttccagctaaggaatctttgacccccggagcatgttattccaggggatgccagcgacagccactcccctgggcccagagtgtaggcccaagctgcttggctacgagggctgcgtactgaggaccaacaatgagccaagctatctgcagacagcccgggtgcccaccacggcctgcacgtggctgttttgcccttttccaagtgaggagactgagaatcagtgaggtcaagtcaagaccacagagctggttactaacaatgctgggtcttgcccagctccctccttttccactcttggggacagctctcagtccccagcctcccctgggaggagcagccctcccttccagctcatgcccctgggacttggtgtttccttctttttctggatccctttccatggtcctccactcctcttttcctcatggggcagatgaaggccccccagtctctgggagaggaccacaccggcaggcaccagagaagggctgggctggctggctgctgcctctagtggacaacctccttccttccctggccttccttccagccagtgccttgcccctaactgggcttgagaccaagaagtttcttcctgactcctaggcaagtcagggagctgaatgcagggctgtgacccagaggcaagcaactcctttcacaccaaatacaagtcccaaaggctgaaccattttcccctccacctttgaattggcgaaccttcattttcccgacccgccctgaaacagtctgctcaggatgctccaggttagggtcccttcttcctgccccctgctgctccctggtgtggagagcatgtggggaagattgtgtgagggctggagtaattagaagaggccatgtcttgatctcattagcagaaacggtgaatgccaggtcctgccctcagggccacaggtggggagaccagccagcttggcctttgcctggtctggggagagccaagggagagaggagtttggacaaatgaagctaagaccaaaggcattgcaaagaaaggcaatgaaccccccagtggatctcaaaccagactgatcatccctttttcccaggctacggaaactaggaagtaagggagaccctaatcccacctgccaaccccagtctcacctacaccaccttgtttacaggattaatccaagcaaaggagagatttctccatgaatcccacatcttgccacctctcttaaaggttgcaaataagcactgtgccactcttacaggctgtaggatacctttgacttgcccatggacaacatggcatagtaggaaaagtttaagtaagaagaaaaacaaccttcttaggctcatatctatgaaatggagaaaataatacaacccataaccccttagtctcttaagctgagaggccctgagccatttccaccttctgaagcaattagtatattaagaaatgaagatatgccttggtcttctggctaaagaccagggttttcattttccttctctgctgtgcatctcttctgactgggtctatcttcaggaccaaagcaatgtgtgtgtgtgtgtgtgtgtgtgtgtgtgtgtgtgtgagagagagagagagagagagagagagagagaaacacaaatgtgaaaattattccccccatgcttttaggatcatggttcctctgatcagagacaaaggttcccctttctcagagttccaggtacctgcctggctgctacttccattgccaccaccactgtcacgagattgcacaggggctaaggaaggaaagaataaacaaacaaacaaacaaaaaacagagattttctacactctctctgactgtttggggctctctttcccattcctcagaccagaaacatggattcttttggagatgtctttgtctgcatcctgtgtacagttctgggtttcaggtggtctctgacgctggctgacaggtaccagaggaaagaaaatgggaaactcaccaacagcttagtagtgttttgaattctggtttccttcccaaatattcctgctcctttttttttttttctagaatcctcagttagcttctccatgcattctgtccagggctgttaattgcatttcatgaaaggaagaggaggagtatccttctctacttgaccagagcccaaatagcaacatcctgcttaactctgcaagcacttttcactacccaagatttccctgattgattaatttgcctattgtttgtctccctgcccctgtccctctctaggatgtgggcttaaggagagccaaaactttgttcatgtggtgaaccacagccatgtccaccatcttgaatactgtctgatacacaaaaggtactcaataaatgtttttaaatgattgaaacagtcatgaaaacagtcataaagactttggagacaactgcttctctctttttttgattcctatttattaaactcttttcccactaagaaattgctttatctatatttcagaaacaatttactagttgcatgaaaaagaagagagaagccagaagaaa

SEQ ID NO: 3302 - DNA, 4001 bp, Homo sapiens
atacacacacaaatataataatccttactgaatgagaaaaatgccttttttcttgaaggaagggttctttgtgtgcatggggctggggcttttggaacatccatgatttgcaaattcacaaggatttctaccaaaatacacctattgcccggttaaagggctgctttgtgttatattctgatggaaggctgtaatcttttccctgggcataaaattaaaagcattctaaagggcttctatttattcaatctatttgactgccaaaaaaaatcataattgtccacagtgaaatgacatagtgaaagaactatgcttttgaactgggctggtacctgcagctcatgcatgggacattttgcataatgtggctcacatagaaggctttgttctccatcgcctcactgtggctgcaaacctcaatttcagtttgcaatcatttccttttctagactgatcattttaaaataaattatacctttaacatttaaattagttccttaccaacagtcatcaatccctttgcctcacacccaaaattatataccacccaacaatatttttttgttttgcactacagattttattcacaacataatttccaaaccctcaaatacaattttaaaaaatcagtctcttaagtacctatttccttttgtaacatgtatatagtgtattatacatttgtgtgcatacttgtgtgtttaggcatttaaacaaaaaccctttacaccggactcaattttaaagcgtctatgtcctggaagcattgtgctaagagcttacgacagatggcacacagcaattgtcacaaacgggcttgttgctaatgaaagctttttattttctgacaaaaatcctgaagtccggatgccaggcagaataacattaatttccagttttcaaggattttttttctgactccatccatacccctccccctatacacacccaaatatacagctccccactcctagccccccacacactctttcttgaaatttccatccttaaacaaaagacgaggtgggggaaggcaggcagccagcactgcagtcctcctctccccaccaaaaaagccttttaaaaagaaaaggaagaaaagaatagatgcactgtagattcagaggtccacccccaacgtttaaaaagaaaaacgactgtgtggaagcctaaccagactcatttcttcgtgccccgccctccaacaccaccaggcatttatttttcattttcctacaattataaatatcagtcctcctctcccagctgtttctgaaggaattacagagaaacatgatttgaaatggacaaggcttccctcactcactcacttcccagtgtgcagttctctgcagctggatgaacaaaaaaatcccctacctcgatttcctattttccactatctttgtagaatccactccccttctttccacagcgcaggtaatactggctttcgatacacgtattctaacctggcgtaagttttcagttgtttcaaagtggtacctaacaagctcactcgctcttctacgaagccagggctcaggtaccagtagcgtccggccccctgctccgcagtgacacctggagaggacaggcccgaatcttccgccaggtgcacggctggccactcgaccaactaccagactgcctgctgcgagtcccagaggacgagacacaacccctccccattcctatctctttctactcagagaccgaggcaaaaggagaggcgccctacatagagccagaggtggggacggtctcttacctgggcgcagaaactggatgcacccgcggtcgcgactgccaccgctcacggacttagcgccctccggagaaaaaggagaggggtagaagggttaggggaagaaggggaggggggggaaaaagaaggagaaggaagagaaagaagcggaagggaagtaaaggaagagaggatgctgctgctgctgctgctgctgcccagagcccgcgcagcccgagcgcccgccccagactgagagcggcgcccccagccggctcccagcgcagcagctccgcctcggcccctcctccccgccccgcgcaggtcccgccccgcgcaggtcccgccagactccgcgagcccgtgggcggccgcggcggggctggcgctgccaccgccgcagtgtccgggagggggagcacgaccgcttcgccttctgccgcagccgccggccgccaggcggggaccgcgaggtgggagcctcggagagccccgcccagccgctggcccgggccttctccagagccctggtcccctcccgcgacaaagtgaggccagtgcccgggcggcgggacaggcgggccttcctcactggcgtccttggaaaatcgggggcaacagctttagtctctcgggagcaacctccgcagaccccctgcttccctcccctgtgtcgctatgaggcggggttgccagtggcacctcaccaggaaagctcactggcctcgcctcacaaacccaaccacaggtgcatccagaaaagacaaaggaatgtggggcgcttgagaacatagaacaactcttgtcagcactaaaggagcaatggctgagggagtagagaattctagacccagctctgtcacgaattagattcattcatttattgagtcaacgaatgtttattgacacctactatgtgtcaggcactcttctaagcattagaaacatcagtgacagacctttcccacaaccctaataagaaagatcccctccctttatagttattacattctagatagccagacgtatgctctagagacagttcacttaatctaactctcagtgtattcatgtgtcatatgagaactaaaaatgacagcccaattctcttatgcttaaaaagataatgaatatgaaggatctttgaagaatgatacaaatacaatgaattagaaagcacggaaagtgttgaccttgaaatatcacccttaaaaaaattgcctcttaaatgcttttgaaagtgaaatgaccacctgagaaaacaaatgattctttaccattcgtactaaggagtatgaatcttcataatcagagagcagcattttattgtaagtaagaaaagtaagatgcaacttagaattacttcgagtgtctatatcaagtactgacaaggtgtttttaaggtcagccaacatactgaggtgtggcttgtacagtcttcacagtgctgatgaaacagcagccataatgtggttctgtcacttaaattaaccacagaatcttagaacctagaacattagagttgatgttttaggcagctggtctaatttcctccattttcagatggaaagagacccaatggtgggagcctgcaaggattagaaaccatcacagaggaagctgtgaaagcctgccctccccagtcacacccagtgctctgtgtcctgcctcccccgctctgcttcataccatgtgccagtgacgcttgcagtgagtttggaagtatcaaggcacacccaggagctgggaggttggaggagttgatgctcctcctcggaagatggccttactgagaaggaggtcttaggagactaggaaatcatagacagtatgtggatgggaggaaggagtaggcatgctaccagagtgttagcagctgacattcatgaccaggcatgcaggcgcaggtgctcaatgagagtaattttccagggccaggagcggtggctcacacctgtaatcccagcagctcaggagggagtatcgcttgaagccagaagtttgagggtgcagtgagttatgattacaccactgcactccagcctgggtgacagagtgagaccctgtctctaaaaaacagcaataaaaaagacattatttctctgatagtttaaagtacagtgttcctcagcactttttgtttttgtttgtttgtttgtttgtttgttttttcctccactttaagattagctgaggcagccaaactctaatggcttttctctttggggaacctggtccttatatgggagattgc

SEQ ID NO: 3303 - DNA, 4001 bp, Homo sapiens
gagtctgaagattaggaaatagatcttcatgtgaaatatatgctctctggatttaatcagatgggcaaataccaaatagattttttttccaccaaacataaatattttcacttactttgagtgaaatctaaaaagagagaatggtctcaagagttttacaatatctaggtgaaataatcctgtttgggggatttcatacacgattccactgagtaatttctgaagaagaagtgcaatataattttatgtgtctcaagactagtattagcttttgttcaatatctgaaataatgcaatttcctttctcagaccacactaatttattttaacgaattcattctcctgttcaaaaatctttatgtgatgctgcctacactctagaaggctgaggacagtgtcatctaccccttccctctctctctcacaataattacccacagcagcaaggctcttaagaagtgcttgtggaatgaataaattaaggttctcatgattatacattgcagatattaacaaaggacaatgtattactctccttcacctgctacaaatattcacactcacaggtgtacactcacatacttataatatttcagtgtcagtagttggacattattttcaggtatatttttcaaaaattaaatttattgtgtaaaatgcttcggactgacagtcttgagaggaaatattatacatagatcccaaggaaaggcttaaaaggtattactgattttcttctcagcagggcagaaaatgtcttccattttttaaaggcaaattacaaatataggttttattgatattaacaggtattaaagttaaagacggtcttaaagaaaaggtaatatccataattgccatctcaaatcaatatatatcctgatgctgaatttcaaaattaatgtttttcatgtaaggcatgaggcccaggatcaagtggattcaagtgcattcatggcaagatgaaggattactttcttatgctgtcaattccaaataaagcaaatgtaaaataacttcttttaagaactaacaacctcggcctttaaatatgtccattttaaagactgaaatgtcaataaagaagttacaatattttatttgtaaagccaacaatactgagtcattcctgggctttcgtctctagcacccattctacctgggaagggcaaggcatttcatttaaccattttaataaatcacttagcaggatttgttcagataaaatcattacttagcatatttctcttaaattcaaattaatgaattttcatttagatggagaattttggactttaaaaaaaacattacaatgataaaatctccaaataagccaaacatgttgatatttgttaataacttgcaacataggcaaaagacacaattctttagtcatcctctaatcaaaacaaccttagataatagaagtatctgcatagaaaatggtatatgcaatagacaatgatcaacttaagcttaaggataaaagaccaatcatagataaattaatttaaataaaaacattccaattctcccctgattttccctcattaaaacatccaaacaaaacatgtggtaccttttaattttctgaatgagtagctcccaatcaatgcttcctcggttagagacaagctgaagaatctaccgaaacaaaacaaaagaaacatatatatatatatatatggatttgttaactaaatatcaaaaattataactcaccagtaagcaaatgcattctttatactcaaataataaatctatgcctggaggtctgtagcacaaaaaaaatgcagtacttgaatatttaggaagctcaataatgaattttaaaagatctttactctgagattacataaagcacatcctatgaaaaacgaattgaaaatgaaacgaaataaaattaaaagccccaaaccattaccagcgcatatgcagcaataccactcaagtctagcctttgagaactgctgcagaatccttctccgggagcattatccccacaggctggctctctggctctctagctccagacagacgcagtctgcaagccaccagctcgtgtctgtgtgtgccggggaaagggaagctgcaaattagaagtccccgcagtggcgaacaggaaaataaggcgagtgggagagagggagagagctcactagtctcagaattttcgagaatgatgacaagccactcagctccgccatcattcactgacaataggatgcagccctcacttacgatttagcggtttgccataggggcttctggtaccaaatgcctgacaggcattttaattgcctccatccaagtgtgtccccaggagtcgagtctatcagcctatgaatgtcatcatctggtctcctttgtgttaatgccagacacacacacacacacgcacgcacgcacgcacacacacacaccgcttaaatagagaaacagttttcaggcatataggattacaaacaagttaagctacacaaactggacatgactaaatactagtttatgggaatttttattatctgcattaaggacatcagagatttgttgatgttttgtcattggcagataattacaatatttttaactatcgcatattgcttatttatattccaaaataaatatcttcattaaagaaatgcatatatttatgtatattttcctacagaaaattcaatacccttttaacagttataattatgcacttggccatgttttccttacaagagaaaaagaaaaaaaaaaaacagagaattagaaaaccagggccgatatgtgatttctgggggcaatctatttacatacaaaagcaaaaggaggtggcaaccagcttggtcctggggcttttcagtccctgagggcccaggcagagaattcaatctttggcataatctgtatcccctccatgttagcaactgaaattagcagttgaatatccctattttacagtgcccttgtgtagggaggttaagtgtggaataatttcctgcatttatttcctggggaaaagggaaggagaaaaatgtcaataaataagttaatttttacagcattgttagcaacctgaaccagtgaatggagcaaaattcgatgagaaccaaaaaggccagctgtgaagaaggttgctgggaagaagcatcaccatggttactggaaacagaaagtcaagaaaaaaaaaatatgatggcagagaagagagaatgagactacagggaaggaaattgagagacagatgatatgtttctttttttttttttccttcttgaaagaatcgcctccatcagttttatactgtattttgaattaagataaatttgcattctccttgagccacctttctgccccattttttaatcactagctaattttgctttcataaatattcaaactacagttcttttgtatgagatcaattctgctaccccttgcctctatccaaatactggcttcatggaaccacttagcctagtccacatcctttgtttcataggtgagaaagctgaggcccaaagaatatgaccaaggtcacaaaacccaggcacccgcagcgtttcctgattcaatcctctgcctttcttctctcaccaagtgactttctttccctgctctcttttgttctgtttgcaagcaatacagattccagaaacatcctttgtctttgattttttaaaccttcttgtatttgctacagcagtgatgtatgtccctctttaaaatgcattgcaatcattctgaagacttttgcaaatatctgtgctggattgtatttgaggtctgaggaatctggggtaattatgtcactgcttttctttcatttccagtctggcaatcagataaatcaagcatgattgcccttttgtgaacctatcttgttgagcctgaacttcatcattacatactaggcactcttatcattactggcctcattatttctgcaagcataaaactgggtaatcaaattgagtcggtctcccaaggcaccttctaggtatagacaa

SEQ ID NO: 3304 - DNA, 4001 bp, Homo sapiens
aaaaatttagatcgctcaaactttcttctttagtttgtagaagggagtgatcatgaagttaaattaatagcgatcaacagttatcacttcaaatgtttgggattaatggtttgtggtaggcaaagttgctaagtgaaaccctaatgataagctggaaatcacatttgctctatagttgcccaggacaaagacactcagctcctctgaacacacttcctatctagtgattaaagccacattaaatggacagagttcctaacaccaaacagcagactcccagtttgtaccctagggacattgctctcatatgtatcccctcctgctatcctggcttcttctaataagcattggcttctttcaacaaaaactccccctctttcagtggctcctccatttatcttgtagtggaaacaaaattgaacaagtgatctatacccagactttccatttcttcatcatattttccttctttactctctgcaatctatcttctgcctacatcctgccattgaaacgtctcacatccttaccacatctgctttgtaatctcttttccaatttaacattgtttcctgctcctttcttcccgcaactctcttctgattctcctcctcctctcacttcctgagtcctgatgtccccaccgctcctctctatctgcgggtgcacctcctcggctcagccctctgcaattttctcactctcatcagtccctcaatgacctcacccaccatcatgtcctcacaatctcctctctgtagagaactcccaaactaacctttcaaccggtcctttcccacaagcccagtcctacagaaacttgctacttgaaagttccaatgtgctcccattttgttggttgtatttccatctcctgcactttccaggccttaaaatttagtcatctttgactcaagtttctcagcggttgtctctgtgtctccgctgtcaacatcacatctcgcagttctgtgaattgttctttcacaatgtctcctagacccaccactcccagcatctcttaggctcactctcacaccccacccaaggacacattccctagttcttaccaccatacatatgggcacttctataatttcttaatagagatccctgccttttccctcagatgtagccaacacgataggaacaggttaatattcctaaaacatggccttcatcattctctggcttaaaattctttagtgtctgttttattgaaaaaaaaaagtgatgtccttcagcctgacatctaaggctctcccctccatgggcccagtttctttatgtatctgaccttctgtttctcttttccctgacatgaactttcagttctagtttcttgtttgcccctgggataagctatgctcactcccagcaaggggcctctgctccacaaaatcaaattgcatccttttttcaaaggtcagatcaagtctcacctctttcatgaaaccttcttaggtatagctttgtcctctgcccccgaagcttcaaacagaaagcgaatcaaacaataaagtcaggcagctttcacaaagtcacacgctgctcagtggcacacttttcattatacttcttgctgtggctgtttctttgtctttgtttggactcttttcctacctatatcaaaccttcccactgttatccagccttcaagaaccactataagtccctcttcccctttcaagtttacagcaagctctctctgacttatgtgatgtgcccctgaccatgctgtatattttcaaaagtttaaaccttgcgttagacttctttgcatcccccagagcacctagtcgtgggccttgtacagagtcactgctccataaatagccgtggacttgatttctttaaatggatccatcaaacagatgtagaaaaagaaagagatctaacaggaatttttgggttgggaaattatgcatgtggagtgaaagtatttacctggttttggcatagaactcattaaaatgtccaaaagctgctgtttctttgaactctctatttgtgacacataatgtattgctgattttccactaaaatcacaaagtttaggatctctaggaagaacagaatcaacattaaagtttatttagttgaatctgttgaaaaaagaaaactaatatgagagggaaacatttacatcaaataaataaaaagtaatcttatgtagtttggggataataataatgatttcaaaatgtgtgaatagaggatgacaattttacaagattttaaataaaaggaatttgctgtgtatctttattcccatccccattctaaaaacattctgaggtttgcagagaattcccaactttggacaaaaatttttataattctttaagggtacataaaatcaagtaaagataaaaacatcttttgttgtttttttttatatttttaaatttttttcaatgagtcataaggattaaaacattttgataaatgattgtcttatcattccaaatagctcacttgatttttttcttttcaataattaagctaactgctgacttttttgatatttcttttttctaatgctaacagctagctcttttatgattcaaaatggtggaatggcatagaatcttctctttaaaattaagctgatacttttatttcatggtctcttggatgagtggagcaatcttgtcataaaaaccaaagtgtgcctctccacatggccttttcttttcttttttttttttttttttttttttttgaggcggagtcttgctctgtcacccaggctggagtgcagtggcgcgatctcggctcactgcaagctctgcctcccgggttcacgccattctcctgcctcagcctccagagtagctgggactacaggggcccgccaccatgcccggctaatttttttgtatttttagtagagacggggtttcaccgtgttagccaggatggtctcgaactcctgacctcgtgatctgcctgcctcggcctcccaaagtgctgggattacaggcgtgagccaccgcgcccagcccccacatggccttttcattcctctttacctggctttgtggttggtaagcccaactggctgatcttaggaccatttacaacagaacaagtctcttcttatcctctctattatgacagcacaagtctcttcttatcctatgttgtactgaacccttgcattagatatcagctcagagaaatccaaagttaaatgatgagaatcccattaatagattacagtgagggaaacaatgatgaaacttgctttacttatcctattctaggacaaggagcaagttgatcatggtctctgtcctaaaacatttgaatttgaatctcttcgttgctatgggacagggtaatgtgtcatgagccacagtaatattctcttatggacttttcttcatcaaagattgtaattcaaaagaaatagcataggactgagaattggggttgccactaccttgatatatggctttaagcaagccacttatcatatttgcagagaattcccaactttggacaaaaatttttataattatttaagggtgcataaaaacaagtaaagataaactcattggggcctctcctcatctgcctagattagggtgtctccaagtggcataccttgatttccagtattctggaccccaatccagacctactgaacatctctgggatgacgtccaggaatctccacttttatcaattggccaaactatttctcaacactaggctgaagtagcttcaaaattcccttttcattccattatactaactgatccttttacaatatcttgtattcttgactataattttgttcttgaagctccctcctcctttttttttcaaaacaaaattcatatgaagtactgagaaagagctcaggccatctgttcttatttgatgacaagataactaagtaacagctttaggaaactgcaattgtaacataagagattgcttattaaccctcttatttaaaaaaaaagtgcattgtttatctcctccctcct

SEQ ID NO: 3305 - DNA, 4001 bp, Homo sapiens
ccgcctgcctcgacctcccaaagtgctgggattacaggtgtgagccactgcacccggcctacttatttattaagaaaaatgagaacggaaaaaaaaataagtaccgttttctgttatatatgtaaaaaatggtggggccagttgaacaaaacttcccatattaggaaggtgacataaaaaacaaagggcaatttaattgagttccttacttggcgggcttgaagaattactactgggcacttatttacccataagtacacttacgtacttatgggtaagtacaatgggtttttttttgttgttttttttttttttttttttgagacagagtcttgctctgtcgcccaggctggagtgcagtggcgtgatctcggctcactacaagatccgcctcctgggttcacgccattctcctggctcagcctcctgagtagctgggactacaggcgcacgccaccatgcctggctaattttttgtatttttagtagagatggggtttcactgtgttagccaggatggtctcaatctcctgacctcgtgatccacccgactcggcctcccaaagtgctgggattacaggcatgagccaccacgcccggcccaatgggtttctgacacatgttggaaggacactgaattgagcacaaaaccaaaaaatacttggaaaataattttttcaaaaatcttttatcagaaatgttgaattaaataccttatatgcttattcatgatatttgaaaaataattacagaagaacatcctcaatcaaaaattcaaacatctgtcatggtgttctgtgactaactttgtatgtttttaagcaatgaatgttgccctactatagagcagtattatttgaggctgacaaaaataaatttgatcgatacatagagtacaagtgacagcacccaaaataaaaagttgaaagaagttcagtaaaagtacatccaatttggagctgaaagtaaggctgactagagtggagaatttgggctacaagggggcactgctactcatgactacagaagaggaagtggaagaacaatttttaaagtagggaggtgaagtctaagcttacatacttgctacaatgacacacagtgaaagtgtcctagcccccactttcatcacatgggcaaatataagttcttcatgagggtgtgtgtgtgtgtgtgtgtgtgtgtgtgtgtgtatttgttttgttaagcaagaagtagaaaatgtgtgataaaggcaaactctggcaagcaaatgtcagaattaaatcccaggatcagtctaagtttcaaaatttagcatccaactactcagtaccatttttcttgatttaggatagggtgggccattcgtgactccatttccttctagtgtcttcctgtctaactaattccctgcctcatgctggaacccttaacacaaaggagaaaaggaaaaaacaaaaaggaggtaaacaggaaaacaaaatatgtaaactgaacatacacaatccattcccatactttagtgtctttaaactaacattataccacaatatacgaccaagagttgtataacatattctccctgagcaccaatgatttgctgctctatgaatgataaaattaaattttatgatttctctcttgccatcagactttaagcaaatcacaacacatcttaacagcttattttgaatgtccctgctgttacgcataaaatgatcattctaaaactacagcaacacaaaaagtactttaattcaaagtctattaagtaaatataaaacatttcataaatctgctatatcataaaatttatttataaaaaggtttataataacacataatagagaaagttttttcacttccattctatcctttaattattgctgaaaaatgcttttagtttgaactcacccattatggcaaacagctcaacaatttgaaaattaggaaaatggttctcccatcagcattctttatggcctgagaagataaaacagatcagcatattaataaaaagaaacagaaaaggagccaggaaaagaaaaaaaaaagtcagtttaaataatactaatgaaaaatatacaatatgaatactttacacatttcgctagggggaggtgttttatattgaaggttgatcatgtaggcacccccttgcctaacacataccaaaattccagactcccagaagaaaagcaggtattcagcataaaccatagtgtttgtacaaaccattatcagttggaggcaggaactctcctgaaatccaagttctcaggtgtcagccaaaggctaactcctaagcaggccttctacaaatcagcaatcaggcccactacattaactctttttctatataaacagcaataggaaactaatatgttggtttaaaaaaaaaactgcataacgcaataattataactgtgttgctgggtatacaatatataataatataattcacataatattaacagcacacaggaaagggaaaggatagagttacataaaagaaaggtgtttatgaccaagtgcagtggctcatgccataatcccagcactttgggaggcctaggcaggcggattgcttgagcccaggagttcgagaccagcctgtccaacacggtgaaaccccatctatacaaaaaaatacaaaaattagccgggtgcagtagtgcatgcctgtagctcccagctacttgggaggcttgaggtgggaggatcacttgagcctgggaggttgaggttgcagtgagctgtggcactccagtctgggcgacacagcgagactgcctagaagaaaaaaaaaagtgtttgtataccattgcaattaagttgatattacctcaaactatgttattataagatgttaactgtaatccccaggtcaactagaaaataagatgaaaaatatgagtgccaacatgacactatgaatggaaaattccacaaacctgtcctcatgtgatatgtcacagtcaaaaggcagatgcacaactcagtttattcagcatcccccaggagaaaagagaccctaccagccccttccactgtaatatatcttttccatgcatgcccaaattcccccatgcaagaggcctacaagggtaataatagaaactttgtttcagacacaaaattattttaaaaattgttggctagtacagtggctcacacttataatactagcaatttgggggggccaaggtgggaggatcacgtgagcccaggagtttgagaccagcctgggcaacatagggagactcccatttccaccaaaaaaaaaaaaaaaaaagatttaaaaaacaaaatgccaggtgtagtggtgcatgcctgtagtcccagctaactggaaggctaaagtgggaagactgcttgagccagggaggtcaacgctgcagtgaactatgattgtactccagcctgtgtgacagagcaagaccctgtctcgaaaacatttaaaaaattgtataaaattacctttagctatatgaataagatgtatatgaaacataaaagaatttcatgtttagacttgggtccctttcccaagatacctcactatgtatatgcaaatattacaaaacatgaaaaaaatccaaaaaacttctggtcccaaacattttgacctgaatatgttgcctacaacagacactttttttgggggacaggaggagggtcttgctctctttcccaggctgaggtgcactggcatgatcacagctcactgcagccttgatctgccaggctcaagcaatcctcccacctcagcacccccgagtagatgggactacaggtgcatgctatcacacccagctgatttttaaaaaaagattttgtacagattacccagactggtctcaagctcctgggctaaagtgatcctcccagtttggcctccctaagtgctgggactacgaaccacaacacctggtccacattttaaattcgaagacaaaataggttgacagtaaaaggatagaaaaagatatactatgcaaacagtagtcaaaacagac

SEQ ID NO: 3306 - DNA, 4001 bp, Homo sapiens
ccattgtcctaaacaagtccgatctcctaatgagaactaagaggcctgcaagatctagggccaccctcccgctctggctgctcaggctatacaggccttctttcacatcgggcctcagagccttcacatatcatgctcccctatctggcgtaatcccctctccccagtaccctaagcaacgcctaatcatctctgagatctcagctgaaaggcgatgagcgtctgataccctaaacaggatcaggtcctcctattacatgctctcataaccctgatcctaatactcttttctgcatcacaaaattaaacggcaataattatttaaatggctatttaatactgtccttgtccaaaaaaatagaaacacttaggaagatttggaaccaagtctatcgtttactgctacaacccaaagtgcttacttgccaagtatctcatacattgtaggtgggctcaatatatctatattgcatagtaggaaaagtgatgagatccacgatggtgaaaagtagatcatccagaaaatcagactaaagcagaacactggctgcactgtattaaatatgtaagttaccacaggcattacactgaagagtaaaaacctgcttaaacatgggcaaaataaagttaagactgaactttccaatgcaaaattaagtttctttgtgcatcctcaggtgttatgtgaaactggaggagttcaacttcagttaccagtaagaagatacacaactaaatcaagactgctgccacatttggcaacaacctcctctcttcttggcagtaactgtgaggccaagagttgagttggccagggaagagtgatttatcttcccacatttagaagtggtccctctacaacaggaatgctgtaccgctactggactttgaattctaaccttgtcaaaccagtaccttccctaagtattcaagtcactttttaaaaaacaagtttaaatggcatcgcagtccaattcgacttagagaaaacaaagttgctctttccaaaaaaaaaaaaaagtcattactctggaaaattaaaagaaactgacagggggatgaataaggcgctaaaggctgagagctgtcgatggaagatggaggtcgctcagcatagtataataactaccaccgaggcctggtgggcagcagctcccaacctagagcggacgaccccaggttggcgtgaagcaggcaggtttgacaacaccagacccctgctgtccggttcgtcgcgctgaccctgccaacgcaacaaacgcccagaccttctctgcactatggatgagcagtgtggcctgctctcgttctgcccttccctggaaatgcgcgcaagaagggaggtggcaaaaatcatgtccaccgggggggctcaggtaagggctggggaggtctcggggttaaacattcggccctttgttcaccaaggcagcagagcccttggcgtccgcagctcctcctccccgactgctccctggcgccagcgtctcccgaggacaggcggcaagggctcggacgcccaggcttggctgcgggtcgggatcccacggcctcggcggcgcgcggcccctgcctttaccttgtagacgtcgccgtaggtgccgctgccgatgcgctgaatcagctcgaagtcctcctgcgggttccggcgggacaaatcgaagccggggttcatggcgggccccaggtgccccccgcctccctcccgggcaggggaggggggccgctcagggggccacacggagagagggcgccgcggccggctcccggctcccccggcggtcacaatcacccggctccacgctgcggccgccgccgccgccgccgctcccctcacgccgctgcggacgacgacaagcggccaatcgtccccgccccccgcggcccgccgccgcgccgaacctggtcacacccacaaggagaggagaaccctcgcagcccctcgctcggggtgaaactccaacatggcttccgctttcgccgctcctccccctccccttactccggctcctccaacctcctccccttttcccgactcccgcccgactgcgcagccgcgatcccggagggagcgcgccaggcctggcgcgcacccgaccccttgcgcgttccggctccgcgcgcctgccaggccggggccggcggcggaacagcttgggacccgaaacgcctcggcttttctgcggacccgcgcccggccgctgccgccggacgcttgaaaaggtttgcctggcccagggaccggggttaggactagcagaaagtggcttcttttcgtttctgattcccctaacgacaaagttggaccttggtctatctggtcccagttccaagcaggtagcatagtggtaatatccaagacagccaatgtcccagcctttattattttagaagcagctacatgtaggataccatggagtgctgcagcctttctgggattgcggggaggggtcactaaacacaccgtgaggaaaacccccaggaaaagtgagctgtgcttgcttgcccctgtcaccgacactcggacccttggagttggcctgccagggtgcaaaggagggcaggccaggagggccgcgagggaggtgtgtgcagtgggcagagcgtgaaagctccgggaggaaaacacgcggaacagctgcccaccatcccgcgtgggaggcaggcagagcgcagaactaaagcagtgattgacctccctcttcgaagagggttggattatcaaagacgggcggggactgcgcaggctgtcaagcaaccctgtaaagaaggggtggagagtggactagatctattaccgcacctgaaatataaacacgtgacgatccggaagctctttagctgtgaccttacctacccaaaaaccccaccctgcttaagacccagattgcgcgtcttacatctgagctatgtggactccagctccgattgttaatacttgcccaagaaagcttgagggtaatggaaggttatttttctgttctcattgaacttcccaatagacatttgcaggagctttaatcaattaggtgatggccactttggcaataccacgttggagttttgcttcagaaatgctttcctaatccccttaggcaccacaccttctaaccactaatattccctaatacctcgtggctcctgagaaactaggtctcatcaaacctgttaaggataagtataataaattaatagtagagcaaactacttagagttaactgcttcatactttttcaaaaaatcttttgaatccttttgctcataggaaaattgcatatgtactaaattctcaaattgtttactttgagtatctgttgactaaattgatgtttgaaaatggttatctcttcacctatataagtagcctttcagttgtgtaatttttaattattaaattttaaagcatcagtaatatgaaagtatcacttaaattattgccttaggagtgcatatcattgaatatcttctcgatggatctaccttcaggctctggtatcttgagaaactcctgactataaatgttattccatagccaaaggtcttgcttttgcttgtttaaggtacttgcccaggacccagattacaggccttccttcagtttgtccacatttggagaattgtttggcatgtttaggccaagcgcaagaataattagccaaggattcagataagcagacctgacaaattatcccaaatggaagccaggtctgctcttttcctctgccttttttttttttttttttttgagaaggagtttcgctctagttgtccaggcttgagtgcaagggtgcaatctcagctcactgaaacctctgcctcccgggttcttagcgattctcctgcctcagcctcccaagtagctgggatcacaggcatgcaacaccacacccagctaatttttgtatttttagtagagatgggatttctccttgttggtcaggctgctcttgaactcccgacctcagatgatccgcctgcctcggcctcctgaagtggtggga

SEQ ID NO: 3307 - DNA, 4001 bp, Homo sapiens
ggctaattcacttggaagactacaatcaccatttaatttggcgagaaaaaactgggttagaaaaaaaatgactggtgcttaaacaaacaacagaccggggagaatgtcttttagccagttaccaaccactcagtgagttgcaacacaatcttttccaaaattttccaaagccttccaaattcagttgagccgggcaagctgagttaacggggctctctttcaaattcaaaaatctggccccggcccgaacagttaaccaacaaaacacaagctaatacacttgagatcacctaagaatactgacccaagttcggaccacagtccagtacagtacactacccaggctagaagtctaggctaaggagaggcgttcaagtgatagataaactctactcacaacgcagaaaagagacaataagatccacacttaatctagcctaagaaaaggtctacagtcggcttccaacccccccaactccacccatttttaatgagacaatgacaattcttcatggtgaaccacagagccctgcttccctaaccttgtaccgactctaacagaacactcccccagtgcagattaaacttttagaaaacgttcagtattgagaaacaaattaagacaggaaaaatttaacattccgttctgaattttcaaggcctgcgcctccattccctacacatctttcataatctctagactgtacaatgtataaaatgaacactgttagtcacatcaggtgtcagctactcagcgcagactcagtctccagatttgctagtttcatttatcgctggggtggagggtgggtgttaaaattttgaaaaaagagaaagacctgggtgggtgtaaaccagggcatcctctatattctcttcgctctctgtcatttctgtttcaattacacagctgtcaaacaggttattcctggaattcagattttataatccccacactgtaattcttcctgctgctgttgcccaaacacacactcctccctgcttccccaaaatacgtatccatcaatagaaaggatgacaaccacagttataaagtattcccaggtaacgccaaactccccaccttgagcaactggcaagcactgagtggaggctgaaacatgatgacaattttcacgatggccaaagcagtggtttaggatcgtcagaggcaaggcccgcctccactgtatttcaatttacacacaaactcagaaggccggatttggggaaaaaaagaaaaaattcaggttgtcttatttttaaaaaatgcttttccattttatcgaagtaaagtgcatgcctaagagtgtagcttatttccttatctcaaagccaggaaatgaggtcttttaaggccagtctgaatataaactcggtgtgcaaaaacagagggactgcaaggcgaaagaaacccctctcccaactttggccaagcggcgtggcctccagtcagcagcatgtttatcaccctctcctcgtcccccaataagaagtttccacatgccacgggaaacaaagaaggcgcccacaccgaccttatagacttgtccataggtgccatttccaaccacttccaccagctcaaaaatcccagcaggatcctggagaggaaggaggggaggggttatcatttaaaagaagccaaaaaaatgaataaatcaagcaaggcagttggagagaaaaggcggtgacaaaagaggtgggcttcgccccgcgcggtcccccagcgcccgggggtcgcgcggcgggctcggggcgtgggggcggtagagggtagcgcccgccccgcaccagcccgcacaggaagacaaaggggccgccgcgccccgcggctctgcccacggcggcgcccgagcgcccggccgacctgggcgcggccccggctgccggctgccggctgcccgctccccgcgcgcccgctcgcgggcccactcacccgcagggaggagaggtcgatgtccaccagactttttgcaggggagtcgttcgccattttccctttttgccaccaaaaaacaaataacaataaatgtctctgtcgctctgtgtatctcagccgcagaccaggccgccgaccgcgctcctcgcgcggcagccgagccggcccggtactctcctcgcggggccgcgggcggcggcggcgggctcggctgcgctctcgggccgctcggggctctctgccggccgggccgcgcggagggcggacggagcgtgcacgggcggcggcgctcacaccatggcgcggggccggccgtcaggcccccgggcgtcgcccgccgcctcaggccccggcgcccgcgccccgcgccgcgcgcctcgaggacgggcccggagcgtggggccgcggcggcgccgagttgagcgagtgagcgcgaggcagcgagacaaagataacccgggaggcggaggcggaggcggggagcgaggtggggagggagggggcggcggcggcgctggaggaggagaaacgggacaccaaaaatatattctgaggagagagaaaacagctccccctttcctcctcaggcaggaaaaaccggcggaaacgcactcacaccccgagccctgccgggtagggcgcgggccgaggcgcccgcgcggcgtgaatattcatcaggggtggggctcgaacaatggccgcgccggcgggcagcgcgggcagcggtcccgacacgacgcccggcgcccagggtgcggcctccgcgctcgaccccgcacggcgctcccgaaaactgcaggagcggggaggaagcgggctgggatttccccggggaggagctggggtggggaaacgcccctacctcgcgctaacaacaaatgacacgaaactgagctggaccgacactaagaggccatggaccctcgcgtctcccagggcaagggtgtgtcccgccggccgcgtcccggctctagagggacccgaacccggtgttgccgagcggaggaggggcctccctcgatcctcgccccctcctcgccccattcgccccatcccccactctcccacaccctagagaggagacccttaagtccctcgtttccggcttccctgcacggttttcttttcctttctctgcttttgcaggctaaatgtgtggtacggttgtggttgtagttgtgggattcgctgagcatcgctgggctgcccggccatatccaaaacagctcctgtaattgtctggcgctgcgctcctggctgcgctcggtaggtgagcactgtgtttggggcccttagtaccaacccgcattttgtaacctggagatcactaaggatcaaccaacaggtttcttccggcaacctcggaagccagtcggtagttaggcactttaatgccagtgaatcaacagtcatttatatcgcattcctccaccgtccaaaaactttcagtggttccctgttacctgacaggtgttctcaaaacgtgagtgcttcaggcaaagtgccaattgcctggccctgcctcccgagttctcgtttcaggaggtctgcaatgggcctgagaatgtgcatgtgtaagttctcagtgtagctaacgtcgctgttacagggatcactcgttgacaacagtggcctccggctattcatgattggattttcataaacatcaccatcatcatctaccaattcttatgcacatactgtgtctcccccacacaaacgcgttgtgccgagtgctttacacacagcactctatttacagccttgaaggaatgttatcctccttttaggtaaggaaagcaaagtactgaaagataaggagtatgtccaaattccttaaaagcacagcctggaagtggagcagggattttcaccaggttagcctgttcccaaaatccagatctctgattcagccaagttagctctacccagaatatgtatagcactatcctgcttcccaacagtttggtttctgaaatttttgactatgagaatccctggtaagggtaaaatatatagaggggctcctggtatccatttgtaaggaaaattatagtaa

SEQ ID NO: 3308 - DNA, 4001 bp, Homo sapiens
aagtgatagataaactctactcacaacgcagaaaagagacaataagatccacacttaatctagcctaagaaaaggtctacagtcggcttccaacccccccaactccacccatttttaatgagacaatgacaattcttcatggtgaaccacagagccctgcttccctaaccttgtaccgactctaacagaacactcccccagtgcagattaaacttttagaaaacgttcagtattgagaaacaaattaagacaggaaaaatttaacattccgttctgaattttcaaggcctgcgcctccattccctacacatctttcataatctctagactgtacaatgtataaaatgaacactgttagtcacatcaggtgtcagctactcagcgcagactcagtctccagatttgctagtttcatttatcgctggggtggagggtgggtgttaaaattttgaaaaaagagaaagacctgggtgggtgtaaaccagggcatcctctatattctcttcgctctctgtcatttctgtttcaattacacagctgtcaaacaggttattcctggaattcagattttataatccccacactgtaattcttcctgctgctgttgcccaaacacacactcctccctgcttccccaaaatacgtatccatcaatagaaaggatgacaaccacagttataaagtattcccaggtaacgccaaactccccaccttgagcaactggcaagcactgagtggaggctgaaacatgatgacaattttcacgatggccaaagcagtggtttaggatcgtcagaggcaaggcccgcctccactgtatttcaatttacacacaaactcagaaggccggatttggggaaaaaaagaaaaaattcaggttgtcttatttttaaaaaatgcttttccattttatcgaagtaaagtgcatgcctaagagtgtagcttatttccttatctcaaagccaggaaatgaggtcttttaaggccagtctgaatataaactcggtgtgcaaaaacagagggactgcaaggcgaaagaaacccctctcccaactttggccaagcggcgtggcctccagtcagcagcatgtttatcaccctctcctcgtcccccaataagaagtttccacatgccacgggaaacaaagaaggcgcccacaccgaccttatagacttgtccataggtgccatttccaaccacttccaccagctcaaaaatcccagcaggatcctggagaggaaggaggggaggggttatcatttaaaagaagccaaaaaaatgaataaatcaagcaaggcagttggagagaaaaggcggtgacaaaagaggtgggcttcgccccgcgcggtcccccagcgcccgggggtcgcgcggcgggctcggggcgtgggggcggtagagggtagcgcccgccccgcaccagcccgcacaggaagacaaaggggccgccgcgccccgcggctctgcccacggcggcgcccgagcgcccggccgacctgggcgcggccccggctgccggctgccggctgcccgctccccgcgcgcccgctcgcgggcccactcacccgcagggaggagaggtcgatgtccaccagactttttgcaggggagtcgttcgccattttccctttttgccaccaaaaaacaaataacaataaatgtctctgtcgctctgtgtatctcagccgcagaccaggccgccgaccgcgctcctcgcgcggcagccgagccggcccggtactctcctcgcggggccgcgggcggcggcggcgggctcggctgcgctctcgggccgctcggggctctctgccggccgggccgcgcggagggcggacggagcgtgcacgggcggcggcgctcacaccatggcgcggggccggccgtcaggcccccgggcgtcgcccgccgcctcaggccccggcgcccgcgccccgcgccgcgcgcctcgaggacgggcccggagcgtggggccgcggcggcgccgagttgagcgagtgagcgcgaggcagcgagacaaagataacccgggaggcggaggcggaggcggggagcgaggtggggagggagggggcggcggcggcgctggaggaggagaaacgggacaccaaaaatatattctgaggagagagaaaacagctccccctttcctcctcaggcaggaaaaaccggcggaaacgcactcacaccccgagccctgccgggtagggcgcgggccgaggcgcccgcgcggcgtgaatattcatcaggggtggggctcgaacaatggccgcgccggcgggcagcgcgggcagcggtcccgacacgacgcccggcgcccagggtgcggcctccgcgctcgaccccgcacggcgctcccgaaaactgcaggagcggggaggaagcgggctgggatttccccggggaggagctggggtggggaaacgcccctacctcgcgctaacaacaaatgacacgaaactgagctggaccgacactaagaggccatggaccctcgcgtctcccagggcaagggtgtgtcccgccggccgcgtcccggctctagagggacccgaacccggtgttgccgagcggaggaggggcctccctcgatcctcgccccctcctcgccccattcgccccatcccccactctcccacaccctagagaggagacccttaagtccctcgtttccggcttccctgcacggttttcttttcctttctctgcttttgcaggctaaatgtgtggtacggttgtggttgtagttgtgggattcgctgagcatcgctgggctgcccggccatatccaaaacagctcctgtaattgtctggcgctgcgctcctggctgcgctcggtaggtgagcactgtgtttggggcccttagtaccaacccgcattttgtaacctggagatcactaaggatcaaccaacaggtttcttccggcaacctcggaagccagtcggtagttaggcactttaatgccagtgaatcaacagtcatttatatcgcattcctccaccgtccaaaaactttcagtggttccctgttacctgacaggtgttctcaaaacgtgagtgcttcaggcaaagtgccaattgcctggccctgcctcccgagttctcgtttcaggaggtctgcaatgggcctgagaatgtgcatgtgtaagttctcagtgtagctaacgtcgctgttacagggatcactcgttgacaacagtggcctccggctattcatgattggattttcataaacatcaccatcatcatctaccaattcttatgcacatactgtgtctcccccacacaaacgcgttgtgccgagtgctttacacacagcactctatttacagccttgaaggaatgttatcctccttttaggtaaggaaagcaaagtactgaaagataaggagtatgtccaaattccttaaaagcacagcctggaagtggagcagggattttcaccaggttagcctgttcccaaaatccagatctctgattcagccaagttagctctacccagaatatgtatagcactatcctgcttcccaacagtttggtttctgaaatttttgactatgagaatccctggtaagggtaaaatatatagaggggctcctggtatccatttgtaaggaaaattatagtaaccaagtattcctatgaatgtattggtgcttttagataattttggtttttgtcagcagcaatgtcattatctatgagtgtaaataaaataatttactcagagaactagacagaaacacatctgaactttcaggctatcttactattgataacattgttttttgtttgtttgtttgttttgagacagaatcttgctctgtcacccaagctggagtgcagtggagtgctctcagctcactgcaacctctgcctcctgggttccagcaattctcctgcctcagcctccccagtagctgggactacaggtgcctgccaccatgcccagctaattttttatttttagtagagacagggtttcaccatgttggccaggct

SEQ ID NO: 3309 - DNA, 4001 bp, Homo sapiens
ggagcagctctccagtacagctgtctgctcctgccctgctcgggtattttggtgagctatgtgacacaggaccacacagaaggaatgccactctcaggccccacagttcccactgcaccacaggcaggtgcatcccaccaaaccccagtctggcattcgaaacagaagaaactgccctgctggatgggggctatagttttcctgaacttcatctctatgtttaaaactagggcgacagccgtcttggctactgtaaactaatctgatgggcatgggggcagggagtggctatgaggaggctgccaataggccatgattgagcaaagtaaagagtgaaatagttatttctcattgtttgcaaccccggaaactccaaatgagtggctccttcaccatgatttttagaaatggaccatgcgttccttttaccatctggagtaaaaatcccaaagcctcttgtgcggtagatctggcttatatttacacgtgctttctaaaagcacactgaaatttggaagccaaataaaaaagaagctgacaatgaggtcatatagtagttaggggccctcaagttgagacatgtttattaagagtttctggctctgggcactaactctgacttcaactcagttcttctggaaaaagaaaactgtttgggaccctcttctattccaagaacagggactgcaagatgggcaggtggaggggtagcaaacataacccagggaattgtccaaatatgctagaacccctatctggtgacagccccacaaagacacacagctggaggaggcacagtgtacaggcctcacacctacaccatggagaagcttcgatttttctccttcctctcaactctgcacacgttatgttaaaaactcactactatccaattagttaatttacaggaatccaagatcaagtcctgccacagccccttcatatataaacagtaagcacttcctatggatggtatcaggcctttttccaaacctcacattataccagggttgtagtgcgatttaaaaaaaaaaaaaagcattttaaagagttccgcaagatgcttattcacaacaccacaccggaagcgcaggaacttggagctcccaaacgcaacctcttctcccttccctccactacttctactccccgctccgcaacaccggccgggcagtagctcagcccactagaaggccaccaggcactagccgcgttcattaaacgctagatgatcacgatggggctgaacccttcccagccaaatctattcggaaagccctgcaagctctgagcagccagtgagaactgtccagacctgcttccccaaaccagccaggcaggagcgtgtggggaagaaacccgaggcccccaggctgggcctggcccgatgttccccctcccccaagtctcccctcgctctcctgtcactctttttctggcacatcactggggagatccagagaggccgggagatgtcaggcctaggaggagtgaggaggagggagaagggataagggcggacgggaggtagtttggagaaaatatcagcccagggcagaggtgcggtggccacgtctagtggggaaggagcctcaaggtggacccggagagacggagggaaggggaggggagggaaggggagggggagtggctggggaggccgggccgccaaggccggagggaacccggcgacagggatggagggggttgaccggcgcggggaaggcgcggtcgggatgcgggagtgcgggtggggaggcaggggcggggggagcccggttcccctcccccagcccgggccctggcctcccgctgactcagccccacggcgtccgtcgcctcggcccggactcacagtgcacgaggcggctccggcggaggcggagggggaggggacaggtggcgggggcgctgcggcagaggctgcggctccggccggcggctccggggcggagggtcctcgctgaggccgccgcggtctccggcttcaacgcacagagactgcgggggacgagggcactgcgcaggcgcgatgcggccgccgctgtcagtccgagcggggcggggccagggcacccgccgtctccaaggcaactgagccgcgggaggacagcccctacctccaccttgccttagcgattgcggcgggaggcggggggcgacaggaacaggcccactgcgttgccgtagcaacgaggagaagagaccgcttcagacgtgtgcggcggtaccgagggaacgcgcctacctcgtcaccatagcaactgggaacagccccttcctttttccctggcaacagggtaacaatccctccgccctgtctcatcacaggaggaacaaccgtgtgcacctgatttcagtagctggatgacggattttcatcttttatggctacggaaaaggaaaaagagacgttttcttctctttcagcgacatggaagagctaaggctgggttttatctcctctcttggtgtgtgggttccaatcacagtctttttctctaattcccaaattcatttttttttctttttttttgggacggagtttcactcttgtcgcccaggctagagtgcactggcgcgatcttggctcactgcaacctctgcctcctgggttcaagcaattctcctgcctcagcctcccgagtagctgggattacaggcgtgcgccacaatgcctggcaaagtttttgtattattagtagagacaggggtttcatcatgtcggccaggctggtctcgaactcctaacctcaggtgatccacctgcctcggcttcccaaagtggtgggattacaggcgtgagacaccgcgcccggcccaatttttttctacctgttttaaacatcccctttcatctcctaccagagagtgtgccctttacccttaaatcgagctaacgaaatcgtctatccacagaccacttgagtttttgtcagccttattgtctctctcccattgcaaggataaacacctcatttcttcatcttgctcactatctggtttgcagtccacttcctcataactagctccctctgacatgtccattcgttttcccgaatttcctcctccaagcatgctgttatggatctcctcggttcttctggatctccctttcctctccacacttgctgtccttgtccagcactgctctgcccggggctccagtatgttctttccccctgtgacttcagcatcttggttctctttgtgctgatgtcttctggctcttcctccctcagccctgattcccatggatgccttgaggtcacctttgtaccaaccctgtacattcctcctttcttacacacaccttacactatcgtcatttgtttacgtgtctgtgtctccagactatgtgaccctggtgggcaggaattctgtctttttcatcagctccctcagcatccaccacagcatgtgacacatagcagattctgagaaatgcttatgtaattgaatcaaatgaagacaaatcttttccttcttcttttctctggcctaactgcctcagagtcccagtccccatttctaatacctttacacatagtttgtcttttagtactatgctactattataagtctttcatctccttagctttccatcctgttaattgagactctggcattctctatttcctgaatcctcgcctctagctcttctctcttctacactatcccaaatgtttctactaaggtaaatttcctcactgggtaccaaccccgtgactcccataccctccataatcagcgtaagctcttcacacctaaccatcctgatcatcccctaaccagctctaatcaagccttcttggtgaacgttactggattctgctgggcttgttgacatgccagagatgcagcattctcttcaaacaactcaaaagcaagagctcacaacctagcattctcttccaaatctccctgtctagctcccacagattccgccgcaggactattggtgccaaagcaccccaactaagcccattttcttggggaaa

SEQ ID NO: 3310 - DNA, 4001 bp, Homo sapiens
gtgttgttggccgccaaaccggggggctgggggtcgccgtgcatgggcaggggcgcttgaggagggcgccgcagtaagaaaaccttcaggtcattgaagagcatgcggcagcggcacttgaggagaccctggtggcgcaacatctggggggctggggcacacaatccatagcagtaccagccggagcagcagcaccaccaccaccagagcagcccacacaggggcatcagcatgtgccccgtggaagtagagagcccaagaggggtggctggagtcttaaaagagggggacaggacaggttttgggggtccacagtggatctgtgttgtggggggagtctgctttctcactggcttttcttacaacccctccaagtagcaaataaattgctcccaggactgagaagtgtgagtcactggttctgaactccacctggaaagcccaataacaaaaaagtttttcttgccctcacacacccaccccaacctccaactttgttcagtgtgtctcctttctgcttttgacctgaggacactggtaggagcagagggattgaagaagcgtggtggaggggccactagagcctctgtcgaattgtttaaatcaatgtcgaattgtttaaaagttccccaggaaaggattattgggttcttctcaaattcctacgcagtgagaaatctttcttttatataaaagggtggggacaattgtaaatcaaatctggagtggattgagctgggcttagagaaaactagctcaatgaagaattgaggactgcatgtgtgagagagaaaagatcgtttttctcaggtggtaggggttgggggagtcaaggtaggggaggagagaagattgggagaagttttaattctcctgggcagaaaactggggcaattaacccccagaagcaccagagttgcttttaagagagcagttgggtgggggaggggtgttgcaggtgaaactgggctaggggcttgtgctttgcctccgcagccaaagggttacaccgaagaggggaaagccaattaggagaagggaggtaaaatagaggtttgggaaggaaaaaggatgggagaaaaagaaaagatcgtttaacccttgcagaggcgcctccttcctgagcatgaagatcctggctagaggaagggtgtgtgtaccggggtgagagggcagtggagcagagaataggggtagaggagaggggcgtgtgggagagaacaggagaaaggagtggttacattatctcagcccccagcccacccctgctgcagtcggcaaatccgtggcgccctcccctcggttccatcaaaggtcccttcggtcgaggggcaagagccgagagaagggcaggtccgggcgggcgagtggcctcgccttctcctcctcttcctcctctgggtcgcggtcgccctcctcctccggctccgggtcggcccgcgcccgcagctgctgctgcggcggcggaggcgactgctgctcggcgtccgggtgtctccggggcgggggctgctccggctcgtcctctggctgctgcccgccgtccggcgcggtcgcgactccggccttcatgatcctcctcctcctcccccttccctgggggccagccctgagcccccgcgcccgggcagcgctgccatgcaaccagaggcgaggccggcgtgggggtgggggcggctggggagtgaggagggggagtaataaaaaatgaaataatactagtggaataattcggttctcaggcaagagtgcttctggagggtgggggcggaggagggcggctgccgggtctgctcggcagctctgcccccgctacccccaccaagggcggcctcggcccgctctctgcccccccaccccgccccttcctcctctccaccgcctctggctggctaggctcgctgttgctacctctcctcgcagatgcaacgaggtaaggcttgtttgcggtgccagctgaaggtggggaggggggagcgaagcagtgtggccgaggtgggaggcagccggcacttggctccagcttggtcctcgcgactccccaaaaccgtatataaatatatctcttataaaagccgagaggaagcaaatcagattccaggctgctgccaggtgttgtctcgtcttccgccgttgctcagcacccgccgctgcccccactggctcgattcccaaaggggtggtgctggaagggaggtggcggggcggcgagctgaccgtccgagaactggaaacaaggttcttgcagcgagggaggctctcggctatctccgccgccggcgccgcggccgccgctgctgcattcagcaccccgggcgagtggacagctcccacccagaccccgcgcgtcacgctcgtgggggcctgacgcagacgccgcggagggatggaggagggaaaggggatgagaggaaaagaagctggagggagagggagcaagaggaggagagaactgtgcgagggaaggggatggggagggaccaagggaaagggaggtaaccaggagagggagggatttaggaagggaaggaggagggagcgaagtgaagagtaaaagaaagaaggagaaaggccacggggagggaggggagcgattcaggcactaactcttgcatttcacctcagcaggaacgtgtcggtgtggaaggtctggttgtagactctctgcccactgtccactatcacagctcctctcattgcacatacaagacacagacacctgtcaaccagagaccgtttctctgttcacataaacatttaaagtagatctcagtctgcaagctttcgaggagataaagttttgtgacttccacaatgaagctgggacttgatggagattaaattcctcatgactaaggaaatgcttgagacatgagacatgagaaggaaatgtttcattgaggcttgagacatgagaaggaaatgcttcaaattttcaaacagggaggaggttgctagtaccatttttttgtcagcttcttcgcctagaatttaagctccaattgacagagataatttttttaattcatttgatcccgtgtgcctaagtcagagatggcatctagtaaatgttcaatgcatatttgttgaatggcttgtggccaccatcaccacagtcatcattactataagtcacagtgctctttcaattgtgagtcataagaatccagagcaatatttcagcttcgtcttcaccaacatccccagcctcctccctattcaagcctttcactgagccgctgacaagaggtaatttgaaatggattttaatttcctctcctatttctgctactgactcatgtcaccctaccctatttttctcaaggagtttcttgagcagcaaagtgcccctaaatgtgaagagcaagaaaaagaaggaaacttaaagtggtctatataaaacctcagtgtttgcagctgtagactttggtcactgaaaacttaggattgctttttttgcctttccttataaacctctctcccccaccccgctctctctctctctctctctctctcacacacacacacacacacacacacacacccctctagggccatagagaagatatgccagtgattcatccaaacagccatggtaatgcctttacaaatattggagccatagacagagtagcatgcaaaatttctgcagcaaaatatcattggaacgaagttcagtccaatgagtcataagaaaactacccctttgctgccatctctatgaaatgattcattcctacaagctctaaggagaaaggacctacatctcagtcttggttaacccagcatggctacttgtctgaatcatgccccaggactcaccatggatgctgagacccagcccaaggtgctcatttaaagatgatactaatatttttaataactacaaaataatatttattgattaatatcagcacaaatactgtgcagcaacaaaaaacctctttatttcaaaaattctatttgttcttcaagaaaatattttgtgttccacatcactc

SEQ ID NO: 3311 - DNA, 4001 bp, Homo sapiens
aatttccaagattaagcacccctcccctatgctcccacagaaccactgtacagtcatattaagataataatagttgtttatacattagtctgatgactaaacagtgagttgtggagggcagatgccatgtcaagctcattcttgtaatgtgaagctctccataatttgtaatttgactacaacaaattacaaattatctaaaaaagttttaagatatttgacagattttgcattataaaattattttcctacaataaaatgtcaaaatgtagacgattcttgaacatagagcagataaaagagttgtgtaaggtgggtatggagcggactaaaaattggctacatgagagtcatggatgacttttgtgtccaagttcgttacctgacaccttcatgtagaacataacctgggcatcctcgtgctttatctgggaaaatagccctcttccaggtggcagaaaaaagaaatcatttgtacttgaataagtaggaattcttaattcaagacacctgacccagcactaaacttggaaaaaaaccaagactagtattatgtcccctagtgactgcttcacacaccacctcagcaaatttaatcctctctagaaattaactgccatgtttctgagacaatctcgtgaacttaaataactatggcaaaaatcaagactcaaacccaggtcttctgagtctggtgctactgcctcatgcaccagtcctgtctcccaaaatgctgtagagctgttaaataaaaatattatactgacctcatttctcaaacaaactttttgctacctcaagtaaaagatctagttacactacatgtgtgccttcttaataactgtatactattggatttttaaatcgaaaattcatctttaatcctacatcttggttctggacagaaaggtggagatttaaaataacatgtaatcagaaaaatagctaatcaatcctacaaaatgggggagaaaacctcgccaaatttcagttttcacacatttaactaatagtaacaaacaacattagtcgtgacgaatttattacccagatagactttcccaatatatttactttggtacttgagaaaaagtattaagtgcagcattttggggtgagggggtggacacacatcttcaatacgcagtttcaccaaaatgagggagtttcctactcccggcgccttctatatttttacttcttaggccaacaggtccatttttaatacaatcacctacttcgagttgcagaacccacaattcaccacaacacaaaaataactctcagggcgtcacgatattcaaaaactgacgttaccaataagacaatcttggccgaatctaaggggctaccgaagtcacttcgactcgaggccgggctggccgagccggagccctgcccgcctttgccccgcgctcaccggcgagctcacgcgcgacacccgcggcccgcagggctccgaagaccccccgccccacggcccaagaggaggccgccccgcgccaaaggagggctcaggcttcttcccgtcacccgccacacgtccctgaggaagacacacaatctgtcccctgcacccgccacaaactccaccacccgaccaaaggcccctggcaagggaggcctgcgctgtggccccttggccccggtggccccggaccaagcttctccacctcatcctgagaggaagcggcctccgcgtccccaggcctcttcgtttcctcccctcccccactcgcggcctggtcccgaactagcgcccaagacggagaagaactagctccgcagctcattaccccggctcctgagccggcaccgaccagtgcgcgtcccactcgcagcaacacgcaccgccgcctttctccttggagttctaggcccgtgactgaggaaatgcagtcggcagcgaagcacaatggcgcccgcccctctcccggatccggcgcagaaccagccaccaccgttaagtgcccctccctgctcctcctccccccacttcgcggacttcctggcttctcgcgagagtggcggcgcggcggggaccgagagctgcgggcgggctggaggtaccccaccgcggggtggtgctctgactgcgggaaccgttgaagagctgcccccggggagtcagcgaggcgccactggtaagcggcagcggctggctggccggcgtgccggcagctgggctggcgagtgtgcgggcgccgggcgctggaggcccgggccggggcggtccccgcccgtctatagtctctgagccagccccttccctcccgggcgccgggtccccgcccacaggcccacctgcagggccccgtgctcgaaataacgcccagctggttggctttttttttttttttttttctttttctggctcttggtaagtggcgcagtgaatgttgaattgaatcaagcactgccttttccgacctacccctccccgcttgcttccctgcccgccctgtgtgatctaactgcaagccctttcccttaagagttggagcctgtttgtccaaccttgtgatcatttccttgtggtaagaatcttggtaaatgatggtgatcatgtcttttaaaatcgtgatagtaacctttaatagcgtagccatcgattttgcagtaaacaaattcacctatttagaaagagggaggaaaattgtgaggtgaatggtctggtgaatattagatgaaactttcaaagaactgtaaatgtggcaaactaagatgtaaatgagtactaataaataaaagggagtaggttagggaaaagctacatctaactatgtgtaaatatttagatgatatgttgatttggaataatgaatcaaaagttttttaatggaaaagatcagttattgaaacttggaagaatactgaaaggcacttgattttttttaatgacctattttgttaaggtattaaaagcaatcctttggatccaaataattccaataaatgaaacacagtgtttctacgtgtttgtcattacatcggaagggaatggagtatcagtcactatcatccttattttattgtcttggggactaacagactgtacatgtttcactatgataaattctaaaatactataaattttaaagacttaaaggtattttaagttggcatgtaagtgccaatctaacttttaggatatgaaatgaaaataagcatctggtatgggataaagtgaacagagattacttttgaggaaattaatttgccctttaaagaaaaataattcttttccagcctgttcgagtgcccctgcagcattgtggttatagatacacggatgtatacaccctgaagaaccagactatatggcttcaaattccacccctgcctcttactacctttgttatctcaagcaattccttaaccttgctaaacctaggtttcctgtaaaacggggttaataacagtacccatgctctgtagcattgtttagatgagataacacgtcagttcctgaaacaagtaagcattccgtaattgttagctattacattccatgtctaaaccaccaataatattgtttctttctgtgacttaatattacataggtctcttagacatcttctcaagattatgctaagagaaatgactgcacccttttcctgagctatggcagtcagacctggcagtggtaactactctacagaactcccaaacctggcaaggatggtgcagattttggcagattatggctttgtccccacccagcactgatgatattataaagtgagtatgacaccaatttcctatgctaaacagagcttctagttttttattggtgctagtaaataaagaccactgatgaatatgtttttattatttaagaatggttcgttgtgtttctttttaatgtactctctctgattttagtattcaggtaattatcatgagtgataaataattattgagattttgctatgctgcagacattttgcagccgggcgccgtggctcatgcctgtaatcccagcactttgggaggccaag

SEQ ID NO: 3312 - DNA, 4001 bp, Homo sapiens
ctcccaaagtgctgggattacaggcatgagccaacatgcctggctccacttagtacataccaaacacaagtgaaaacacaagtccacacagaaacttgcatatgaatgtttatagcagcattattcataatagtcagaaggtagaaacaacccaaatgtccatcagaaaataaatgaacaaaatatggcatatccatacaatgaaatagtattcagccacaaaaaagaataaagtactgacatatgctacaatatagatgaacactgaaaatatgctaagtcaaagaagctactaacaaaagactacatagtacctgtttctactcatgtatatgaaaatccaaaatagggaaatgtacagatataaagtagattaatggttgctttgcactggtaggggaagagggactagaggagcagtgcagtgataaccataatggttgtgcagctctgtgaatatactgaagactactgaactttaaatgggcaaactatatggtatgtgaaattacaacttaataaagtcatttcttaaaaaagaactttaaagatacttgcaaatttacatcaatgttatccactggcaaatgattaattaaaaatcatgtaatgcacaggaacagaaactagcccagaatgatattcttttcctgggctcctcatttccatgagttaatgacttgactgtgaagtgaataaatcctgctttgaaagacttccagaacaacattaccttagccatgagcaacaacttaagactttgagctctcccttgtttgaaatattcatgtgatggagagtacccatctccacaccaatgcagaagaaactcatgtcactccactgtacactttaagaccaaattgacaagctgtgtttccttggaggaatggtaaatctttttctttttgagacagggtcctgttctgtcacccaagctggagtgcaattgcatgatcaagggtcattgcaacctcaacctcctgggctcaagcaatcttcctgcctcagcctcctgagtagctgggactaagatgtgtgctaccatgcctggctttttttttttttttttttcattttatttttagagaggggtcccactatgtcacccagactggtctcgaactcctggccacaagtgaccctcccaccttggcctcccaaagtgctgagattaaaggagtgagccaccatgtccagtctctttttcttatatgcaatactcattatagagctagttgtgttttcctgcaattttcttgatacccaaaatgagagcaagtttaacttaaaaatgctgcagggtttatgcaatgcctatcaatgttacaattctgacccactctccatatttattactctcagtattctatctgtatatttccttatcctattttaaactgttttcattttcttgtttaattgtatatgcatctatgtatttatttccttgaaaactacacttgcataaggtagttttaaaaattaatgaccactggttctacactatgcaaaatatgcaatggtactgatctctatagcagttatctacaaactaaaaaaaaaaaggtatcaataactttaaaaagcccctacaaccttataaaaagcctccttttaaaattatttcatattaaaagtaatcaacctctcaacaaggcaaaacagaacaaacactaaacagattagtgcttccttaaagttacagaaaaatacaccaaaacaaaattacatatccacaaataacccctttttaacaatatttatagaaattaaattttcctttaaaaacatgtaaattttgcttactgttactaaagacataagatgatcatagttgccaatcattcaaattgtgataaaaatttaaagatgggatagcagaagtaacagcaagattagtagcaggtgaagcgcagcttacaaatggctgagaactgaaagatatttaggaaatcaactgttcggaacttagaatctacattttcccaaagaaacaatgctatccagaatcttggattcttaagctcaagtatattacataataatcgtgtaagtgagagaaaccacctatatttctagatttcagaaccttatcgatgaactgacacaaatatccatgttaactaaaaacagaagtaaaaaatgttctataaaatgtcaagcactatataaggtgttcccatattaagtctataacataactgaaattgatcatgtcctaccccctgaccctcttttctctgaagcttcagatttaccaagtgcctgagataacagaagttttatgtctccaagagttgtgagttaaaaagcctcaacaatcttttttttttttttttaatgttgcctctggccaggtgcagtagctcatgcctgtaatcccagcacctttggagggtgaggcaggaagactgcttgatctcctaagttcgagaccagcctggtcaatacagtgagacttcacatctacaaaaaatttaaaaagcagtgcagtgtggtgtgcacacctgtattctcaagctactcaggaggctgaggtgggaggactgcttgagcccaggaggcagaggcttcagtgagctgagattgtgctactatactccaacctgggtgagtgtgagaacccgtctcaaaaactaaataattttaaaatgctccctttgacactgagtaatcttaacaatgctaaataaaactaaacatactatatgtaatttaatatttggataacattatactataccctacagatattatcttaaaccaatgtaaagccaggaaataataatggtaacagtaaaagttaacaattataaataattataactaaataaaaataacaattataaataattataattagtaacacctgaacccctatactatgttctaggcactgttccaagtgcttcacatgtattctttctttcaattaatcttaacaattaagatgaacaatcttgttcatcttacatctcacatatagatgtggctgtatgaagaaaccgctatcactatcaccatttcacagaagaaaatacagataaataaaatacaggccaggcatgatggcagatgtctgtaatcccatcactttgggaggctgaggtgggagtactgctggaggccaggagtttgaatccagcctgggcaacacagcaagaccccatctctataagaaaaattttttaaaaaattagccacgtgtgtgtgtgtggcagggggctgcgcatctgtagtcccagctactcaggaggctgaggcaggaggattgcttgtgcccagaaagttgtggctgcgccgagtcatgattgctcaactacactacaagctgggtgacagagcaggaccctgtctcttaaaaagtgtaacactttgttcaagaacacaggagtttcaatttctaaatcaaaactaaataagcaaagcagcctaaaaatggttgacttatggctgaaactgctcccataccattaaaaagaaaaaagcgattaaaaaactgattgtaagcaacttaaagcaactaaaaagcatttagaaaatacctaaaatttataaaaataatttatcttaagaatcaataaagattttaaaaattctacttggtttttggatgtttgcaagtaatttttgaattttacttgggtacttaaatacatgaaaattttggaacagaatgaaatcaacactaatatgttactacaaccatcatttaggtggggtcattttgaagtcattaacatgacatttaaatttttttttgttttttgttttttgttttttttgagacagagtctcgctctgtcgcccaggctagagtgcagtggcgtgatcttgattcactgcaagctctgcctccagggttcatgccattctcctgcctcagcctcccgagtagctgggactacaggcgcccgccaccacgcccggctaattttttgtaattttagtggagacggggtttcactgtgttagccaggatggtctcgatctcctga

SEQ ID NO: 3313 - DNA, 4001 bp, Homo sapiens
ggaatcctcctgcactggcttagttacatttttaattggtgacacacacaacccaggtcagaaatctagggttcactattaactcctgcgtcttcctccccagccctgtcctgccattgcagtccaattgatctgatttccggtgtttctccagagcattcctttattttcctgccttccatccactgcccctcatcatctcttgctgccaagttcctctctgtcctcagcttctctctccagccatccctatgtaggacaaagagcaacctcacatgcacattagtgcctttcagccccacatcggccccttcctgcttccccactgacctcaggatgaagtcaaattttttggttccagcctcagtccccactggtctttccgtcccaattttggccaaacagtatggaagtatttatatttctctgaatatttcttgtgaatacaatacaaacatgtggcgcccaccccgccccaggcactaacttctttctctaacggactccctttatcctttaaactttggaagaggtgtcagctctgccctccagggctctacacctggttagatctgtccatcatgtcctgtggaagtctcagtcacaacatggaaattgtcagttcatgggcagcttaccctgtcccctgtcccctcgtgccagaagccagaggccagaggctatgtttattcaagcctgtttcctcagtgctgagtgcagtgccctgctggaaataggtgctgagtatgcttgatcagctgactttgcttgaacatcttcagtctcttaaacagtcatgtatccagaatgttgcattctgagaagttctaaatagccaatgattattatagccattagcactcacacctttctctgttattacactgtaaattcctagaggcagagccccagacgcttcatctttgtgcgctgaaaattccaggcagggacctgggcagacaggtgtgggatgagaaggacactctggccaggagataaagccaccaattttcctgcatagacaacttccagcaaagcctgggagtggaaatgactgatcaacttggaagatgatcccaagagaacgttctagactaggaaatcagagctcatttgtggaatgcaagcccacccatgacttcaaatgctacaaattctagaagattttaaaaatgcatcacctgttgaatgctgagtgagaaaataaagacaacagagttgactgaatattacagacctgagtttaacctaagacaaactaattatgaagctatgaacatatttcagtcaacatgaaatacagaatatgtttcctgaccagcacatcagttataacagaaatccccttaaagaattttaaagaagctgtgttttgaaaactgtcatgcttggcttcagttttgtggtcccctttcagtgcccctgttttgcgttttcattgtatcacccaacctgtgtgtcagaataagacattcattaaaaaaaggggacatttaataagcattggcattttttcaagggaaaatatttaaatatgattaaaacaatagtgaagctaagaaaaacctgactatatgctaaaaatacagcatctattattagcattccagaaattccaaattgaagcactccagacagtattagtgatgattacgtgcaaaatgcagcaataagccaaacctagactttctattgacttgtctattttcgtatctcgctagcagaaagactacatttctggtcatttccattattggggaatcgtactttaccattgatttcgaaaggctccattgcaatttggtgaaaagcagcttgttgggtctcactcaagagctcgtcctccttgagaattttcttatttctcattgccaagctttatagatggccaaagtcctggagccagcagaaatgctcccctcaagaggaaccacttggagaaagatccttcccatcgaaccactgcagctggttgtaaacctcgcagcacttccctttggctctgatttcagaatttgcaggatgtttcctgacatgatcaggattggacatttctcaaacacgggctattcacatgtggatctcccacacagtgctgctgcttgttaagggggatcgaggaggctttgggacacaagttacgggcctctgaatgcacccgtcactcccaggtccctgagacccaaaagctggatggctccagagagggccaaccaagccctgccatgggcccagactcagctctctgtcccaggacctctccagcccacagtgaaatctcccttctctgacctgcctcaacctttagagttcatccttgctgctcaaagtgtggtccatggaccagcagtattagtatcacctgagaacttgttagaaatgcaagttcacttgttctaacaatgagtctctggtcccaccccatcagatcaaatccaaatctacagtttaactagatccccaggtgatttatatacacattacagtttgagaagccttgctctgaaccacacattttagcacttagtatttcttcttgtagttttcccatgttctctctctgtgtgtgtacacatgtgtgcacatgtgtacatgtgttacaggtgtccttgtccaggccccagtgagatctgagctccttaaggaaagtagcttctcccctctctccctcccgtcaggcatctctaccagggatgctgtatagcatggtggttaagacacagacactaagagctagaatgcctggcttcaaattccacctcttccacataggggctgtctggcagtaggcaaatcacttgagctttgagcatctcactcttctgtttgtataaataaggaagatatgaatttcgtgagccttaaatgaattaaatcatataaggtggctaggatggaagtattaggtaataaacactatggtcatgttgttgttattatcattagagacattgtgagcctgctgggcaccgaggagatgaagaaatggccttttttcatgaaagatattcacagtctaccatgcaagatggttgcggctacaactacattccagaaaattgctgtgaagtgcggcaaaggttgatgtccctgaaaagacagaagtgccgggaggcaggggagacagggcagaaatatgacaaatagctttatcatctgaatcaagagatatcagataccagagctgggcttaaaaggataatgggggattgatccagatcaagatgaggcaaaggccctccagggaggaaggagggcaggtgcagcctctcagaggtgggacagcctggagcaggggagccgtagacttttggcctatttgaaatgtaagaggtgaggaagacaggtggcaggaagtgaagctgtgccaggcgaagtcactttctttggcccgtggtatgtcagaaagtgaaaggggatgaaactcaggaaagtgagctcctagcagtgccctgaaaagcagaggtcccccgtggcgcccacaatttcaacattcaggaagtcactggttccgccagaggacaagcagcagaagccaggacagaaaaatttaaagaggaaaattggaaatgaggaagtgatggctccagctagagtctggggggtagacaggaccagataattgaggacacaggggatttgcccactggagggcagtcccctaggcaaaggaacccgctcacttagcctggcagagctccctgctctccctctgcctctgcctggtcagctcatctttgattctcatgggtgtggggaggggacttattagaaaatgtcatgggctaattattgaggatccctgttcttaaaggaagcacttagtggatgtcaagtgtagtcacttcacctctggctagagaccagagagacttgggtcccaaattcaactctttcattaactttctgtgtgaccttggttgacttacttctctgaacttccacacagagtaatggcttgtgcaagcattaattcctatccaggatttactgttaatgcc

SEQ ID NO: 3314 - DNA, 4001 bp, Homo sapiens
gcttatgtgctcatttgattccacacttaagaaaatactagtataactttcctgaaaataaaaaataaaaagataacacatttgcttttttaccacaagccggtaagaactgagtttctaggtccggtgggctttcaccagccaagtcctggactggtctagtcttggaaacaaaagcccagtttcaggtcccagcctcctcccttcaaaagggcatggatgtccatagaatcgaggcaagaaatagagctctccaagactcctctctgaggcagagacccccagcctagacagcagcttgtcagctaggcttggggtgacaggctgcagcaaagtcccaaagactcgcaaacattccaaggccacatgaagcacagtacccagccagggagcatccactgggctctcccagttcagcttccatggtgcatgcctttggacaaaaccattagtttgccggacacagctggacacggcctccagagccttatatatccgaaagttatcatagtggtctgctacctgctttggcaaagtggccactgcgctcaccagagcataatcctctgcctgagcacgaactgacggccccaccaaccctggctcactagggaagcaggtagtgcagaaggctgggtaggtctcagaaggatttattcttttggcagtgcatcggttcaagagacctcccaaggcatctgccagctcggagttcagcaacttaaccaccttttcatcatagtagtcacagtcccagttggggacgccctgccgaaggagaaagtagcggaagccatccacggtatagcggttaaggcaagtcctaggatccaccacgttgcccaagctcttggacatcttttggccacagactgtccagtgggaatggacacagatgcgctgtggcgggctcatgccggcccctaacaggaaggcaggccaatagatggcatggaatttgagaatgtccttacctatgatatgagaggtggccggccaccaagatttgaactcagcatttgggtagccaattacagtgaggtagttgaccagggcatccagccatacatagatggtctgcgaatcatccccgggcaccggaatgccccagtgcaagtggctacttctgcgagacacggacaggtcgggcagctcctcgtccagccactgaagaactacgtgatgaaatggttcgggggtgatcgcctgagggttgccccgcagccaccgctggagtggcttccggaactgggaaagcctgaaaatgtagttttcttccttggtccaggagactggatgcccgctctcgagagatacaggaaacgaatcccccgatgggcccggctgctgggtgaccttggcctcaggcaggaagcactcgtcggaagcgcaataccaaccttcatagacgcccttgtagagcagaccgcgggacttaagcaccccccagaagtgctgcacagccacccggtgccgggcctccgtggtgcggatgaaatctgtgcaggagataccggcctcctggaaaagctgctggaactgctcagagactcggtcgcacagctcggtcggggccaggcccgcggtagctgctgcctgctgaatcttcagcccgtgctcgtcggtaccagtggagaatcgcgtggcggccgtgctgggacctcggaggcgacggtggcggcatagggcgtccgccagtagtgccgagtacaggtgcccgatgtgcggcgccgcgttcacgtagaaaatgggtgtagtgaagtaggcgcgcacatcacaagcatcatcgccggcactgagggagcccgaactgtagtagcgtgggccgaagtcctccaggagagacagcctactagcccccgtgcgtcctagcaggcggaggacggacgttcgcagcatggtgcagaccggccgcaagcggaggaggcggcgttctgacagcacgtgtgagaggcgcatgcgcagccgggtcgcgccgcagcttccggccggaaagccaatgaaacgcggccccgagcgccggccctcaccgccctccccgcccggccccgccccgcccgcgcctgcgccgtccgcacgccgaaagccgcggcgccagaggccgccaatggacggcggcttgccagaaaaacagctcagagttgccgggtttaggagaggctatgaaagaagacgaacctctttgccttcgtataacatactgtgtttcctgctttggattgtaattttatatttatgaatctgtttccccctctaggctgagctgcttgtaggcaagagttttatattcagccgtttgtctaaaccccgtccgtggctggcatactgcaagacagagtattgctctgcacatgccctgtcgatatctaaaatgtcacctaaattttatctcagagcctaaatcaatctgtaagggagggagagagaaaaaagatgaaaaatcattacctacagcattttgagagaaggataagaactgagaatggaagagaagtctttaaacagtttttgttgaatcaacaaaagtagatttgtgatctgccaagttcttgccaaagtttattgagatccaggaaagtagagtgcaatatgctgtcactgtgcatataaagaataattttcaaatttatttctcaaaaagttaatttttttaatggtcttgaagttcttttaaaatagtgtttctcaagtttgcttttagtaatggaaccttagaattttttttaggggaggaaacctcaggagcccagaattgaattaatgttaatccctagttcataacacactctcatctttgatcttttttttttaatttaatttaagtagcatatacatttaataataaaatggagcagctatgaacctacaacccaatctaagaactacaagtggtttcagagtgtggtccccagagcagcagaactggcagcacctggaacttcgttcgatatgtatattcttaggccccatcccccacatactgaaccagaaaactctgagggtagggcccagtaatttagattttaaggtgattctgatgcacattaaagtttgagaaacactgaactagaaaattaccagtgatttagatctgtgtgctccttttcttctcgtactgtcctccctgaggtagtcattgtcctgaattttgttcttgcacatttgtgtgatcacatacaaagtatgtctaagtaacattgtttaattttgcttgcatttaaatattctaaaaaggatataatactacatgtagtcttcaacttgcctttttattcaacattttgttgctatattaatccatgttgttgcatgtaactgcattcatatgttcttaatacatgttgcatgtaattcattcattttgactgctgtataataacctttgactgaacacatatggtaacttggatctgatttctctagtgatatgatgaaaggtggaccaatcgaattctgtataagagatataaaaaataactttggatactcagttgatgtgctcttatttaatccagcagtttaagaatgacctacaaccatctggtcttcaacaaagttgataaaaacaagcaatgggcaaaagactccctattcaataaatggtgcttggataactagctagccatatacagatgaaacaggacccccttcctataccatatacaaaactcaactcaaaatggattaaagacttaaatgtaaaacctaaaactaaaaaccttagaaggtaacctgggaaataccattctggacataggacctgacaaagatttcatcatgaggatgccaaaagcaattgcaacaaaaacaaaaattgacaaatgggacctaattaaagagtttccgcaccacaaaataaactatcaacagagtaagcagacaatctacagaatgggagaaaatattttcaaactatgaatccaagaaaggtctaatatccagaatctataaggaattttaaaaatcaataagcaaaaaacctcattaaaaaggcaaaggac

SEQ ID NO: 3315 - DNA, 4001 bp, Homo sapiens
tttaaaaaacatgcttaatacatcttaattcattgtgtttgcactttcctcctaaaattcaaagtttgcattataaatctaatcaccagaaaggtgaactgttagtcctatatcctttaaagaacagaatttgccctatatcatattcacttccacaactgtaccaaacccctctgcacctgggagtctggtagaactgaggccacaggtaggccagtttccctaatcttaaggaacaccaattataatgagcaacaagataattcgattaaacaattaaatgaaaagcattttctgactaaaatggcaattatctgattttgctgttaggagttgcgcaggaaacaaaagctcaacagtgtagaagatgctcaaacgtattccgaatccatgtctccctgctttgtcatctattgttaggagggagaacaaatatctccctaattcaagttcgtttttctgaattttctataaccgcctaaaacagaatccaaacataatgtggaagccagactgcaggctctgaacttcggtctactactaactggtgtaacagctaaccttcagcactcatcaagatcctgggtttgtcctctcataccactaagttacttgtgggatttcatcatgggcacagtaaactgaccagaccctaaagccaccagatagataactactgcggtcatcctaagggcagaaacagccaaaagagccaaataatcatctttactagccgatatgctcaggctgagattttcagttcctggaaatatagctttactcctccttcacgtgccaattgatccccataatggcggttgagcggacaaagcctcaagtaaaaccctgcaccgaagactttaaatgcgaacccaaagcaatggcagctcctaattcatgcttcccatccttttcacaaggggtccaaataaggactgccttcttggacatgagctatatttagtcagaggccgtcaccttggaggcaaggccatatccgccgaagggcatgtgcgtattctccagtgtgtagtcaagacctaaccactgaggcagtggagccagacgacgtcccaaggcataggccccccacccctcaaactgagggccaggacagccggggaggctcacggctccccctcgcccagataccacatgcggcaaacacgtggtcgccgctgcaatgcggggcgcgcgctcccgagggccggacgcgagcacgcggggcgggtcgcccactccaggtttgtcagacggcagggccgggaggggttaacagtgccctcccttcccggccagaactcactagcgaccacagcccccgcccttcacgttttctggaaccttccgcatgcctaggcgcgcgaccgaatgaaaagggaggggggaagggaagggtggagaggggagggggaagaggagcggcggccacgcgccaggccctggcggcgccacgaggaaagcgcgcggtcgccgctcttccatcacccggcggacgaggacgacccgcgcgggccccaccaccggccggccgcagccagccggaccttggcgctgccttctgccccgccccacgcttcgcttcaggccgtcccctcacctgggtggccttccccgaccgactctgaggtgaaaaggaatgtgccctcctcgatgaacgcctcgtggaagccgttgagctgtccgttcatgttggtgtcggtgtgcggaagtggccttacgaaggagcagcggcgaggcggcagcggctgcgaaatgcgcaagctgcggacagcgttctactcgtagcaggcgggcggcgcggagcgaacgaagcagcgggcggtgcggcccggtatttatagagcagcgcccgcgcgcgcccggctcgggccccgcccctcggcgccgcgcgccaatgcaccacttgcgcgggggtcgggggaggaagggcagctcgccccgcggagtccgggctgaaccacactgcgcggccgcgggaggtgccgtggcaatccggccctccagagaccgttcagctatcttgagccgctagagctaggagaaaaatgcagacgcgaggagacgtgggggattgctcttccttgtttgatgtgggagaaaaagcgactggggcttgctggacccgctcccctgtgcggtgacatggcacctcccttccgaccgttggccgggatagctttcccggaggtcgcgtcccccagcggaggcggcgggaatcgcggaggttttgtgctgcggctggggtctttctggccgtcccgcctctagatgccgggtggcagggagccggtggcggtcggccatgtgaaggtggccatcttggccggccagcgagggctcctcacggccttccttcggcgtccctgcccggctcgttgccggccccgggatatctgaggggcgcaggcccaccttctagtcgtttcctggtgaatggctctgctgaagatggccggaaagcagattaatgaaggtgctgccatcgatttaaacaatcgccctcctgcccgctcccctgcgctaaagtttctgagggatcctcacccttcgtggttcgtggacttaaaagtggaggcagcgctccagcctttccctccagagagaaaggaggccgctcccaagtccgtccttgccccgtggccttcctgttcctttgaagggggggggaatcgatgtttcaatcctctgttcaggagaatatggaacgaacatttcttttttggtgggtgggggctattcgttcccttgaatgtgcttaagcagatctcttgacggcgtggaatgggctgtttcatgaagctttcactttaaaatgtccacctgcgtttgtcccagttttgcccaataaaggaattacagggaaaaagagcgaaacaaaacttgagccagcaaggagtatggagtcccgtttggagggagcccgccttgggggcgggggtctctgcagcctgttctggggctgggcctcggtgcaggtctggtcgggctggtggcctggtggccctgagcggagcgcgtgacaagaacgccgggtttaatgaggttctcagggaacggcctgctcctagcatgggatgtactttacgctggggaggtgaaggagacccctagtaacagtctccagctgcctactgctggcggcagtagaacaaggtgcattcccaagaacaatcctctccgtcggtgcaggaggaaaggtgggatttgctaaaggctcagtgggaaacaaaggaagcacttgggctgtgctgggggcatccacaaagaagataaagggctcctccccagactcagtgaccacatccacggtcgctcaaagcaggcagcaagaaaaggttcgaccacaaaagagacaataggtgatgatatttttattcgttgctttttacttttcaagctaacccttcatgggaaagtaactgtataagactattaaatttttttgttattttttaaaggagaatgccaatttattaacttacaatgtgtaataaaattgtcaactggaacaaaatgcgtgtgtaggctggtcagtgcattatctcccagcagaaaaatctatatgggaagccagaatataactagaaggttattttattagggagtcagaacaaggagcgtaaagtcaatgattggctcattaaatcctgatacccctgtgctaccaactccacagtggggctaggcctgccaaggagatgagatttagctgtacatagttgcttacctacttctctcacttgtgaatagtgtgtaggtgtaatacagtaagagtaggggtttggagtcacgacctctctatgcatcagtatcctcgttctgtaaaattggaatattaatagtacatcataggattgtttcaaggattcaaatagtgcaagtagagtctttagcacagtatctagtacataatttgttttaatgtaagctgtaaaaaaattaactatatttgctgtgaattacttttcagtggctttcaattgctgtcgggatacgga

SEQ ID NO: 3316 - DNA, 4001 bp, Homo sapiens
gagcctcccaaaaggaacacagccctgccgacaccttcatcttagcccagtgagaccagggtcagacttctgacccacagaactctcaggtaataaatgtgtgttgtcttaaggcactaaattcacagtaatttgttacagtggccatagaaaactaatacctgaggcttgaccatggtggcagaaaattctgtgaacatctggttccttcctgactggtactccgcatcaatcattagttgtttttgaatctcactcccatttactaaatagcagcaatttgattcccaagaacaaagaaagaatctgaatctcctaaaatgttcccatactcataataccactgagtccttacagtcctgctagaaataaaaatccatagcgaagcttagcaatttctggttgctaaaaggagataatttggaacagggtggaatctcgcatttattaatgggttatcattcatgatcaggttcggactctaggtaatgaaagaccagtaaagcttagggggacatggccacctggtgctgaatctctccttcctcttccagtcccatcccagagggaggcaggtcaggactagagtaagattaacttccagaagaaaggctttccctcaattcccggcctggagcaaccagccaccagctgaatctagccctgtggaccccggtacctcctgccttagcagcaatgcttttgccatttcaaatctgccacttcaaatacggggactgagtatttgagtcaggaaagagtcccttgagctccttctcagcttatccagaaagatgcagaaggggatagacaattgaaatcagcctgaggcatgcagcgtggctggccaaatgagactgcatacccagaaatggcctggcacagactctttttagcaagactgaagctgcgctttttggaaatgaagatacaatcttatgtaaaccatattaagaggttggtaggctggggcagtggaaagagaccttgcttgggatttcggagccctgaattttattgtggcctctgatactgattcacagagtcccttcaacttgatatgcctcagtttcccttcatgtgctgtcaggggctgtgtcagacgacctgcccgcttcgctgcactatgagctttgctctgcttcaggaatcaattgctgaccaaaaagagaaatagaattgttcgccaaagacccagagtgtcttgatcctggggtatcctacggctcctcggatctcctcctggtctcacacccgcatcccttaccttccagtctgaggcagcctgaggactgtgggaggggaggaaagatcacgccctgatattggatggagatggagagattccaagagaactaacagcagagtctcaggaagggtttgctcactgaatggagaggtcaggactgggacggagcttagcagcagccgctgggcagcagcccctgcgctccccagctgccctgtgctcctggccgaatcacaggggagtgagagcttcaggagacccacatctctagcctggacacatgagtgatattgggcatctccctccccttctctggacctcagtttcccccacaggattcatccgggaggggcctctttcccccgcaccacggtcggcctgaggccgggatgaagcgcgcttggtggatgccctgggcttctcctcgttcgatgctcacgcgtccctcccgccgcccgcctgtacctgcaccgcgggcgcggccaggctcgctggtcccggaagcgggcgcgccgtcgggagccgcaggagaggggcggcgtccagggctgcccccgggacctcgggtctccagcctccggaagcccgggcgggccacggggtcgggggcggcggagggcagcagcagcagcggccagagcagcaggaggagtcccgggaggcggcgcgcgggggccgggcgcggcatggtgggctccgtgggcctggtggtgtccgtcgggggccaggagcccacgcgaggctcggatttaaaggtcccgcggcctcgggccccgccccgccccggggcctcgagcgccaggccggcccggcgaaccccgcccaaggccaacaaggagccttgtccgcgcattccagcggcagaaacggaatgtctgggcgaggcggccagcggcgcggtggtcacctcccgcccctgccctaagccccgagccggctgcaactgggtgggctcggctgctgtcgcaacctccgtcctcccagtaacaccggggcagggggggcagccatccgcggctgcagcctgcccggccctccactctccctcccaccccagcggggcctgcgccccaggtacgggatggggacccctgggctctgctttcccttctgccactggtttgcccgactggggctgaagatgaaaccctgctcctagctctacattcctttcctcagccaagtaacccaagttttgctgtgggctcttgtttaaaaaaaaaaaaagaaagaaaaggcctcacagattctaggggcatgaatagaaacgctttcatccgagcttcaaatatccacaaacatttgaacttatattaccgggaatagaaagtcaaacatacattccccagagagccccgttagctggaaggacagcctgtaccaacacaggcttcaaaggctctcccgaggccccatttcctctccggaagagttagcatggtacagggctggaggctgccaggggacccccatggaactcactgtctgtgagaaggagatttgcataaatgtggtgtctgtctacgggaatgtggtggatttaggaaagagatactgactgcctgcggagaccaggaagacttctaaaaccaggtgacatttgagctgcgtcttaaaacaatgggcgcgagttccaacagagcctatctggtcgtcctatttcactattttccctctacaagtgatcctcctcacacgatcctaaacctcacttctcatatttgtaccccatgctggtagcagcattatacacaatagccaagaggcggaaacaacccaagtgtctctctttgtgtgaatggaaaagcaaaatgcagtatctacgtacaatggaatactgttcagccttaaaagggaggaaattttggcagatgctacaaaatggatgaaccttgagagtattatgttaagtgaaataagctagtcacaaaaagacaaatactgtatgattccatttacatggggaatctagagtagtcaaattcatagagacagaaagaatggtggttaacaggagctgaggggaagtggggatggggagttgtataatgtatcaatgacattgggcagtgatagtcacactgagggaaaaggtcactcaactcccactgagaactcaccaatttagaaggaccttagaagaaacgagaagtttgtaataatgggaagaggacactaagaagtttgaaagaaactatgccaagaagaggagggattgataaatacagtatttgcaagctctggtggacatttgtctttcgtcttgcttttagaatgatccccaaagcctttgaaccctacattagtcagggttcttgagagaaacaaaaccaataaattttatatacacatacatatagagagagggtggggggagtaattgagattatgagggattggttcatgcgattatgaaggctgagaagtcccacagtctgctgtctgcaagctgggggcccaggaaagccagtggtgtaatccagtccaagcctgaaggcccaagagcaggagagccaatgacataaggcccaatctgagtccagagacccaagaaccaggaatgctgatgtccaaggacaggagaagctggttggcccagctccagcagagaacacatttgccttccactgtctttttgctccattcaagccctcaacagattggatgatgcccactccactcacatagatgaaggtgatcttctttgctcagtctaccgattcaaatgctaatctcttccagaaacatcctc

SEQ ID NO: 3317 - DNA, 4001 bp, Homo sapiens
aagaaatgtatatatgaaacaaaataacactttccaatataagccctagtaaaaggcctacatcagaaacatactttctaacatttgtgaaataaaatacagcactgaattttaaagctatgcactaagaacacattatacaaaaatgaagtgatttttatcaatattgttattccataaacttaaatctggatttacctttcaatttatagctaactgaaattaatatactaactataagttcatgatttctttgactcatgaaaacatattttagaaatttgtgtacttttacatacagtgggcaatttggttcagaaccccaagagaaattgagatgaaaaactcatctcaatttacaacagtaaataaataattcagctaaaactgaaagtggtaccaatccagcaaactattgatggagaggtttggccttccatgcagccagaacaacataaagttttcaatggggattacttgttcagacaagttacaaagattacaaatatacccagattaattataaaatagctaatattctcatcatatggaaaataagtatcaggaacgtatgtgggaacagacaatagcagtggcatttaaactttaagcattttagagctttggactttatatactgatatatgaaacagacatttaaccaaaaaaaaagcaataatgcaagtcaaaacctaaccaaaggcctctaccaactaaaaatttgaaattttccatggaagtcagacaaaacgaaaaaatggaaaatgaaacccttaaagcaaaaaccaatcaagtcttccaacactgaagtcaatatccaaatctcatacaggaccaaaaaggggaaaacactcaggtctacaaatggataagcagttccaatacaatccagatcccgacattttcccactcagaaacaaatgcagtggagcttttcctggagaaaaagagctctccaatgaattttttttaagtgacatctagaaagtgtgcctctttctgtctctttccctggcgcctcattggaggaaggagggggttgtttttgtattctcccccactggagcaagacacaatcagatgttagatggaggagagaaaccacttttgacaacagcaaataaaaataaaagtgcccttcctcccctgacaggatgggcaccccacctcacacacccctccctactccaacccctccttcaccccccccagcaccaccccctcctcaccccggagctccactgcgtatgtggtttggtgctactgttgccccggagtgaaagtcagagccagaggaaggcaatgaagcccccacagacacacttacctttcctgccccccacttttgagtgccttccctggagctgtggaggatgacacaaagggtaataaagggggggagtggaggaggaggaggcgaaggaggaggaggagagctggggaagtggctgctcctgggtgtagtgagatgtctccagccagggccaagcagcagcagtagcagcagcagcagtagcagcagcagcagcaacagcagcagcagcagcaacagcagcagcaaagggtctgtgttgctaagaggcttttggtttctttctctcctcctctcacggccaaagaggaggagggtggagggagggaggcgagttggaggggtgagggggtaggagtcgtggatgggggttttcgaagaagaagaaactccttctcctctctcaggctcaatccccctctcagggctcagggctggagggtgggggaaggaactcagccgccttccccccacccccctgaattcaaggttgaagtggggtagaattagtgtcctgtccctttaaaaatagaaataaaaggtgccccccctctgccactgcctctctcttcatcatcagctgctgctgctgctggggtctctctgcttgggggggagggggggttcgggtagaagagacgggaggcactcactgcgcatgtccctctctgacgggtggctggttggttgaaggcaggaggagggggaggggaggaaatgagctattttcccagaaggcgtcgaggcgctagcgacccggaagacattgtagcgggaggtacaggagcgggggcggggaggaggaggaagtcgctacgcttttaacacccccagctccctcctccttcctaagggaaagtggaggaacggaagtgggcgtggacggagacgaaaggaggtcacgtgtttgggcgggagaggggcggggtgggagaggtagtgcgtgcgcggggcatgccgggagtggttgtgtacggtccgcagcggcaggtgaagtctagcagaggacgcggccaggcgattcggtgaagcgattcctgcaggcgttggttcccctctttgacctggtaaatgcaggcttttatgcgagaggtaatggtgggggtaaacttgctgcaaacgaaggccaggggcgtcggtggcgcaaggtgaatcgaaagtgggaggatggaaggctgtggagattgggaattgggaagggggcaggcttgtataggccgggaaggccaggaccaggcgagctccgtcttgtggccactcccgccccgtgagcttgccgaggaatccttgacaagtgcagggatcctgagtctacctctgcatcggggtagtaggtgaggagcgtgacggtccgagtgtaagagagaagggaactgtgaagcctcagcaattgaccctcatgactgcaggacggaggacttctatctagggacagagacaagtcctctgtatgcattttgaccagatgcatcacacgcgttgctcatattggatattgcgcccttcatgccttacctctcaaccctccctggtattctggagtggctttggggaaggagcaggcagggaagtcttgagtggagcttccctccatgtcttgcgttgttgctacaacacaaagcctttgctttttctcggagagggatgtgggattgtgtagtccttaatgttgagttctacgattgatgaaggagaagggacgtgatcaaagtttccccttatagtgtagatgagagttttaaaaggactgttttgtcaagtttctttggttactattcttagtttttgagcctttggtttcccaaatgccagctgtttttgctgaaaataatgaatttctatcataaaattagaattaactcaaaatatttaagaaaggatttataaatttacattagtaaagcttttatagtgaaacagtgctggttctttttcattgttttcatacaatcaatataaagcatcacagtctcaatatgttttgtaaagatattttgaaggaatatcatctttgtatgttttttaaaaaccaagaatctaaaattcttcgtatttattatgttggtacttaattctgttgggtgggttctttttgtttgttttttgttttgagacggagtctcgctctgtctcccagacgagtgcagtggcgcgatctcggctcactgcaacctctgtctcctgggttcaagcagttctcctgcctcaccctcccgagtagctgaaactacaggcatgtgccaccacgcctggctaatttttttgtgttttcagtagggacggggtttcaccatgttggtcaggctggtctcgatctcttgacctcaaatgatcctcccgcctcggcctcccaaagtgctgggattacaggcgtgagccaccgcgcccggccggtgtaggttctttaggtgtacactatcagttaaagttactaattttccacgttttgctttctgtaagtttgggcagtggaccccgtttatgcatcattgcttagcccttagtatcttctgtattgtgtacggtaatcatgtccgatggaatcaaaactagactcctgtgctttaaaattttctttgtagtgtaaccaattgtctgtctttatagtgtaaccaattgtctgccactttgtaatgaaaaaaaaaaataccagcaaggcagttaatgtgccttagctacaattttaaat

SEQ ID NO: 3318 - DNA, 4001 bp, Homo sapiens
ttaaaaagttataagcattatataaatgaataggtattattagcatagtcaagaaaatatttcagcatagcagggacgggtagggctatggcagacatggagcgggagggaaagaaagatgggggagagaaaaagggaacgtgaacatgtgcccatctctctgaaagaaatgtaaatatataaacctatctcccttgctcctcatcagcaaagaacttttcaacagacacccaccctgcatttgctgatatactggaagtagcctatttaaggcaggagtgtgatatgctaaaaggtcatacactgcacaccagtgtggaaatgtcagcaagaatcctccgcggggccgggaggatgaaaaaccctaaattctggtcaatttattaataaagagagaagaatattttcttcgaatacacgattaatttcactaccatactttattagcaagacacccattagaactcttgttcaagacaggtgggggataggtactttactattaaccagaagttatgaccgcgatgtggaatttcaacagaagccacaattgtttaacactccttcgacatacttaaggcgattttatttaaaacagtaaagcacaaagcagctagtatcctaatgtcaggtttccagcttgctgctatggaaagccgtctggacaagaaggaatcccgtattgaagtgaaatccctgaagactaaatgacagcagcaccttcaagttcaagacagtgaaccagtatcccgtgtgaagtccaaacacttccaggttaagtacacttgaaataactgtaagcaaaatttccaaagttaactacctttagcctggggctagagcaatcacctaactatacacccccgccccccagcccccgcctcattaacaacttccctaaatctcactgtcacaacaaaatacttccaaactttcttttctcagtaaaaatggcgctgcttttcccatcacaatgctgtttatttctcagtaatcgttaggccctttaaaccatcaaactcgattggcctcatttaaataccacccttccctagacactgtcaagagcttttctgagggctgggcaaggaggtaaagtggctgcatcaatctacaaggttgccactttgtcagcaagaatcctgggattaactccgacttttcttcataacctgtctgccttcccacaaactgttgcctctgtctctcttaagccacaatccaacgcaaactgtccccaaagtgcagtagcgcttaagcctctccgggcccctagcacccatcgacgccgtctctaaggcacccagcacacccagacccatgcatcagcctctccgggggtcgctcagaggcgcgcgcggggcaggcagcaccacgccaggctccccaaagcgcagccttccgcaccctttccacaacccggtccatgcgcaccgggggctgctccgggacccgaccaccggatccgagcgccgctgccgcgaagggcagggaccgcatgcacacccgcacgcccatacgaccaccctccccgggggctgtcgccggcaacaacgcccggcccacctcccgctcggcccggggatggcgggctgggggcgcacccaggagggagggggctctgggacaataaccggcttgttgccccctcccttccagggagcggcgggtaggggggcaccgggcgcccggccccagcccccaccctcctcccgggcccccggtcgggtggcaccgcggcggggaggggcggcgagggcgcgacgcccggcgccagggcgcctcggggtacctggtcgatgggcagctgcacggcgttgctgaggggctgcagcagggtggagcccgtggtgctggtggtggccatggccgggcctcggcgctccggccgcccgcgccgctcgcccgctcgcgctgtgccgggcgacgacgaggatggggatgcagcggcgcgcccgcccctgggccgcccgcggtcggagctctgcgcggggaaggccggggaggggccgggggcggtgcccggctcgcacctccccctccgccgccacctcctcccgcgcccgccgcccccgaccgccctgcacaggcgcggcccgtcctgccgtcgcccccgtcgtccccgccccggcgccccagccgcatcccccgcccccgacttccagcagcttccagcggccccctccccacctcgcgcgctctcgctccagacagctgcgcgacccaatcgcggcgcgacgccctgacgcccgcagccaatcagagagcgccggccgcgccacgcccctcccccgtgccgaggacccgggcgagggcgccgaggcgcggcccgggccgtcgccggagaacggctggccagcgtcgtggggcgcgctcctcgggtgagagcatggaagagcgtctttgcccctcactcctcggtttctcctccctggaatgtcgcggccccccacccctctctgggagagacggcagacaacaaaggggcccggggtggcggccggagggacgatgtgagggacgccgccgagccagcgccaggggaagttggggacgaaggtgggggctgggaggacgacaaaccaaaacagcgacctggctgagaagcccctttgtctgggagagtgccgggtgaaagcccaaagctgagagcagccccggggtctgacgctttcgtcaccctgcagccgcacccgggcctttgggtggtgagagctgggcctgggttcgacgcccgcgggcgcagggagaccggctcccctttgctgtgtgaaagtttagttctttgtagccagccgccctcgttgaaggccccaccttcttcctgagaaagtttctaagcatcccttcaccccttgagcgcaggcacccccagactgttgaagtccgccaggtttacataccctggcgggtcacgtgtatatataatccccccaacttcgtaaaagtaagccatttgagttcctttaaaatgcaaacgtcaacttctgttcagaagactttaaaagaggagaaatgccacagcagttatgaggacaaatcaagactcaaggatttggcagtttaactttggtagaaataactaatgtttactgagagtttaaccacagctttaatacttttggtatttaatcctcacaataaccgtgtgaaatagacacttttacacaccctccttcaaggaagttgagtcacagaagaggtaacttgcccaggggcacacagctggtaagtagattggaatccaagtaaatctacatttagagccgaccttatcactaggccttcatctctctcacacttaacacccattccagaaactcccgtcagctatcagttataccattgggttgatgactagcttagagtcttgaataagaaggcagcacagataaaaatacacctgccttagtaatcagtctgtgggcttacgtttgtctctctgaaaaggaggcagtggaactcatcagtgcaatcccgtcttgcctagaatcctttcactggtcgactcaatcctagtttggtggattctcagctgaaatggaatagaggataaaaggaagagtaaaaagaacaggaccttcattcccccaggggagtgttccagtgggatttgtaatcaattagagagctgcttattacagtatattaatccaaaaacccagacctattaatattatattagaaagaaaccatttttttttccttttcttcactttagaaaagtagaggaagcgcacaggtggctgagcatacaaactgaagaaaaaattgaaatgccattttaaaaacttgaaaggtgggtgttgggaacatattgcaacctaaagtaagcagcatggagatacaatctcagagctagaacaaataatgtctgcagaaaggagtttccttaagctaaatttttattttagtcagacatgacagaacataatctgtatttggggtaactacatgaaattatttaatatctagaatggttgagcgctgtggctcatgcc

SEQ ID NO: 3319 - DNA, 4001 bp, Homo sapiens
tttctgtgcttttgtttttcggcgaagttttatgttccttaaaagaggggccataacatagaattaccatgtaatccagcaattccacttatgagtatacacacccccaaagaagcgggaattcagaagtatttgtacacccacgttcatagctgtattacaatagccaaaaggtggggataacccaaatgtctatcaagagacgaatggataaacaaaatgtggtatacacacacaatggaatattattcagtcttaaaaagcaattttttttttttttctgagacggagtttcgctttggttgcccaggctggagtgcagtggcgcgatcttggctcacgccaacctccgcctcccgggttcaagcgattatcctgcctcagcctcccgagtacccgggataacaggcgtgtgctaccacgcccggctaatttttgtatttttagtagagacgggctcacgcctgtaatcccagcactttgggaagacgaggtgggcagatcacctgaggccaggagttccaaaccagcctggccaacatggtgaaatctcgtctccactaaaaatgcaaaaaattagccgggcgtggtgccgggtgcctgtaatcccagctactcgggaggctgaggcggaagaatggcttgaacctgggaggcagaggttgcagtgagctaacgccactgcactccagcctgggcgacagagtgagactctgtctcaaaaaaaaaaaaaaaggtaaattttactttatgtatattcaaccacacacacacacacacaagtggagacattaagcttcaagtatcttaataggacaaatcaaaggcaatctttggaatacactgtcttcatttttcctttatgccaagatgtgtatgtaagtacaaaacaaacatgcacctttatctgtattgagttcttgcagtatgtatatgacctgttggaagtcatactttttcccaaactgtcaatcattaaagtgtgcagttctaaaaatagacataaaaatgccttttcccaaatattcatttatttatagttttacgttcctatcttgtgtatcacctaagaggaaggtatgccttacggttaagaatgtgggctctggtgctagaaggatttatcacgaatgtcccggagtaactctggggcattaccacttggcaccttcttcctaatagggaatctcagattaagggaaatacttgccctctcataaaaggaggaagagaaaaaaaaaaaggataaaaagaggagaaagtgagtcagaaaacgtgacaattattacagttatttctgtcataactgattctatgtacatattttaaaaaaaatgaagggggagagaactcaagaaagtttccaaatccacatgcttttatctgtgtacgcgataaatatattagtgcacgtggaaaaaccactccttttgtattctttacaccactgacctttgagtgttcccaacagaaagctggtcacgcttggagttcggccgactagtagttgttgtttttacggaacgtgctctcctttctggtttctccccagtctctttattggtgcgcggtaaaataacttaccgatccgcttctatttacttctgtccctgccctgcctgacctgccgggcaagttccctcgactctcccgcccacatactggaaggtgcagagcccaaggcgcacagctctcggatggaaatgggactcatgcacaaggcaatccccgctactaagcggtggcgcttctggaaggcaccctctgcctaagtgacagcagctgctgtggaacgcgcccccgggggaggacattagatcaaggtgctttggccacgccgaggcctcctccgcccccgaccgccgttcccacgctccctgtcccatggcgaaggtcgccggtgcccggtattcacctacggcattcgcggctgcagccttcagcacccgcgccattttggaaagcaacccgccacgtcaagactagccacggaggttgagagacgcgcggcagagggcggggcgggaggcagagggggcggggacagaaaggtcaggggcgtggcgaaggtcgctgctttcctgctacaacgggcctactttagctaaaacagaaacgtaaggccaggacgggtcaccctttgtgggcccctgaaaaatacaaaacgaagtttggagagagttgaaaggcgtttgggctgaccatggagatttttgtttcccaccctcctgcgaaagcgctcgcgctgccattggctctggctgagggcgagtccggaacctgtgcgccgcggaactttcggctctgaaatccaagttgcgctgggcgcatctttgccgcgcggtttccgggcggctcccttcccttgcatgctgcattgtgtcgggagttgctgacagccatggcgccgcaggtctggcgtcgacggaccctggagcggtgtctgacggaagtcggcaaagccacgggtcggcccgagtgcttcctcacgtaagtgcgcagatcccgggctcggggtgcgaccggggtctcacgtggacgcgggttgcaggcctccggcaaattgtggagctgggggaaggtaaggggaaacgtaaaatcgcttttccccaaatttcagagtttatgctttcctaggctatcaaaattttaaaaactgttaaaatttgtatagatggatctctcagttgagtgttactgaaatcactctaacctcaattgttaacacctagaagcttcccttgggcttcttacgcccccatccctctacacacagactgttggtttctccttcctcctatgtgctctcaaagcacttagcgcttagcatactttattgaaagtacgaacttgtcacttgtctgtccaccccccatgactaagcttcttcagaaatagaacttccatgtctcttcccaacacaagcgttttatatgtattttgttgaagaatttaaaatgtgatctatgaaattattactcatttatgtttcaaaccccaacctttccctgagttcccagctcacagcaactacagactgagcttagtttgaattccgtagcacacaactgggatatccacactgtacaacttttaacgatttttaaaattttggtactgtcaagcatctcaaattcactgcgtccaaaatagagctgttgtgtctgtttaatagaattgttgtttctacccacctatactctgccatcccctgaagtccttttcccatgctacacctgtcaagcgcgtctgtgtgaagagaccactaaaacaggctttgtgtgagccacaaggctgtttattcacttgggtgcaagtgggctgagtccgaaaagagagtcaactaatggtgatggggaaggggttgctttataggagttgggtaggtaatggaaaattacagtaaaaggtggttatctattagcagaggaggacggggtcacaaggtacatggtggggagatcataagacttattgtccagaagaagaatgtcacaaggtcgattgatcagttaaggtagggcagggacaagtcacaatggaggaatgttgtaatgttgattaatcaattaaggcaggaactggctgttttatttcttttgtggtttttcggctgccccagacttcttggctcctgcaggccatctggacatatatgtgcaggtcacaggggttacaatggctgagcttcagctcagaggcctgacaccaccacccaagccttccctatctcagtaaatggcacttctgtcttttcaggtactcaaacataaaactaggctgctactttaatgtcttcatttttctctattctatatctaattctttagcaatcctgtcagttctacctccaaactatactcagcatattcactgctctaactccagtctaaatcaccattatcctttcgctggaatgctgcatcaaccttctaatcactgtactttcctcctcctccctcgtccctttctccttccttcgtgtaaatcatcatttcatc

SEQ ID NO: 3320 - DNA, 4001 bp, Homo sapiens
aacttccttccaggacaggttcaaatgtcacctcaggattcttccagccaagaccaattgctctctcatccgacctcagtctgtagcctctcacactcatttgacctgaacatacgatcacaggttgttctccttttccatttttctcttttcctccctctctgagagtcaggaccctctctcctctggctctcatttaccttactgatctctgctgagctgacctggctcatcgctgaatcagggaagtgagtcttggcacctaggtgtattgttccctatcccacagcggatctagcctaagctggaacttcctttggaggcttccagtggtttgacctggcccaaccctttcttcctggtgtgtcatcagtcctatcagcactaagtttggggccagccttcctgccagcagctagtagcagcttctccctcaaggggcccttggttaagaattcaaacccaaagcagccaaactcaccaacatccagacatcctgtacccacagccaatgccaaagaaaaactgaccagtactttgtcacttacccctgtcatggtcctggaatgaaggcaagaaaataaccaacttcctaagctaaagaaacctctacacggactgagggttgagaattggttctgaaaaagcaggcatttaatattaataacttgatctatttgttcatctagggagcccaaggagcacccatgctgcatttatacatttaatgaccgtactaacagcacaaggtactgaagatagtactatgacctcgacaaactcctctcacacagattacaacctggtagaaaagagagaccggcaggcagacacccatggggtaccacgaaatccccaactgacacctgaaataacacataaaggataagaaggattatttcaaccaaaggacagtgcctcagacatagcgaacatactgaaggaacatgtaagcccagaaggaacttgttctgatctaagaaccaaaaaagattcagtatggttgaagacacagtacagtcgagacaaatgaatctaaagttaaaggaagacaggtcatgaagggctttgcaagccccgttcaagagcttggaagagcaatgagaatccaccaaagggtgataagggaatggggggacgcttctggtcacatgatcagatttctgttttaagaccatggctgtagcctctctgtatagaacaaactacagaggatgaagaagagatgcagggatcatcaggaagacaccgaggtagtccagagaagaaaaggtggcctgaactaggtagggcagggggatgggactggagaatgaacgtatccaagacaactttgcaagggattcgatgtgggtgggtaaaggagtgaagcaagtgagaatgatgcccaattctggcttgggcacccgggtggatggccatgcccagagagggaatacaacaggagatcagcttcccccgccgggcccgacaggacctgtggtctccccgagagagggaacaaggagcagagggagagtaaggcttccggcccgctgcttttgggccgggccaggagcagtgtccacccgacacagctggtcccacaggccgatcctcgggcccctagggaccagggaagggggcggagatctgcccagtcggccccgtctggctccagagcccccggtggggcacaggcttccgccccgggagacaggccgtgctcctagccggttaagcgtcccgagacggcctgggggcccagcccgcgcccccagactactcctgcctctcatcttgagcccaagcctccagcccacaggagaggcgccgggatcccgcccgctgcggagagtgcgctagttcactcacccttacggtctccgaagcagacgcgaagccctccaacgtgagcctcaccagcccccgtccccaaaacgctcttcctcggcttcgccccgccccccccccccccccgacctgccctgcgcacgcgcgctccctgccgcccgcccattggcgccgccgggcccctcccgctggcggcggcgggctgtgaggacggctcgcgtgagtccacgtgtaatcggcccgggcccagcactggcgggactgacgcagttcttctacctgctttcccaagggcgacactcggctccactccagttgggccgctggacgccctaggggcccggcagttgctaggcaacgccggaagccctcaggaacgtagttccacgggcgacgtaggatggcggatccggatggggcggaccccaaagctggctcccaactccgctcaccccctcctatacagggctcttggttcaggtctcttggttcgtcctgctgcaagttgggaagaaagataataggaatgctaattccttcttgatgaaacgaccacaacacgctggagccggccttggaccctacgtttcaagattggcctgcttccagcgtctgccagctccactgcacaagctgcggcagccgctgtccccgttcgcttccacgggagtcccagcaagactatgcgacccagttcaaataccatcttccatgtaccgttcgtgaaatcagcagcttttgacattcaagagaggacagattacttaaaaacagactcatgaacaaatagggaaacgaatacatcatccctgtatcgaattcatccctgtataatcctgcccttacacctgtgctcctatacaagattaacattcagtaagtatccattgacctgatggataaatgagtgtaggacggtcgttttgtttttttgttttgttttgttttgttttgagacggagtctcgctctgtcccaggctggagtgcagtggtgggatctcggctcactgcaacctccgcctcccaggttcaagctcttctcctacctcagcctcccgagtagctgggattacaggcgcgtgccaccttgcccggctaatttttgtatttttagtagagacggggtttcaccgtgttggccaggctggtctctaactgctgacctcttgatcctcccgcctcagcctcccaaagtgctgggattacaggcgtgagccaccactcccggcaggacggtcgttttttttaaagcccttctcccatttctgtccataaaggtacataatcgtttttcaaatgagcctgggtccggacaggaaagacaaagaaagtggctaagtagttagatgccttgaaagttgcctaacgccactgccattgacggtctcattccttttcccaccttcatctgagattgaaatctgccaccccatcccagagaaaaatcccataatccctaatttttttttctttttttaaagaaaagagtctccatggtgcccagctcgtctcgaactcctgggttcaagcaatcctcccaccacctccgcctcccaaagtgctgggattacaggggtgagccaccgcgccgggacaaagaatccctaagttttgaggaaaccctattaattcaagacccattcttctttccttactctgaactttggattagtttgatctagttcctccttctaccctgcatctgccattcatccatctcttcatccattcatccacccctccctttgttcatttattcattcaataacatttcttgaatatcttctatgtactaggcgctctactaggagctactagagatacaaataagacaaatgaagtgtcaagaagctggtgtctggtagatggataaagtgtcctcattctagccagtgctttcatttttttcctatggatgttatcctgtgttatgtctctcttgaatctacagtcactccctctctaccagataattcccatcaacatataaacttgctgtattttctcccccaccataccactgaaactgcaatctccatgcaaatctagtggtctctttgatctcttgtttttattttacttgccctctcaacactgttttatcaaagccaaccactctcacttagaaacactttcttctcttgttttctgacaccacacactctgg

SEQ ID NO: 3321 - DNA, 4001 bp, Homo sapiens
ggaagtgagtcttggcacctaggtgtattgttccctatcccacagcggatctagcctaagctggaacttcctttggaggcttccagtggtttgacctggcccaaccctttcttcctggtgtgtcatcagtcctatcagcactaagtttggggccagccttcctgccagcagctagtagcagcttctccctcaaggggcccttggttaagaattcaaacccaaagcagccaaactcaccaacatccagacatcctgtacccacagccaatgccaaagaaaaactgaccagtactttgtcacttacccctgtcatggtcctggaatgaaggcaagaaaataaccaacttcctaagctaaagaaacctctacacggactgagggttgagaattggttctgaaaaagcaggcatttaatattaataacttgatctatttgttcatctagggagcccaaggagcacccatgctgcatttatacatttaatgaccgtactaacagcacaaggtactgaagatagtactatgacctcgacaaactcctctcacacagattacaacctggtagaaaagagagaccggcaggcagacacccatggggtaccacgaaatccccaactgacacctgaaataacacataaaggataagaaggattatttcaaccaaaggacagtgcctcagacatagcgaacatactgaaggaacatgtaagcccagaaggaacttgttctgatctaagaaccaaaaaagattcagtatggttgaagacacagtacagtcgagacaaatgaatctaaagttaaaggaagacaggtcatgaagggctttgcaagccccgttcaagagcttggaagagcaatgagaatccaccaaagggtgataagggaatggggggacgcttctggtcacatgatcagatttctgttttaagaccatggctgtagcctctctgtatagaacaaactacagaggatgaagaagagatgcagggatcatcaggaagacaccgaggtagtccagagaagaaaaggtggcctgaactaggtagggcagggggatgggactggagaatgaacgtatccaagacaactttgcaagggattcgatgtgggtgggtaaaggagtgaagcaagtgagaatgatgcccaattctggcttgggcacccgggtggatggccatgcccagagagggaatacaacaggagatcagcttcccccgccgggcccgacaggacctgtggtctccccgagagagggaacaaggagcagagggagagtaaggcttccggcccgctgcttttgggccgggccaggagcagtgtccacccgacacagctggtcccacaggccgatcctcgggcccctagggaccagggaagggggcggagatctgcccagtcggccccgtctggctccagagcccccggtggggcacaggcttccgccccgggagacaggccgtgctcctagccggttaagcgtcccgagacggcctgggggcccagcccgcgcccccagactactcctgcctctcatcttgagcccaagcctccagcccacaggagaggcgccgggatcccgcccgctgcggagagtgcgctagttcactcacccttacggtctccgaagcagacgcgaagccctccaacgtgagcctcaccagcccccgtccccaaaacgctcttcctcggcttcgccccgccccccccccccccccgacctgccctgcgcacgcgcgctccctgccgcccgcccattggcgccgccgggcccctcccgctggcggcggcgggctgtgaggacggctcgcgtgagtccacgtgtaatcggcccgggcccagcactggcgggactgacgcagttcttctacctgctttcccaagggcgacactcggctccactccagttgggccgctggacgccctaggggcccggcagttgctaggcaacgccggaagccctcaggaacgtagttccacgggcgacgtaggatggcggatccggatggggcggaccccaaagctggctcccaactccgctcaccccctcctatacagggctcttggttcaggtctcttggttcgtcctgctgcaagttgggaagaaagataataggaatgctaattccttcttgatgaaacgaccacaacacgctggagccggccttggaccctacgtttcaagattggcctgcttccagcgtctgccagctccactgcacaagctgcggcagccgctgtccccgttcgcttccacgggagtcccagcaagactatgcgacccagttcaaataccatcttccatgtaccgttcgtgaaatcagcagcttttgacattcaagagaggacagattacttaaaaacagactcatgaacaaatagggaaacgaatacatcatccctgtatcgaattcatccctgtataatcctgcccttacacctgtgctcctatacaagattaacattcagtaagtatccattgacctgatggataaatgagtgtaggacggtcgttttgtttttttgttttgttttgttttgttttgagacggagtctcgctctgtcccaggctggagtgcagtggtgggatctcggctcactgcaacctccgcctcccaggttcaagctcttctcctacctcagcctcccgagtagctgggattacaggcgcgtgccaccttgcccggctaatttttgtatttttagtagagacggggtttcaccgtgttggccaggctggtctctaactgctgacctcttgatcctcccgcctcagcctcccaaagtgctgggattacaggcgtgagccaccactcccggcaggacggtcgttttttttaaagcccttctcccatttctgtccataaaggtacataatcgtttttcaaatgagcctgggtccggacaggaaagacaaagaaagtggctaagtagttagatgccttgaaagttgcctaacgccactgccattgacggtctcattccttttcccaccttcatctgagattgaaatctgccaccccatcccagagaaaaatcccataatccctaatttttttttctttttttaaagaaaagagtctccatggtgcccagctcgtctcgaactcctgggttcaagcaatcctcccaccacctccgcctcccaaagtgctgggattacaggggtgagccaccgcgccgggacaaagaatccctaagttttgaggaaaccctattaattcaagacccattcttctttccttactctgaactttggattagtttgatctagttcctccttctaccctgcatctgccattcatccatctcttcatccattcatccacccctccctttgttcatttattcattcaataacatttcttgaatatcttctatgtactaggcgctctactaggagctactagagatacaaataagacaaatgaagtgtcaagaagctggtgtctggtagatggataaagtgtcctcattctagccagtgctttcatttttttcctatggatgttatcctgtgttatgtctctcttgaatctacagtcactccctctctaccagataattcccatcaacatataaacttgctgtattttctcccccaccataccactgaaactgcaatctccatgcaaatctagtggtctctttgatctcttgtttttattttacttgccctctcaacactgttttatcaaagccaaccactctcacttagaaacactttcttctcttgttttctgacaccacacactctgggtccttctgctacctcactcattatcctttcttgggcttcttaattggcttctcaatctataattatcaaagtgtccagggttctgttctgagtcaccttctctatccaccctccctatgtgagtttacctagtcctgtgctttagataccatttataaatagatgactccaaaatatgtctctctgacaatgacctctctgtgtaattcctggctcctgtaaataactgcctacttgatgtct

SEQ ID NO: 3322 - DNA, 4001 bp, Homo sapiens
agactgcttgactaaactgtctctaaattccaactgccagagcagcttcagcttcccttcatctacctcctggcctctgggggttcagaacagtccccaggtgctcagagcagcacccaccgttaggaaatcctgcccaccaaacaaggactggagctgcatttagaacccggagaggagggcctccacatgggagtcgggggtcagtgggaacaggaagactgtcttcaactaatcaccctgtgtggcttcatgtgaaaggccacacgggactatgcactaggagcctgggttctgcttgacataaaaaccttccctcggttacagttgtccaaaaacacttagggcagtggtgaagactccagagggaggacgtggagcaccttctaactcttaggagtctgctcaaaagtttgccctgaccctgctgtcttttgagtcttcagtctggaccatacaatgtgtcacttaaatgccggtggtttttggtttcgggtcttgctgtggcttctccagcactggtctgtgagctgcggcggcagcggggccgggcccctgtaagaggtctccccccaagggtggacctcggctgcccccgctaggccccgccccgtagtcctgtgaacttctgggcaccccacagccctgggctaaaccctgctaagcactccatagagctttgatcacagtcttagaccagcatgaagaaataaataaataccaaggtggtgaaacagcctaaagcctttaagaaatccagggcaacagagattccacagaggacaggtcaacgggttagggaagtcaagttggaaagaggaactccgctaaaataagaaaatacaaatgctcccagcagaggggcgtccagagagtcgcgggcctgggaacgggcctgggtcctcgcgagcatgcctggcccgcatcgcaacagggcggggcggacagcggcaggccagctcccgggaggctcgccgtcggggttggggcctgtcggccggcctctccccatttttgtgacgtgtcaggggcagcagcggtgacggggccaccacacaaagccaggtcgtcgggcagtggtctcccaggctaagagccccgatgggatggggagggggcgggaagcgaggcgcccccgggcgccggggctccgcgcgggattaaagtgagctccgactccgcggcgggggcggcggcggggggcgggtacccgggcggccgcgagcgcccttcgcgcgcctggctgctgtggccgcgctggcagccagcgagcccggctcgccgaggcctccccacgcccccgcgggggtggagccgcggccaggggcgggtccgcagctggcggcgccggggcccggggcggaggctgtggcagcagctgcagcggcggcggcggcggcagcgccaggagctgctacagcagaggcggaggttgctcctgtacgcgtacgggccgctcggccggagccgcagcccggaggcgccgggcggtgcgctgggagctgctggtgctgctgctgctgctgctgcccaccctccgccgcccgggcccccgctgccgcccgggccccggctgccgtctgcgcccccgtcgaccccgcccgcgagtgcgccccagccaggacgccgcccccggccgggtctccacttcttggccgcaccttccatgacagcgcccgcgagaagatggctgcgaagggcgcgcacggctcctacctgaaggtggagagcgagctggagcgctgccgcgccgagggccactgggaccgcatgccggagctggtccggcagctgcagacgctgagcatgcccggcggcggaggtaacaggcgaggcagcccgagcgcagcgttcacctttccggacaccggtgagtaagggaagaggctggctcgccggcagcgagcgcgcgaaacgcaccgcctcctccaggaagcgcgcccagacagtcctcggccgacagcgggcgcctgccagcccaccgtgctagtcttaagagcagccagggcagttaggaaggtccttctgccgcgagagaaaaatcacatgtggtttgggggcttggagggaagagaaacggcttttgctctgtgtcctttaggataatgtggctaactctgtctaccgtgaaatggtggtatctgcatatcatgagatcagtgcattggctggactctgccccccaccgcggtccgagggtggggtgtccctaaactccatcaggtgaagtgtgtctgtgtcgtctttgtccatagttctcgcaagtgacgttgaaaacggagctccgtccgaagcagacaggggcgagggtttgacgagctccagggtggggtggtggagaaatggggaagaggcttggccagcctcagtttcctcatctgtggcgatctcgggacacatccagctctagcagtcggtggctttagcagtagggctggtttggctgggccgggctcttgtgctggggcgggaaagcaccctgatgtggcagcggggaacaccccgccccagtctctaacctcaaatcctgttcctggggccttcagcttaccctccctgagtcctctctgtgggcacaatcacttaggaggctttgtggaaggaggcagggaataaatgaatacagatataaataatttttaaagactgctcagcctgttgaaggctctgagagggacagatcgtgatagtaatagtaatagtcaacgcttacttcgtgcttcctgtgtgccagacactgtcctgagcactttaatcaaccccgtgaagcaggtactcttgtttgtcccactttacagataaggaaactgaggcacagagcaactaaataacttgatcagctagccaataagttgtggaaccaggatttgtgcccaggtttctgagtacatcctttaaatcacttgcactattacctctcaaagatgtacagcacaaaatccttgcccttgaagagctcccacagtgaatggggaggcaagaaagtgatcggagggcaattgtttgtggggtttttttggttgtctttttgtttttgtttttgtttgtttgtttgtttgtttgtttttgagacagggtctctctctgttacccaggctggagtgtaatagtgcgatctcagctcactgcagcctcaacttcctgggctcaagcgatcattccacctcagcctcccaagtagctgggactacaggtgctggctaccatgcccggctaatttttgcagttttagtagagacggggtttcgccatgttgcccaggctgatctccaactaggctgaagcattccgcccacctgggcctcccaaagtgctgggattacaggcatgaaccactgtgtctggccgctttctctattttttaaattcttgtaaacaaccctattaggagggcaggagttattgtccccattttagacatagggacaccaaggcccagagaggtcatataatgtgtatgtggttaaagcctgtactcaagcctgagtctctgccaccaagtctcctagtgtcagagttggggacacggagcctgggctggcttcactgtgggaactggccagtataaggaaggagatggagggtcagcagggtctctcctgccagttttggggtctgtgaatgatttttctcccagttaaatccagatacactatcacaaagcatgcactcacactgggacacatagtcatacatgcatatgcacacacacaaacacgaggaacaaaaaaaaatgcctcccaaagcccatgcgtagagcattgtttggattgactgctgttttggtcctttctctacagggttccttgatcactcaagggattgagagcttgttcttttttggggtttgatgcagactcccctgcagccctgaagggagattcttaacatcccacctggcctgtttgactcttacaagtcagtgatctgaagcttccacagttacagaattgggagaggttctgagatggggttgaaacccattttactgaggccttgag

SEQ ID NO: 3323 - DNA, 4001 bp, Homo sapiens
gtataccaaaatttcctaagaaggcagcattattcacaatagccaaaaggtggaatgaacctcattattcacaatagacaaaaggtggaatgaacctgtgtccactgaatggataagcaaaatgcagtatatatacaggttgagcagccctcatctgaaaatttaaaatatgaaatggtccaaaatctgaaactttttgagtgctgacatgattttcactggagcatttcaaattagggatgcaattggttaagtataatgtaaacattccaaatctgaaaaaaaaatccaagatcccaaactcttctggtcccaagcgtttcagaaaagggatactcaatgtgtacagacaatgttatttagccttaaaaagtaaggaaattctgacacatgctacctcgcagaggaaccttgtagacattatgttacacaagccagacacaaaaggacaaatactacacgcttccacttatatgaggtacctagagtggtcaaactcataatgaaaggaagcagagtggtgggtgacggtggctgagggagagggtaacggaggagagttcgtgtttaatgggcacagaatgtcagtttggaagatgaaaagagtttggagccggacacggtggctcacgcctgtaatcactttgggaagcccaggcggggggatcacctgaggtcgggagttcaagaccagcctgaccaacatggagaaaccccatctctactaaaataccaaattagccgggcgtggtggcgcatgcctgtaattccagctagtagggaggctgaggcaggagaatagcttgaacccgggagacggaggttgcggtgagctgagatggtgacactgcactccggcctgggcaacaagggctaaattacgcctcaaaaaaaaaaaagtttggagatgggagagtggtgacggctgcacaacgaggtgaatgcacttagtgccactggactctacacttaaaaatggctaaaatggtcaactttgttatgtatattttactaaaaaagaacttcaaaagccattccaaactgctgacccttcatcctggaggccgtggtgtatctgctccaggaaaaataaccggtgggtgaggcaagccagggaggaggttggggttatgaagctaggagcccagaggcacagaaaaaaagaagagtagagaaaggaaaggaaggccagagggaaaggggagcaagggacccagaagaagggatatggtgagctactctctgcagggcagggctccgccccccagcagctttcaaaccacagttgacgcagaaactttcatcagcacaagaggcgagggtggcccgtgccctgcgaacccccagcaccatgctcccggctgcgtggcccagcagggcaccgacgagattcaatggcacttcggcctcccactcgacctggccgcacccagcggcccagttactatactcagcgagcccaggtttccgcgccggtcaccgagggctgtgcaaataccaggctcgcggggtggtgagcatcaagtgacagaagcaaagcgctgagcactgggcacgagcgtcttagggctcgagatgggttttactccagaaaaacccagcctgtcccaggctcctcgcggccgccgggctcggagcctaaagttggggggcgggcggggaggcgcttcccggacgcgcgacccccaggttccggaacacccgccgcccacacggcaccgcctggcccagacgccgcaggctccggaggcgggcgaggcccggggcgctcgccgacttactcctccaagaagtccaggaacagtttctggcacttctcggccacctcgtcgcggacctccaggtgctggctgccggcgcccggctccgctgccgccgcgaggtccatatttgcttagtgccgaggattcgcctgcgccacgctcgaccgccacaagtcgcttttttccagacgctgcagctttgcgcgcgccgccgccgcttccgccccgccccctcttccgacctgcacggccggaaccaatcgtgacacaggagctggagatttcgcgccaaacctgaccaatgaacggcgcctctccaagagccccagcccacggaaagggatttcgcgccaaatgcaaagcccttctggagaaagcccatctgcctttgcgcctgcgcagtgtagccgtggcccgcgggtatttttggctgctggaacaagttcgaatctgagggttttgtccgagtggtttttcaaatgttctttaaatcattccactgatattaattgaacgatcggagtaagactctatggaagagaaaaatgagtaagccgcttctgctgtctagttagaggaaataatggaaaccacagtataaaaccctgtaaaagagtcaaagagatgtctaaaccttgcatgggtaaggtggcacaattattgtggtggtgctgaccgaggaaaatcagcgaaatatttgacattggccgggcgcggtggctcacaacctgtaatcctagcactttgggaggccgaggcgtgtggatcacctgaggtcaggagttcgagaccaccctggccaacatgcagaaaccccatctcccctaaaaatacaaaaattagtcgggcgtggtggtgcacgcctgtaatcccagctactcgggtggccgaggcaggagaatcgcttgaacctgggaggaggaggttgcagtgggccgagatcgtgtcactgcactccagcctgggcaacacagtgtgactccgtctcaaaaaaaaaaaaaaaaaaaagaaagaaaaagaaaaagaaagaaatatttgacactttgattaatctttttttctttttcttttcttttttttttcagatgaagtctcacccagtcgctcaggctcgagagcagtggcgcgatctcgggtcactgcaacctccagctcccgggtccaggggattctcctgcctcagcctcctgaatagctgggattgtaggcgcccgctaccatgcccagccaatttttgtatttttagtagagacagggttttcgccatgttggccaggctgctctcaaactcctgacctcaggtgatccgtctgcctcgacctcccaaagcgctgggattacggccgtgagccacagcgcccggccttaatacccttcttaaaatgcactattggcttgagttatccttatgtttttttcccccatctttccctaaccatttcacttggtttttctgccatctctttggccattcctgattagcatcctttgtaggcgcctctccttcagtgagtcttttaaatgttctggttccagagccttcttttcccgtaaagtcgctctcttgggcgaccctttacactcccttggcgttaattaacatctgggtactgatgatatctatatgtgtatttcaccaaccagtacctttttttggcctccaagacattaagagaaacggggaccacttccattttttgaggcttgttgcatattaaaaatattttttctttcttttctttttttgagacgaggtcttactatgttgtgcaggctgaccttgaacacctggtctccagcaatctgcctgcatccgcctcccgagtagctgggatttcctgccaccaccaaatccaacttattgaaaaattttttctttttcttttttttctttcttttctttctttctttctttcttttttttttggagacagagtctcgctctgtcattaggctggagtgcagtggcaggatctcggatcactgcagcctctgcctcccaggttcaagcaattcttctgcctcagcctcctgagtagctgggactacaggcgcacaccgccacgcccggctgattttttttgtttttgtttttttgtttttgtatgttagtatagacggggtttcaccatgttgcccaggctggtctcaaactcctgagctcaggcaattcgcccacctcggcctcccaaagtgctaggattacaggcgtgagctaccgcgcccggcctgaaaaga

SEQ ID NO: 3324 - DNA, 4001 bp, Homo sapiens
gctcttagcagggcaccaatgactttcctgcagatgcaggctctgtgctaacttctcagctataaagattgaatttaagtgtctgttattccacagacagagccacatatttctttttcactttcaaatttatatatatttctaaattacatgtatttctataacacaaaaaactaagcagtaccatttagattccttcatacagtttattttgctgtcactccctacagacaacaagcaaagaatcctccgctttgaatgagcttacagaagaaggctcttttctaactctgtccattcacacaccctcctgagggggcagggaaattgagtcatgtgtgagtttgctgtcagttccagcaaactgccagacaaattcttcctcatgttctgtctctgtgttatctggcaccccagtgaccttccaacggtggggccttgctagggaaactagctaagaatctggggcccaaaatctctgtgaccttgggaaaattatctgacctcaccagactacattataagagtagataatataatctccaaattcccttttaattctacaattccagtattttgaatggcaaggaataaagctatcaagtaatctacatgctgataacatatttgagtttgtatatgcagtatgaactggtaacttcatccggaatctcagctagtaaaaataagttttcagggagttgagtacactgtctctcccccgctgcgagacctcactgcggtggtccctataaaaataaaaattcagaaagacttggtaagtgtaagacacaatatagaaaaatggcaagagtgtgagactcttggagcaaatcacattctctttgggtctcgataaactccattttaagatctgaagtggggagattcgtcaagatgacctttaaaagatcccattcagttctaaaagcaaaaagtccaaggttatcagataataagtacctctgctttctagctaaggttattaggacagaaactaccgaaaccataatttaaatgactaattatgtgacaaaacatttaggaaacctaggtttaacacctactggaaattagtagctgtctccactggccccgttagacaggcagagagagtaatgcccttgccttgaaaacgtgtcttttcaggttctgggaaatttccaattcattcaaacatttctccacattctccagccgttttagtattttgcagataaagtaggaaaaacagtcgcaactataaatacaagccattgtattgatagtatgaagcgatttctctgagtttgatgacaaatgtcaccttcaagcagtacgcagattattcctacgccagagttccttcaccaactctccccctccccctctctttcagcagagacaagcgatggagatgcaggttacccaggtcttccatgacaaaatggttactctgttacatttaagagaggtgcttctggaattcacaatatacagttcaataaagaatatttgcagtagttatttagttagtgatgctgtcacttcaatatatcctggcattacaaaaaaggtcaatgaacgggttccaaataacattttgagaaattagatatggcggaaacacgtctgctgcaaacgcagatcgtaatctggagcacctggtaaatactacctttccagctttttgctttcaaggtccctgtgacaaaagccgttataaacactgtgggcaaatgaggagaaaaaggggttaggacccaacctttccctcccatcgcaaaccttatcgtccttatcaaacaccgtaacgtcctttggaaaatagctgcagcgtcgcattttgtcctcccgtcatgcagcaggattaagatcgctcctctcccaggacaactacttctccagagtcctcctaagagcgccccataccccgcaaggtggaaatcaatcccttcccattactgggtcactgcggcaatccccagaagatgagtccgagcttgccaaagggcgcgaaggacagtgccttgcacagctgcctcccaaaagtccctaaagtgcaagaaaccccactcaagggcgcgagggccagaggtgggcaggaacccggggcccacactcaccatgattgaaaactgcggggacaatttcaacaactgcaaaatgagcctcagagagtcaggtcacctctaccgcggaactgactcggagagggcgagcggtgttagcgagaaaaggctccgctcccgacgcggcgctctctgggaactgtagtttacgctgccctggttgtggcgcaatctccaaagcatttccttcaagtgttgaactacacttcccgataccagaggtttttttcaagctcttctcactgcgctctgcgccgattgcaaagtagtccctgaggatgagcccctgtgattggaggacgacaacaaacggatggtttgggctcaggaggaaaggacctgcctgatggagcccggcaattggcgggagagatagcgtgtgtaactctagggaggggagaatcaccccttagcgacatcacccccacgcgcgtgactgagactgcatcctcccatgagggtaaacgtgggaggtaaagagaccttccgctgcgtaaagctggatcgacccggaaacaaaatcttttaaaaaacgattgacactctggaggggcgggggaattgataagttgggacgaccggacagcttctcaggttgctaagcgacgaggcgggagcgcacgcacaccctggctgctttgtagcacctgaggaaactgtggcggcggcggcggcgtcctggagacccaagagaccaagcgagcgtgtcgctccctctcgggtccgaggacctagcctaggaaccttctgcccggggtagtgtctggtgatgaggcgagagttttgctgggacgcctactccaaagcggccgggagtcgcgcttcttccccactcccgagacaggtgagccctggcccgagggcaaggggttttcttttaaccttaggatccggaatgcggttggtgcgccgtcccgctttgcttttatccgctgtgcggatgcctgcaagctcgccggtcccttttctgagcggagtatgagggctgtgggaatgcagctattttggagggggtggtgccctggagtaggtgcacccccgaccccaaatggagctcttccagagttatatcaaaaatatttattgagcatttactttgtaggaggtgagcctctcccttccaggaggtcacagtatacggttctaatttgctctaagccctccgtgaatgttgagttttgtccattcccttttggaagaaacaggatgcgccttaaaccatcttgagtcttaaagttatgccaaacaggcatttctaaggaaagactggcgactgaaggggagacactggttgtttagtcagtcagtctcagctggtaaaacaacttaagaggttctctttaaaattaatgctgccaagagaattgctgtgctttttgaaagcttgtttcttgtggatgttaaaaggaagatatgatgctcgggagtagcatacacagcatatacgtaatgaaaatgaataaaacatctctattagataacattgttagaacttccgttttttctctgtcactgataaatgaatgccaagtaatatctttcaatttttctctatttcagtttggaggatttgctatttttggaaagaaatgtaatgctttacttttagcatttattaatatcatacctgaatgactctccttgtatctctttattcatttggctctcagacaacatactttcctggttttcctcttttgttactggttctcagttctgcggagtttctaaattttttttagttgtgatctcttaacattggggtgcctgtattctctgtctatactaaatccctcagtgagctaattcataagttgcatcacttcaaatgctacttttaatgtcaaaaactctcaaatttatgtgtctagtcctgaattagtaggtgtg

SEQ ID NO: 3325 - DNA, 4001 bp, Homo sapiens
ccaaattcccttttaattctacaattccagtattttgaatggcaaggaataaagctatcaagtaatctacatgctgataacatatttgagtttgtatatgcagtatgaactggtaacttcatccggaatctcagctagtaaaaataagttttcagggagttgagtacactgtctctcccccgctgcgagacctcactgcggtggtccctataaaaataaaaattcagaaagacttggtaagtgtaagacacaatatagaaaaatggcaagagtgtgagactcttggagcaaatcacattctctttgggtctcgataaactccattttaagatctgaagtggggagattcgtcaagatgacctttaaaagatcccattcagttctaaaagcaaaaagtccaaggttatcagataataagtacctctgctttctagctaaggttattaggacagaaactaccgaaaccataatttaaatgactaattatgtgacaaaacatttaggaaacctaggtttaacacctactggaaattagtagctgtctccactggccccgttagacaggcagagagagtaatgcccttgccttgaaaacgtgtcttttcaggttctgggaaatttccaattcattcaaacatttctccacattctccagccgttttagtattttgcagataaagtaggaaaaacagtcgcaactataaatacaagccattgtattgatagtatgaagcgatttctctgagtttgatgacaaatgtcaccttcaagcagtacgcagattattcctacgccagagttccttcaccaactctccccctccccctctctttcagcagagacaagcgatggagatgcaggttacccaggtcttccatgacaaaatggttactctgttacatttaagagaggtgcttctggaattcacaatatacagttcaataaagaatatttgcagtagttatttagttagtgatgctgtcacttcaatatatcctggcattacaaaaaaggtcaatgaacgggttccaaataacattttgagaaattagatatggcggaaacacgtctgctgcaaacgcagatcgtaatctggagcacctggtaaatactacctttccagctttttgctttcaaggtccctgtgacaaaagccgttataaacactgtgggcaaatgaggagaaaaaggggttaggacccaacctttccctcccatcgcaaaccttatcgtccttatcaaacaccgtaacgtcctttggaaaatagctgcagcgtcgcattttgtcctcccgtcatgcagcaggattaagatcgctcctctcccaggacaactacttctccagagtcctcctaagagcgccccataccccgcaaggtggaaatcaatcccttcccattactgggtcactgcggcaatccccagaagatgagtccgagcttgccaaagggcgcgaaggacagtgccttgcacagctgcctcccaaaagtccctaaagtgcaagaaaccccactcaagggcgcgagggccagaggtgggcaggaacccggggcccacactcaccatgattgaaaactgcggggacaatttcaacaactgcaaaatgagcctcagagagtcaggtcacctctaccgcggaactgactcggagagggcgagcggtgttagcgagaaaaggctccgctcccgacgcggcgctctctgggaactgtagtttacgctgccctggttgtggcgcaatctccaaagcatttccttcaagtgttgaactacacttcccgataccagaggtttttttcaagctcttctcactgcgctctgcgccgattgcaaagtagtccctgaggatgagcccctgtgattggaggacgacaacaaacggatggtttgggctcaggaggaaaggacctgcctgatggagcccggcaattggcgggagagatagcgtgtgtaactctagggaggggagaatcaccccttagcgacatcacccccacgcgcgtgactgagactgcatcctcccatgagggtaaacgtgggaggtaaagagaccttccgctgcgtaaagctggatcgacccggaaacaaaatcttttaaaaaacgattgacactctggaggggcgggggaattgataagttgggacgaccggacagcttctcaggttgctaagcgacgaggcgggagcgcacgcacaccctggctgctttgtagcacctgaggaaactgtggcggcggcggcggcgtcctggagacccaagagaccaagcgagcgtgtcgctccctctcgggtccgaggacctagcctaggaaccttctgcccggggtagtgtctggtgatgaggcgagagttttgctgggacgcctactccaaagcggccgggagtcgcgcttcttccccactcccgagacaggtgagccctggcccgagggcaaggggttttcttttaaccttaggatccggaatgcggttggtgcgccgtcccgctttgcttttatccgctgtgcggatgcctgcaagctcgccggtcccttttctgagcggagtatgagggctgtgggaatgcagctattttggagggggtggtgccctggagtaggtgcacccccgaccccaaatggagctcttccagagttatatcaaaaatatttattgagcatttactttgtaggaggtgagcctctcccttccaggaggtcacagtatacggttctaatttgctctaagccctccgtgaatgttgagttttgtccattcccttttggaagaaacaggatgcgccttaaaccatcttgagtcttaaagttatgccaaacaggcatttctaaggaaagactggcgactgaaggggagacactggttgtttagtcagtcagtctcagctggtaaaacaacttaagaggttctctttaaaattaatgctgccaagagaattgctgtgctttttgaaagcttgtttcttgtggatgttaaaaggaagatatgatgctcgggagtagcatacacagcatatacgtaatgaaaatgaataaaacatctctattagataacattgttagaacttccgttttttctctgtcactgataaatgaatgccaagtaatatctttcaatttttctctatttcagtttggaggatttgctatttttggaaagaaatgtaatgctttacttttagcatttattaatatcatacctgaatgactctccttgtatctctttattcatttggctctcagacaacatactttcctggttttcctcttttgttactggttctcagttctgcggagtttctaaattttttttagttgtgatctcttaacattggggtgcctgtattctctgtctatactaaatccctcagtgagctaattcataagttgcatcacttcaaatgctacttttaatgtcaaaaactctcaaatttatgtgtctagtcctgaattagtaggtgtgcattattctcaaacctaggttctctgagttttactttttactctgagcagttacgaaaaatttcttccattatcctcctaaatgaattcttctactagctgctaacagaaagatttttccatgttgttgtccttaaaaatatcatgattttacctaatgtaaatgacgagttaatgggtgcagtacaccaacatggcatgtatacgtacatatgtaacaaacttgcacgttgtgcacatgtaccctagaacttaaagtataacaaaacaatctcatgatttttgtcctcgatttacagtgaattttacaagggagactttttataaccagaattctcactgcagtcctatagcaggacaggacattcccatactccaagaaggccacaaacatgtaagcccccgtattcccatccagtccagatatacagaattgaagtcacctgtgtggtagttcacgggccttgttctgtttattgctagttgcccttgtaaatcaggttaaggagcatattagcactgattgtaagttacttttctcag

SEQ ID NO: 3326 - DNA, 4001 bp, Homo sapiens
attaggccctcctccccttctaaaaacctttcatgtactctggataaagtctaaactactgaatgtggctcaaaagaatctacattatctaactctagcctcaccttatgaaattctcttccttgtactatttgcttcagtcctaataaacttatttcaattttatacttattttatattctcaattgtcaccaaactagttctccttgctctaaccccactcccagttacccatgcctaaattgctcccctcctttctacctcttctctgttaggtaattcattatcatctttcaggtatctgcttaaaatctctccctctgggaaacccttacctgattaagtaaggtccctgctatcgttcctatagaaccctgccctgtcagtgtcatacatgcaacattctctgtgtgttttccactgacttcccaccatgtggttagtcagtgttcaaaaatattcttctgggccaggtgtggtggtgcatgcctgtaatcttggcactttgggaggtcaaggtgggcaaatcacttgagcgtaggagttcaagaccagcgtgggcaacatgacaaaaccccatctctacaaaaatacaaaaattagctgggcatgctggtgtatgcctgtagtcccagctacttgggaggctgaggtgggaggatcgcttgagcccaggaggtcaaagctgctgtgagccacgattgcaccactgcaatccagcctgggtgacaaagtgagagcctgtctcaaaaaaaaaaaaaaatctcctgtggatggtagatgtcaattgtgttcaatgcatcaaagagatcaaataagtcaaagactaaacagcttctataaaagtcagtggtgactttggtgacagcagtttctgtcaggaagcagaagtagaagccttcttccaagactgattggaaggcagaactggagatggaagagcagtctactcttttaagaaactttacgaggagaggaggtaggtaccatggattgttgtaataaaagccttctcagttgagtccttgctgtcaaccagcactttcaatcattctctccgttgctgccaagacaggcttcctaaaatgcaaactcattaagactactctcctgcttaaaatttttctataattcctcattgctttcaggatacagttcaaacacctttgcttgacctacatgaaatgcaaggacctggctcctgctcctgttgtagccccaggtcctgtcacgccccacatatccagatcttctgttaggccaggaagcttcctgcctctctgcttttatttggaatagcctcctcagctcacaccttcacaactcagctcctgtaataccttccccagccagttccttgtgtccacctctccctcatcccccaaacccagattaggagtctacgctcccagaggcctgtgcaggtctccttcatcgcgttaatcacaccgtatcaaaagtacatgttctgtgccccatgagactgaaagctcctctaaggcagggatatgtttccctccattgcatccccagtgtcccacaatgcttggcgcaccgtcacggtccagtaaaaaactttgaataaatctatagcaaagcatggagcggtccgtatagaggctgccaagccgagcggccatgggaggtgagctgttgtcggcgttttgagcaatctgcgggcggacgcggggatcactcacccgcgatgacgaatttggccatggtcgagagagactcagaggcagggaccgcggcttcgcggtttcctggcaaccacgcagccaagggcaaggcgcaggcgcactacaaagtctggcgcccagcagaggttaggtgtttaaagttaggacctgaatgggttacgttgcgatacacgatcaaacatcgcccttataagctctgtggtatccccgagccccactcctgtatgcagggaaattagtcattctccttggtaaactttcttcaagtaagtccttcagctacagccgcgaacatatgctttttgacctttgagggaatccgtaagatctcgtgagaagcgcagcttctcggggaagctgtcatggctgctcctgtacgtagtcacggtcttgtgctctaaggtgagtggaggacgagcttgggcttagcggcagcccgtatcacatcctagactttttacttcgaggagaagagtctcacgagttgtcctggaagtaagtttaaaggaggtgggttaatgctgggcggcccagctgcggaaggacaggctcttgaagttggttctggggtctggtgaggctggctggttgtataagatcttcctcttaagcgcaggccacgtgcagacatcgctttcgttttctgcttcttccactgagccgttctacctgcccaggtccctattcttgatggtctgggttcggccgttgctaaatcgtcatgttgaaaatgatctatcagccgggcgcggtgactcacgccttgggaggccgaggcgggtggattacctgaggtcaggagttcaggaccagcctggccaacatggtgaaactccgtctttacaaaaaatacaaaaattagccgggcgtggtggcatacgcctgtaatcccagctacttgggaggctgagacaggagaattgcttgaacctgggaggtggaggttgcagtgagccaagatcgcgccactgcactctagcctgggggacatagcaagactttgtctcaaaaaaaaaaaaaaaaaaaaaaaaaacagagaagagaaaagaaaatgatctatcaatgctaatcccctaattttcaccgaggacatttccataacaatgccaacaaaagtctctcctacagagaaagctttatggaacgcttttgcaccagaaaaatctcattaatacaatgactacttccaaagtgacctggcttctttgaaactggacacattgtggtagattggagggagcccacattggtaaaaaaaacttttactgttttatgtaaatgtttaatggctccataggttccccattttctcttctgttaaatgcatttcatttctttaagtaaaagttttgttttaatttttattcttttcattacttcttcccctacaggaaaacgacagcacgtgttctttttcactagtagaagtgacgttggtttcatgttgacaactttgaagccatttggaagtgtttcagtggagagcaaaatgaataacaaagcgggctcctttttctggaaccttagacaattcagtacattagtttcaacaagcagaactatgaggctatgttgtttgggactttgcaaaccaaaaatagttcattcaaactggaacattttaaataactttcataacagaatgcaatcaactgatatcattagatatctctttcaggatgcattcatttttaaatcagatgttggctttcaaacaaagggcataagcactctaacagcccttagaattgaaagactactttatgctaaaagactgttttttgactcaaagcagtctcttgtccctgttgataaatctgatgatgaattgaagaaagtaaaccttaatcatgaagtctccaatgaagatgttcttaccaaggaaacaaaaccaaaccgtatcagcagtagaaaactgtctgaggaatgtaattccctgagtgatgtgttagatgcattttcaaaagcgcccacatttcctagtagcaactatttcacagcaatgtggacaattgccaaaagactgtctgatgaccagaagcgctttgaaaaacgactgatgtttagccaccctgcatttaatcagctctgtgaacatatgatgagagaagccaagatcatgcagtataagtacctactgttcagtcttcacgccatagtgaagcttggaatccctcagaacactattttggtgcagactttgctgagggtgacccaggtaaaataaaaaggagatttaaacatgcatttacttgatttagaatattttgaaagaatgaagggatatagatatgtagc

SEQ ID NO: 3327 - DNA, 4001 bp, Homo sapiens
catgtctctggaggaagaaattcaaaatcacaataataaaacgtgccaggacactgcagcaaacccgcctagtttcacagccccttcacatcagggggaattaaaaaaaaaaaaaaaagttacgatgggaacagctacgcaaagcacgtgaatttagacaggcttctcattttatttccctgccagcgtgaggttaggcagtcctacaagacactgcatttcttttgctttccaagacaaactctgctaaattatacaaaactaactgaccccttataagtgaaactcaaaggagggtagcttttcctgaacatcagagctgaatttagaattgggcaattccccacccccaaagttaaagaaaatctatagttgaagcagctaatattctattttcttatttactcttatgaactttgtttccagactagaagtcaaggaggcaaatgttactcaccaggtttaaagcaaattcaaaagcaaatgcacaactttccatcttcctcttccagaaaaaaaaaaaaaaaactactttcatattgattgtcattattttgtgtgtgtgaaatttagctatttaggtttttctaattggttcattccaggcagttattttcccaagatttggaggcgctgagagtgaaatgattttcaaagaaaggaggaattgccactttcatctccttaaagccagaggtgtgaaaagagtttggaagaacgctgacatttgcctgaaccaaaggagtaaagaaaactgtgtcagcctagtaactttcttttgcaaacagggctttgagggccaggacacaaattatgcaaggaaggctttttgtagaccccctttcttttaagaaactacctcagttgggttgtcattgtctcactttactctcactgcatttccattgaaaaaggaatatggggaaattagtattgcatttttaaagtgagtaactgtgtgcttagtattcaattagtagagggcttatctaagagaaacttgcaaaatattgccttgtatacaagtctatacaaattgaaattactataaaaagatgaatgttttctgaccaaaaaattggctatactatgacaaagttatttcctttaaaaagctgaatacttctagtgatattaaagatgagcataatcaataacatatcagaagtttccagctgcatattttagtttaaacataactttaaacttctgatctctgaatgttcaaattacagctttaggtatctagcttttttaaaaaaaaacccagatgattgtttgagcttgcatttttatttatatagctgctggttaggaatctatagataaatagattcctttaattaacaactccaagtaacatacataagtctacaaatgcattgaataaatcctctcgcttaggccacggctttaggagcctcattttttaaaagagagagagaaaaaaaggaaactttttagcagtgtctttcggccacgtttcaatttaatctcacatttgagttccacaattgttttttaatacgtaccctttgcgccatcggcctctctggctcccttcctacttcaacttctaatatatcctctttaaggccagtgtgaaaagaaacaaatattcaaactcccccggaaaaaaaaaaaaaaaaaaaaaaaagcacgacgaaaaatcccttaacgtctccagcaacgtgagctactggtcccagatcttcggtctacgggacctgaagcaaagcgcccgagtcactgagcataaaagcgctccgtttccaagacagcagcgggggcaaaaaaaagcagatcttctctcccccaaaaatcagtttaaaaaaaaaaaaagaaagaaagaaagaaaaggaaaaaaaagagcgcccctcagacccaactaccaaatctcatggctttctgccactccagctgtcaatcacaggcgaggttgtcaacgtggtgaatgaatgatcatccgctctgtcttcttctggtcagaacacctcaaatgttaatattcaaatgcacaaagccctagcgctcgcttcccttgaatcagtcctaattcctaatcagtttctctcttctctctctctctttctttctctccctctctctccctctttgcaagtgctgcactggaaggagattagagaaggagggttaaaaaaaatgtctgtctgagtttgtcttaaaggagccacgatcgatgctgcccgcttgcagtccccgtgcgtgtgtaaagtgtgtgttgcacaggcggagaggtggattccgaccagaatgctagaacccggaagtagtggtggccataacaggtcgcgtcttacacaatgcattgggctgcagcaagtaggctcctcggcaggggtgggtgcgcgaagcgagctctggccgcactggagaggcagagaggcgctccattaaatcgcacgcccaggcacaaacaccacacacccagggcacacgcacacaaacgcaggcagtagcccgcggccgccagctttattttcagtattcttttctctccctccccctgcagactctctccccaaagccgactctcttgaaataaattgggaatcaacgccgggcaggcagcagcgggagttattttgcacagggctccgcgcatagacttcatgactttcctcgaaattattggggtctgccagtgtttttcggggcagggggtgatgcgcaaagtactgaattctcagaactaaacactgcaaggagaaaagtcaaagcgggatcgtggaggaaaaggagggagaagccaggttgggaaagcctctgctaaggagtcctgagaacatggggttgaggtggctcgggctttctgcagacccagcttagaggtttctttgctgttagaggtggacgcccggccgggggaaagaaaatgctagcattttgtcacttcgggtctggactcccccacctcctagccccggcggctcccagccccagcccaggcgtcctgcgcgaagtagagaggaagggagggaacaatgagctgagcgcggggaatgtgcccccagcgcctgtttacaaacaccaagctatttatgatcgtcggaaagcgaaacccggcgcgggctcgcagcagcccagacctcgcgggcggagccggggccggggagccgctgggagggaggctctttctccgacccgctcggggtgaggcggccgtgcgcccagggcgcggcgcggcgcggcgcgacgctgccggagtgctaggctccggctgcagccaccgctgcctttgtcttagaggcgccgaggggctccagcctcgacctctcccgggcctgtaagaacctcgcgccccactagctctttctccagcgaagccctgccctcaccaccccagacatccttccccgcgctcctctttcccgtccccaacccggctcggcgaaacctcccagtgccagagaaaaagaaatccgcttcggaagctgagatttcagacaaaagctgcctgtacctacaactcggaggctccaaccaaccactgttttttgttttgttttgtttttaactttaacacctattgcctgggctttaattccccctcaccccttctctttattctcccgctctaagcttctcccttgtgattatatttagtggcgttattttcgtatttatatttctgtccgctgggctctgatctgccgagatggctcagccgcagcagctctaccagtggctggaaacctcacatccacaagcagggctcgcagctcgctcggctccgagaggatttttccccctccctccagctgaaacctcgcagaaaactccccctgcggtcgactggaaaatgagctcacccaaatctcggtaggcagccgtggaggagtgctcggccaatcaggaggcgcccccgcccaggccgccgcgcattggctgcggggaaaatcaattatcaaataatcgatcagcagggagcttcgatctgcggggaatgcgaactgccagtccctattcccgccctgaag

SEQ ID NO: 3328 - DNA, 4001 bp, Homo sapiens
aggaagattaaatgtttatgaagtactttaggaccatgaatggaagccactttaaccataaaatgtcatatttgcttaatgcaaaactatagctacctgttagctatagctgcaaatccaatcctcacaattcttttgtgtctccctaacacagaaaatcttcagtgagtcatgtatttcagtaaggtacatgtatttaatgagctagtttagcaacctcagagaaatgaattttcttccaaatctttgctttctcacaggccatgtcactctccaagccaattctttgcaaaaggaaacatgatccgattcacctcgagaagttaggtctagttattgacaagccaataccaaatgactgaagactatgaggaatcacagtagaactgtctttgttaacataccagaaatgtgactcctgaaaataatcccagaaaacaggcattctaacaagcactttattaaagggaaagtccctacactttcacataaagaagtctaaaatgcttttagacagtggagacagaaaactcaactcgctcaaagcttaaacttaattcgttaggtagttccagcacctgcctggtgtagggcgaccagtgactggggcgactgctcgggaaaagtgctgatgccatatccagctgcccctttcgtgaatgacagtaacaatgcaaacactgacagaagagctgggagcccccccacccccaagcccctagcttagcagtacttccaccccagccccaacatacaaagtgacaaatccctgaaaggccctcctctgacagatctccccatgcagagacctcgtctgtagtctggtaacgtaaaaaagtgctacccttcactccctgcaagacagcggagccccttaaaggtgcggggaaacgctgcctccttctccagcaccagaggcacggggcgagaagacttcctctccggctgcgggcgcgggggctcgggggcagaccgagagaactccctctgggcgagggcactccccggaccgccagcggggagggcagggaagacgggagaggaaaggaaagggtccctggctcggcaagagggcggagggtcgctgccctgcggcgtggagaagcggggctcggcgccgggcacaccgtccttcccgggggtggcagcggccggccgcacgcttcctgcaagccagaggcggcgacaagtcggctggggtccgggagcacgttccttcctcgagcctggtcctgagggagggcgcaggctgccgaggcggcaactctccctctcgcccaactccggagagcgtgaggccggccggccccgggctgccggcgcgggatgcccgccgcccgggtgggggaggcggcgaggccggcctcggctcgctccctccccacgcggtccgcgcccggcggcccgtccgcgccctcttccccgcccgccgccgccgcggggccgggccgccgacctcggccggccgggcgtggggccaggcggcgacggcggcgggcgggccggcggcctggggccctacctgaggctgtgtaccagctcccggcgtgactggcttctcggcagaccactcggttggacatcttggtgcctgtgccgcctatggtgcacgaggatgaatgaggaggcggcggcggcggcggcaggagcggctccgcgaggggacgagacaccgcgggcccagcccaggaggaggcggcagcggggaggggatcagcccggcccaggaggaggaggaagaggaggaggcggcggcccaggaggaggagatggcagccggggcggtggcggcggcagcaacaatcaccacaaactccggcgaccgccggaagatggggcccacggcggcctcaccgaagcccggaaagccctggccccggcccccggcgtccccgctgctgcccagccggggctggttccgccgagccgcccccacggccccctcccctcccagctggcctccccgagccaccgcgagtgaccccacccccgtgactccgcgcccgcccccgccccccaccccccgcggggctccccgcacccacccccacccccggcagggccctccagcccggccgcccgccgccggccccgccccgctcctcctcccggccgcgcggcgaggttaacggcggaaaccggacaggcctgacggcatctggggtcgggcagccccgcgaggaggcagtggcggctgcagctacgcgcacacaaaagcccagggccggggcctgaaccggggaaggcagacccggagaagagccaacgcttccttactcgccactctaacgggtcctgcccactgagcatgcccagcaccgctgcctacccgccgaggaatctcaacgtgcacgctccgctctccggggtttagcggcagcagaggctgggaggtgggggcagggcgcggggagcaggacgcagccgcaaggcaagccccctcccccagccaacttcctcaaatggagagcacctagggctcgcggatgcggctttccacgaggacagtcccgcgggtatccatcatatacaggcatctctcatcgatttgcacccccaaggtctcattcctagggtggcacgccgggaagttcatctgtagaagcaggcgcgtggtaaagtgtgcctgtggtcatgcaaatactagtttttgcttcacagggtcactcttaccacctaatggtggctttgacactgtaaccatttatcttgtttcatgttgtatttatgtaggtgtatgtcatatctccctaactaaggtgtttgatataactagcctcgttatcctcagctgtaaaatggggacactcaaggagtgtacctacgattataagagctgttgaatgtgaacagcctgacagggtaagcctacaacaaatattattttcacctttgtcatcttataaatcccagtattccacataaatgtcaggaacaaataatttttttacaattgtataagaatcacagcaaaggaggctatcttggacctctgaggaagtgttattgttacaaagtacaccattgcaaaagtaggaatagaggaagagaaagttgcatacatccaatgaaagttttggggcaaacactataaaatgtttgtaactgcatgggcatggtacctcctgcctataatcccagcactttgggggcctgaggcagtaggactgcctgaggccaggagttctagaccagcctggggaacataggagaccctgtttctatgaattttttattttttaattatccgggcgtggtggcttcgcctgtggtcctagctacttggtaggcggaggcgggaggatcacttgagcccaggaggtcgaggctacagtgagccatgatcacgccactgcattccaacctgggcaacgtacgtagcaagaccctgtctcaaaaaagaaaagaaaaaaaattatatctgagtttcatactaaacaagcccctgacagattccagagtagatgactggctgtctagtattcaagtttacttttaaaagtgctattctgtttcctctcctcctcccaccttctccaacttcagggcccaaggattttgtgcagtatccctgtcctaaagcctagtcaattactggaacacttctgactctcatacctttttctaattaggctaaaatctccactgtatatttgtttactcaaattttaccctctccaccaacttgcacaaaacataatatgcaacaaaaaaaaaatggacataccatgtatccaaaacctctctcttttttctttttttttttttttttttttttttttttgagacagagtcttgctctgtcacccaggctggagtgcagtggctcgatctgggctcgctgcaacctccgcctcccgagttcaagtgattctcttgcctcagcctccagagtagctgggatcatgggtgcccaccaccatccaccatgcccagctaatttttgtatttttagtagagacagggtttcaccatgttggccagggtggtcttgaactcct

SEQ ID NO: 3329 - DNA, 4001 bp, Homo sapiens
gtctttgttaacataccagaaatgtgactcctgaaaataatcccagaaaacaggcattctaacaagcactttattaaagggaaagtccctacactttcacataaagaagtctaaaatgcttttagacagtggagacagaaaactcaactcgctcaaagcttaaacttaattcgttaggtagttccagcacctgcctggtgtagggcgaccagtgactggggcgactgctcgggaaaagtgctgatgccatatccagctgcccctttcgtgaatgacagtaacaatgcaaacactgacagaagagctgggagcccccccacccccaagcccctagcttagcagtacttccaccccagccccaacatacaaagtgacaaatccctgaaaggccctcctctgacagatctccccatgcagagacctcgtctgtagtctggtaacgtaaaaaagtgctacccttcactccctgcaagacagcggagccccttaaaggtgcggggaaacgctgcctccttctccagcaccagaggcacggggcgagaagacttcctctccggctgcgggcgcgggggctcgggggcagaccgagagaactccctctgggcgagggcactccccggaccgccagcggggagggcagggaagacgggagaggaaaggaaagggtccctggctcggcaagagggcggagggtcgctgccctgcggcgtggagaagcggggctcggcgccgggcacaccgtccttcccgggggtggcagcggccggccgcacgcttcctgcaagccagaggcggcgacaagtcggctggggtccgggagcacgttccttcctcgagcctggtcctgagggagggcgcaggctgccgaggcggcaactctccctctcgcccaactccggagagcgtgaggccggccggccccgggctgccggcgcgggatgcccgccgcccgggtgggggaggcggcgaggccggcctcggctcgctccctccccacgcggtccgcgcccggcggcccgtccgcgccctcttccccgcccgccgccgccgcggggccgggccgccgacctcggccggccgggcgtggggccaggcggcgacggcggcgggcgggccggcggcctggggccctacctgaggctgtgtaccagctcccggcgtgactggcttctcggcagaccactcggttggacatcttggtgcctgtgccgcctatggtgcacgaggatgaatgaggaggcggcggcggcggcggcaggagcggctccgcgaggggacgagacaccgcgggcccagcccaggaggaggcggcagcggggaggggatcagcccggcccaggaggaggaggaagaggaggaggcggcggcccaggaggaggagatggcagccggggcggtggcggcggcagcaacaatcaccacaaactccggcgaccgccggaagatggggcccacggcggcctcaccgaagcccggaaagccctggccccggcccccggcgtccccgctgctgcccagccggggctggttccgccgagccgcccccacggccccctcccctcccagctggcctccccgagccaccgcgagtgaccccacccccgtgactccgcgcccgcccccgccccccaccccccgcggggctccccgcacccacccccacccccggcagggccctccagcccggccgcccgccgccggccccgccccgctcctcctcccggccgcgcggcgaggttaacggcggaaaccggacaggcctgacggcatctggggtcgggcagccccgcgaggaggcagtggcggctgcagctacgcgcacacaaaagcccagggccggggcctgaaccggggaaggcagacccggagaagagccaacgcttccttactcgccactctaacgggtcctgcccactgagcatgcccagcaccgctgcctacccgccgaggaatctcaacgtgcacgctccgctctccggggtttagcggcagcagaggctgggaggtgggggcagggcgcggggagcaggacgcagccgcaaggcaagccccctcccccagccaacttcctcaaatggagagcacctagggctcgcggatgcggctttccacgaggacagtcccgcgggtatccatcatatacaggcatctctcatcgatttgcacccccaaggtctcattcctagggtggcacgccgggaagttcatctgtagaagcaggcgcgtggtaaagtgtgcctgtggtcatgcaaatactagtttttgcttcacagggtcactcttaccacctaatggtggctttgacactgtaaccatttatcttgtttcatgttgtatttatgtaggtgtatgtcatatctccctaactaaggtgtttgatataactagcctcgttatcctcagctgtaaaatggggacactcaaggagtgtacctacgattataagagctgttgaatgtgaacagcctgacagggtaagcctacaacaaatattattttcacctttgtcatcttataaatcccagtattccacataaatgtcaggaacaaataatttttttacaattgtataagaatcacagcaaaggaggctatcttggacctctgaggaagtgttattgttacaaagtacaccattgcaaaagtaggaatagaggaagagaaagttgcatacatccaatgaaagttttggggcaaacactataaaatgtttgtaactgcatgggcatggtacctcctgcctataatcccagcactttgggggcctgaggcagtaggactgcctgaggccaggagttctagaccagcctggggaacataggagaccctgtttctatgaattttttattttttaattatccgggcgtggtggcttcgcctgtggtcctagctacttggtaggcggaggcgggaggatcacttgagcccaggaggtcgaggctacagtgagccatgatcacgccactgcattccaacctgggcaacgtacgtagcaagaccctgtctcaaaaaagaaaagaaaaaaaattatatctgagtttcatactaaacaagcccctgacagattccagagtagatgactggctgtctagtattcaagtttacttttaaaagtgctattctgtttcctctcctcctcccaccttctccaacttcagggcccaaggattttgtgcagtatccctgtcctaaagcctagtcaattactggaacacttctgactctcatacctttttctaattaggctaaaatctccactgtatatttgtttactcaaattttaccctctccaccaacttgcacaaaacataatatgcaacaaaaaaaaaatggacataccatgtatccaaaacctctctcttttttctttttttttttttttttttttttttttttgagacagagtcttgctctgtcacccaggctggagtgcagtggctcgatctgggctcgctgcaacctccgcctcccgagttcaagtgattctcttgcctcagcctccagagtagctgggatcatgggtgcccaccaccatccaccatgcccagctaatttttgtatttttagtagagacagggtttcaccatgttggccagggtggtcttgaactcctaacctcaggtgatccaccggcctcggcctcccaaagtgctgggattacaggcatgagccatcgcacccaggccaaagctactttagaggtaacagaaaaaagaaggcttgagctctgattacatggtactgttctgacagtaccaaaactcagtgatcattgataaaatggtaaagttttgttgtaagttgcaagaaaaggaaactgccctaagtgtttatatgatgatggttcttatggttatttattgctgattttgtttctatggaaaagaggtgtggggtgttgtggggtggtggagaggggattggatacaattaaacaaagaaagcttagtatttcaggcccttcaaattagaaagtcagatttgagtcctggccctgtcac

SEQ ID NO: 3330 - DNA, 4001 bp, Homo sapiens
agctacaaaaatttgttattacagccttttaaaattttagaaaaacaaaagcactccaatttttaagtatttaacacaaaactattgttcccattactttctccatagttctcaccacattcactacctccaagactattcacggccagtcctcactagtagcaacaaataacagatttgcagcagattatgaaaaatggggctggcagaaatgctgaggaatttttgaaggtttggtggagggaggggcagtggagaacagaactgctttagttctttgcctggctcttaaagtttgtttcaaattgctatgttgccccaaattataaattgcttatgtaatttaacgtgcaaaaagtgggtgcactgtttaagaatttttcatttgagtaaatgagctttcaaaggaaaatctcaaaggaaaaacttttaagtaacttacttgactataaactgagctttccaggtattcctaaaaaacatctttgactgtaataggtgaaggctagtcaagtgcattctcgatcaaaagagagaaaatctacatgctgaatggaaatagaaaccttttagctgagagaaaatacttggaatgtgtttatttagcatttttcccctttctttttcttttgggtaaagcctggtaagtttattccagcctcctcaagaagtgcatcagcgatcaaacttgaaatctgttcatcactcactccccaaataagctgttcaagcagaatgaaaccggccttccttgcctccacgtatcagtccagcatcttgtattaaaatgcctggaacaagccgggcgcggtggctcacgactgtaatcccagaactttgggaggccaaggagagcagatcacgaggtcaagagatcgagaccatcctggccaacatggtgaaaccccgtctctactaaaaatacaaaaattagccggacgtggtagcgcgcgtctatagtctcagctactcgggaggctgaggcaggagaatcgcttgaacccgggaggcggagcctgcagtgagccgagatcgcgccgcggcactccagcctgggcgacagggcgagactcggtctcaaattaaaaaaaaaaaagcctgtaacaacacttcgctgaatccagataaacgtaaacgctgccgagcactgtaagttctgttctgccataacaggagtgaaaagaacgctccccttttcccacactctctgggtgcccctaaaaagggatactaataatgcccgtaagggcccattgggagcagccaggactgccgtccccccctggcccgtcgctcggcctcagtctatcgcggctcccggactgcggctccgactcccgcagcccgttcgttcgccccgcgccggtccctcgggagaccggatctgtggcccccgggactccggccagagcggggccccaccatgcaactctagtggaaagttctcgtcgcatcccagaccagacctgctacctacgttccactcgtcggaacttcaggacttgcagcgcgcccggccgagctcgatttcctcctctgcggtgaagaggggagcctgcaacgccgaccccgacccggcttcaccacgatgcgcacccgcaagccaggctgggtgccctcgggacgcttgaggcgccgcggtcagtggacggtaggttcgcctacgccccctcctctggcaccgcagtgggtggagggtgtttgcaaacttgtccagcagccaggcgcgcccctgtggacgcgctccctccccagaggcccctgcttcctcctgggagcccccaccccctcgcctggcccccagccgggcgcactcacctctacgccagagcgcggggaggaagaggcccagcagcagcggcagcggggccggccccatcccggggctgcggatctgtaatttctctccggacggatggacagatggacgtcccgaacctgtcctgtcgccggccaagcgcgccagcgaagctccctgtccgggcggcccgggcagtgagtgccgagtggcggagccaagcggccggcgggaggtgccgagggctggaaggggcgggccgggggccgagccgaggccggccggggctggaggagaggagcgggcaggggggcgagtcccggcgggcccagcaggttggggtgggagggggcgggaggacgagggggaggaggggcgtaaaggggaaagggagggggttggagagaaggggcgggccgaaggccgccgctgggcagacggcggggaagggggcggagaggaaggggagggggctgagagacccggagggagccggaaagagaagtgaaggggaggggtggactggaggtccacagcggaaggctctggccgctgcgcgggtccggggccccacacgtgtgggtgggagatggggaaggacagaaggtgggagaggagtagaggatgcccgaggcagcccccagacccaagaggagggtccagaggcgcccccgcattccgggcttggctgacacagaaaaccctggccgcgccgctcccagaggccaaggccagggcggcagcgctccctgccgagcgctcctccacatccattccgctcgccgccgagcgccgcctgggtacccggcccgaggtgcgcgacacggccctggcggcgaggagctcacctccccagggggaggggttcctgggaaaggacgctttgccgtggctccgtgacgagccagagagaggtgacactcaaggagggagatgaacgtgaatgacaaagtgcagagcaggagtggggagagggggaaccacagcacgtcactctcatgggcctccacaaggtgtgcagggtccaagaggcagtagcagagagtgagtcgtaagagaaatgtaactacttacgctaataatggcaacagtaacttaatttatatacgtagtttcttaaaggtaacacttttagaatgaatgtattttaatgtggtccctttaacaacataacataagccaaatcatgtccctctcctcaaatctccctaaacctatcagtggttcctgctgtctctgcgtacgtaagccaaggttctgcagtggtctacgaggttctacgtgacctggtcccctttcctctttggcctcatctccttacgcctcttcaatttacgttggtctcgtcaagcggtcccttgacccctacactggctggacacttcccgtagatttggctacgggaaggagacaggcagcccagatgggtttagacaggttattacttacaccgacagcaaaagcaaaatcagtgtggtgtcagctccatgcatccttaggcctacaagataacaccaaactggaagggtcagtgttatcctatgggtctacataatttaacaaaaataaataaataaataaataaataaataagacaacatgagccctgccgctgagtagccaagtctaaattacaccaagcagttttatagacttcacaggagcctgccgctgtatgcttggagggaagcgggctgggcggtggagggagggatatggaaagtcctgcagtcaactgaaacgttggagaaggaagagaaatggccttgcagcagtctcccatggggtagggataggaaactgcctaccagtggctcctcaccaggcttacccatccctgctttaggggaaatcacagggcagtccaacaagacttgggtcagaccgtggtcataccttgcctacatggcctcgagagatgtgcaagattgccaaggacacctcggcagagctgttctcctgcaatttccttgctattgctcacatataccaagcactcctccgcccaaaggtttgcactggctgttctctctgcctgaaatgctcttcccctagacacacagcttcccagttggctctcctccaagtcagctcaaatctcactttcttgttgaggcctgccttgtacaatactcttcagctatctaccggtgtttgatataccaccccaaacatagtgggagtaaaatgtcagccattttat

SEQ ID NO: 3331 - DNA, 4001 bp, Homo sapiens
cttgaactcctggcctcaagtgatctgcccgccttggcctcccaaagtgctgggtaatattacaggcattagccaccttgccaggcctggcacccagatcttgagagatgtaaattggctgtcttttcacaaggctacactctcatgctgatgtccattccttcatgcaaccagtccaaaatgctcgctacatcaccttccccatacacatctctcccctcaaatcttcctgtggcccctttctcatctccactaacactgaaatactgaagtctattcgattaccaaccttcttcctctctaaaaatatcttcctcttcacttcttattttttattatttttatttattttttttttctgagacggagtctcgctctgtcgcccaggctagagtgtagtggtatgatctcagctcactgcaacctccacctcctgggttaaagcaattttcctacctcagtctcccgagtagctgggattacaggcatgcgccaccacgcccagctaattgtgtatattagtagagacggggtttcaccatgttggccaggctggtcttgaacttctgacctcaagtgagccacctgcctcggcctcccaaagtgctgggtttacaggtgtgagccaccgtgcccaggctctcttcactttttgtacacactcatcctgcactgtctctgctgaactttacacactgacttctatggagtgaccacgtcatgcagtaccgagaaatgagtcttaaaaaaaaaaattagagtcatgttcaaatgagcaatctgcctcttaccatttatgcgaccttagtaatgttacttaacctctctagccttacttttcccttctgcaaagagaaaataattcctaactcactgggtttttgtttttgtttttgagacagggtctggctctattgccaagtctggagttcagtggtacgatcacggctcactgcagcctcttgacctcccaggctcaagcgatcctaccacctcaacccccagaatagctgagactacaggcatgtgtcaccacgcccgactaatttttaaaattttttgtagagacggggtctcattcattgagttttaaaaggaagcaagcatatgtaaggcgcttaacacagtatcgtgtacttaaaaggcacttaataaacagtagctgttactatgaaaataatatttacctcacaaaactgttcctacatgcctgacgcttaagtagctcctcaaaatatgatagttttcctcttcccccgtccttggaaaaactttctagttctttccaacaaagattcagcacctagttcaaatccaacaaagatttccccaattctgctgcaaaggcatttgtatatttactaaaatctcaacactcacgcaggataaaacctacttagaactacccagacatcctttcttatcttcttaactttaagtcactggaagaaaaccatcacattttgcaagtccccaaaaagcatgcctgcataaaagctctagggaagggaaccgggtgtccagatgcatttcagaattaccataggtttccttgctcggcatacagaataaatgttggttacactaatgatacaaccgaagttggggaaaaaaacttcagacaatggcccgcaaatctcaaggagtaattgcgaaaagatgccacgtggtgacgtgttctaggcgggtgatcagtgaacaaatttgtatgtgtgatcctgtggtgtgtgaatgtgtcatcgtgtgtgcctgcgtgtgttcgtaaacactgaaagtacagtcgtgtgcgccgagaagtctgagcgcgggtgcgcatccctttggacccgggtgcgtacctagtgagcaaccgtgcgaaccctcacggggctctcctccacgcgcttacctctgcggacgagcaggtggacgccactgggcgccgccatgttggcgtcggtcacgtggccgcgagcactcgctcgccgccccgcccgctggagccggccagtcgcagccctgccgaagccctgaggcgtcgaggccgcccgaggggagcgcgcgtgcgcgcgcggggctgactgcgggagccctggctgggaagcggctagggcacccgggcaagcagcagaacccgcggccggctgagtcctctccagccgcgagaggcgggctccagccgcggctcgcgcgctcgctctgagcccccgcgcccaggtgggatggaagaagcctgtcaggtaagcgtggcatccaatatttatagcatcaacattttggtgcatggaaacgtgaagttgggcggaaaaaataaagcacaatctagtgttcaacatagcactttgtatcgtctgccactctgttgcaaattattcccctggattcagttgaaaggtaaaatttggttcaaagtcaccagctccccttttgctgtcccagaatctacattactcagcagagactccagacaacacaggatctgtgtgtcgctgcaaaatctattctaggtaccccagtgggtatgttcaggagacttctctttctccaaggacgccttctgcttggcagtattaactggagtcttaatcctaaatttggagtttaagtataaaaggatgacgcctgccaattgcattgccaagagaagaagcctacagaaggccaattgtgaatcagatgagggagctgatgtatgcctactgatgacggtgcccatttttaccaaattcactgtctctcttacctgtgttctggggtagatgccatcctgtcatggaccaggtgttattcatcttagtagcctccgtgcccggcacagaacccgatacccgaggaatgtcaggtgaagcaattgaacactgcatgaaaccagtcaaactgagaatgtaaccgtttccagactttaaatgcagtgaagattgattaggattctcagtgaatgtgtgtgatgtcttctaattaatttttaagcactacacactcagtgaataatctagacaattcagaacaattcagaaataaggaacaagtgcaagccccttcctcgccctctgtacataccatagtcccactccccagttaaccaccgtgtgctcaattgagatctttgccttttacacacaggcaaatgtaagtattttaaatagaatcatatgacttgctttttccattccagtcatcataggcatcaaatcttagaacacttagttcagacttattctttttaatgactatataatcttgatatttttacttttaaagagagtgaatgttggcatttcattagaggacacatgctataattctggaaaacctggttttggatgcttttgggtcaccttgaaagataaagagaagtaatgctttccatcagggtaaataagatgcacaagaatgagaataaaatgtactcctaccttttgcaaactcatttcaattccagggagagcatttttgaatgtggcaaatctgtcctctgtgtaactgaggccagcaatctgagtgcagcaaaggagcctgagagttagctggccacagagtcttaagcagtgtacagaaaaaagaaatctagacatccctattccttaaggcatcaagcctagtttcaaacccatctgaaatagaacacatgttcatgtgacttaactcagccaacccttggaaaataaatgaatgctttattcccctacaactaaaaggaaaaggaaacactatgaggacccaggtggcaccagcagtagtggaatccagtgaggaaatcctcaataagttcggcatggaatgtagatatctgggatgagctagaaatgaagcaaatatgaacttgcacaggtgatagctcatccactgaccctggatctggcttctctcatacacatccttctcaccgcagaagggttaaaagctgccagcacatgtccgccaaaaccatcaacttatgggatataagctgggtgtggtggctcatgcctgtaatcccagcactttgggaggcgaacgcaggcagatcacttgaggtcagg

SEQ ID NO: 3332 - DNA, 4001 bp, Homo sapiens
tggattcctagaagtggtattactacattagaatatattgagatttttattcctacgtgtttaacatccctaacaatgttaaaactgtcaaactgtatttatgccaatcatgcattcaacattaattgagttcccactgagtcctaggtgtggggctagatgctgagggctcaagtcagaacagggcagggagaggaagaagttaaaaagcagttacaattttttaacaattacaactatggaaaacttaaagaaaacacataatctccattttgggctctgccactttacaatactctgtgaaataaagagactaactcggctgggcgctgtggctcacgcctgtaatcccagcactttgggaggctgaggcaggtggatcacttgaggtcaggagttccagatcagcctggccaacatgtcgaaaccccatctctaccaaaaaatacaaaaattaaccaggtgtggtggcgtgcacctgtagccccagttactccagaggctgaggtgggagaatcacttgaacccaggaagcggaggctgcattgagccaggatcgcaccactgcactccagcctgggcaacagaacgagactatgtctcaaaagaaaaaaagactaactcgtgtccaaagcagttgggggctttccttcctatcctctccgacaagtcattaactttcctcagctttcatttacacctttaaaatgtaatctatgtggagggacaagaggagtgactaagggatacgggtttgagagtggcagtgatagtaaaacttttaaaattgaagcggtaatagttgcactactctgtgaatatactgtatttttaaaaccgcactgaattgtgcactttaaataggtaaagtgtatgctatgtgaattatatctcaataaagctgttctaaaaaaaataaaaaataaaagccagtcttgcaagtgtgaacgttttcagaggtcccccagggcttacttaccgcatcccaaaccaccgctgcgactcccaggtgtctccagtcctgccggatctggatcgtgtggtttgcaaaggaaaaagttgcaagaggcttgtggaatttctgcaacccaaattccgtggtctcctcatagggcacgagggccattccgcctgcaccccgccctctgctcagacctgccgtgcaaaagaatcctgggtgacgctctggccaaaagatacattatctgttcttaactaactccaaatgcttttaaggtcgtttacaagttcaaaagaaaaaaagaaacaggtggaggaagcctttgtccaatttcttttgcatggctcttccgaatctgagtgagatttggctcggaatttgtgtcaacggatgtgtttggggaagaagaaaaaaaaagcccagaacattccaacttccgcagaataccctatacactgcactgctaccactccgtgaattcagaactacacaagcggcggaagcggcggtgatcgcccagggccccagagcagcgcggaaagcagcgcttccaacccagacccgggcgcccggactgcagctgcagccagccgggcggcccgggttctttcgctacggtttcgctacccacctcccctcctccatcggctgcttcgatagtgataacaatgggacagaacctgcccttagactgggtgttagcggtttgataaaccagaaatacatggtcgccgcagttccgtctccccgaccctggaagtgagcgacactgggggcctccaagcggctcgcggggacagcggggactcggaggcctccccgaactccccctatagctgccccccactcacccctctcccgggacgaccagtgcgcccttcctgcccgggggccccggagctgcggcaaccctccaggggtgagagggagaccaggcgaggggggtcacagggcctcttaggatccccaggccatacggggcgccgtgagctgcccggcggagcacccagggctcgcccaggccgggctgaggcgccgccacgccggtacttacggcccgggaggcggtcccgcgtggagcgcgcgctccgctttccccgccccgggctggctgcgaaaaccgccggccttaaagagcccgcgacgcgggggcgggcggccccggcccggagccacgcatttccggtctcccggcacccagcctccggcaggtgcccccggagctcacggcgagggcggggccgggccgtggcgcggtggaggagtgacgttgcgggaggggggaccggggctttccctcgtgcgtccccagggtacacggacgacttaatccgtttcccccgccgccgagggaggcgctgtgggggcgggagcaagagtgagatcggggtgccgaactgccgcgggtgcacagggagagcatggggtgccctgggctctcctagcgggagagaaaagccacccacctggcgctgaatgtgcctctcgaccttttctatcatgtgctccgccgctctctgcctctgactttgtcgcttgcgcgttgtgcctgttttttaaaggtggcgcgttagcggatgatggagacagctcgctccgaagaaggcatggtcactctagtccccgcgtctccacggtggggtcagaagcggcgtaatagcccgcttggcggcaatcgagtggaaaagtcacaaaacccttttcaactaaagcacagtgggggaagtgaacacgtggcgcccgagtccaagtttttaaagtggggcgggggtcggcgggctctggctgcagtcggaagcgcggagctctgggcgtgcgctcggctccagccccggccccaggcggcgctgcagactccagtgccccagtctccctcctcccgatgccaagacgcacctgcccgtgaggacccacgctggacgtggaaggtgccgagggcctggtaccctggccgcaggccctggcagagcgcgcggctggagtgggtccattgagtgggaccgtgcggggaccggcatcctcccggggcaggcttctttttcctcctggggcccctcgccccacaccgcccgctgcgctctcagcgcggctgcacgttagaaccagctggggtaaacctcccttaccagtcccccgccccaagagctggccatgggagggggcccgagcgctgatttttttgtttggttttttgcttttgtttttgtttttgtttttgttttgagacggagtctctctctgtcgcccaggctggagtgcaagggcgcgaactcggctcactgcagtctccgccttccgggttcaagcgattctcctgcctcattctcccgtgtagctaggattacaggcctgcgccagcacgccagctaatttttgtgggattttgtttgtttgtttgagacggagtcttgctctgtcgccaggctggagtgcagtggcgcgatctcggctcactgcagcctccacctcccgggttcaagcagttctcctgcctcagcctccaaagtagctggaattacaggcgcccgccgccacacccggctttttttgtgtttttagtagagacggggcttcaccatgttggccaggctggccttgaactcctgatctccggtgatccgctcatctcagcctcccaaaatgcgggattacaggtgtgaaccactgccacctcccccacccctaccgcccgagcgctgattttttttttttattattattattcagagtttcgctcttgtcacccagggtggagtgcaatggcatgatctcggctcactgcaacctccgcctcccaggttcaagggattctcctgcctcagcctccaagtagcttagattaaggggcccaccaccacgactggctaatttttgtatttttagtagagacgggggtttcaccacgttggccagactggtctcgaactcatgactaaaggtgatccacccgcctcggcctcgcaaagtgctgggatcacaggcatgagccaccgcgcccggcaagcgctgatatttttaagagctcccggggccgcccccg

SEQ ID NO: 3333 - DNA, 4001 bp, Homo sapiens
tcccagctccctgcaacctctgcctcccaggttcaagcgattctcctgcctcagccttccgagtagctaggactacaggtgtgcgccaccacggctaatttttgtattttcagtagagatggagtttcgccatgttggctaggctggtttcgaactcttgacttcaagtgatctgcccacctcggcctcccaaactgctgggattacaggtgtgagccaccacaccaggcctatatctttattattaccagagtaacttccatgtagttacctggactggattcctagaagtggtattactacattagaatatattgagatttttattcctacgtgtttaacatccctaacaatgttaaaactgtcaaactgtatttatgccaatcatgcattcaacattaattgagttcccactgagtcctaggtgtggggctagatgctgagggctcaagtcagaacagggcagggagaggaagaagttaaaaagcagttacaattttttaacaattacaactatggaaaacttaaagaaaacacataatctccattttgggctctgccactttacaatactctgtgaaataaagagactaactcggctgggcgctgtggctcacgcctgtaatcccagcactttgggaggctgaggcaggtggatcacttgaggtcaggagttccagatcagcctggccaacatgtcgaaaccccatctctaccaaaaaatacaaaaattaaccaggtgtggtggcgtgcacctgtagccccagttactccagaggctgaggtgggagaatcacttgaacccaggaagcggaggctgcattgagccaggatcgcaccactgcactccagcctgggcaacagaacgagactatgtctcaaaagaaaaaaagactaactcgtgtccaaagcagttgggggctttccttcctatcctctccgacaagtcattaactttcctcagctttcatttacacctttaaaatgtaatctatgtggagggacaagaggagtgactaagggatacgggtttgagagtggcagtgatagtaaaacttttaaaattgaagcggtaatagttgcactactctgtgaatatactgtatttttaaaaccgcactgaattgtgcactttaaataggtaaagtgtatgctatgtgaattatatctcaataaagctgttctaaaaaaaataaaaaataaaagccagtcttgcaagtgtgaacgttttcagaggtcccccagggcttacttaccgcatcccaaaccaccgctgcgactcccaggtgtctccagtcctgccggatctggatcgtgtggtttgcaaaggaaaaagttgcaagaggcttgtggaatttctgcaacccaaattccgtggtctcctcatagggcacgagggccattccgcctgcaccccgccctctgctcagacctgccgtgcaaaagaatcctgggtgacgctctggccaaaagatacattatctgttcttaactaactccaaatgcttttaaggtcgtttacaagttcaaaagaaaaaaagaaacaggtggaggaagcctttgtccaatttcttttgcatggctcttccgaatctgagtgagatttggctcggaatttgtgtcaacggatgtgtttggggaagaagaaaaaaaaagcccagaacattccaacttccgcagaataccctatacactgcactgctaccactccgtgaattcagaactacacaagcggcggaagcggcggtgatcgcccagggccccagagcagcgcggaaagcagcgcttccaacccagacccgggcgcccggactgcagctgcagccagccgggcggcccgggttctttcgctacggtttcgctacccacctcccctcctccatcggctgcttcgatagtgataacaatgggacagaacctgcccttagactgggtgttagcggtttgataaaccagaaatacatggtcgccgcagttccgtctccccgaccctggaagtgagcgacactgggggcctccaagcggctcgcggggacagcggggactcggaggcctccccgaactccccctatagctgccccccactcacccctctcccgggacgaccagtgcgcccttcctgcccgggggccccggagctgcggcaaccctccaggggtgagagggagaccaggcgaggggggtcacagggcctcttaggatccccaggccatacggggcgccgtgagctgcccggcggagcacccagggctcgcccaggccgggctgaggcgccgccacgccggtacttacggcccgggaggcggtcccgcgtggagcgcgcgctccgctttccccgccccgggctggctgcgaaaaccgccggccttaaagagcccgcgacgcgggggcgggcggccccggcccggagccacgcatttccggtctcccggcacccagcctccggcaggtgcccccggagctcacggcgagggcggggccgggccgtggcgcggtggaggagtgacgttgcgggaggggggaccggggctttccctcgtgcgtccccagggtacacggacgacttaatccgtttcccccgccgccgagggaggcgctgtgggggcgggagcaagagtgagatcggggtgccgaactgccgcgggtgcacagggagagcatggggtgccctgggctctcctagcgggagagaaaagccacccacctggcgctgaatgtgcctctcgaccttttctatcatgtgctccgccgctctctgcctctgactttgtcgcttgcgcgttgtgcctgttttttaaaggtggcgcgttagcggatgatggagacagctcgctccgaagaaggcatggtcactctagtccccgcgtctccacggtggggtcagaagcggcgtaatagcccgcttggcggcaatcgagtggaaaagtcacaaaacccttttcaactaaagcacagtgggggaagtgaacacgtggcgcccgagtccaagtttttaaagtggggcgggggtcggcgggctctggctgcagtcggaagcgcggagctctgggcgtgcgctcggctccagccccggccccaggcggcgctgcagactccagtgccccagtctccctcctcccgatgccaagacgcacctgcccgtgaggacccacgctggacgtggaaggtgccgagggcctggtaccctggccgcaggccctggcagagcgcgcggctggagtgggtccattgagtgggaccgtgcggggaccggcatcctcccggggcaggcttctttttcctcctggggcccctcgccccacaccgcccgctgcgctctcagcgcggctgcacgttagaaccagctggggtaaacctcccttaccagtcccccgccccaagagctggccatgggagggggcccgagcgctgatttttttgtttggttttttgcttttgtttttgtttttgtttttgttttgagacggagtctctctctgtcgcccaggctggagtgcaagggcgcgaactcggctcactgcagtctccgccttccgggttcaagcgattctcctgcctcattctcccgtgtagctaggattacaggcctgcgccagcacgccagctaatttttgtgggattttgtttgtttgtttgagacggagtcttgctctgtcgccaggctggagtgcagtggcgcgatctcggctcactgcagcctccacctcccgggttcaagcagttctcctgcctcagcctccaaagtagctggaattacaggcgcccgccgccacacccggctttttttgtgtttttagtagagacggggcttcaccatgttggccaggctggccttgaactcctgatctccggtgatccgctcatctcagcctcccaaaatgcgggattacaggtgtgaaccactgccacctcccccacccctaccgcccgagcgctgattttttttttttattattattattcagagtttcgctcttgtcacccagggtggagtgcaatgg

SEQ ID NO: 3334 - DNA, 4001 bp, Homo sapiens
atatctgaacccagcaaggactgttggccactgattcctgcggatccagaagttttttgttgttttttttcagagacagggtctatctctatcacccaggctggggtgcagtggcggatcagagctcactgcagcctgaaattccagggctcaagcaattctcctgccttagtatcagcagctgggactataggcacatactaccacactaggctaattttttttttttaagagctggggtctcactgtattgcccaggctgatcttgaactcctgggctcgtcatcctcttgccttggcctcccaaagtgctgggattataggggtgagtcactgtacttggccagattgttattattttttaaactggattccactaaaaaaacctacagtcagaagactagtaagtcattatttgagaaaactggtcttaacctagacacagtagttttgtgtgaatttttggttggaatcatgacagtatcttggagttaagtgtaaatacacatgtattctccttgactttcattgacaacttagaaacaactattttggaactggaaaaaactccttgcaggtactctcagaaaattaattttcctaaggagccagcctcagtggctcatgcctgtaatctcagcacttcttgaggccccagtgggaagatcgcttcagcccaggagtctgagaccatcttgggcaacatagcaagacgctgtctctacaaaaaataaaaaatattagccaggcatgacggtgcatgcctgtagtcccagctactcgggaggcttaggtaggaggatcacttgagtcctggaggtcaaggctgcagttgccgtgatcatgccactgcactccagcctgggtgacagagtgagacccttatctcaaaaaataataataataaaatttttttcccctaaggtttcccaatgacttcggtaacataaatatatgttgtcctgtattctctcttgtactcccagtatcaatatctggcatgaagcaacaatgctaatgctcagaaaatctgttaaaatatgcatgctcatctttacacagcacatactctgattttgttaaactatcattccactatcaactctggtattcatttctagggcagagtatatagcacaagaatccttgcgtaggcaattagtagcaatgggaaactgatccttatttagtaaatgtttactgagctcctaaatagtaccagcgactcttctgggcactgggaattcaagtatgaacaagtctaacaaattccttgtcctcagagattgtaatgtgagaagagaaaaaaacacattaaaaagatgtctggcagtgttaagggatatgcagaaaactagacagtaaaatgatagtgtgtatgtctgtggagggtgtgccttgagctgcagtgtcaaggaaggcctctctaacgcgacaggtgatcttagggcagaatttctctagacattctctgtatccaaataactgttctatttttatcacagagtagactggactaacgccgaaagccggggcgtggtgaaccagccgccctacctgcaatgtgcggcctggtaggatactgttccagaagtagcttgggcttttcaaatccatccacttgttgcaggcgactctctagttccttaagccttactttcttcattttgttttaaagtatggactcgtagggtttgaaggcacaggatctgcggagaaatctattgaactgggatcttgtttcctccctacccccaaccttctccctttttcagcaccgctggccggacccgaagacgcgccctaaggagacgcccggacgcagggcacggggcgagcctctgacccacctcccggctaacccaagccgccccaggagacggcggcggcgcactgctggagcagcctcaggatccctcgcgccacgaccacgcacctctggaggcgacccgcacctcggccggtgccggaagcgccaggccgcacgcgcgcacgcgttcgccgcccagcggcccggcgccgagctgcagcgtttatcttgagccggggttccgctggccacctgggggcctcattgccccatcccctccgcctgcaaagcctgcgctacttgctgacccaccgccagtcctcgccgcctgtcgcgtgctcattaccctctagtttgccatgagtacctgcgggccctcaaaggatggggaaagacagagtgaaagggatgcgggagagaaagtcacagtcactttgttgtatggcccagagtgactcttcttgtttcccaagtctcggctcaaaaagtagcgatctccattcacctttacctccttctccattctcatgccttattttattgtaactttgtttcccaatttttaggtcatttgtgtcacttgcaattctcacaggagtggtgatgtcaaagaaacccaaagaagagatagtggagaggcagggcgcggcggctcacgcctgtaatcccagcactttgggaggccgaggtgggtggatcacgaggtcaggagattgagaccatcctggctaacacggtgaaaccctgtccctactaaaattacaaaaaaattagccgggcttggtggcgggcgcctgtagtcccagttactcgggaggctgaggcaggagaatggcgtgaacccggaaggcggagcttgtagtgagccgagatcaagctactgcactccagcctgggagacagagcgagactccgtctcaaaaaaaaaaagacagtggaaatgaaaataaaagaataggtagtggtgtcaaatactggaaagaggtcgggcttcataaagtaggagcagaaattaagttgtagcagattgtggagcgaatggaaatttaggaagaagaaagagtaaatgtgaacaattaaacgtggccccggaagcggtggctcacccctgtgatcccaacattttgggaggccgagatgggcggattgcttgagacgggagtttgagaccagcctgggcaacataaggagaccctgtctctactaaaaatacaaaaattagctgggtctgatgacgcgagcctgtggtcccagctgctcgggtggctggggtgggaaaatcgcttgagcccgggaggcaaagcttccagtgatctgaaattgcgccactgcactccagtctggtcgacagtgagaccctgtctcaaaaaaaaaaaaaaaaaaaagaaagaagaaaagaaagagaaagagaaaggtggcctacgaaaagaatggttggatgcttagtaatgggggaagctttattattttttcaattatttttaagacaggaggagacaaattctgacaagaattgagctaatagaaagagaggggttaaaaatgcaagaggatattggatggagttgggatcctgagaaggcaggatccagtggttaagtaaaaggattgcaggattgcgtttaagcctgtggatggacacctctttgcattattataggaagaagaaaaagagtgaatggacgatgacgaagtagagaagtgtctgaggctgctacttctaggaatagcagaattcaaagttatctgttatgagaatcaaatgagttaaaacatacaaagttttagcatgtaaagttaatacataaagttttatttagtttataatttagtgattcgtaaaattattgagcaaatttaacttatcactgttatatgatgatcgtgacatacttaactcatgtagaagaccaggaataacctgttttaattatgtttcattcatttcaaacacaaggttatggattggaaacactcctgttcttctttgttgttgttgttgttgttgttgtttttagagacggagtctcgctttgtcacccaggctggagtgcagtggcgcgatctcggctcactacaacccccgcctcctgggttcaagtgattctcctgcctcagcctccggagtagctgggattacaggcgtgcgccaccatgcccggctaatttttgtatttttagtagagacagg

SEQ ID NO: 3335 - DNA, 4001 bp, Homo sapiens
tggaaactgactgtaagcaaaatgacatataacaaaaccatttttaccataggccaattgatataaacaaaagttaagttcctataacatatttctggtcacaaaaacatcaccaaactcctaaatacaaaccaaaacacttctaatattaaacattgaaataaatgggagctatacatacatttaaggaagattaataaaaacaagtaagatagttatttacctaattattccagttcagggtcgagggtggctgaagcctatcccctcagctcagggtgcaaggtgggaaccaacccttggacacgacgacattccatcgcagggagcactcacactcacactcagacaggaaacacagacaaggccaattcatccagcctgcactgagatgtgggaggcagtaccctggggtacctggtgaaaacccatgcagacgtggggagaaggggcaagatccacacaaacagtagccccggtaggaaattattattttttctcatcaagttatacaaaatgacactgaacgaaaaaatgcgattcaaggacctgctgtactgtactttttgctctgccagtcaggtgcgatcgctggctttctttgagcacctatgaacaagaggtagcatgcccaagtccacgtgggagatacagcggccccacccttaagggacttagagcatggcggtgggacacatgtggtgcaagcttgctgaaagtttagtgtgctgggaactttgaacatacaggcagggctagttaacaaagtatatcttttacttagagacatcgacgaggaatatcttaggccgtccaataagaatgtaagcatttcatattttattccctataaagaaaaaagaatggaggcgagaggaaatgaaatgaagcaattatcgcaaaaccagtcagtgtccccgcaggccacccaaggacaagcctccgggaaagagtaactcaatcccagtttggagggtgaaactaagagtgaatgggaagccagcatcttcctaatacaaaagcacagtttaccgtccccctcagccaacatgcggctgaagggaaagccgcggggcgtacctttagcacgggacgctgctttggggggatcgccctcgacacagcgcccctcccggcacctggccagaacctcccagggcgaaggtcggggccgagaagcttgtgagtaccggggcagtgagggagggatccctaagtgcagggcgcacacacggggcggagacctggaggcggcagcaccgcgcccccagggctctgcccagctagccactcgcagcacagagaagcgcgcccgcaagacagcgcagcctccgcgggccggaggaggcggggccgcggcaggcagaggcagggccgggcaagccctcgctccccgccgcctgacgggaattgtagttcctgggagaagccgggctgcctcacgaggcactaggaactacatttcccggtgagagagcggctccggccggccgcgcggtaccggagcgtcgcactgtcagcggccagagagcctggggcagatcgaaaagggagtgcttcttcccttctctccgcgctctggcggtgcaagcggctctgctttccctcgccccgccgtcgggtgctccctgcccgcctccccgtgtcagctttccctgggccccgccgggaaagtctgggcctcgaaattcgaaggcagcggcggctgcccagcacgggagtgtggggcgcgccactcggcggcccagcctacccagggcccggcccgcgcctccatgggcccgacccggaagcccaacgtgtgcagccggctgagtcgccgggcgctgggctgcttctcgcgcgacgcaggcgtggtgcagaggaccaacctgggcatcctgcgggcgctggtgtgccaggtgaccgccagccggccggggcgggacggagggccgcgggcgcgcggcggccgagcctcctgcggggatgcggttttaacgcgctggggcctccctttatagggtcacatgtgatggggaggaggatacaagcccggaatctgggataggtggtaatagggccaccagctgcttttagttttacgcttcttatgtcttacctggaaacaattattctaaaagttggtcacctcattaagccaaaacatgagggcagagtggaggaaggatgcaaaaagttttaaaataatataggtgacattatgttgctttgaaaatttaaaatctaacttaaagcctaagagttctttcctgaacggaaattctttatgtcttttaggaaagtactaaatttaagaatgtctggacaactcattccaggtcacctatagcctatgagagaggaagaatatattttgacaattatcggcgctgtgtcagcaggtaactttttattgataattttgctgtaattcacctcactgttgatcttaactataatttgtatagaaccacatgcctacattagtgcctagtgaaatagaatgaaaaaaatgggtccgaaataagactaggcagtaaaaaatgcatgtaattttaaaatcttgttaaatctaaagttgcaggtgtcatttttgtaaataccaacttaaagcaaaactacagtgcaggcaaaaccacagattgttcagagtactgtttagtgtttagtctacttataccacagtcaagaaatccagttgccaatcaaataattagatgctgctttggagaattgatggattgtgttttggaagtacttgccttttttttttttttttagagaaattttttcaaacaaaagcctagtatttagagatccaaaatgtttaacagtcagcctcatccacaactgtccaacatgaggggggaaggaaagccacaatgcatccccatatactcattacccagattcaaaaactatcaagatttgccacatttgctttatctaacccacttttccttttgcatgacctcttttaaagcatattctaaacatacatcagtttgcatttttaaaaaaatgagctttttttataggctttattaggatataattcacataccatatatttacccatttaaagtgtacagttcaataatatttaatgcattcacagatacatgtaatcactaccacagttaattttagagcattttcatcacttcaaaacagaaccatgtacctttaagcagtcacctcagtaccaccattaccctcagccctaagcaaccactagtctgttttctgtctgtagattcacctattctgtacttttcatataaatggaatcatataatatatggtcttttgtaactggctttttcactttgcgtgttttcaaggttcatccatgttgtcacatgcatcagaattcctttataaagttgaataatattgcattgtatcaattaccacattttacgtatccgtttatcagttgttagacattggtgtttctaccttttagctattataaataatgctgctataaacatttccatgtaagtttttatgtgggcatttattttcacttctcctagattatacctaggaatggaattggtaggtcataagattatactgtaactgcgtttaatagttagaagaactgccatacacttttctaaagtggtagtaccattttatgttcccataagcagtatatgagggttctgatttttccacattcttgtcaacacttgatgtgtgactcacagcatctcactgtggttttgattccattttcctgatgactagtgatgtcaggcatcttttcttgtgcatattagccatttgtatgttattctttggagaaatgtttggttagatattttgcccacttgtaaatttttttttttttttttacaaaaatccttacatattttagatacaagtcccttatcagatatatgatttcaaatactttctcccattgtgtagattgtctttttactttcctgatgttattgtttgaaacagagaggttaatttttttttttttttttgagacagagttt

SEQ ID NO: 3336 - DNA, 4001 bp, Homo sapiens
tttgctacagttaatttttttaactcgactttttaaaatcaaaaaagtattgtaaaagaaaattttgtatcactaccttaaaccatggctgtacatatataaatacagattgcaaaaacatcctattacaaaaaaatcctcatccacgtaccgcctagagtcaagtcacatgccactagcggaaagtgtaccaattttgggacacaatgattccagcccaactttctcattttctgtattagaacactggaacccagaaagcctcggaagtcaccgaaacaacttgagtcaaactgactgtggttgcaaatgtttatgtacttttcaaaaacaaacatacaaacaaacaaaaacaaaccaaaaaaaaccctccagttgtttattacctactgcgtggacctagttcacacagatgggccactctgcacaccctgtttcagttctttttcaaagaaactatatttaaaaagtcactgcaaacttttaaaactatatattaatgaactttaaaataaggttatgaacccacagaaaagtttcaataccagaagagaggagagcgaagactaaactttgcaattctgaaaggaggcagctctatcagacaggaagggagagaacacaatttccttttggaaaaaatggcaaaaccaatatacaagcctttgaaaccaaaagatagaaggtcccccaagcaatttaattgcatgggaaaagactactaagtataactaaatcgtcctaattttcctaagggtttttcttttgggctctcattagccaacggaattgaggcagaaaaaatgtttttcacgcagggagacaaaacatttgtgatcatcttaagtctctcggtggatgagaggcctgaatacaaatggttctatatttgggcagaagggccagaaaccttttttttttttttcccctttaatgttctccaatgaaaacatgtcacttttgaaagggtgctcttccctcgagaatgccctttgcttctaactttgtgggaggtagacaggggtgttcttttacgatagtaatagtagcacacgtcctgcagaggaaggtcagaagctcggcggaacaggaaccgcagctttcctccggcttcccagctcctggaaggaaacccgagagcaactgcctgcagccacatctgcgagcagggatgctcacagacggacagggtggcccgcagccacccgcgatgccacaacctgggcttccaacaaggcccttcttttccaaaatgtacttgccacaaaacaacacaaaaacctccttttaaacaaggcaggtttaaggtcagcctgtaaggtgtcagggccttggcagggaaggatgagtgaagacctgcaaagcccggcgttcacgctcacgggactcccgctgcttcccaaacccctattttccagtcggaaaagtccgggttaatacacaaaaggagacgccgaaccacacaaggtgaagaggttcgcccaaaaacacctgcagaagacgctcctctccctcgctctcctcggggactcaaggtcccggggaggaggaaagaccagggttgaaggcaagaggcccggggacgggactcgggtcagggagacactaccgggggggccggggccaccgcgggtccctgttggccggagggtctcggcggcggcgataggcctggcagccagctcgggcggcaggtcgcgggtcgggaagacgtcaacactcacccctgggcccacaggagggtcccggcgaggacccccgccctctggctcccggggcgctcgagtgggcgctctcagaggtggttggctgagagcacggaggcgcccagggacagcaccggcggagcggcccgcagagggccagggcagaagcgcgaaaggcgcgggctggccccttctgggagccgtagcggaagagtgttcgtggtcatgtgacgcggaaaagggcggacgcgtggcccacgcactggaacggctccacggtaagcgatgcgcagacatctttgttgtgggcgaaacgaggtgaccgcaggtgactcctcttgcggttaagtttaattcacacttcggctttattagattttgtaatctttaagaacttggtgtttgcaaggtaaacctttggtagccaattaaaacaactttttcaggaccatctggcatgaaaatttctatgctgtgaggcttaggaattctcatatgtaaatcagctccgccagtgattccatgagttccaatttgatacttcttaagccctcggttgatcagaccttgtcttccatgagaattccgggagaggggaagttaagtttcacagtagttggcggcatcgtttagctttgggagagcactctctgcttctgaacacccaaccacagactcttccccccaggaagcccttgcttagagcgggggaaaaatggtacagtgcttgtcagtatgggaatgtactgaggccaaataatgtgatattttatatgccttggttttcacaaacacctaaaggtgtacacatgacttatgtactcccctacgatctaattgatattctagagatgttaccattcttcaaaatgatttgggaagccctctgaattgcgttcttgggcttcttaacactggtgtagggaaagtgaaaatatttcctctcccctcttggggtcttggctgggcctaagaattaaactgatgaggaaaagagtcaaactctaaaatatttgaagagatttattctgagccaaatgtgagtgaccatggcccgtgacagagccctcaggaggtcctgagaacatgtgtccaaggtggttggggcgcagcttggttttatgtattttagggaggcatgagacatcaatcaaataaatttaagaactacattggtttggttcagaaaggtgggacaactcaaagcaggggcttccaaggctgtaggtaaatttaaacattttctggttgacagttgaagacctgggacccatagaaaggaaatgttgaggttaaaataaaagattgtggagaccaaggttcttttgaagtcttatagtggctgcccttagagacaatggatgacaaatgtttcctattcagatctttaaaaggtgctagattcttacgtaatctctttaggattgggaggacctggaagaaaatgatctagctatgttaatagaaattctatgtagatgcagattttcccccaacaaaggacagctttgcagagccgtttcaagatatgtcaaaaactaaaaaaaatgttttgcggtaaaatattttgattttgtttcttgtctcgttatgccagtgtcagattggaaagtaagtcacaatatatagggttaaataaaacccatctgatgagaatttatggattgtagggcatgaatccctaggccccttagataggaatttgagcaagattaaaaaaaaaatcagagcttagtctccactgacgtaaaatagagacataaaacataacaggaggaaagcatacaaattttatttagtaatttttacatttacattggagccttccctagaaaaatggagacccaaattaacagttggaccctaagtgcttttgagtctccatttttctagggaaggctaaaaagagtagtaaattgtgaaaatgtgagaaaacaaacagatttgggttagtgcagttaatgcagaagtgactaagaagataaaggttgttgtaacaaagtggaaatgaaaatcggtaagtttgtgcagatacagctcagctttgactccatgtctctggtgttgagaacatctcccttcctccttatacagggagggcacctttcatacggaagttttatctcctgctttcaggaaggaaaaaggaaagccacagtgctctttttgcattttttttttaagtgcctttgactcgaaaataatctttatgccaaagtgccatattttgggttggcatatcctactattgacagagcagaagcactgccattttaaagtgccccttgatcaaaa

SEQ ID NO: 3337 - DNA, 4001 bp, Homo sapiens
taatttctgccatctcagcagcagtgggagaaggaaatgctgccctgctcaccctgtgggagaaaaatttaaagacagggctgactgttaaaatgtcagtctcctctacgcagtgaagttagaagacaataccttatagaaagagcgaaaggaaacttctcatttgcaagtactgaacacatacaaagcaaaaataaaagatgaaagaaaatgtcttcctcaacaaaatgccttcttaattatcagctgaaattgtaccttgaggatattgcttaggagcaaattttttaaattattatagaattacaacacaaatgtgtacacacacatacacacatactctctgcgtaaacatgcatgctgcttgtaactaaaaaaatgcctgcaataaaatttaaacttaaaatttcctcatcaatttgagggaaagctgcttggactttaaaaatataaaattaaaaattactgtcatgcatgaaaaaataaaacctttaaatgacaaatgcatctgttattcaaaacctttaaatgacagatgcataacattaactctgaatttactaaaaaagaagatgcaactccctgaaaatcacatcatacaaactaaaacttctcctaatgactgagatgcaatgaataccaaatttagaatttgtaataataaatcctcatgtttgtattcatttttggagggactgaaagttttacactattaatctgtatttaatatcatatttacatgtgtttttttttttaatgcagtagaaagaatgttgccgccaatacaaaagctgataaaaatgtaaaagagcatggttagcctacggcagtaagctttaaagccattgtctctcaaacctataataccagctcaactgaataaaatttcactgaccttcctagtgatgtgtcactgcttgttcctttactcatttaaatacagtaaatacaggtctataatagctattaaaatactgctaccctgcagttcagtttactttacacaacaattcccctacacatttgaactttttttggaggtgtacataacaacacggacactgcttttccagctgtaaaaaagaaagaataaaaatcagtatttcaacaattcatttcataagaaaactatgaataaaagtaaatatctacgtaaaatgacttttggatttgaacatggcttagggcttgatttgagaaaccaattgttaaatctatcctaagaagagtttttctatacctcaaaaatcataaagacagttgtaagcacagtcactgtcttatgattttgcaaacaggatacagagaagctgtatcaaatgtatatacaaatgtgaagtcagattcgaagaaaacaatactgccataaaactcctctaatcattatactccaaaggggaaaaatccttttttaagactaagcccaaatgaataaatcatgaagggaatacaaagggtaaaaagtaaatgtaactgaggcagcctacatatttgacgtctaatggtttctttaaataaaaataaacttcaaaatttagggtaaacttcaaatggaaattacactaaattttcagcaaagacactatatataaattaaagacataaaaagttaaagacagtatacatgactttaccatggctaaggtatttcctaaactccatgctggagatatagccccaccctaagcccccgcctcactgagatgcctaggagagctcttagaggttgctcaggacgctcagccccagcaactggtttgactatgactgctaactcacatcttttattctttatcaaaaaatctctggggacatagatctttaaggatttggcatgcagacgatttaaagactaagaaagtaagccaaaagggaccatttttactcacaaatgtgtaacaactactgcttgctatttggcactatctgcttctgtgcttcatattaaatcctttaacttgcttcaatgtgcatgtgctggattgagagccacttttgtccctggggaagaaaaacaggggctaattgagaaactagatgaaaccactattagggattcattactggaaattctccaaatagtaacagtcacaaagatgcacaacctgacatcaagagaccagtaagaaaataaagaaagaaaaaaattaagcttaccaccaatcttagttccacagatggggtcctacaactattcattagttaaggcaatataaaagactagctctgtcattgtttctgatttgtatttagaaaaatgtggcagatgaaaaatacgtaagtttaaatgaatctaatacttacgtatatatatgcatataggtacacatatatgttaaagaagaacaaatgaattggtttttttttttttttttttttttttgtcacccgggctagattgcaatggagcttcctgaatagctgggactacaggcatatgccaccacacccagctaatttttgtattttttgttgagacagggtcttattatgttgttcaggctgatctcaaactcctaggctcaagaaatcctctggccttcgtctcctaaagtgctgggactacaggtgtgagccaccgtgcccggcctgtttaaattttcattcacttacgatgttaaaattttgaactagtaatgcatgtactcggtacaaagtacgcaagctatacagagaaaaggaagtgtcccactttcaatcctatccttaaccacccaggttcccacaggcaacctttataatcaatttttgtgcatcattccagatgagatgctcttctaatacttgcgtgtatctcaagcatagcaaaagctcatattcagaactaacactgaaaaaagctacctcaaaaagattatagcctttggccattataaattgaagttttataataataaacgagaaccaagtggctagaacctcagtatctccttgaaatgtgctttctctgcattccattcattgcatttcagtcttacgaactttctagtagtacatctcataggtctcactactatattccattctatagcaacatcttttcttacgagaatatctgagtttgtaaaaaactagtgacttagaaaataaaggtggatgctgaaatgccaacttctggaaaaagccaagttctcctgtagctgaactacttacatttaaaaagtaactggatttctactaagatttaacactgtattatcccaattattgggttttctgcttaaaaccaatcaaaatctgattttttttctccctcgttagactgtggcatttctgataatatcttttggcaataaataaacgtctcatttggtgttgatatgttaattccagaagttttgtaccttagaatccagtaggcaaccagtacgtgattctgttacataacaaacgaggcaaaatctctcttagaatcacagatgatttcatatttctactttctaagcccagtggttcccaaacaccagtaactaacttgccaacttcatgggttttttttttcccatattcacagagtacattaactttttgctacagttaatttttttaactcgactttttaaaatcaaaaaagtattgtaaaagaaaattttgtatcactaccttaaaccatggctgtacatatataaatacagattgcaaaaacatcctattacaaaaaaatcctcatccacgtaccgcctagagtcaagtcacatgccactagcggaaagtgtaccaattttgggacacaatgattccagcccaactttctcattttctgtattagaacactggaacccagaaagcctcggaagtcaccgaaacaacttgagtcaaactgactgtggttgcaaatgtttatgtacttttcaaaaacaaacatacaaacaaacaaaaacaaaccaaaaaaaaccctccagttgtttattacctactgcgtggacctagttcacacagatgggccactctgcacaccctgtttcagttctttttcaaagaaactatatttaaaaagtcac

SEQ ID NO: 3338 - DNA, 4001 bp, Homo sapiens
ggatttgaacatggcttagggcttgatttgagaaaccaattgttaaatctatcctaagaagagtttttctatacctcaaaaatcataaagacagttgtaagcacagtcactgtcttatgattttgcaaacaggatacagagaagctgtatcaaatgtatatacaaatgtgaagtcagattcgaagaaaacaatactgccataaaactcctctaatcattatactccaaaggggaaaaatccttttttaagactaagcccaaatgaataaatcatgaagggaatacaaagggtaaaaagtaaatgtaactgaggcagcctacatatttgacgtctaatggtttctttaaataaaaataaacttcaaaatttagggtaaacttcaaatggaaattacactaaattttcagcaaagacactatatataaattaaagacataaaaagttaaagacagtatacatgactttaccatggctaaggtatttcctaaactccatgctggagatatagccccaccctaagcccccgcctcactgagatgcctaggagagctcttagaggttgctcaggacgctcagccccagcaactggtttgactatgactgctaactcacatcttttattctttatcaaaaaatctctggggacatagatctttaaggatttggcatgcagacgatttaaagactaagaaagtaagccaaaagggaccatttttactcacaaatgtgtaacaactactgcttgctatttggcactatctgcttctgtgcttcatattaaatcctttaacttgcttcaatgtgcatgtgctggattgagagccacttttgtccctggggaagaaaaacaggggctaattgagaaactagatgaaaccactattagggattcattactggaaattctccaaatagtaacagtcacaaagatgcacaacctgacatcaagagaccagtaagaaaataaagaaagaaaaaaattaagcttaccaccaatcttagttccacagatggggtcctacaactattcattagttaaggcaatataaaagactagctctgtcattgtttctgatttgtatttagaaaaatgtggcagatgaaaaatacgtaagtttaaatgaatctaatacttacgtatatatatgcatataggtacacatatatgttaaagaagaacaaatgaattggtttttttttttttttttttttttttgtcacccgggctagattgcaatggagcttcctgaatagctgggactacaggcatatgccaccacacccagctaatttttgtattttttgttgagacagggtcttattatgttgttcaggctgatctcaaactcctaggctcaagaaatcctctggccttcgtctcctaaagtgctgggactacaggtgtgagccaccgtgcccggcctgtttaaattttcattcacttacgatgttaaaattttgaactagtaatgcatgtactcggtacaaagtacgcaagctatacagagaaaaggaagtgtcccactttcaatcctatccttaaccacccaggttcccacaggcaacctttataatcaatttttgtgcatcattccagatgagatgctcttctaatacttgcgtgtatctcaagcatagcaaaagctcatattcagaactaacactgaaaaaagctacctcaaaaagattatagcctttggccattataaattgaagttttataataataaacgagaaccaagtggctagaacctcagtatctccttgaaatgtgctttctctgcattccattcattgcatttcagtcttacgaactttctagtagtacatctcataggtctcactactatattccattctatagcaacatcttttcttacgagaatatctgagtttgtaaaaaactagtgacttagaaaataaaggtggatgctgaaatgccaacttctggaaaaagccaagttctcctgtagctgaactacttacatttaaaaagtaactggatttctactaagatttaacactgtattatcccaattattgggttttctgcttaaaaccaatcaaaatctgattttttttctccctcgttagactgtggcatttctgataatatcttttggcaataaataaacgtctcatttggtgttgatatgttaattccagaagttttgtaccttagaatccagtaggcaaccagtacgtgattctgttacataacaaacgaggcaaaatctctcttagaatcacagatgatttcatatttctactttctaagcccagtggttcccaaacaccagtaactaacttgccaacttcatgggttttttttttcccatattcacagagtacattaactttttgctacagttaatttttttaactcgactttttaaaatcaaaaaagtattgtaaaagaaaattttgtatcactaccttaaaccatggctgtacatatataaatacagattgcaaaaacatcctattacaaaaaaatcctcatccacgtaccgcctagagtcaagtcacatgccactagcggaaagtgtaccaattttgggacacaatgattccagcccaactttctcattttctgtattagaacactggaacccagaaagcctcggaagtcaccgaaacaacttgagtcaaactgactgtggttgcaaatgtttatgtacttttcaaaaacaaacatacaaacaaacaaaaacaaaccaaaaaaaaccctccagttgtttattacctactgcgtggacctagttcacacagatgggccactctgcacaccctgtttcagttctttttcaaagaaactatatttaaaaagtcactgcaaacttttaaaactatatattaatgaactttaaaataaggttatgaacccacagaaaagtttcaataccagaagagaggagagcgaagactaaactttgcaattctgaaaggaggcagctctatcagacaggaagggagagaacacaatttccttttggaaaaaatggcaaaaccaatatacaagcctttgaaaccaaaagatagaaggtcccccaagcaatttaattgcatgggaaaagactactaagtataactaaatcgtcctaattttcctaagggtttttcttttgggctctcattagccaacggaattgaggcagaaaaaatgtttttcacgcagggagacaaaacatttgtgatcatcttaagtctctcggtggatgagaggcctgaatacaaatggttctatatttgggcagaagggccagaaaccttttttttttttttcccctttaatgttctccaatgaaaacatgtcacttttgaaagggtgctcttccctcgagaatgccctttgcttctaactttgtgggaggtagacaggggtgttcttttacgatagtaatagtagcacacgtcctgcagaggaaggtcagaagctcggcggaacaggaaccgcagctttcctccggcttcccagctcctggaaggaaacccgagagcaactgcctgcagccacatctgcgagcagggatgctcacagacggacagggtggcccgcagccacccgcgatgccacaacctgggcttccaacaaggcccttcttttccaaaatgtacttgccacaaaacaacacaaaaacctccttttaaacaaggcaggtttaaggtcagcctgtaaggtgtcagggccttggcagggaaggatgagtgaagacctgcaaagcccggcgttcacgctcacgggactcccgctgcttcccaaacccctattttccagtcggaaaagtccgggttaatacacaaaaggagacgccgaaccacacaaggtgaagaggttcgcccaaaaacacctgcagaagacgctcctctccctcgctctcctcggggactcaaggtcccggggaggaggaaagaccagggttgaaggcaagaggcccggggacgggactcgggtcagggagacactaccgggggggccggggccaccgcgggtccctgt

SEQ ID NO: 3339 - DNA, 4001 bp, Homo sapiens
ctccaagtcctgatcatggctaaggagtccacccagtcggccccctacccacctcacctcaaatagctctccttcagccacgccgggctccttcctattcctcaaaatcatcaagtctgttgctgcctcagggcctttgcccttcccattcctctgcctggaaggtgactccttgtcattctggtttgatgtcaccagcttaaatgtcacctcctccaagaggcattccctaacctctcacctctctcagttgtacttaccgcctgctatattttcatttagttcctgcctctccctacaggaatgtaagctctctgagagcatgaactccaccttttatttatcatggtgtttccagtacctagaacaaagcttggtatacagtaggtgcttagtatatatccgttgaagcaataaatggccatgaagaccctgtgtaaagtgctgtttctttggaagaagctgggctcttttctcatcgtttgctgggggctggagggagtggagatgacatggcttcacccatttccacatcttgcaggacaccccagcaggctcttgtgaagggaaggtctccccagataagggtttatcacactttgcacactcttcctacccacaggggaaaaccacactgggggcaggatgattcttttctgacatttgtgtgaacatcatttcagcttccagaaaactttaagaacaggcagaattcaacgtgacagtccccctctccccctaatggggactcttgtatcccccaaaacaggcctagcaagtttttagaactttagaaagaacttccaagtgaagccagggatatgatcccatcttgccgtcttgaggatgacagttttaccgaaagtcataaaagcccggtacagctgtacagtgagctgtacaaggagaagccccttgggaggggcggctccgggcgaggggcgcagccctgctatctctagctgcgtgacccagggcagggcacctcggtctccttggagtgaccggggctgccacccctcggagagtcgtaagaggattccacgccggaacttcatcagcaatgcgagtgtttccctcttgctgttaatctcaccctgaatttctaagtttccctgggaagtgagagtccccggagagccccttcatctcacctcactttcttgtgggatgcaatcctgtgctcccaggtgcctcgtaggaagccctgaacaggctgggggctgaggtggtcaggggaggccacagaatgccctgggcacgagcagggagcaggcgcgttcagtgaggcccaggaagccccaggccccttgctccgtccagcacagccccactggccagcacggcccggcggcatcgggcaagggacaaggggccccgaagaccccgccgctcccacctgccctcctcccttcttgtcggagcccatggccaggaccttccctgaggctgcctccaaggggagcctggtgcctgggcgaggccagggtctgggagggaggccgaggccacagcagctgcctgaggtcgggaaggacgcagcctccccaggcgcttcagaaagccctgcctgcccagagctcggggaccccgggaggacctgcggtggcacggacaagacccctaagccgggaatcaggacagcaatgaccacgcatccccaagttacttccttggctagggctaggcttcccgtcctagtctctttccggcgccggcacctaccagcctccccgctcccagccgtgtaaccccgcgagggcagcccctgagctggcaggtttgggccgagcccctccgggctgcccccagctggaaaaggggctgcgaggcgacgccctggagctccccgaggacgcagccccttcccggtccccgccgccccgctcacctctcgccctcgcttggcgctccccgggccgggctctggggcgtgcggctccggctgcggggaccccttggcggctggtgcagggggcgccgccattgccaccgcagcgccgcccgcggccgttgccctcggggttatcgcccttgggaggggcggttctgggctaggggcgcggcgcgagtggctgctggcaacgcgggggaaacgcagaaaccgcgaagggcaccccaaagggaaacagcgaagaaccaaaatccgcggggggaaaggcccggcaggccctcaggaccgttctccttggggtggatccccgggggcgtgagcgcccgcagacggcggccctgcgcgctaagggctccgccagaccgctggggtgaccgcgggcaagcagcagctcccctgcaaaatgaagcaagaggcccgctcgttcaggctggaccatggctgaacaggcattccgccggctacacatgatgcccaacgcctgaaatatacattgtcgagtctcctatacagaccacggggatggccagtaactaagttctggccagcgaataaaagcaggtggcacaggccaacattccagaaaagtccttaaaagggaaggggggtgacagcaggtagctagtcagcctcgaaaagggcaggagagggccacgcttccaaccaggtacgtcaggcaaccatcaggcgacagtcaggcggttgttatgctccctctaaaatgatcattgatccagcggggccagggaaaggcagtctcccaatagatagagaaaacctgaaactggtgatcagcttctcggtaagatctcaggagctgggcaagtgggcttacacaaattgcggagtttaactgacatgtgaccctcgaaggacaccggactggtaagggaagaacgcctccagtgagcatgggtacaactccagtatacacagtgtgcacactcccctcccaagtgctggcagaccactgcccatgcaggcaggcctcccaagggaagaatcaggggagaagggatgcaagaccccagaagtatgccaatgcataagaccccaggtcaaaaggtcaaactgtgcgcttctttttcaggtcacccgcttggccctcttccaagtgtactttccttccttccatttctgctgtagagctttttaataaacttttattcctgctctaaaacttgcctcagtctctccttctgccttatgcccctcagtggaattctttcttctgaggaggcaggaactgaggttgctgcagacccatatagattcactcctgctgacatattttggtgccacgtgactcagataccttccaccagtaacaggggtacacattaactaaaaatgcatcatagacctagaatgtaaaacttatgaaaaaacaggagcaagggacaggcacggtggctcatgcctgtaatcccagctactcggcaggctgaggcaggagaatcgcttgaacccgggaggcggagattgcagtgagccaagatcgtgccactgcattccagcctgggtgacagagggagactctgtctcaaaaacaaaaacaaaaacaaaaccaaccaaacacaaaaaacccagaagcaactcttcatcatattgggccaggcaattgtttcttaggacgccaaaagcacaagctggatgaactacaaaagttttcaaaatgaaaacctttgtgctgtaaacgattccaacaagtgggtataaagacaacccacagaatgggagaaaagggatttgtattggaatcaactttcacaactcaacaattaaaagacaatccaattctaaaatgggcaaagaatttggatatttctctaaagatatacaaatgaacagtaagcacatggaaatacaaatcgaaactacagtgagacaccatttcatatccacagggtggctgtaattaaaatgagacaagtattggggaggatgtggagaaatcagaacccctatacactgctagtgggaatggaaactagtgacagtcctttggaaaagtttggcagtttctcaaagtaaaacgtggaattaccacatgacccgcaattccactcttaggtgtatacaccctacagaaatgaaaacatgttca

SEQ ID NO: 3340 - DNA, 4001 bp, Homo sapiens
taactctacctcttactgattatgtggtttgtgtaagttgcttaacccttctgagcttcctttttgtcatgcacagaactaggggaaagatttatcttacagagattgagatactaaatgtttacaatggtgtcttgaacataataagtacccaaaaaaatgccttaatactgttaatagtccagacactatatatgatggaattggtgatccaatactcacaccaccaaatacctgtgaactctgctttttgtctttgtgttttatttgccttcacgcttttatatttatttgtatagagatggaaagtgccttagaaataaactgctgtaaacatgaaggacacacaactacttagtagctttaatgcattattgaagtgatgttctctcctcctgtttccccagagcatcctgcactgggctcattaacaatgtcccatccttcccctaagcaatcctaaattttacttacacctcgtgataaatacaagccatctgactatcactaaacagctgaccatatcctgcacctctgctagcagcttgacgtgtcaaaagccaagcttcccaaagaggaggatcctatccttttacttaacaaggctaaaacagatgcatacacttttagctggctagtgcccacatcttggggaaaggacctaccaagtacacatctccttttattacatattttagtcaactgtatgtccacccacccttcacattcatctatacttaagaggttagatttctagaaaatcatggacttctagaaggattaggggaaattttggccactataatatccaaccatcctcttttccatgtgagaaaactggggctcaggaagatgtgacatgcccaagcacacacatctatttaaataccagttgggattagaaccccaactctttaagtcttttgcacactaataagcaaggtattatatgttccagtagttctgtgaggtgcttattcaatctttttgggatgaaaagaaacgtccgtggttgcgaatgcataaaggtaattaacccacctgtctgtccatgtggggatgggattaacgagggggaaagttgcgtttgtatttttccaccatcttacctaaatttgcaggaaaattgctctatgggcaataaatatgacccagaaagactagcaacccccagtagtatctcaaaagggctccagagacatgttagaccaagtggaagtaaagcacgaggtgggggatgtctgctaggatggtggctggcagagcagaggtatttttttttccgtatttattaacctgggagggcagacgttgtcaatttcctcctcctgccacacaagtggccgcgtccttgtcactggggctgtgtggaggttctcacctcctcctttttcccagggatgtttatggcgagggcgcgggtcggcccgggcggaggaggacccgggcatcggcgctcaccctccgtccccacccgcggcagcagctgtgggcgcccggcgagggctccctgggcagcgcctttgttttcccgactccagttacgtttgcggaagtgctgccagcacggggcgcgctgggggcgcaggcggcagcctcccccagcaccccacaaagatgacacccgacacggaagccgggggagggagggagggagggagcggcgggcgagcgaggcccgagcggagacagcggcgcacgctgggctccgagccccggccccgaagcccctttcccggcagcaggtgtgcgcggctgaggtgcctacccgccctccggctgggcccgtgcggggcgggggaggccagggcgggtctgcgagccccttctccgcaagccgggcccgactcacctgctgcggcggcggcagcgctcagctgcgcggggcgcggggagccctgtccccggagcacggggcggcggctcggggcgccggggcggcggctgtcggggcagcgcgcaccatcccgggctgctcgcgcgctcctccggggctgcgacgggctgggcggggcgcggcgaggcgaggcgagggatgcggaccgggtggggccacggaggacggaggcggagggcccagcgctcccgccggcgcgaccttctctcccgctgcggctcctcctcctccccggccccggcctcacagtcgccgccgccggtcactaccggctggacccgtttcagggccgggcgctgaggaccggccgccaggtgcagcgctccgcctcctgcggcggcggcggatgcgtcgactgcccgctcccggcctccagcccgccccggcggcccggagggacacctgaacccagccgggcccggggagcacgctgaggaggcgaaagcactgggcgaggctccatccctaccgcaccctccacccccccgcacccccaagcgacttccgctgagcccccaggcaatgagtgcgggccaggaaatgtgggggaaaatgtactaacatcccttattccttgagcgccttttaagtggcacacacaatgctaatgctgtcagtgcgttatctccgcgtctgtcccaggttgacccgggagggaggagccggcggggtgcgggagacaaacgatctgtgagtttcggggctcaccaagaagggggaacactgagacgaaggcaccctttttcaggaagctgctactggcatcttgctgaaaagccaaccgtgtgtgtcgcactaagaatataattaaagttgtatttctagttaaacacgcagagagttgggggagagtggagtattcacttggcaagtatgtctgtgtgcctgtgatgggctttgggggatgccacatcctgttcttaaggagtttattgtcttgttctggcaacaacgacaagagtgacaatggtagctaacggcaacaacgacaagagtgacaatggtagctaacgcttataaacatcgattatgtacggggcactgtgtaggtactctttgagccttataaccctataggtgtaggaaacgttattcccattttacaactgaggaaagccgaggctgaaagttaatgtgacccatccaaagttactaaacagcgaaagggaaagcaggcttcttttgtctccaggctttaagctcttaaccgtgaaatcatactggtaagaatttgataggccctgaagtttctgaattttgagtccctctttaggaagaataaaacaattacaaatacgaagtttctagggccccttcctgagcttatgaagggtctctgaagcttaaactatagtagcctcatgctaaatccactttcaatattgacgtagatattcaatcatttctttctccaggcatttctttctcctgtcaggaacacgagacactggtcccctccttgaaactcttcccttctcttcttttggtgctccgtaagtgttggattttcctccttgaaactctcccctcctctgccttctgtgacccacaagtcttgggttttcctcttcctctctggccactcccctttgctccacttgagttttagttttccttgggttttgttctaggctttcctttcttctgattctgtttgtttctgcgaattctctcactccttggcttcaatcacagaatatttgagggtgctccaaaagccctctctcggggtcagcttttctcctgagggccagatccttatggccagttgtccagtgggatgtgtcacaggcaccccaacctcactaagtgccacgtcaatgtttctttaccttctgttcttcccctactcgttttttttttttaagatggagtctcactctgtcgcccaggccggattgcagtggcgtgatctcagctcactgcaacctctgcctcccgggttcaagtgattctcctacctcagcctcctgaatagctgggattacaggcatgtgccaccatgtctggctaatttttgtatttttagtagagatggggtctcaccgtgttggccaagctggtctcaaactcctgacctcaaatgatccccccacttcagcct

SEQ ID NO: 3341 - DNA, 4001 bp, Homo sapiens
ctgcgaattgctttgttttattctaatactaaaactactttgaattctaagtcaaattctctgaaccctagtctggactttccaggtaagggctcaaatgttttcatctggctgaaccagcccaagtcccttctgagacaggacagcagtagcttgggacccataactaaaaaggctggatgtcagccaactcctctccaagaaccacccatactcactggttgtgaattctaggtgcctagactgaaaagtagaagaagcatccccatgctgagaatgaactactagattaaaggaatagtggtcagaaggagtgccagtctctgaagttaaaggcatggagctggagggtggatcctgcaatggcctagaggcagagaaatcctctctaaaaagccgccctccctgaagaccttgtgtttctgggcttgcagcaatttgatgaacatgctttcatggtgatcttaactattaactcaacatagagttgctaccaactgaacgccttgcatggaggtggtggcatggagagtgcatgaaactgggagaagtggtggtcttgatctgcatctgggcagaaaacgatgactccctgccagggcccagtgccatcagatactatcttcaaggcctcaaaggcagccttctcccattgacacttatcgcagcttccttaccctcaagatactggattagctcacactcagggctgaatcaggcctagccttggaaagggaggagtgcagaggtggatctagggttcttgcagataatggcccagaaactaccaacatcagcttacttgtaagactgaattcttctgtggcagaactgtggattacaatagtgaagctccgcagcacctgccacatggcaggtgttcagaaatgccatgaatcagcttactaaactttccattctacgtgggaaattagcactcagggagcaaaccaggacacgcgcgcgcgcacacacacacacacacacacacgatgaaaccaaaccgccattgtgcaatgcacaccctttgtccaaaggtagatgggtacaattcactctgatctgcatttttaaacattcaagtcaaccgagagctctagtgaaaatgcacccaattctgtacaagtggggtcatcaacagcggcttctccagcctggtctggtaaaaaagcaaaccacaggcacacacatcatgatgaaaccaaacctacgctgtgcaatgcgcagtttgtcgaaaggcagatgggtaaaattcactctgatctgcattttttaatatttaagtcaaccaagaatcctagtgaaaatgtgcctaaatctgtccaagcggggtcaagagcggcctcccctgcctgttctggtaaaaaggcttgcgtgtccctacctcaccagcagccgcacagcagctgggcttttccaagcttgcccacacccctgttctccgccctgcaaaagctgcacctgccacagcatttaacacctggtcacacctgaggttggtaccagggcttctcaaaaggcagggaagggaagacgttccgcgaacggggtgcaagagaaagcgcgaggggcaataaagcagtgtggccagatgcagactgaagtgggtgatagggcaagaggagagcttgataggtagtgaggcactcaccaggcggactgcgggttcccactccctgggagctccccggaagctccaagaaccgcctgggtccccaggcccgaacacagtcagcacttgctcccagcccccacgctcgcactcaccaagaagcccaccaagtagagacagagcaggaagcggcgggctccgacggcaccggagtcggcagcctccgcctcggttcctgtcttctgctcctgtttccgctctgcggtctccgagaccagcctcggggccgagttcatgtcccagtgacccccaagctccatacccgcgccggccgggggtcggacgcagcagcagccgcggacctaccccgggagcccagccccgccccgagcggaagcaggaggcgcgcgcctgcgcagagagagggggcgggtgctacctggcagctccgcgggtgcgtggccggtgctggctgggagttctggtctcaggcaaggtggggactgggcacatcatcaatacggtaagcacacaccagtttgtgatgataatgatgatgctctttgtttcctctgggtacagaccctgctgcccctatcgttggaggacaggagggaattgtattgagcttcacttcctcctatggagttgtgctaggaggtgaccaactccagcttgaagatccacagaccctggccaccagttggttgtgacagacctaggatacgttaacgtggctctccaagctttcgtttgcctatttaaaaagcagtaggaaataatgtagtccaacttctagaggtgtgagaattctacacatgcttcttaagatcctttctggtgcagtgcaatgtgaacaaaccatagatggtctatgcctgagttgagattacagtctcatggagtaaaaataataagcacgcagtaaataaacataaataaaaatactaaacatgcaatgaaaaagcataaaataagtaaaataatatggtgataatataaagaagcacggtcttgatgtggaaagtaatgaggtggggagtgagctactttagaaaagcagtttggaggaggtgacatgtaagctgagaagagtggaaagaagatatgtgtggctgaaacttcctcatcaaactgagaggtcagcaggagtgcagaccatttaggacccagaaggccataacagagatttggggtttattctgagtgcagtgaaaggaattaagtgagtgcatgacaccaaaagatgcctttaaattacttagcaaagcccatgacacatggtaagtaataaatgttaacaatagtgactagcccctcttttctttagaacttgttatttattcctctttcactgtgggatcaagaagactctgacattttactgagattttgctcaaaatctcaatttacttgtgtaggttgctaattctgagatctgttaaattcagtgttgcaaagtttctcatgggaggtggcactgaatagggagaagtggaatactgatacttagaattaagacatataattgaatccaggtgaaactgtcaatcgtgaacccccaagttattctgagactcctttgcaggagaactagtttgctctcctatagctgaggaaactagtctttttgtgcttgaaattttgtgagtaactcatctgggaaaggcgccttgaaagggctgctcatgttaacccattaaaaccactcactgtggctactaaatacatagctagggtgaaattttagcatgctctggtgacaggtacacattataacctaggaggacatctcatacacgccaaaagaattggaagtcacggccaggcgcggtggctcacacctgtaatcccaggactttgggaagccagggtgggcagatcacaaggtcaagagatcgagactatcctggccaacatggtgaaaccctgtctctactaaaaatacaaaaaatttagctgggcgtggtggtgcgcgcctgtagtcccagctacttgggaggctgaggcaggagagcttgaacccgggaggcagaggttgcagtgagctgagatcgccccactgcactccagcctggcaacagagggagactctgtgtaaaaataataataataaaagatttggaagtctctgctaatatataatcaatgtaaactttagaaacctgggggagagatttctaagggtgtcagacaaaaaaagggaataatataacactaaattaggcagaattcactagtatagatgcatttacaacatataccgatgtaatatgttagcttgtgcagctggaggcagctctagtagtttagtcagttggttgaaatttagactcaaagatggcctatatttaatgatgttcagatgccagagttttcctggcaaaat

SEQ ID NO: 3342 - DNA, 4001 bp, Homo sapiens
aactgaatattgtgttataaaaatagaatgcaataatagaggaaaaacagagatggcctacttaaacattacattcagagaaaatctctctgaagacttgacatttaagcctaaatttgatacatatttctattcaaatgtacaaaactaaacagaaaacattaaaagggctattttaagttcattaattggagctttgtccttaatagcatgttgatgctatagcaatggttctcattttttattagaacccatttagttaaaaacatgttcataatttacccatctctgatcacctccatgaacagtctcccagtccaagcctcacctcgattatggcaacagctttctaagtagtctcctttcttttgcccttaccaaagcagacagcaggatcctttttaaaaaggcaagtcatattattcttgccaaaaatgcatagtcaaaatataatcatgagaaaatatcagataaatccaaactgagacattttacaaaataactgaccagtgcccatcaaaaatgtccaagttcatgaaagacacaaacatggacaggaggaagctaaggcatgagaaccgctaactgcaatgtggtgttccatagtgcatgctggaacagaaaggcgaacccaggcggaaaaacaggaaactcaaataaagtctgtagtttggttgagtattatatcagtgttaatttcctggttttgataactataatatggctacatatgttgttaacatcagagcaagctgagtgaaggagataccctctataatttctgcaactttctgtaaatctaaaattatttcagaacaaaaagtcttaacatataatttgaaatagttatatttatgtagaggagtaacaggtaatttttcattatatatttatgtaattgttttgaacagtatgcatttgtttacttctctaataaggaaatcatcaagaccattttcatttaaaaagacatggggaactctaaaaagttaggaattagtgggccagaactagaccatgtcctaaatcctttcccattctgaaattctatacaataattaagaaaatatttactctagggtcttattcctcatgatttaaaaagaacttgctcaagatttattctttctctaaatcttttgaggagactaaaatacaagaagtgtggtatttctcattcacatgatttcttaggagtacagagaagggatggagagaataaaagaatgataaaaccccagctgagcctaaacctttttcaggtttcaggactcccaaagatcatcagtgcaaatctccaaatttaagtcttagagctagaaataggcacacgttcttaaagatctacgggtgtaacatcctattgacaacaaatattactattcctggtttgtaattgcaggacagaagtgagttcaatttacattaaactaccagatagaatatattacctaagctttactcatcacattttttaaaaagcgtttttaaaagcatattcaaatattcaattagagtttcaactcttataggctatatttggtaaaaacataacaacaattaaataattacctctcctatgaagactactataacacagtccaacttctcttcaggatacaggttatcaataagggaatgaagagtttctatgaggtaagatttaacttctctcttcactgtgggaatgcccatgactattgaaactggaaaaaaaaatagtaattatattaaaaaactgtacaaggacaatacagaaaaacacttctatttcaaaagtattataccctctcaaattgataggaataactgatggatcaaaatatattaagtttcaggaagaaaaataaagaatacaagggcatacctgtaatactgtaattcattttcacatggcttaaccataagaaaaaaagaactgataaaaatgaaagacattaaacttcacactaaaaaatgaatggctgcgaagtataaacagcaaactgtattttacaactaaaacttaaaaacactaaacatatcttaaaaactaatgtcttatctctcgacttcaagcatgtgacatgccgagaagagcacaacatcagttctgtggttgttcttgccaacaatgcataacctcaacttaaccgtaaagaaacatcagaaaaatccaaactggggcaatgctccacaaaataacagtactctttaaagtgtcaaggtcatgaaagacagagtaatgaatggtccccgattggaaaagactaaggaaccacgacaattaagtgaaatatgggatcttgatttggatcctgaaagagaaaaacagcaacaatgaaacacatgacaaaatcggagtaagagctaaggttagtgaacagtgtagcatcaacgttaacttcctggtttttgatcgctatactatggtcatgtagggacactgggtaagggcatatgaaaactttgtgaccaggcacagtggttcacgcctgtaatcccagcactttgggaggtacaggtggtacactgcttgagctcaggagtttcagaccagcctggccaacatggcgaaacccggtctctactaaaaatacaaaaattatctgggcatggtggcgcacacctataatcccagctacttgggaggtggaggcacaagaatcgcctgggaggcagaggttgcagtgagctgagattgtgcccctgcactccagcctgggtgacaaagcaagattccatctcaaaaaaaaaaaaaaaaaaaaaaaaaaaaaaagagaaaactttgtgtactatttgtgcaacatttttaaagactaaaattacagtcaatgttcctataatgcttgttttcaatgcaaatttgtttctacatgattaacatattagggaaaaactggggcataacacatgaatttcacattagcttacgtgcaatttgtcctctgagacaaacaccaggtgaacaacagaaaattgtacccagctgaattgagttcagaaaattaaaccgaaccatgtagaaatactgcatacaaaatgcacgcacctcaaaatacctaccagctgtctcagttcaccacaactatcaaccacacccatccacactgggtgttgcaaccttccatcagattgcaaataacctacctcacagcccttcacaataacttacaagctgcaatccttcagcaacccacttcaacaagcaaatctcagggctttttcaagatggaatgccacatttatgtgtttcttaatcatttaacttgcgaaaaactgtgccactattataattaggttcttatccttttttatagtgtaactgacaaagtgtttgagtgttgtgatcctaacccccttgctctcatttttttgcaccattttcataccacagtgatttttaggaacacttatactgcattatagaggtatttcaaagtaaatttttaaaaattatgccttaaagtcttagtacgctatgtatcaatacagaagtattttaaatatggtaaaaacaacttagtcttaatcatgcaacaattttttggagatactaaaaaatacttataattcacagaattctaatgccaggggctgggtgtggtggctcatgcctgtaatcccagcactttgggaggccgaggcgggtggatcacgaggtcaggagatcgagaccatcctggctaacacggtgaaaccctgtctctactaaaaatacaaaaaattagctgggtgtggtagcgggcgcctgtagtcccagctactcaggaggctgaggcaggagaattgcttaaatccaggaggcggaggttgcagtgagtcaagatcgcgccactgcacaccagcctgggcaacacagcaagactccatctcatctcaaaaaaaaaaaaaaaaagaattctaatgccagaagggagcgtaaagaccatggatctaccaccatgattcttgaggtaagaatactaagatgcgaaaggtttaagggactgccccaaggtctcgtgacacaaccctctctt

SEQ ID NO: 3343 - DNA, 4001 bp, Homo sapiens
aaaaccaaagtaaactattgatatactacccctaatatatgaaaaaaaaaaaatactggatccagtaagttatgaaactctgaagatacttacaataaattctactagcaaataagccctgaaattttgcaagaaaaatatgcgtgttttactcagtaagaatgtagtcatacatttttaattagggtttcccagctaataagtttaactgcacggcacaagtgaagaaactcttcggacaagagtaaaaccaaggatctactcactcttcaattatgagacataattcacaggctggcttgtaagacacaggtgacccacatttttattagtgtccacatttgcaaaaattttaatctagccccttaatattctcggagactataatctaacacgtttgaatctttaacaacaacaaaaaaaggtagtggctaaaattgctagtcatttctccaccctcccaaaggtgaatggaactttcaactctagacatcagactgttttgttagcaatcctttaagggcttcagtcttcattttattattggatacaaaacctttacttattttaaagtgttctctgaaatactcaatatagtccacggctgagaacactttgccgaacgtttggcatcttccttaatcagcatcccacagacagggtagaggtgacttaagaatgaaaggcacaataatccctgatatctggaatcaataaaatccatgacgtaagcctatataactttacacaccacaattgtggcaaaattcatttatttgccatttataaacgggtcagtagttttctttaatacagcttacgtaatgtcatcgcccagtgcgttttcgggtttacacgtgtgggttaaagaaatctatgtcaagataacctgttcatcaaactgttttttaaacattcagaaaaagaaacataaaccacaaaacgcatatttttattctaaatttacagtctacgttccaacgaacgactgtcattatcttttatcaaataatctgtccaacagcaaaagcacaacagcaaaatacgtggaaagcattcaaagcatacattgtgcctgcttctattttccaatgcggaatgtaggcaatgaaaccgctccagagaaacacactgttgcgaggaataaaggcgggtgtgcaagtggctcgactgccagctcagaaaagctcgcctccgagatgtcacctggcacacttggtggagtcaccgagacccagcctcagggtcctactgcagcttcctcattacggagagagctgaggcctggggaaacgggggctgctctttcacgcgggccccgcagcccttcactttgtgtgaaaattccctgcgaaggctgcacggccggtcccctcgggagcagcccctgcccctgcgcctcggaccgtccggccccgcccacctgccccgcggcccccgcgaaagcgccgactcccgcgcagcccccgggtcccacaggcagctgtccctccccctccgcaccccccggatcagcactttgctccactttcccccaaagtcgccgagccccgccacgccggggagcgccaggaacgcaccaggcgccgagccggccgcagagagggcgcgcgaccccgaggggtgcgcggtgcggggcagggacgctgggaggacggcccggcccgcgccccgccgcccgcccccgaggcccagccgctcccggagccggccccgcgcccagaggcgccaacagctcccccgcacagagctccggccgggccgcggcgcagtaggctcctttaccagcaggtggatctcccgcagcccggggccgccagcccggccgccggcgccgcccccaactcccgcgccctccgcgcagccgccccgcgccccctcccgcccccgcgcgccgccgctgccgccgcgagcccctcacccgccgctggcgtcgccgtgctcccgcggctgccggcggagctgctgtagccgccgccgccgctgccgccgccgctgcgggccgccccgcccgccccgccggctccgcccccgccgctggagcgcccgccccgccccgccccgccgggccgccccgaccccgccagccattggccggccccgcgggccccgcgccccgcgccccgcgccccaccagtggcccgcgcgactgtcacttaggggcgccgccacgcagcctgcggagcgttcgggaggctggcccggctcatcggtgtcacggcgaggtccggagcggagccgcggtctcgggtcccagctctgggcgccggcctgctccccgccgccccgctgccacatctggctgagatcctcccggcgcgtgcagggaccgctccggcggccaacaaaggcccgggcgagccctcggcctgcgcctcggcgcgcgacccgaccacccggggctgccccagctcccaggcgcctgcctgcctcgacccggccccttcccagcggcgcgccccgctccgggccgcccaaactgggcggcctccccggggacaggtcccgggcccagccccacaggagctcccgaggccccgcggacggtcgcgacagccccaacttcccggtgagaaccccgcgaatcggccagaagggctgatttcagcaactgggaaggagaaaaacaactagggtttcaacgcacatcgttgggtgctaatgcccctgattttccactatgccccgttttcttgaaccccatgtccttatctgtcgccgtttcacaaggttagaggttaacttcaaaggcaaaaaactgactcgtttgtagaaagcctgggtggtctgtccctgtttttcatagtatccataggacttgtgctaacagtaactacccctgggtacgtcctcttttgaatacttaactgtatagcaggcaaccgtatagcaggcatgggtgttagatcgtttattgcatatctcatgttttaaatttattccccatttttcataagaggaaactagctgagaggtgaaagggcttgcccaaggtcacacagctggtaatggttcaaaaacaagggatgtgttaactttattgccgcaataatccttacagcaatcctaccgagtaacctgtaagggaattgaggggccaaagatcaaggaggcagccttgttcctgccaaactcccaaagtaataagtagattcttttcagaaaacagtaatttcaataatcgaaaactcttaagaggcatcaatcagaacagggtcccctccccacctccgataaattccattatttttatctcaagataagaataattaataatcagctagaacatgcatggagttatcagccttcccatgttgaggtttctccatgacggctaatttaaaacttcaggaagagacacgtaacatccctgctcccatagtctcttactagtttaggggaaccataccaaaagatctgtccactgcccagcactgtggacacaacttgggggatcacagccatgatatccaatgacagctcttccctctactttgagtgtgttttctctctacttccggtttggctgtgtccccacccaaatatcatcttgaattgtaaatcccacaattcctgtgtggtgggaggaacctggtgggaggtaattgaatcatgggggagggtctttcccatgctgttctcgtgatagtgaataagtctcacgaaatctgatggttttaaaaaagggagttttgctgcacaaactctctttgcctgccaccatccatgtaagaagtgacttgctcctccttgccttccaccatgattgtgaggcctcccctgccatgtggaactgtaactccattgaacctcttttgtccgttgcccagtcttgggtatgtctttatcagcagcatgaaaacggacgaatacattggggacctgaaagccaggtttcctgtattctatgacaaagccattgccaagtagcaagctggcaatttgattcatgaccagatgtaaacagaggtaaagactgagaccattccaaggtaaagctt

SEQ ID NO: 3344 - DNA, 4001 bp, Homo sapiens
ctggaaatgttacacaaatgtgagtcaatgagcaattttaaaatgcaactctaggaaaaactacctagttacttttcagtgtaagctcccacagtggaatctcattttttaaatccatcagttcaaaaaaggtaccatttttttagatatattaaaagccaatgcctacagacacttttaacagattaaatgcagagtgtgattatttacatagtaagaactagaaaagaatttctaaaatgttcctcagaagtaagcatcttctaatatatacacatacacacacacacatacacatacgtgtgtataaaattttacatacttttttaaaaacaagtttttttccccttttggaaagaaagaagcacatgtataactgagtatgatttcctgtgtctgaactcaacctgcactgaactgaactgttgctgcacatttttgggaatcacgatttgaaatcggcatacttcagggcaccttccttgagtgggtcacaaaacacaactccactttctccacctcacctaaccccattcttgcatctcatctatactatcagggagaccacttcagtgagaccactgaaacctcaattcaatgatcagactcttgtcactcaacaacaggtcatcttctacagaccaagtctgctctgcaaaacacagcatgatctaaattccatttgcaatttttttccaagtatttgtgtgtgtatgtgtatgtatatatatatgtgtgtgtatatatatatgtgtatatatgtgtatatatatgtatatatgtatatatatgtatatatatatttgtgtgtgtatgcaaagtatcagaaaaatacacactgaaatgttaattgtggttattgcctggagtagtagacttatgtgtaatttttttctttttttgcttgtctacagcttccaactttttctatattaaacataaaagaaaaataagttacatcccatatgtgtatttttttactctttctgatttcaaaaagaattctgaaaaaaattctttaaagaaaaagcaacaagtacacaaagattcctttcaaagtgagggcagttagagacaagggcaagaagaagagcaacataacctcaagaagccaaaggttaaaactcaccagcatgcaagtgccagtgtcatatttattggctggagggaggaacacaattggctctaagtttactggcttccatagaacattcctccccatcctcttcacctcacccccaccagccttaattaagttttgtttagggaaagatgagaatatttttcagcattccctgaactcactcccacatgagatcacatggttcctgaaatgtgttcagggagaaggagctagctgcaaacacaaccaatagagccctaactatactaacccactgactccaggggaaagtgtgtctgcatacaccagctcagaacccccaaaatggcattgctttaatttcctaaagatgcctctctgtgtgcaattcactgcttatgaaggcagtggcaaaggacattcagtccatgacaagaccatatctgggagcttctagggccatttcaaggccaaggcacactttaatggagaggtcccagaaacagtgcttaccataagctgtcatgactccagcgtatggcccatccaccacattcctgttttcttctgccagtgccttgatgtaccttttgctgaggtccaggatctgctcgcgcagcatggagctgctttcaggctgagttcgctgctggatggtaaagtgcagaagcatcataccccaaatgaagccaaaagtcaccaggaaaaagcccagcttctgagaggacaacttccacggagtgaagagagccattgctctctggcaacttcacctgtccttggctcttaacgcgtagaagatagacacaaattcatggtgtaggttgagtgtgagagtctgctggtctcactctggctcctgtgtcagctggttgcctttcctcacttccattctgctgtgaaggaggagaagaattagccaagtggtcatggcacaatacagcaaaataaaccagaagccatgttttcacttgaatacctctaagtaaaatgtcaactcttaaatttgctggttcaatatcttatgattcaggaactgtaagctgaggggaaatctggctaggcaacaagaagctaagcaattatgaagggggaagtgtgcgtctgcgtgtgttaacaggtgtagtggggctgttccagcctggaccaaattcaaaacaggaagtttgttttgcaaggtggggaggagacagaaggatatttggcggaatgtcagcaaaaacggggagggtggagtcatatcaccatcaggcccttttgtgtgcctgtaacttaagcttacaaagtcattattatgtgcttctggcaaggactagaacatgcaactggtgaggtgagcaagaaagtggatgcccccttgggggtaactagacaaagaagaggtagattgctacatcttatttgagcatggccagctttcaccatcagtgtttagtgatgagatggctctctcagggccaccaggcaacctctctaggtgcaccagcacagagaagatatgccagaggtacaagcaggggtattgctttcccagctacatgaggaaaaggtacacctcactgctcacttgcatgctgtagcacaagaaatgtggaacacctggcaggcagattttctgtggttctcactttcactcccaccatgaggcaaaatgagacattaaaaggcagagtagtttcaatattaatgcagccagatcctatctaatgccagcacagaccaggccactcttctcaatcagggcttcccaacaagtaggacctgagcataggttgcaaatggttaccagcatgcccaccccttcagccagagtcctgggcccaataccagtcagcttacgaatagcgccattttctaagtgccactcaagggagaggctgagcaatgatccgatcccttataagagactaacccaggctgtacttcagagtgtacatacatgcttcagtcaaaggattcttctttgcaagcggcccaaaagaaaatggtagcaggatcttgaagcaattagctttcagagccctggatcactgttggtctgcctcttactgttttcccattgcctatcaacagagtaaaaataaattataaattctagctatatcccagatattgtgacataccatcttttgtggctttgctcactgaatcctcagaagttctatatggtaagaagtatgaatattatcgtctctgttttattagaaacatgagaaaataaaggtaaaaggtgattaacttggcaaaggtcagccagctatgtggcagaggactgatcatctaggcatggcccaggggttattaaaccatgccccaccttccctacatcatcctcactcccccaacagcctgtttgtatatggcagagaatgatatatatatgcttaatgggtcatgaaaagcaataaaaaatatgtaacagatactctttgtagcccagaaggcctaaaatatttactatctacctcttaacagagaaggtttgccaacctctcaattctagaccagtggttctccaaatgtggtcccaaactcagtaacagcagcatcaccagtgagaaatgtgaattctcaggccccacccacacccactgaatcagcaactgaggagatgtggtccacagcctatcctttaacaagcctcgaggtgattctgatgcacactcatgtttcagagcccttgaccaggcagcctgattccagacccatacattccatcactattcaacacccaccacaatgcctattaaaatgaggctcaacctctgtcttgtactatcataacgtaagttcctctgccccatcacacccctctcccactacgtacctgctggtctgctcattaccataaaccctgcacatgcttcctgagaggcttccccttcttcactcggctgct

SEQ ID NO: 3345 - DNA, 4001 bp, Homo sapiens
catgacctttaactgtttaaatcctcattgcgtttatctatagatatctctctcctggcacttattccctgtattagcgctatttgcattttggtcttaacccatctatgtgacatcattgtctctgtaacctctacgggatcagtgaagcaccctagagcagaactgtgattctcctgcttcagattcctagtgcagccaaaacttgagcagtgttccacctgaccaacacagtacaccatctctcttttgggattcagtataccagagtcgttggggccttgggctccgactgtgactctaccacctcctagtggcagaacttgaaagcgaacaatactttttatgctgtaaaacgagaataccatcaactcctacttgatagggcaattggtacggatgaaacgagatcatgcttttaatgttttctgcaatgcctggcactcagcactgaaacgtgatatctatgcttattgctgttgtcactgtcatcattatcatcaaataatgccccaggcaaggtagagtttacagttattttttcttttttttgagacggagtcttgttctattggcagactggagtgcagtggcgcgatctcggctcactgcaacctccgcctcccggattcaagcaattctcctgcctcagcctcccaagtggctgggactacaggtgcgtgccaccatgcccggctaatttttgtattttcagtagagacggggtttcaccatgttggccaggatggtctcgatctcttgacctcatgatccacctgcctcggcctcccaaaaaagtgctgggattacaggagtgagccaccgcgcccggccggtagagtttgtagttctgaccaaagcaccaaaccataaagggctcccctctgctgccccaaagcttctgtaacactttaattataagaagcttaaactagaaagaacagagggagcttagtccagaccgggagtgtcgggggttggggagcaggagctgatcttatcaatttaatacataaatattgagtgtctactgtgagccagggttgtgctgggtgttaaggaatatttgggtatttctcaacattgaataatacgaaaagtctcacttgtctcctccacaaccctgcgcatttctcacaccgaacctcatccgtttaagaaaaacttttcttcttctaccgctacataattttactttggcttgctttaaatgcaaatgtttaaacagaaaattaaaaataatcgtataataaacacccttattacccatcaccgaaatttttaaaattagcatttttgctcaaatagagcttcgatttttaagaaatttttgcttaaggaaaattaactaaagacatcatagcatctctttctaaaacactttggtctgcatctctaaaaattaaggaaagttttggaaaaaaaatcatattgcctaagaaaataattttaatgccccccaatctatattcaaacttttctaatagatccaaaaatgtcttttaaagttcgtacaaacccaggtcctatcaaagcttatatattacattgcgttatatcttatatctcttaagtcttttaaaatctagactagtagcctccccaccttttctaggtaacatcaatctattaaagatctaaaagaaagcggcccagttgtcctatagaatatcccaccttctgtatttaactgcttcttcgtggtgtggaaaaatcatttttaactctttcacttcaccccagacacagcaggaaccagctccttttcctcaggtcctccccgccttggctcattgctcacctttcagaacctgcaggagcagatcaatcccctcttggtaacacaccagagcctgcggataccgcgactccgaatctagttctactgcccgctttagcacagtggctgcagctgtgctctgcgggtcctgcctcagcccggacttcgccataattctggaagttctcctccgcctcaacccaggatgaagttgagcgggtctgctgcgcttccgggaagtggtcatgtgatacccaggcgcctgcgctctctttctagggactttcctgagtgggagggatttcgccggaacaaaaatgcctcagtttggaggtcgcgctcactgcgacggcaggctttgagtgtagcacttggtagttcttcctctgctctgcttcccttcggaggaaaatttcaggctgaaggtttagcgggtgccggtgagtggggaatgagtggcggagagtgcggcattcttcgcaaggtgtatccgggaaccctctgcagatcctaattgattttccctattgcgtactgaattggccggttacggcaacctaaatgggtctgcccctgatcccgtcacattggctcccgtaaggccattggcctgcaggatccccccgtttcccaatttgcaggatccagggccacgcggctttttgtgcccagactcttggagctcaagaacggagccgccgaggctggacagcttgggaaagggaacccaagcagcattttctgtgctgctgctttattcataacttagggttgccactgggtattaaggttgcttttttttttttttaatgaagacagaaaattgcctttatctttgtattgcttcattttataatgcaaacatccaagagttggcagttagaatatttgccattttattaaaactgtgatttgttaccattttgatcgagacctaccaaaagctgtttgttctgccctttttgccaagaggcagtaatgagggctgcctactgcttgttaggcactaggagttcagagaagagacacgcttccagctttcagagatctctggtatctctgcaagagtgattccatgttttgcatttcagaagtgtttttccccctttaataattgtatacattgtcggtttagaaaaagaaatcgatttttaacattcctgttgcatgcatgctcattgtaaaaagacaaaagaactatcggtcgctgggggggagaagggggaggaaaaacgccttttttcatacccccaggggtatgttaacgtttttctgacaaccttccagagtttttctgtgattacacacgttcacagacatttaaaaaaatagaaatgggatcatacttctcctgtgatgcctgatattttcctgttttacagaagacagcgtaattgtttcagggtccaggagttacgtgcctaattattaacagtaacttttactttattaaaacgtattccttgccgggcgtggtggctcacgcctgtaatctcagcactttcggaggccgaggcgggaggatcacgaggtcaggagatcgagaccatcctggctaacacggtgaaaccccgtctctactaaaaatacaaaaaattagccgggcgtccgggcgggcgcctgtagtcccagctactggggaggccgaggcaggagaatggcgtgaacccgggaggcggagcttgcagtgaacccagatcgtgccactgcactccagcctgggcgacagagcgagactccgtctcaaaaaaataaataagataaaataaacgtattctttgagtcaaacgtggtgacacacacctagctccaattactgggaaaattgaggattgcttgaggctgagttcaataccagaaacatagcgagactctgtctctaaaaacttgtaacttttgactatcacaccttcagaagtctgtaaatatttaaacttcagttattctgcaaaaatatattatatgtctgctatagggcagataccgctttacacagatgtttgggatacttctatgaatataacagacccaaaacaacaaaatctaaaaacccttttcctatggaattagcgtgctattgaatgtacatgcactaaacaacaaaacctaacagataattaagttacgttagaagataagcacgatagaaagcagtgaagaggaattgggagtgttgacagttggggtatgggtgaaaatgttaaatgatgtgatctgggtt

SEQ ID NO: 3346 - DNA, 4001 bp, Homo sapiens
agtgctagtctctaccgcaaggatgggtcccaggtgaggctgtaggaggatggtgctgagaggtgggagctgggttcccatcccagttcaggcacagccagcccagccacctgggaaagatgcccctcctctcagggtcttagtttccccatctgtaccatggacaatggctgagctccaagacctctctggccctctccagccctggatgatgccaggatgttgaaattaagagggggagtgatggtgtgggggtagtggggaggagtaggggcaaagactgttcctccagaggttgcttctgaaaagaacaagacagttggccctagaaggctgccccaaccactgagactggggcttatttgagccgttattgcattgtggttgaaaggcaccaatttcacttttcccattagcccacagggctctgggacacttccaccacctccagcccctcactgggcacacattcagctggtttgttttaatttttttctgagtcactcatgtcgtactcagtaagacccactgactccccatgtgtgtgccgggcaccatcccatgttctctaaatgtgtcctcagtcaatcctctgaggcacctgctactgttcttagagcctgagtgagggccaggagcacagtgacccatgcctggtacttagatactaaggagcacggtcctgggcagggagggggctgggcccaggaaggctgaggccttactgaggtcagctgaatcccgccaatgagcaggtggagggatgtgtttcctaggacagatgcaggccagctggagggatgggtttcctaggacagatgcaggccagctggagggatgggtttcctaggacagatgcaggacagctgaacccggggtgtcaatgtcactgctcagcaacgcggtctgcaagtccagaagccttttcctgagacttcacagcccccagcaatgctggcctttgcacctattgggagccttgctctcccccgactgtcatttcactccctcagaaagaaataagtgaagaagataccagtcacaccatctaaaaaaggacctgtcccaagttccgtgtggaagtgaggtggagtttccagtgccagttaatgtcagtgggacgcggtgtctaagcccggggaagggatttacaagtgagattccgttcctgtagggacttggggctagtagggacgaagcccacaggtgctcacagctcacagacccttcccacatctctacttcccacacctccctggtgggcccagggagtctgtctgcaaacaaaaggtgattccaataaaacagacttttagacgcccagaggaagccaggtgcctcctcccaggccaagatcatctggcctcttcctcaccccaagaccagctcctgggctgggaggaaacctttcccctggggccagcctacttggcatcagcagccttggcccagtctgcatggcagactcgcaatggaggcaatggagcttctgattaaaaccaaccgttttgcccaaaatggggatcccccgccatcccactcccacccgtgcctgcacccagagcagtctgctcaaagaatccaggtgaagcctgggggactaaggctgggtggctgggaacgcgctgtcctcaccagcctggaccgaggccgggaggctggcggctgggggcgttttcacaccagtgggtctgcacgcgacaccgcgcaccccccaaagcctaagccccgagtcctgggcgccaccctggccccgctgttccctcttctcagtgcactcaccggaccctctccgggggacgctcagtccctggtccagcacctgggagagaaaggaggcgacgaagcagggcgtcaggccagggcgtcaggtcagggcgccggggcaaggctggataatgggggcaagcagggcgcggggcgcagagcggctggttagcgcctggctctccggggcaggcgggcaactggccacgtcccggcgcctcccgcccgaaccacgtgggctgcgccccgctccgcccagctccgggagcgcggacacctctggatgccctgccaggcagagggcggaacggaacggacacctggggcgcccgcgcgggaagcgccagtgcgggggagagccccggatactcgacccccaagccagtttggggagaaagacggcggcggggaggggaaagttgagcacacagctgcgattcccgtgagttgcggcgactttgcataggtgacatcgcgccgcggtcctgccttgggcacggtgggacccgcttgctgagcgcgctctagagcgcgcggcacatcgtcgaaatttctaactctgcagggaaagcgctatgtacttcggctttacaaatggggaaactgaggctcagaaacgcgccctaccaaagccaccgaccagtaagtggcaacgccaaataataaataggactttaagcccagggctttctgctgcagagagcgtaccctcaccccttcgattctgccaggcatcaggaccaggagggtcccgcagccgcgggcagccctgctgcggggaggagaccgaggccttgcccgccaagaaaaagtcaagatccgcgggcaaatggggcagatgtggaagccaggacgcgcggcgcggtggttccaggaccgaggacgcgctgcggggaacgcctgggagctccgcgccgctgcgctcttctcctggactctagggccggcctttgggtgctcagcggggcccgcaagctcagagggtcccaaggcgagccgccgtctccagtccgcccggcctgcctgtccttccgaattccaatggacattagggaattgccctcctccctcatcctccaagactgggcgcttcagaattttctctccctccccctccctctcccttgtcacttaaaaactcacattctgttctccaggaaccgcttttgcaattcagttttcctatctgcaaaatgataggaataaagccattaggtgaatgaatagatactagtatctccatttaacagaagaggaatcaaaaccttataggattgttgtgatatcacattagattatttgtaaacagctttcaaaaggctgcaaaagaacaaaaaagaatgttgttgcctgctgagcccaggggaacactgtaggtgaatcagggtatttcaggcccctgggctgctttgagacaggtgctcttaccaaacaccatcaattgttgagtgtgaaccctggaatagagtgaagcttacactgaagccagtatttccacatcccatatgatctggtgcttatgtttttcatttccttacctccttgccatatactttactgttacttgttaagattaataaatcccttaagagttgatgtagggacttaagttccttaagggcagaagtttttaaaaatgtttttaatactttagtgcttatttatttgaagtagtggttttaaaaaatatacaactgacacacgctgatatataaggtatatagtaaagaatataaggagtataaaatgaaaagccaaattctctcttattccattactaacctccatgaccagaaagcaatcattattaatggtgtcttctatattctttctgaatggtgtgtgtgtgtgtgaggttaagcatgtgggctcaaaccaactgcaagagtcggaattccaactaggagtgtggcccacaagctgtgtcatcttggacctgttactgaatcttctactgacttttttctctcttctccatgatgagaatagtaatgggagttacacataagggtgttgtgaatcaatatccctgcagcttgggtgagacaccatgtggtgagtgcttggtaaatattaattactattcctgttgatctacttcatccttttttggttgcagagtatccaatgtgtgagttaccataattacttaccagtcttctattgatggacagttaatttttgattttttgctatttaaatgattctgccataaatatcatcctagataattc

SEQ ID NO: 3347 - DNA, 4001 bp, Homo sapiens
ctaggacagatgcaggccagctggagggatgggtttcctaggacagatgcaggacagctgaacccggggtgtcaatgtcactgctcagcaacgcggtctgcaagtccagaagccttttcctgagacttcacagcccccagcaatgctggcctttgcacctattgggagccttgctctcccccgactgtcatttcactccctcagaaagaaataagtgaagaagataccagtcacaccatctaaaaaaggacctgtcccaagttccgtgtggaagtgaggtggagtttccagtgccagttaatgtcagtgggacgcggtgtctaagcccggggaagggatttacaagtgagattccgttcctgtagggacttggggctagtagggacgaagcccacaggtgctcacagctcacagacccttcccacatctctacttcccacacctccctggtgggcccagggagtctgtctgcaaacaaaaggtgattccaataaaacagacttttagacgcccagaggaagccaggtgcctcctcccaggccaagatcatctggcctcttcctcaccccaagaccagctcctgggctgggaggaaacctttcccctggggccagcctacttggcatcagcagccttggcccagtctgcatggcagactcgcaatggaggcaatggagcttctgattaaaaccaaccgttttgcccaaaatggggatcccccgccatcccactcccacccgtgcctgcacccagagcagtctgctcaaagaatccaggtgaagcctgggggactaaggctgggtggctgggaacgcgctgtcctcaccagcctggaccgaggccgggaggctggcggctgggggcgttttcacaccagtgggtctgcacgcgacaccgcgcaccccccaaagcctaagccccgagtcctgggcgccaccctggccccgctgttccctcttctcagtgcactcaccggaccctctccgggggacgctcagtccctggtccagcacctgggagagaaaggaggcgacgaagcagggcgtcaggccagggcgtcaggtcagggcgccggggcaaggctggataatgggggcaagcagggcgcggggcgcagagcggctggttagcgcctggctctccggggcaggcgggcaactggccacgtcccggcgcctcccgcccgaaccacgtgggctgcgccccgctccgcccagctccgggagcgcggacacctctggatgccctgccaggcagagggcggaacggaacggacacctggggcgcccgcgcgggaagcgccagtgcgggggagagccccggatactcgacccccaagccagtttggggagaaagacggcggcggggaggggaaagttgagcacacagctgcgattcccgtgagttgcggcgactttgcataggtgacatcgcgccgcggtcctgccttgggcacggtgggacccgcttgctgagcgcgctctagagcgcgcggcacatcgtcgaaatttctaactctgcagggaaagcgctatgtacttcggctttacaaatggggaaactgaggctcagaaacgcgccctaccaaagccaccgaccagtaagtggcaacgccaaataataaataggactttaagcccagggctttctgctgcagagagcgtaccctcaccccttcgattctgccaggcatcaggaccaggagggtcccgcagccgcgggcagccctgctgcggggaggagaccgaggccttgcccgccaagaaaaagtcaagatccgcgggcaaatggggcagatgtggaagccaggacgcgcggcgcggtggttccaggaccgaggacgcgctgcggggaacgcctgggagctccgcgccgctgcgctcttctcctggactctagggccggcctttgggtgctcagcggggcccgcaagctcagagggtcccaaggcgagccgccgtctccagtccgcccggcctgcctgtccttccgaattccaatggacattagggaattgccctcctccctcatcctccaagactgggcgcttcagaattttctctccctccccctccctctcccttgtcacttaaaaactcacattctgttctccaggaaccgcttttgcaattcagttttcctatctgcaaaatgataggaataaagccattaggtgaatgaatagatactagtatctccatttaacagaagaggaatcaaaaccttataggattgttgtgatatcacattagattatttgtaaacagctttcaaaaggctgcaaaagaacaaaaaagaatgttgttgcctgctgagcccaggggaacactgtaggtgaatcagggtatttcaggcccctgggctgctttgagacaggtgctcttaccaaacaccatcaattgttgagtgtgaaccctggaatagagtgaagcttacactgaagccagtatttccacatcccatatgatctggtgcttatgtttttcatttccttacctccttgccatatactttactgttacttgttaagattaataaatcccttaagagttgatgtagggacttaagttccttaagggcagaagtttttaaaaatgtttttaatactttagtgcttatttatttgaagtagtggttttaaaaaatatacaactgacacacgctgatatataaggtatatagtaaagaatataaggagtataaaatgaaaagccaaattctctcttattccattactaacctccatgaccagaaagcaatcattattaatggtgtcttctatattctttctgaatggtgtgtgtgtgtgtgaggttaagcatgtgggctcaaaccaactgcaagagtcggaattccaactaggagtgtggcccacaagctgtgtcatcttggacctgttactgaatcttctactgacttttttctctcttctccatgatgagaatagtaatgggagttacacataagggtgttgtgaatcaatatccctgcagcttgggtgagacaccatgtggtgagtgcttggtaaatattaattactattcctgttgatctacttcatccttttttggttgcagagtatccaatgtgtgagttaccataattacttaccagtcttctattgatggacagttaatttttgattttttgctatttaaatgattctgccataaatatcatcctagataattcttattgacacctatcatacataggatgacacatgaatatcattgtacatacatactgatatatctgtagactaaaagcctatagatttggattttctgagtcaaaggatgtatacaattttaagagaaaattctagaattataaacttttttttttttttttaatggagatggaatcttgctctgttgccaggctggagtgcagtggcttgatctcggcttactgcaacgtctgcctcccgggttcaagcaattctcctgcctcagcctccccagtagctggaactacagacgcacaccaccactaatttttgtatttttagtagagacggggtttcaccatgttggccgggatggtcttgatctcttgacctcgtgatccaccctcctcggcctcccaaagtgctgggattataggtgtgagccactgcacccggccctggaattataaacatttaaaatgattaaacaatccccaaattacagaaagtttcaagtataacacaaagaaccctaccttcccctagccatttgtgatggagtttctgacatgagggtttagtgtattttatacaaacaaggacaaccttctattaaactgcaatccaaccatcaacatctgtacatgatatgttgctatcatctaatcatcggagtcctttcaaatgttgccagttgtctccgtaattttttgttgccaaacgatccagtttagaatctcatgttctgtttagttgtcatttctaagtctccttcaaatcagatcagttcctctgtctttgactttcatggctttgctatttaaatatt

SEQ ID NO: 3348 - DNA, 4001 bp, Homo sapiens
atttggatactgaaacttaaatttattttaatatgaacttctttctaacaaaagacttataaaaggatcttccctactgaactattataatttattcatttaaaccaaaataaaaccaggtcaaataatagcattctattctacttcaattaatttctctcctttgaaagtaccacatacttcttttacagcattctctttctgtgcaggttatgggcaggcaaaaattcaccatagaacttggccaagactagtaatctattcttatgacttgtctctatagtcacactttagacttaatataccatgttcaattacagaaatagcatcctggctaaatgctgccatataaatcttcctagcacacagctctaagtgaataatcacaatttaaagaatgaagtctaaattactgagttcggcattcaaggctctcatttacttggtaccaacctcacaattcaaccttatctcccacttatctctttcatgcagcttacattcaggttggcaggcagcagtcacttttcagtttttcaaaggggtaggcgggttggggagttctttgaatataccttcctgtccttcccgctcatattttagactatacaaatcccacctatctttcaaacctcaagttaaatgtttccctcatgaagtgatcccaaactcctctccacaaagacttgaatctgcattgcaccttcgtgtaggttctaaaaaaaattattactttatactttaattgtagctgtttttatatatgtcttatgaccgctacatatgaattctatagataggatgtgtctaatcactgcaaagttacagtcaataaatatctctggtgtgtgagagtatctcctattcttattttgtaggatttagaaggtcacttccaatatggaaactgttttaaaaaaaagaaaaaaagattaaaaaaacccttcagtttagctaacccaaaagctaaaaaagggcctaaacatagattctaatatttactgaaacgctgtatttaaaaaataccgaaagggtgcttgaatttccacatctgtacaaatgaaattgtataaataagtgtatttgcagtgcaaagaatgctaccatcttcaaagcataacataatttcacaccacttgcttcccttgacatttttgatacattatatctaacactataccacccaatgccatcataattaaacccgttctttcattcctaacattcccaaacgagtttactatgctgattcttaagagataatttactcacattggccatctccgctggagaagatagttcgcaaaatagctttcctttggtaaagttatttctgggaaagaacacaacaaaacagacgagtgatcgattaaactctaacaacagacaactgaggtaacgtccactcttcgaaggtgtgtcgtccaccacgtcaggaccaaagtccaagctctccccgtaccctaaggaggccagaactcgcccccatgccaggcacagatcccccagcccggagccggcagtgcagctcagagcccttccggtttacagccgcggaaaaacaactcggaccagatccgggaggggaatgggggctgggtggccaaaattcagtccagaggatcgaagcggctgctttaacagaagttggggctgcgtaacaacagctccaagcaaagcttcaggctgatcggaaagatgaggaagcagaaaagagactaaagacagacggacaggatggctggggacaacgacagggacccagtgaaaatacgggcaataccgagggctgtaaccctaacacgggcaaatttggaggggctaacatgggcggaaaccatccgtaccagtcaccaccactgtctccagctgtcccagaaccggactcttcctgccatcaaaatggcggcggcgacggcagcggtggtagcacctacgctggcggtgagcaggcaaaggaagttgcttccgagcgcgtcgaaacgatgatgcgcacgcgcaaagtaggcctacgtggagccgacctgccattgggtaaacgcaagggaggagaaaaggtggggcaggggtgatttgggtggatggataggagggcttccgacctgcgttaggcgggtcagttaatcttcagtaactccttgatgcgtttgatagtcctcccaacttaagccttccttactgcctccaggagatacagtcttctgttctttttgtcatagttgtttatttttcatgaatcgctgtttttgagcatagggcacttacctctttctgtgtccccagccctaccacagtgccaggctctcaatatgctcgataaatattaggcgattgatttgtaaatcgtgtatcattttcatgtatctaatacttttttaaaaattgattaaagcccataagcccatattttattccagatgtccttagttttcgacctggtattcttttccattccaggatcctgtccggagtacatcaccatgtcttccaggctcctctggaccgtgaccgtttctcaaactttccttgtttttgataaccttaatagttttgaagcgacttattggtcatttggtcaaatgtccttcaattgggttttgcctgtatttttctcatgcattaactgaggttatgggtttttcttgagttaagaggtaaggtaaagtgatcttctcatcacatcacatcaagggtatatactatcaacatgacttattactgttgatgctaacctttatcaccattattacagtgtcatacagaaaagttttatagttctacaaagatcccctttgtttcatctagtaagcccttccacctccctatgtagggtttgtcaggtttctccactgtgaagttactgtttttcttttcctctccatactatactatttggaaggacatctctctgtgcagcccaaactataggaatgggaaattgttatactccacctttatgaggacagaatatcttcatgaattatttggaattcttctgcatgggagatttgtctgtactgcatttatttatgtattcaatcatttatgtcagtatggactcatggatatttattttacattttgggttataatccaatactactttattttgttgttcatattggttccagctttggctattgagatttcctttagttggcatttgtgtctttttgacaaaccctcctcgttttatgtttattgattttttttcttgagcattttcttaatttctataagttgctccaggctcatcttgtatattccctgccccaatcctagaatcagctgcttccccaaaaagccaagggtacttttaatggaaaatgatattagaaatcaagatttggacatttgggatgttgttgcttctagacactctcagctgacagagcaaggaaatatttgtggatatgctaacctgactaaatacgcatatctgtaagtatttatatatgtatccatctgtatctttgacagctacacaggcgttctaggttcaaatactagagctgttatcttcagttcaattccagcaccatatggatcattgcagccttctccccttgcttgtctgtagccttccactccagtgtgagacacctggctctcatcatctgccatccatttacctaattgttcaattccaggttacgtgtataatggattcagaaccgtcaacccgtattcagagtacatgtatagttgtttctgaactgttatcaggtatacctgtgagaaacagatttaccaattagagtacaatgcttatgtatagttcttttgcttttaatcttatagattccacttattttcaaagttactgaagtcagcagccctccctcctacctctacccggcctcagtgaagttattttatatgctcgtaatacagttgtaatcttttgccacaatctgcattactcctgggattctttgagttcctaagattttttaaaaaatcttcctccgtttaggttctgtttgtgcaatcctcataat

SEQ ID NO: 3349 - DNA, 4001 bp, Homo sapiens
ttggcagttcctcaaaaggttaaacatagttaccacttaagccagcaattctgctcctaagtatatacccaagagatatgaacacatacatccacgcaaaaacctgtcacatatgttcacagcagcattattcataatggccaaaaagcgggaacaactcaagtgtccatcaagaaggccaagttttaaaaaaagaaagtctcggccgagtgcgggagtggatcatctgaggtcaggagttcgagaccagcctggccaacatgatgaaacccagtctccactaaaaatacaaaaatgagccaggtgtggtggccggcgcctgtaatcccagctactcgggagtgtgaggcaggagagtcgcttgaacccgggaggcagaggttgcagtgagccgagaccgtgccatccccggaggcagaggttgcagtgagccgagaccgtgccattgcactctagcctggaggacagagcgaaactccgtctcaaaaaataaaaaaaaagaaaaagtctcgtattaaggtccacaaagcaactgtgcattcactaattaaatatcaactcgtaagaaaaaagtggaggagggaggaatacttctattaatatggaagttaaatctaaatcatacaggctttttgacaaggtaatcgtattttagagaccattcatttacgagaataacccaaaggaaggaaaatgagacgcagataaacatattctgagtagtgctattttataatagtaaatactggaaggaatcccagtttctcacaataaagtgggtaaactctggttataaaaaataaaaaaaaaactatatagtgtttttatattgtatttaataaaaatgtcaagcatgtggattacatccataactaaaattggataattattcaatcacaaaacacacatttaagcaatatacaaggtagagagagacacctgagaataaaaaatactgtgccagagcaatgcttctcaaaccttaatgtgcataagaatcatcagggaatttacaagctttttcattttagccttgtttggttgggctcaggcattatctctaaaatgagattctaaggtatgcctatcaagttaattgctgtagtgcactaaaatggcaatactgtgtttctgcaatgggactatgaatttgttttaactttccaaattatttataatactgcaatgtactatataataatgctgtatggtatattacataatgattaaaaacacaggattctaccgaggacaagagaagttggttaaaatcaaagccagtaagtgggcagaatcagaactggacagaacgatccgactccaaggccagcatcttaacttcaagcttctcaaactgcggcaacgcacattctcctggggcggcatttaacaccgacaataatgaaactggacctataaccgagcaacgagttaagtcggcaaggacggtttctagaagctcgagacaagagaaactgggggctcgcggctccgcccccagatcgtctccccgccctcgggggcgctcgggcggaaaagtttggaggcgcgacggccccggggcctttctactccccagccttcacgctccgtttcctttacttcgaccttcatctctgtcggcctctcccaacatctcggcctcccccgcggacccgaacagaggcaaaacaaacgccagctaccccgcccccgcctcggcccccaggccgagccctcgcctcaggtccggggaggcctcccccacaacctcggcccgcaggcccggcgcccgcggcccgaccccactcacaagaggaagctcatcttcggtcctcagaggggaggcgaggggcccctggcccccgcctggatcaggattcggagctggctagagggagcggaccgtccttagctcacgggcagcggaagccgggccgccgccgctcggagccgggtttctggccgctgcgagcctttgcaaacctcggcgcccgccttgcccgcctaccccacctcgcagacccgaaatgcggaaccaacaaaatctcgcgagctaaggtttcgctgcgccgggagggacttgtcgcgccccctttcgctccgcctcgtcctagaactcggccaatcatcgctctccaagccaggacctccctcccccggaggcgtggcgaggatggcggtcctgcggaaggggcagtggctggtcctgctcttagagtatcttggtgctgctgggtttcgatcccgctccctaggttatgcagggacctctataagcgctgcgtactcctgcaatttttaaaattgttaatttaatttttacttgaaatatattcacatagcataaaatctgtcctttaaacatgtaccctctagtggtctttttcggttttttctttcttttttttttttttttctgaggtgtctcgctctgtcgcccagactggagttcacagttcactgcagcctggacttcctgggcttaagtgatcctctcgcctcagcctcccgagtagctgagaccacaggtgcctgccaccacgcccggctaattttctcaaagtttttgcagagacgagcgtctcactgtgttgcccaagctggtcttggactcctgagctcaagggatcctcctggtttgacctcccaaaatgctgggatcacaggtgtgagccactgcctccggctttgtttatgttttcaaagtgtgccaaccatcagcactaattttttttttttttttgacagagtctcactttgtaacccaggctggaatgcagtggtgcaatctcggcccgttgcaacctctgccttccagattcaagtgattctcatgcctcagcctcccgagtagctgggatcacagtcgtgcgccaccacacccgtctaatttttgtatttttttttttttttttttttagtaaagacggggtttcgccatgttggccaggctggtctcggtcttgaactcctgacctcaagtggtccacccgcctcggcctcccaaagctgggattacaggcgtgagccaccgcgcccagcctaaccataattttaggccattttcatcaccccgaaaagaaaccccatacctattagcagttactctttattacccacctccctcctcccaacccctggcaaccactactctactttctatttccatggatttacctaatctggacatttcatatacactgtgaatggaagcatacattatgtggtcttttgtgactgacttctttcacttagcataatgttttaaaacgcacccatattgtagcatgtatcaaagcttcattactggccaggcacagttgtggcttacgcctgtaatcccagcactttgggagtctgaggctggcggatcacttgagctcaggagttcgagaccagcctgggcaacatggtgaaaccccgcctctacaaaaacacaaaaattagccaggcgtaatggtgtgtgccagtggtcacagctattcgggaggctgaggcgggaggattccttgagtccaggagatggaggctgcagtgagccaagatggcgccacttcactccagcctgggtgacagagccagatcctgtctctaaaacaaaaaaaaaaaaaagaaaaaagaaaaaaactttatttctttctatggatgagtaatattccattatgtgaatataccacattctgtttacccattcatctgttgaggaacatttgggttgtttccactttttgtctattattaataatgctgtcgtgaacattcatgtacaggcttttgtgtggtattaatgccaagtgacagccaagcaacgccttcattccaccatggtggaatgaagaaaacaaaaggaaaatagtgggagacttcagtcatagctcagcaaatggtggtgcagggtgctcaatgtaaaggagtttgccctgtacctgactgcacaatgttcatgtttccagtaattttatttcattcatatatcacttgtcacattaagttaatgatgttagggcacatgagactgt

SEQ ID NO: 3350 - DNA, 4001 bp, Homo sapiens
tcagcctaccgagtggctgggattacaggcgcccgccaccacgcccagctaattttttgtatttttagtagagacggggtttcaccgtgttggccaggctggtcttgaactcctgaactcagatgatccgcctgcctccacctcccaaagtgctgggattacaggcgtgagccaccgcacccagccctctattatagtttttaattttttttcttttgacccaatagggaaggagatacggttctaaatatatcattttagaacagatccatttcactaaacgaaattcatgtgataaacaagataggacaaactacggcgtaagcagtctttttcattttttatcctttttctgttatattttatctaacaaccttgatccatgacaatgtgaaaaaaaaagacaataagttttcttctatgtgacttacagcaacatagcaagtatgttacgatattaaatattttattttctaacctttcaaaattaagaacttatgaataaatgagatgactctcagaatatgaacagaaaagtctacttctgaacataaaaatgtaatcagaaacaatgtttccacagaataagatgtaaaggtatctgagaaaagagcatgaggaagaaaagtgtggaaacggtaaaaagcaagcatatgtaacggataaatttccagtagtatgaaaacaaaactgtcagtaggaataactgacagcttaatgtgactccaaaataagactttaaaattttctctgaaattcagcactagaagcagcttgttaaagagaacaggtcaccagtgaattaagaatcaggagactatgtatccttgggcaaatccacttaattctcttgggcttcagtttccttatctgtaacatgaatctggggaggtaatcaatacctgtatgcccccttcgaaaggtgttctttccataattctgtataagaaattaaaatctattctcagacatacaatcatagctccacgattgttttgtttcaattttcatttgcatcactttttaacattttataaacacatctcttccgatttcagagcatctagtctatagcaagccatttcggctagcaattaatcagttcaagtctggatgccaattttatttatttatttttaatgtgaggcatcccatcttttccaaaccctaagaaacaatgcctaatcaagcaccaatttaccacacataatgccctacaaaaaagctgacaaaattataatcagttcattctctgactatgcttcacgcatattagcaaggaatgacatctaacaagtcacaacttagtgatgaaaacttgctggaccagagaacagctccagggaaagcggcagggagaggtggtcaaagggaaacaaggaggagaatatcggcacccggatccggctagacaagctggatggcaggaaacgggtaggtacttcccaggccaggtaggaactggacgccgggtcgaggtaggctgtgtttacaccccctcccacctcagcggccccgaccttcaggaaaccccgggggtctccaccaggctggtcgcgcccctccaatgctagtcagctggggctcaggggcaaggcgagaagaagccgttgctgctgacaggctcgcagcccagggcttcggcaggcaggtaccaccagcagaccccacccgcccctcacgcctacccctgggtcggagctccgcaggcctcacggcggccgccaccgcctcagccaaattgaggggctgcagctccggaagagcaggccgggcaccagtgccccagcccgcccgcctgccgcctcggcccaacctccccgcagtggcggccagcttccgggcgcagcactgctcggcacctagttgcccgacaagaaaagtgcagacatggtacctgcgccttggtgcccggcctgttccgcctcagcactgccgtcccctccgccatgaccatagtgccagcgtctaggcggctggagtcggtacccggatgtagggacggcagcctgcgcggggggcggggcagagcggcgctctgcgtctgggaggaggagcggcagctgacggaacagctgcagcctgcgccgggagccgtccgggtagaagcgggctaggcggagggagagggcgaacgaggaacagccggacggcgtcgggtggctactggcagggactgaggcaccggaaggcgggcgccacgagcctctttgcgagggctgcggggcggtttgaaaggtcgtgatcgcagcgaccgctgcggcagtgtgcacggctgcgttgcacgttggtatgggctctcgttagttacacgggaagaacgaacttcgtatagtggcgaccgtttcagtaaacccacctgcaagcaaatacttagagaaccgtaattctgtcccagaagccacctaaggaatcagggtagaaaacaggccagcagtcttggcaaattctatagaacctgcgtgaaatcgacccaatctgaaatcagacgggggatttgagtgtcagtgttatttacgccatccggcgacttcaaagccaaggactttttcaatgacaagtttgtttacgtagataaaagacgcagatgtcaattatgtgagatgaagagtggacatctggttttgtgcgttaggcagacagatttagctcgtgtttttcaagtcagaagcaggaggaggaaattagtagtccttgacaggtggtgagggttttacatcttacaggattccacatttcctttgttgcaaattttaagtgttctctcttaagaaaccacagcattttcgcaaactttttttcctgcttagaaaccttgaatcttttatctggggtgagggaggccttgggatagcagatgggaagacagttcaaaaagtaaaaaacgcatacagtagcatgatttccaaaagaagaaaacatcaagtgtccctagatagaaggtgtattgagaatgctgagggaagggccatgtaacagcttccagaaatggaatttgagaggagaggagaggttgagtgggtctctagctgagtaattgtcagtgacttagaactaggcattgaagggtttaacaacaggaagttggttctctctggaagatgtattgactggtaactcttcaagaatagggacttaattttgccctcccagaaccagcgtctacatatgaaaagattattcgttcaacagatactcattaagccccactatatggtaggcactaatgtacaagtatgataaggctcagtccttcactacaaattgccttgactccagcaacagagacgtgcaaatcacaaattcttatacaggttaagtacccctcatcttaaagtttgggaccaaaacactttcagatttctgattattttggattttagaatatttgcatatacataatgagatttcttggggatggaacctaagtttaaatgtgaaatgcatttgtttcctatacaccttacacacatagcctgaagttacttttatacaatactttaaataggccgggagcggtggctcacacctgtaatcccagcactttgggaggctgaggggggcagatcacttgaggtcaggagttccagaccagcctggccaacatggtgaaatcccatcactactaaaaatacaaaaattagccaggcgtggcggcaggcgcctataaaacttcaaataattttgtgcgtgaaacaaagttttgactgcaaccggtcacagaaggtcaggtatggaattttccacctgtggcatcatgtggatgttcaaagtttcagatttgggagcatttcagattctggacttttcagattatggatgctcaacttgtattaaatgcaacgagagcctaggacaagtgacacgtaaatgttgcctcccttagagagatgggttgggtctatgagatagcagagtcccagggaggcctcttggtctatagataactcgcctcacttactgcaaggattacgtttacatttcccagattgtgtgatatt

SEQ ID NO: 3351 - DNA, 4001 bp, Homo sapiens
agaaactctgtctcaagaaaaaaacaaaaaaaagaaagaaagaaagaaaaagaaaaaagaaaaccaactatgtgcctatattccagtctaaccaactttttttttaatgtaggaagatactccacctactctcctatagttttttgtttgtttgtttgagaccgagttttgctcttgttacccaggctggagtgcaatggcgcgattccggctcactgcaacctccgcctcccgggttcaagcgattctcctgcctcagcctaccgagtggctgggattacaggcgcccgccaccacgcccagctaattttttgtatttttagtagagacggggtttcaccgtgttggccaggctggtcttgaactcctgaactcagatgatccgcctgcctccacctcccaaagtgctgggattacaggcgtgagccaccgcacccagccctctattatagtttttaattttttttcttttgacccaatagggaaggagatacggttctaaatatatcattttagaacagatccatttcactaaacgaaattcatgtgataaacaagataggacaaactacggcgtaagcagtctttttcattttttatcctttttctgttatattttatctaacaaccttgatccatgacaatgtgaaaaaaaaagacaataagttttcttctatgtgacttacagcaacatagcaagtatgttacgatattaaatattttattttctaacctttcaaaattaagaacttatgaataaatgagatgactctcagaatatgaacagaaaagtctacttctgaacataaaaatgtaatcagaaacaatgtttccacagaataagatgtaaaggtatctgagaaaagagcatgaggaagaaaagtgtggaaacggtaaaaagcaagcatatgtaacggataaatttccagtagtatgaaaacaaaactgtcagtaggaataactgacagcttaatgtgactccaaaataagactttaaaattttctctgaaattcagcactagaagcagcttgttaaagagaacaggtcaccagtgaattaagaatcaggagactatgtatccttgggcaaatccacttaattctcttgggcttcagtttccttatctgtaacatgaatctggggaggtaatcaatacctgtatgcccccttcgaaaggtgttctttccataattctgtataagaaattaaaatctattctcagacatacaatcatagctccacgattgttttgtttcaattttcatttgcatcactttttaacattttataaacacatctcttccgatttcagagcatctagtctatagcaagccatttcggctagcaattaatcagttcaagtctggatgccaattttatttatttatttttaatgtgaggcatcccatcttttccaaaccctaagaaacaatgcctaatcaagcaccaatttaccacacataatgccctacaaaaaagctgacaaaattataatcagttcattctctgactatgcttcacgcatattagcaaggaatgacatctaacaagtcacaacttagtgatgaaaacttgctggaccagagaacagctccagggaaagcggcagggagaggtggtcaaagggaaacaaggaggagaatatcggcacccggatccggctagacaagctggatggcaggaaacgggtaggtacttcccaggccaggtaggaactggacgccgggtcgaggtaggctgtgtttacaccccctcccacctcagcggccccgaccttcaggaaaccccgggggtctccaccaggctggtcgcgcccctccaatgctagtcagctggggctcaggggcaaggcgagaagaagccgttgctgctgacaggctcgcagcccagggcttcggcaggcaggtaccaccagcagaccccacccgcccctcacgcctacccctgggtcggagctccgcaggcctcacggcggccgccaccgcctcagccaaattgaggggctgcagctccggaagagcaggccgggcaccagtgccccagcccgcccgcctgccgcctcggcccaacctccccgcagtggcggccagcttccgggcgcagcactgctcggcacctagttgcccgacaagaaaagtgcagacatggtacctgcgccttggtgcccggcctgttccgcctcagcactgccgtcccctccgccatgaccatagtgccagcgtctaggcggctggagtcggtacccggatgtagggacggcagcctgcgcggggggcggggcagagcggcgctctgcgtctgggaggaggagcggcagctgacggaacagctgcagcctgcgccgggagccgtccgggtagaagcgggctaggcggagggagagggcgaacgaggaacagccggacggcgtcgggtggctactggcagggactgaggcaccggaaggcgggcgccacgagcctctttgcgagggctgcggggcggtttgaaaggtcgtgatcgcagcgaccgctgcggcagtgtgcacggctgcgttgcacgttggtatgggctctcgttagttacacgggaagaacgaacttcgtatagtggcgaccgtttcagtaaacccacctgcaagcaaatacttagagaaccgtaattctgtcccagaagccacctaaggaatcagggtagaaaacaggccagcagtcttggcaaattctatagaacctgcgtgaaatcgacccaatctgaaatcagacgggggatttgagtgtcagtgttatttacgccatccggcgacttcaaagccaaggactttttcaatgacaagtttgtttacgtagataaaagacgcagatgtcaattatgtgagatgaagagtggacatctggttttgtgcgttaggcagacagatttagctcgtgtttttcaagtcagaagcaggaggaggaaattagtagtccttgacaggtggtgagggttttacatcttacaggattccacatttcctttgttgcaaattttaagtgttctctcttaagaaaccacagcattttcgcaaactttttttcctgcttagaaaccttgaatcttttatctggggtgagggaggccttgggatagcagatgggaagacagttcaaaaagtaaaaaacgcatacagtagcatgatttccaaaagaagaaaacatcaagtgtccctagatagaaggtgtattgagaatgctgagggaagggccatgtaacagcttccagaaatggaatttgagaggagaggagaggttgagtgggtctctagctgagtaattgtcagtgacttagaactaggcattgaagggtttaacaacaggaagttggttctctctggaagatgtattgactggtaactcttcaagaatagggacttaattttgccctcccagaaccagcgtctacatatgaaaagattattcgttcaacagatactcattaagccccactatatggtaggcactaatgtacaagtatgataaggctcagtccttcactacaaattgccttgactccagcaacagagacgtgcaaatcacaaattcttatacaggttaagtacccctcatcttaaagtttgggaccaaaacactttcagatttctgattattttggattttagaatatttgcatatacataatgagatttcttggggatggaacctaagtttaaatgtgaaatgcatttgtttcctatacaccttacacacatagcctgaagttacttttatacaatactttaaataggccgggagcggtggctcacacctgtaatcccagcactttgggaggctgaggggggcagatcacttgaggtcaggagttccagaccagcctggccaacatggtgaaatcccatcactactaaaaatacaaaaattagccaggcgtggcggcaggcgcctataaaacttcaaataattttgtgcgtgaaacaaagttttgactgcaaccggtcacagaaggtcaggtatggaattttcca

SEQ ID NO: 3352 - DNA, 4001 bp, Homo sapiens
tctaacctttcaaaattaagaacttatgaataaatgagatgactctcagaatatgaacagaaaagtctacttctgaacataaaaatgtaatcagaaacaatgtttccacagaataagatgtaaaggtatctgagaaaagagcatgaggaagaaaagtgtggaaacggtaaaaagcaagcatatgtaacggataaatttccagtagtatgaaaacaaaactgtcagtaggaataactgacagcttaatgtgactccaaaataagactttaaaattttctctgaaattcagcactagaagcagcttgttaaagagaacaggtcaccagtgaattaagaatcaggagactatgtatccttgggcaaatccacttaattctcttgggcttcagtttccttatctgtaacatgaatctggggaggtaatcaatacctgtatgcccccttcgaaaggtgttctttccataattctgtataagaaattaaaatctattctcagacatacaatcatagctccacgattgttttgtttcaattttcatttgcatcactttttaacattttataaacacatctcttccgatttcagagcatctagtctatagcaagccatttcggctagcaattaatcagttcaagtctggatgccaattttatttatttatttttaatgtgaggcatcccatcttttccaaaccctaagaaacaatgcctaatcaagcaccaatttaccacacataatgccctacaaaaaagctgacaaaattataatcagttcattctctgactatgcttcacgcatattagcaaggaatgacatctaacaagtcacaacttagtgatgaaaacttgctggaccagagaacagctccagggaaagcggcagggagaggtggtcaaagggaaacaaggaggagaatatcggcacccggatccggctagacaagctggatggcaggaaacgggtaggtacttcccaggccaggtaggaactggacgccgggtcgaggtaggctgtgtttacaccccctcccacctcagcggccccgaccttcaggaaaccccgggggtctccaccaggctggtcgcgcccctccaatgctagtcagctggggctcaggggcaaggcgagaagaagccgttgctgctgacaggctcgcagcccagggcttcggcaggcaggtaccaccagcagaccccacccgcccctcacgcctacccctgggtcggagctccgcaggcctcacggcggccgccaccgcctcagccaaattgaggggctgcagctccggaagagcaggccgggcaccagtgccccagcccgcccgcctgccgcctcggcccaacctccccgcagtggcggccagcttccgggcgcagcactgctcggcacctagttgcccgacaagaaaagtgcagacatggtacctgcgccttggtgcccggcctgttccgcctcagcactgccgtcccctccgccatgaccatagtgccagcgtctaggcggctggagtcggtacccggatgtagggacggcagcctgcgcggggggcggggcagagcggcgctctgcgtctgggaggaggagcggcagctgacggaacagctgcagcctgcgccgggagccgtccgggtagaagcgggctaggcggagggagagggcgaacgaggaacagccggacggcgtcgggtggctactggcagggactgaggcaccggaaggcgggcgccacgagcctctttgcgagggctgcggggcggtttgaaaggtcgtgatcgcagcgaccgctgcggcagtgtgcacggctgcgttgcacgttggtatgggctctcgttagttacacgggaagaacgaacttcgtatagtggcgaccgtttcagtaaacccacctgcaagcaaatacttagagaaccgtaattctgtcccagaagccacctaaggaatcagggtagaaaacaggccagcagtcttggcaaattctatagaacctgcgtgaaatcgacccaatctgaaatcagacgggggatttgagtgtcagtgttatttacgccatccggcgacttcaaagccaaggactttttcaatgacaagtttgtttacgtagataaaagacgcagatgtcaattatgtgagatgaagagtggacatctggttttgtgcgttaggcagacagatttagctcgtgtttttcaagtcagaagcaggaggaggaaattagtagtccttgacaggtggtgagggttttacatcttacaggattccacatttcctttgttgcaaattttaagtgttctctcttaagaaaccacagcattttcgcaaactttttttcctgcttagaaaccttgaatcttttatctggggtgagggaggccttgggatagcagatgggaagacagttcaaaaagtaaaaaacgcatacagtagcatgatttccaaaagaagaaaacatcaagtgtccctagatagaaggtgtattgagaatgctgagggaagggccatgtaacagcttccagaaatggaatttgagaggagaggagaggttgagtgggtctctagctgagtaattgtcagtgacttagaactaggcattgaagggtttaacaacaggaagttggttctctctggaagatgtattgactggtaactcttcaagaatagggacttaattttgccctcccagaaccagcgtctacatatgaaaagattattcgttcaacagatactcattaagccccactatatggtaggcactaatgtacaagtatgataaggctcagtccttcactacaaattgccttgactccagcaacagagacgtgcaaatcacaaattcttatacaggttaagtacccctcatcttaaagtttgggaccaaaacactttcagatttctgattattttggattttagaatatttgcatatacataatgagatttcttggggatggaacctaagtttaaatgtgaaatgcatttgtttcctatacaccttacacacatagcctgaagttacttttatacaatactttaaataggccgggagcggtggctcacacctgtaatcccagcactttgggaggctgaggggggcagatcacttgaggtcaggagttccagaccagcctggccaacatggtgaaatcccatcactactaaaaatacaaaaattagccaggcgtggcggcaggcgcctataaaacttcaaataattttgtgcgtgaaacaaagttttgactgcaaccggtcacagaaggtcaggtatggaattttccacctgtggcatcatgtggatgttcaaagtttcagatttgggagcatttcagattctggacttttcagattatggatgctcaacttgtattaaatgcaacgagagcctaggacaagtgacacgtaaatgttgcctcccttagagagatgggttgggtctatgagatagcagagtcccagggaggcctcttggtctatagataactcgcctcacttactgcaaggattacgtttacatttcccagattgtgtgatatttccctgagctgtaaatagtcacctatagttgaatggaatcatcttcactttctcttaattccagatttgttaaactgtttcaacccatctgaaaccaacaaaaaacgtgaatgagtaggtgttaaattcgggaacaaaatgcacattcgttgtttttgaaaagtccaataaagttgcattctgatgtcaaccctggccttgttcataggaaggaccttgttctttagggatagaatgtttctagctcataaccttcacattttcattcctctgtcagcctgtagattacgtacctccaaacaagacaaattttataactagggttaatttgtccggggtaggaggagagagaaaagaaaaacaaaaagcatgatcaacaataacagttacatgaaatacttgaatatttcaggtaaaggaggagtggagtgatctgtttaaaggcaatatgcaccagtaggaatagctctgg

SEQ ID NO: 3353 - DNA, 4001 bp, Homo sapiens
gctatcagagatgtgttgaatgatcggttaggaagtcggactccaagttcaggccatttaagagagcagtttagtggttaaagcagacactttgggcagaatacttgggtttgaaaccagctctaccacgtcctgctagctgcatcgccttgagcaatttacttcatctcttagttccctcatctgtaccaggagtgtaggaatagtccttacctcacagggatgttgtgaagattgctagttaatcgtggatgttgcttagaacagcacctggcacataccaagcgctagataaggtcgtgtgttgttatctccatggtgctttgatccagagcaaccctgcctcacggtgtagtctgtgaggacttaatgagttaacactttgaattacatttttttttttttttggtaaattctacctagcagcacaggagagtcactcggagagttcttaagaggaaaaaggaaaaaaaaaaaggtgtacagacttcattctgaaacaaatgacttagaaattccagggatgagccgggcgcggtggctcacgcctgtaatcccagcactttgggaggctgagacaggcggatcacctgagattgggagttcgagaccaccctgaccaacatggagaaaccccgtctctactaaaaagacaaaattagccagatgtggtggcacatgcctgtaaccccagctactcggcaggctgaggcagaagaattacttgaacccgggaggcggaggttgtggtgagccgagatggcgccactgcactccagcgtgggcaacaagagtgaaactccgtctcaaagataataataataataataataataataataataataaacaaattccaggatggagcctgggcatctgcactttttagaagcttctccagtgattctcatctagagccagggttgagaaccactgattcaggctttcgaaatgtaaaagcagttttaaaagtgtaaaactctccaatgcaatgggcttattactattattaccaccccaacgctgtacaatccatgatcttacagcatacacatgatcttagtcttcagaagagtttatgtttcaatagaagggtctcccccaaattcctccctcctcccacatcacccctatttacttcaagagcagaacaaatatgaaggaaaaaacaaaaaacaaaaagaaaaaccacccacgtttttgccccatctaatgattcggctcgtgtatgtttcatgggctcaacttgggaaccaactggaacacacacgctactgagtcaaactatttccagagagaaaccgctcaaccaaatgcaatgagtggtgcagccttctttacagaaaggtactgctatgcatccaggaaatctccaaaacgggaaagggaacactgctctttgtcaggagggtggggagacaaagagggagaaggaacaaggttttaactactgaggcattactttgccatctatgaatcaacagttcgagaaacgagtttgccaacttttgaggggttaaagtgctcatgcgttcgatggggtcatggttacattttggtagatacagtcgccaaaagtcatcgagctgtatccgtataactgcgccttttattgtaggcaaggtgcacctcaatttaaaaaagtaacgcaggagaaaataaaattaaacagtcgttagcgatgaggttctcgtgaggaaaccagagtccacgttagctccaaatgccctctttgacctgcctgctctggccgacaggggaacgagggttggaaggttctatgcaggtcctggaatccggaccgtcccgagggaggatatggagcccaagccccgcggcccggggggcggggtccttaccgagcagcaggtatttcaggacccactgcagcacggccaccgtctgcagccgccgcgccagctggatgttgagcggtgcaaactctaccttcatggcctggccgggcgaggacggcgccagccactgcagcctgcacccacgctgctctgcggcgcctgtgggaagtgcccggccggatccgggccccgcgctgggcactggctgggcggagaggaaaaggcagaggctaggcagcgagcggggacccaactgcgccctgggtgggagggcgcgctgggctgaggctgggggcagccaatcacaagcgccgggcgccagagctggcccagcgccctggccccggagcagctacagcggcccgggcgcattggctggcgcgccgggcgttggcgagagtgcgccgcgtgggacacgagggacggggagaggggtcaactggcagccagcccgagccgggcagcgcgggctcctgccgcctggctgaggacctgggatctccaccaggatctgaccattgttcagctgatcgatcacccagcgcttgccttcagcatcccaccccttcattcgaaccctcggtgattggggaagggttagtttgaggaatcgcacaccagctggagagatgagcgagacttgtttcttagtttattgatctgtgtccccccgcaacctccaatttccccgcggatggggaaggggacctggcttcctcactcttgggtcctcagttccctacaggagctccgggaatctttcacccattcattcattcaacccacatttattgagcacttgccacttgctgagcaccatccgggcgcttggataaccaagctgtcaagcgcatccgtgtgaagagaccaccaacaggcattgtgtgagcaacaaggctgtttattcacttaggtgcaagtcagctgagtccgaaaaagagtcagcgaagggagatggggaaggggttgctttataggagttgtctaggtaatggaaaattacagtagaaggtggttatctattgttagcagaggaaggggtcacaaggtacagggtggggagatcataagactcattgtccagaagaagaatgtcacaaagtcgattgatcggctaaggtagggcagggacaagtcacaatggtaaaatgttgtaatgttggttaatcagttaaggcaggaactggctgttttacttctttgcgttttttttggctgctccaggcttcttggctcctgcaggccacctggatgtgtacatgcaggtcacagaggttataatggctgagctttggctcagaggcctgacacaagctattcattgtcttgttctcagagtacagggggaaacagacataagcaaaacaactacacaatttggtgtataattacaagtaagaccctactgtgaatgactagaagattccaaaaccaagactgctgcacggtcagggaagtgtctgaagaagtgcccttacttgagctgtagccaaatctagttaacccaggagtcatccgggcaaagggaagcacatatgcaaaggtcctgtggctgaactccaagaagagctcaaagagtgagagcttgggggacaagggtgagattggggtgacatcaggcaaaaatggtgggcaaggtccagacccttgcagactgagttagggttcaagtttgaaccccaagagcagtacaagacactgaagggtttcaattacgatgtgctaaatggatggctagattctaaatagtgcctagtccttgggagcaaccactgcactttatttataaatattaattaccacatagttgaaaaactcaaaatgatgagcagctgtcaagtcattgctgaagaggacttggaacagggcaaaacaatatagttggccctcctttctcccccatcctatgcccttttctccttcaacattttaatacaaagggagttggattaaaacaaataccagggccacttggaggagttgtttgtgattttttgtatgcaaaacttgtttgggtttctttttcctcctacttaaggagtcactttcttctttccttttagatttcttccttgaatcttcccccagtgctaggtggggacactacgaacacaccctatgtcaggcactctgcagagacctcac

SEQ ID NO: 3354 - DNA, 4001 bp, Homo sapiens
agaacagtgttagattggcattctctcttgaattccctcttgagaatcagccttagtgagggaaaggaacagtaggcaggggtaatgtaaacaacatacgtctggcagtaatgagggtcactgagggtaaccaggtacacccaagcgggatgagataaagagccttgcactgggtgccctgggagataacagtatacttttgtactatgtcctacactaagaactctacacagttgatttcatttaattctttttttttttttttttttttgaggcggagtctcgctctgtcgcccaggctggagtgcagtggcgcgatctcagctcactgcaagctccgcctcccaggttcacgccattctcctgcctcagcctcccgagtagctgcgacaataggcgcccgccaccacgcccagctaattttttgtatttttagtagagaccgggtttcaccgtgttagccaggatggtctccatctcctgacctcatgatccgcccgcctcagcctcccaaagtgctgggattacaggcgtgagccaccgcgcctggcttttttttttttcttgagatggagttttgctcttgttgcccaggctggagtgcaatggcacgatctcggctcagcgcaacctccacctccctggttcaagcaattctcctgcctcagcctcccaagtagcttggatcacaggcatgcgccaccacgcccggctaattttatattttcagtagagacggtgtttctccattttggtcaggctggtctggaactcctgacctcaggtgatccgccagcctcggcctcccaaagtactgggattacaggcgtgagccaccgcgcccagcctctttttcatttaattcttacagtcctgtgagttaagtgctattattatctacattgtacattttacaagcaaggaaatcaaggcttagagatggtaaatagaaatggttatacaggcagttgtttaaggcaggatttaagccaggcagccagagcccacttcatgctgcatttgctggcagcaagggaaggatggagggggtctgggctgagaaaagggtgtcctgaggccctgacctgaggctctacagtcactctccagctccagtcccctccgtgctgacccccaggcctcttgacgaactcagtggtgagccttaaggccccatcctggatgtgttggcgcccgaaggagaggccgtcgtggaactcccagccatagggacccacaccgtccccctgctcacacgtgtgcctgagcttaggagtccccggggtggtgccctgctgcgcccacatcagtcctgggggtagaatggccacgtaagtcaaagagcaggggacctgtccctccgggtctccgggtcatccctcttcataactctcctgatccattccttcccacccttgctctcgcttcaagctggggcgcccagattaggagtccgcctgcctgcccgccctggggcccggttaccggtgaggaggggcttcgggctgcgggtcttcatgccgaagtagacgtgagggcggtaggttccccagaagaggtccggggccacggcggggctggaggagtcggcaggcaacacaggaggcgcggagtgcagcgtgaccgcccgccgcgcacggtaccacgccagcacccagcgccccgacatacccagggccaaagacaggaccacgacggccagagccactcctccagccgtgctacgcggcccgccgccccggccgtcccgtcgcccggggcctccccgagccgccctctcggctgtccgcactccctctgccggcactgcgcggcgccgccgctcgccccgagccatcctggcactgaggtccgcgtcacaagagctcggagaggcggcagtggagcccgggtcctgcctcacctctccggctcccgcctctcgccctggcgaccaccgtccggttagcgacacctgccagccagcgcctgcgcctccgcctccgcctcccgccggaagtcccgccccgccacgttaggttaagtcccagagtccggaaccgctgcctgcggcttgacacagggttggtacgtagcgtctgtcctgggcgttggtccaccgggattgcgtttatctggcgaccccatggagttcacaggctcggaaaaaccaatctaacgttgggctgaggcatgagaatcgtttgaacccgggaggcggaggttgcagtgagccgagattgtgccactgcactccagcctgggcgacagagcgagacttcgtctcaaaaaaaaaaaaaaaagactgatgtggccaggcaccgaggcgcacatctgtaatcccagcactttgggaggccgaggcaggtggatcaccagacatgaggagttggagaccagcctggtcaacttggtgaaaccccatctctactaaaaatacaaaaattagccgggtgtggtggtgggtgcctgtaatcccagctattcgggaggctgaggcaggagaattgcttgaacctgggaggcggaggttgcagtgagccgatattgcgccattgcactccagcttgggcaacaagagtgaaactgtttcaaaaaaaaagaaagagagagagagagagagatggagggagggagggagggacggagggagagagagagagagagagagagactgatgctttatgcaacacgaccacttatatttcactataatctgactggtggccccactctccactagtggtagactttttgcttatgaaatcatctgaccaaacccaatggttagtcctgtttttgtctttcttgctaccgttgcatttgtcgacatccttattgtagcacttattacatacctgtttcatttttcatctttgtatcacagtactaatcaattataggcataaggcagatgctaaatatttataaattcaacacatgtttattgtacaccctatatcgcattatgcaaggtgctggggactcagagaaaatggccccaacctcaagttcacagtctagaagcacaatgccagcactcaatgcatgttgaaccatacccattttttttttttttttttttttgagacggagtctcgctctgtcaccaggctggagtgcaatggcatgatctcggctcactgcaacctctgcctccagggttcaagtgattctcctgcctcagcctcacgagtagctgggattacaggtgcccaccaccacgcccagctaatttttgtatttttagtagagatggagtttcaccaggtttgccaggctggtctcgaactcctgacctcaggtgatccacccacctcggcctcccaaagtgctgggattacaggcgtgagccaccgcgcctggccagaccacccccatttttacagatgaggagagtagttaagactgacccaaaataacagccagttaattatggagctggggaactcaaatccaggttgttcttttgactttagaataaggcctcttagggcaggcgcagtggctcaagcctgtagtcccagcactttgggaggcaaaggcgggcggatcacctgaggctgggagttcgagaccagcctgaccgacatggagaaaccccgtctctactaaaaaatacaaaattatctgggcatggtggtgcatgcctgtaatcccagctactcgtgacactgaggcaggagaatcacttgaacccgggaggcagagattgcagtgagccaagattgtgccattgcactccagcctgggcaacaagagcgaaactcttgtctcaaaaaaaaaaaaaaaaaaaaaaaagaataaataaggcctcttagataacagcagttactacactcccagcaatgttttaggtactttacagatattaattcatttaatctccttaacagtcctatgagaaaagtactattattttcattttacaaatgaaataagcactgatagattaaataatttgtctaaagtcatacagctacataaaaacaaagctaggatctcaaccccaagcagtctgg

SEQ ID NO: 3355 - DNA, 4001 bp, Homo sapiens
ttagctgggtgtggtgttgcatgcttgttgtccatgctacttgggggctgaggtgggaggatcgcttgagcccaggaagtgaaggctgcagtgagtccgatcacaccctgccctccagcctgggtgagacagcaagactctgtcttaaaaaaataataaaataaaaaaaattaagttttaaaaatagaatctggtggctcatgcctgtaatcccaacgctttgggtgggtgaggtgggaggactgcttgagcccaggagtttgagaccagcctgggcaacatagtgagattccatctacaccaaaattaaaaactcaaaaagaaaaaaaaagaatctgtaactaaaactcaggtaatatcaatatggaaatggtgtggaggatagagagcaatcttgctagaattctgatctcgtttaggggttaaatatagacactaattaacactaaatcttagaaaaatctgaatttagttatgtttgcttattttttccccataatttctaagatttggttgtggataaagggtgaagtatggtggtatacagaaattgccatgtgtgctcattaattagttatttacatgtctgcaagatgtgaaattccaagagagcagggacacagagctactttctttcttttttattttttaatttaatttaatttaatttaatttatttatttatttatttatttttgagacggagtctcgctctgtcgcccaggctggagtgcagtggcttgatctcgtctcactgcaacctccgcctcccgggttcacgccattctcctgcctcagcctcccaagtagctggaactacaggcgtcagagctactttctaagtgtttaactaatgataactaactagattaccagatctgcttgtagtttcccacagatgccatgccgtactctgggtggaacacccttctcttctttacctggttaactgctattcatcctcaagagttggcaaaatagagtgtagtagttaggggttcatgctctggcatcggactacctacctttgcatccagactccaccattttctctgaccttggacaaataattatcttatgcctcagtttcctcatccttagatggggcaaatcaagtaaatgagctaatctagttaaagcacttagcccagtgtctaaactctgtaaatattagctattgtattcttgtagccccagctcaggtatgagctctcccacaaagcctttcttctcattacttgtcaacctcagactccttcaggaacccccacggcactctgggcctattcctactgtagtacttaaggttctattaaaaccatgcttttgtatcgggatcccctatcccacccagttcctccaggacacggatggcagattagtcaaatctcttctcaccccactgtccgactccgtgtttagtactaatagtaacagaacgtctagtgaatgaagggcacttcggaaggaatcgttaagtgcctatgaagcagagcattaaacgtaatcatatcagaaactggactgttttcaattgccgctaaaatgttctacattcgaaacttgggaacgtcagagctagagggaacctcacagagaccacccggcaccatagcggaaactgaggcccagggaggttggcacgcgcctcgggtgtctcaacagcgaattaacaacagaatcagagctagattcccagaccaggggttcccccgtgcccctcggctagacggtcaggaaatatatcacacccccacaggagttaccgggagccaagcaggttctgactccacgctagttcgacttaaaggagctcttctctgcccgggtcgttaggaggagggacactcacttggccgagaggtgttagagagatcttccaaactctgcgactccccctgggcggccagctctgcggccgggagagaactaggcgctaggacagctccaggtgcgacttggttgctggggcgaccgggcacctctcacccggaagcgaatacgcgaggggctgtagctgagccaatcagaaggcgccgggactgtgccgctgcagctgggccaccgcagggctgctccaagtgagaatcgtgagggtggccaagtccagtttggacctctgacccttgggcagcacctcccgacagccggctcgggacccaactctgcgagccaggtacgtcttccacttctgcggacaagtgatgcgcgttgtgcgcacggtgtgcgcgtcaccctgtttgtcagtgtgtctgccgcctcctgctccaggagtggtcgggatctgacgagcatcgcggcccagtgtgtttcatccagtctgcctggggccggtgaatctggaccagcaggatcccaggccctgataccgaaccaaggcgggctctgccgctgaggttgtccacgctcaaactgcaggttggggccggggggggcggggcgtgaaattcagtcttggagcaggctaaggggttgattgaagggatcaggctccgttctctgactccgtctgtgtggcttttttggggagaagggtggggacgatgtgagttcgaaaaaggatacgagatctggatatctggatggagctggatatattgtgatcagtcagagatctgcctgggaggagagtagtgtgtagtcacttttcagtgccttggctatcaaacaaagaatactcttacagccaaacttaggtccctgtatccatggtgaagaaagatagttggagtcttcccgggctagatggaatagatagtggaatctaaccacgtggattatacaacctaattcctattcccttgaaaactctgggagagtggtattggacaccattacagtcagtaaatcttcgtttaaaatgttaagcgcatatctcagatctagttgtaaaagtaacattttctgggttggtgtgagacaacttgttttgattcagcgtaagtatcctcttgctttttcctaatgtttctcagtacacaaatttacctgggctgcatggtttttgagatgaagttctaatctaactgatttgttatttcatttccctaaattttagaaataataggtaattattggtgcacaaccttacagaattcagtttgacctgttatttttcttgcctgttaagattttaatgactctacatttttgtgagtaaagttgacgtttgaacaacatgggtatgaactacccggctccacttacaggtggatttttcccaacccaacacagattgaaaatacagtatttcaggtcgggcgcggtggctcacgcctgtaatcccagcactgtgggaggccgaggcgggcggatcacgaggtcaggagatcgagaccatcctggctaacacggtgaaaccctgtctctactaaaaatacaaaaaattagccgggcatggtggcgggtgcctgtagtcccagctactcaggaggctgaggcaggagaatggcgtgaacccgggaggtggaggttgcagtgagctgagactgcgccagtgcactccagcctgggcgacagagtgagactctgtctcaaaaaaaaaaaaaaaaaaaaaaaaaatacagtatttcaactaggcacagtggctcatgccggtaatctcagcactttgggaggccaaggtgagacgattgcttgagctcaggagtacgagaccagcttgggcagcaaagcgaaacctcatttctactaaaaaatgtttaaagtagctgggtgtggtggtgcacctgtggtcccagctattcaggaggctgaggcaggaggattgcttgagcctaggagatcgaggctgcagtaagctatgatcgtaccactgcactgcagcctgggtgatagagcaagatccagtctcaaaaaaaaagaaagaaagaaaaaagaaaagacagtattcctggaatgcaaaacccacatacagagggccaacttttcctctatgcaggttctacagggctgactggagaacttgagtatccgtggattttggtatacatgggggttct

SEQ ID NO: 3356 - DNA, 4001 bp, Homo sapiens
gtaagaatttgtcatttaaagtgtaaagagaaaacattttaagcagagggatgaaatgatgatttacacgaaggaaggagaaagggacgagggaggaggaggaaagtacagtgattagaaggttgatgcagcattccagcgaaaggataatggtgatttagactggagttagagcagtgaatatgctgagtatagtttggaggtagaactgacaggattgctaaagaattagatatagaatagagaaaaatgaagacattaaagtagcagcctagttttatgtttgagtacctgaaaagacagaagtgccatttactgagatagggaaggcttgggtggtggtgtcaggcctctgagctgaagctcagccattgtaacccctgtgacctgcacatatatgtccagatggcctgcaggagccaagaagtctggggcagccgaaaaaccacaaaagaaataaaacagccagttcctgccttaattgattaatcaacattacaacattcctccattgtgacttgtccctgccctaccttaactgatcaatcgaccttgtgacattcttcttctggacaataagtcttatgatctccccaccatgtaccttgtgaccccgtcctcctctgctaatagataaccaccttttactgtaattttccattacctacccaactcctataaagcaaccccttccccatcaccattagttgactctcttttcggactcagcccacttgcacccaagtgaataaacagccttgtggctcacacaaagcctgttttagtggtctcttcacacagacgcgcttgacaggtgtagcatgggaaaaggacttcaggggatggcagagtataggtgggtagaaacaacaattctattaaacagacacaacagctctattttggacgcagtgaatttgagatgcttgacagtaccaaaattttaaaaatcgttaaaagttgtacagtgtggatatcccagttgtgtgctacggaattcaaactaagctcagtctgtagttgctgtgagctgggaactcagggaaaggttggggtttgaaacataaatgagtaataatttcatagatcacattttaaattcttcaacaaaatacatataaaacgcttgtgttgggaagagacatggaagttctatttctgaagaagcttagtcatggggggtggacagacaagtgacaagttcgtactttcaataaagtatgctaagcgctaagtgctttgagagcacataggaggaaggagaaaccaacagtctgtgtgtagagggatgggggcgtaagaagcccaagggaagcttctaggtgttaacaattgaggttagagtgatttcagtaacactcaactgagagatccatctatacaaattttaacagtttttaaaattttgatagcctaggaaagcataaactctgaaatttggggaaaagcgattttacgtttccccttaccttcccccagctccacaatttgccggaggcctgcaacccgcgtccacgtgagaccccggtcgcaccccgagcccgggatctgcgcacttacgtgaggaagcactcgggccgacccgtggctttgccgacttccgtcagacaccgctccagggtccgtcgacgccagacctgcggcgccatggctgtcagcaactcccgacacaatgcagcatgcaagggaagggagccgcccggaaaccgcgcggcaaagatgcgcccagcgcaacttggatttcagagccgaaagttccgcggcgcacaggttccggactcgccctcagccagagccaatggcagcgcgagcgctttcgcaggagggtgggaaacaaaaatctccatggtcagcccaaacgcctttcaactctctccaaacttcgttttgtatttttcaggggcccacaaagggtgacccgtcctggccttacgtttctgttttagctaaagtaggcccgttgtagcaggaaagcagcgaccttcgccacgcccctgacctttctgtccccgccccctctgcctcccgccccgccctctgccgcgcgtctctcaacctccgtggctagtcttgacgtggcgggttgctttccaaaatggcgcgggtgctgaaggctgcagccgcgaatgccgtaggtgaataccgggcaccggcgaccttcgccatgggacagggagcgtgggaacggcggtcgggggcggaggaggcctcggcgtggccaaagcaccttgatctaatgtcctcccccgggggcgcgttccacagcagctgctgtcacttaggcagagggtgccttccagaagcgccaccgcttagtagcggggattgccttgtgcatgagtcccatttccatccgagagctgtgcgccttgggctctgcaccttccagtatgtgggcgggagagtcgagggaacttgcccggcaggtcaggcagggcagggacagaagtaaatagaagcggatcggtaagttattttaccgcgcaccaataaagagactggggagaaaccagaaaggagagcacgttccgtaaaaacaacaactactagtcggccgaactccaagcgtgaccagctttctgttgggaacactcaaaggtcagtggtgtaaagaatacaaaaggagtggtttttccacgtgcactaatatatttatcgcgtacacagataaaagcatgtggatttggaaactttcttgagttctctcccccttcattttttttaaaatatgtacatagaatcagttatgacagaaataactgtaataattgtcacgttttctgactcactttctcctctttttatcctttttttttttctcttcctccttttatgagagggcaagtatttcccttaatctgagattccctattaggaagaaggtgccaagtggtaatgccccagagttactccgggacattcgtgataaatccttctagcaccagagcccacattcttaaccgtaaggcataccttcctcttaggtgatacacaagataggaacgtaaaactataaataaatgaatatttgggaaaaggcatttttatgtctatttttagaactgcacactttaatgattgacagtttgggaaaaagtatgacttccaacaggtcatatacatactgcaagaactcaatacagataaaggtgcatgtttgttttgtacttacatacacatcttggcataaaggaaaaatgaagacagtgtattccaaagattgcctttgatttgtcctattaagatacttgaagcttaatgtctccacttgtgtgtgtgtgtgtgtggttgaatatacataaagtaaaatttacctttttttttttttttgagacagagtctcactctgtcgcccaggctggagtgcagtggcgttagctcactgcaacctctgcctcccaggttcaagccattcttccgcctcagcctcccgagtagctgggattacaggcacccggcaccacgcccggctaattttttgcatttttagtggagacgagatttcaccatgttggccaggctggtttggaactcctggcctcaggtgatctgcccacctcgtcttcccaaagtgctgggattacaggcgtgagcccgtctctactaaaaatacaaaaattagccgggcgtggtagcacacgcctgttatcccgggtactcgggaggctgaggcaggataatcgcttgaacccgggaggcggaggttggcgtgagccaagatcgcgccactgcactccagcctgggcaaccaaagcgaaactccgtctcagaaaaaaaaaaaaaattgctttttaagactgaataatattccattgtgtgtgtataccacattttgtttatccattcgtctcttgatagacatttgggttatccccaccttttggctattgtaatacagctatgaacgtgggtgtacaaatacttctgaattcccgcttctttgggggtgtgtatactcataagtggaattgctggattacatggtaattctatgttatggc

SEQ ID NO: 3357 - DNA, 4001 bp, Homo sapiens
tcacagataggcggtggtttcttgagtgaatgcaatggttaaaatagcttctaataaatctagagccaacttcagggctacctagataactaattcatacattctaaaaggctcgttttgacccaaagtttctcagccatagaggcaaaaacaataattacagtaatctacaacttatgcaaattctaaaaactgtgcttggctcctcatcttcaggttcctatgacaaatttatggtggactgaatgttgtgtccccacccccaattcagatgttgaagccctaatccccattgttgatggcatttgaagatggggcctttgggaggtaactgggttaaggtcatgaggtagaggcctcaagatgtcattagcgtctgggtaagagccatcagagttcatgtgttctctctctccctgccagatgatggcacagtgaaaacgcggccatctgaaagccaggaagagaaccctcgcaagaacccaaccatgctggcatcccaatcttcaacttccagcctccagaactgtatgagaaaatacatttctgttgtttaagccactgtctatggtactttgttatgacagccaaagctaagacaaaactcatagaaaaaaacttccagaaaatgattttccctccctccaggtagctaagaaaacagttgcaacttcttgccctcatagcacttctcattttcccagttcttgtatccactggcttgctcagtgtctgtctcccgcaggtgtcatgtctgcagagggcctggggagcagagatgttgcttatcttgttcatgctgcagcttcacctgcaacagtgcttgggccatagcaagcacttggtatgttcagttgttgttgggaaggggtagaacaaggagaggccaagatccagaagtaaaaggctgatacctccctcaaggcagtagccagcagctgggacttcaatcctaatgggggaggcagctgaactccagaggcctgtgccctcccttcctttcctccctggcctggtatcctgacttaaacctctttccctatcaaactttaaaactgggggcagaagcggatcttagagataatcaaatgcaaaacctttgttttacagataaggaatctgacattcaaggaggtattcagtagagttaacatgtagtaaaatcgagttttcctcttttgtttccttagtcctgaaagatgctgatgcctggcatgatgcctggcaaaagacttaccttcctttccatgacttctgtaccaaatttgtcagttgaagcttatctatttctgctatcttgagagtgagaattcttgattgagactgcaaataagtaagcacccaccacatgcaattccggactgagtacacagaaaggatagccagttcttgactcagaagatgcattagtgtgactgatgcctaaggaatttgtcctaaatcttgttttaaaagtatttccattagctttttaaaacgtactattaaatgccacaaccccctacccttactatgcttgtttttcaaaatagtgctttttactagacaaaccctaaaaaagcacttggaaacttaatgatgagaaatggcccttacaaaaatagctggcttcctctgggtccaaatgctgttgattaggaccagggcaaatgcccattgtactcaatcttcctgacaactcattattccatactgaagaaatggcttctcgaagcaaaacctgctctttcaagatcataaaattccccatatcatttgagttaaaatgaaactaagccatttgagttagattacccagatttatatctttagctattaaaaactgacaggcaagctaggcagttatggatacatcttctggtaactgaggattatttgccaaggtctcttacctgcaagactgtaaacatgcatgttgctcctatccagacaaaagctttagtaggatactagtggcctgttagctgccaaagtcacctcactgctcccgataaaatctctgcacatcctctttgatgtaatccacagatgcctaacccagcctaacaactaaattactcacaagcctttcctgccacaaatcttcttaagtattccttgaagtctaatttgtatcattttcaaacctacattctagtattttctctcaaattgccaacacatagttaacggcagaaaaacatagtatttttgttgattagttcaagatgacagacattccacaacagaagatagcatttttaatgaaagaaaaaaatgtggcaggaccggaaataagccaataacctactaaccttattaaatctctcatgttatggtgagaaaacaactgaagactgttcagctaataatagaaacccatcaaaaacagtaccttctggtcaatcccctcccaagccactgttctgaacctaacaaatagtgctttctgtctcagataggagctacttctttatctgaaaacttaatactgcagggagtgctcagtggggagagcatttggaaggggatattgcagaaaggagaggaaggtattgctgacagcaaggcaaaaggtagagaccaaatggcaattatcagagggtcctcagcccttctacccatattaatcacatggctttccttatctctccatcatagatgaaaacacaagttgggaatgtgatacatttgtgttttgagtacagcatattttgtgaaaagcacttgatttcaataagattttcatttttaactcacttttaagaactttcaatacataaccagctatgaaatgacatctctggcagctgtagtagcaaaaagcactggacttctagggaagtagggagtagggaagttctaggctggagtcccagctctggcagtgagcaaatcttggtcactgcttgtctgaaaaatggggggaaatggggataacacctgcatccttgggctgctgtaagcattcattacgcatgtgaatgaccattgtaaactgctgcaggagtgccaaggacttctatttacaaacattggcctggagatttagggtttttcttccaatacacttcaaaatttataactttaatatgctatctgaaaagcatatagtaggaagaatccaaagtaactgaacagtttcattcaagactccagtaaaaggacgaattgtaacatggcttttcttagaacagagacagcctatcatcattggaaatcttctcaatgggtcaatttgtctcaaagtttttgtttgtccatttccacatattatccacccccgcccagagtcagaaattctgtaaatttggctttaccaggcaaatgtggttatttatgtgtttgttcagaaactcaaaacaatctccaatgtaaatgcaaagtatttaacataaacggatttttaagggttggtccccttccaacagaggacaggcacattctggtagaggcagcaacaagatggaaaggcctcttgagaaaacattacaactgggagataattaatatctaacgtttctaagcagaattttaaagcctcaccttcccttccctcgatctgtttaggaggaaaaaaaataacgagtaactatcaaaatatgctttttattcaaagaaataatagatttctttggagacccgtgtccttgggttattggggtcagaaagttaatttgctctttgctagaaagggtgctataactattggtttacgtttattttaaagacagagatttctaaaaccccagagggacttttgaggccaatacttagaggcatggattacaatgtgggctaaagaaatactaagtctgggtttcctttcatcttttaggctgccctgttcatttcttctacaatcataaaacaaccacataaagatgaatgccttttattatgaaaattgctgttacattacagccaacattccaaaacagtattttaataaacacttgtcttgattataaagtagagcaaaaaccatgatcctttttcaaaagtaattaacatcttctcag

SEQ ID NO: 3358 - DNA, 4001 bp, Homo sapiens
agatgcctcaggtagggaaatataaggactctttccctccctattcttgatgaccacaagggggaatcttccatctggcagttatgggccctgagggaatctgagcctgggcaaagggcccagcgtgtcagttcccatcatagccacactgtccagcatgagtcaccacacacgtagccaggtgagtcatacaggctgacggacgctgaggacaggacaagaggtggttgggcaccggagactggagaggggcccagggaagggccaaagaatccatctcctggccattcatgcagttaagtttctgtgccgatgcagggctgttctggtcacaggatccctgttccactctggccttcagtagcccccaatcccttccaatagtcctcttctcagaaggccagtcatcactagaatcctgttccccttctctaaacatgggcaagacctcatcttaatgtgatcactctttgcaccccaatgttctaaggccttctgacattccccctctaagacttacttatcttcatgccatcctcttacattagctaacttgcaaaatgaagatggtaacaaatgcaggtaggtcactgcattacctctgtgaggttagtactcaatcactgcatttggagtgactggtatctgatcactccaaatggatcaggatggagtgatcagataccaatatactaaccttggagatacatatttaggcagtaaatgataacaaaagcaaatgaacgatataaacaaaactcaggaaattttgggtgaattacggagaggcactcaagaggtctcaaagctgattactgacacaggagtgttcagttttaatgccatttaaactgtacatacacatcttaatcattcttttgtatgtttcacaataaaaaataccaagaaaaactggggtaagagtcttgattcagcacttattaggtgtgatctaatgtggactcaagtaaccctcctagctcacacacctttgtgggggccctatgccataacgtatatgaaagtgctttgcatacggtaaaatgttttccaagttgaggcctcctggggcaatgcctttatccttcagggctgactgttcagctttttgaggactttgaaatcctaaaaccctactgcacagcttggccaactacgcataccccttaaaaacagccttggggaccaccctccaaaacagactggggacagtgtaggatgaaagacagccaacccttcaagagagccgaatagaaacaggaagtgagggtggtgcagtggggcaagcctctggcttccaaatcagtctgccctggtcccactcaagtcctagagggacactcaccagctgtcaggacctgtactttccacgggtgagcggccagggcccgctggtatgcccgccagagtgccatgcttcctgtcaagccaagaggagagggggtcacccccaccgtccctctccacgactaagaagccgcctgacattcccttgtgcccactcccttccccttcccacttccaatgtgacttaaaggggcagaggccacatgaaggatgcttcccagacagcttcctgtcgcaggagtcgccttagacaattggggaagagagaaaggctgtgggaagctatggactcctggtagcagccaccagccaccccaacctcattcctgaagccagaccacctggaagcctccgttcccgacggagacactcatgaggacagctttgctctggcttctacccagagcttgggtgcctcaaaagatagcttggtccgtctccagattcagacttggttggaaccagtttgtaaccttcctgagtccagctccaaaccgaaaatagggcccgtcactgcccggatataggatgaccacacaccttgtgggcactcatggcttgcgacgctttaagccagagaccgcagatcacccgccactcacctgagcgccgagcctccctcccacgtgacaggctggcctaggaacttccgccacaagtcccgccccttcctcccagcgtccttcggattacgcagccaggacaggaatgggggtggaccgagccatgaatacccgtggagagcggcctaactcggccacccactctgtgagagaccccttttccagctggactgtgccggaccctggtgtggggcccgccagccatatttctcacctaagttcgaccctctgcctcctcctgccccttctctccgcgcgagacccgggcctctctcaatccggtagtctcattgttcagcccaccctccccgcataactggccataactacgatccttgtctcagcaatcgtagttagggaactataagttatagttaagtgcgtgttttgtctctaggttcttcactggcctcaactgtgagctcatgagtgggtaaaactggggtcgttcatatttgtcgtcctcatagcaactatttcagtgctttgccgcaaacagccacttaagaaatactgcgtatgtatgattcttccacagaaagcattggaattagaacctcagaagacattaggtattggctcccaaactaacgggctgtgcagccttggtcatgactagacttgatgttaaggctctgcatctgtaaaatgagggaggttacactattgactttccaaactcggctcctcagttctagggatttttcagatgtttgtgtgtggggatgagaggggcagcattactacagctgcttctccaacttttttttccaagtatatacttctcaaaagacccatttttaacggggcccacaactgcatgtttgaaaaccagtaagctaggtgatttcttaatccccttccagctctaacattctaagagtctgtgaatatagagcaatatcctttctagagcgttggaaatgtctacaatatccctggcaatggacttgtcaggctggcaggctttacttatctccagggagcccacacgtcaggaggcacactctttcaggctctccacctgcccagctccacccccaatttactcaattcctttatgattaaggcagggagactcctgccacaaatcctggagaaacagagtaaggaagcaagagaagtcaatgtcacaaacatttaactaaaatgctatttgcaaaacagcatgctagaggagtgaactgacaaaagtaaatgtaataggagaccaaatgtggtaggctgtaaagttatattctgaagttagactgagttcaaatccccagcaccaccacttactagttatatgaccttgaccttttacagacagcttaccctctccaactcttttatcattaagtaaaatggcaatacctacctcatacaagtgacacatgcgaagtgcctaaaatggatcaagtgcttaatgcttgtttatcctttttcctcccttcccccttgggaacacaagggagggaaactattttttactggagaaaactgggaagctctttggtgaaggtggaatttgagccgggaccttgaaggatgaattgaactcaggtgaagatggtggaaaaagacactctggcgaagggaggaatatgagaagaggaataaaggtagagaagtgtatgaacaatggatagtatgaagtgggtatattgggagggagggttagaaagagaaaaggcttgttagagaaaaagaacaaggtcaagactagggctgagactcagttgcagaagcagggctgccagcaccaatctacagcctcaagtgtggatccccaggtctcatcttttctaccactgaaaataggaagggggctgccctgtagaattgagtaaagcttctcttcgacagaaggcacttgcgtaacagctcaaaaaacaaaactggctcaatgtgagctggatcccaatagggtagtgcaacacttggcttctttgcactgacatgggttgtggtctctgctgttgatagacttgggtttcctccaggtctattttctcatctgtacaggataggggctgaactctttttgag

SEQ ID NO: 3359 - DNA, 4001 bp, Homo sapiens
tgctactccgctccaattgaccctggggcttcttaaaatcacatgcaaaattcactgacttgtattcactggatagaagctaagacaggagagcatctaagattttaaaacaaccagaactattaactgaaacagcaatcctggacagaaaactggaaatactcaagcctctgaggttgaaactaagctcaagtctgtatttcatgttactaagagccctgacaagttcagtgtataacctaagcataaaattctagattgcagttacccactacctattagattagagatagattattccatttctccctacacacaataatctaaaaatctaagtgggagtgtcattgacaagagcaatcaaaatcactgtatattgtgtgtatgactttatatatataatatacatgagttacatgtttatatacatgtgtgcttaccaaacagcgaggagtagatggtaatttctaagtactacatcctagaagaggaagatggataagggcaaagtaatcaaagaagattgcttgagaaggccttgaaaatagcttttgggaaggaggagcaaggataaaggtcaccacttgagggagggttggagccaatgagtggattattcccacggccgcaaggagtgtacactgtttaatgtactggaaaatcagagtggacaggcaggaaggggttatgtaagatctccaaagtcaagggggtgtttggacttgatagagtaagaaaaggtaaatcattccttagaaaaagttgtgcaagctgtattacgtgagtttcatacttcaaaagaaagaaaccctggctttagtatttgcttactcaaccctggaattccacctgaaatactgtttcctaattccattttaaatattctgtttctgtcatgtctacccctgaggcatgacctagtccagcctcgatttcagcaaactcaagatagaaaatgattgcttaaaatcacagccctgaacaaaactgggctggtatggtctcttcacaaagcctcttagcttattgctaatgagcattacatttcctcacacttcatagcttaacctgtaatgaatcaacatcctagtgaataggctgccccttgatgaaacatgcatttttttcatgtgaaaaatatttccttatactcagtcactggaatcgtcttcgttgggtaataaaattgaatgagaaatagacaacttttttgctgagtggcacagaaatccacagtcgcccgtttcactgtaatataccgatcaaatacccagtcacagttgtattttatcagacccctatggaaacttctgatcaacttctctcccttacttccctgcccaggtaggacacccgaattcttggcactttgcacagacatccagctgggtctcaggtgtctccgaagatttgtgcttttcggcaaaaatcttactcaaggaacaaacccaaaacatcccataaggaaccaaggggctgagatggcgcctccgcgtgcccttccagcaagcccacctccccaactcacacaagcacacaggtgtccacactctcggcgcccggctacggcccaggtaagcccagatcccggcccgggcggcgcacccacctgacgaggggctccttctcaggcagggcgcgctcctccaagcactcgcacccgcagcagcagcacacggttctcagccagtccctcagccccatggagagcgagggcccccaccggcgccggaagcctggggccgagtcgccgcggcgagcgatcgaggctggggcgcggccaccgcgccagcgtccaggtgcggggacagcggcagcccgggcgtcgcgggctggtccgcgcgcatcacgccgcggccggggacgcgggcgagggctgcaggccgcgcgccctcctctccttgcgttttgtttggggcgtgagttttcttcgggctttttttcccctcttttaattccccgagcgcaatttggggcgcatgcgtccacgagacgccccgctaccgccctctaagggtgaagcagggactccagccagtcctcaaaatcccagggcaccggaggctggcagccgggctgggggagggcggggaggggaaagccctggagccacagagcacgaggttgggctgaatctattcgtaccttttattggcttcactgcgcgaggaaattaaagatcctcccccacccctacaggccttcaaagcagagttttgggcatgtttttgatgtcagctccacacagagtaaaagttaccaaaagagcatggattgatgcatatcggcgtagggtttttttttaaataatatatttacaatgatttgaaaaattgttttcaaacctcctagtccttaaatagcccctatttgtgaggcaaccacttgtgagtttccagagctatttatatatagttgtatttatttgtgcttgtacaaacttgttaatatatgtgcctgtcctcatccctttgacccaaacagcggcatactccacacatttctgcacctggcttttttgactcagtgtatcatggaggctgtcccttgtcagcgcgtggatatcctcctctcattttaacagttgcatgctaagcagttttaaggatgcccacatgttacttactcagacccctattgatggacatatgggtggattccggcctttcattattaagataatgctgcagtgaacattcttgaaccaaagtatttgaacacgtctgcaagaatgtctattggataggccgggcgcggtagctcaagcctgtaatcccagcaagttgggaggccgacgcgggcggatcatgaggtcaagagattgagaccatcctggccaacatggtgaagccccgtctctactaaaaatacaaaaattagccgggcatggtggcgggcgcctgtagtcccatctactcaagaggctgaggcaggagaattgctcgaacccgagaggcggaggttgcagtgagccgagatcacgccactgcactccagcctgggtgacagagcaagactccgtctcaaaaaaaaaaaaataaaattaaagatatatatatctattggataaatgtttggcagttgaattgctgggtcattggtcaggtgcctttttaattttgatggatcttgccaaattgctccccaaagaaataatccgaatttactctctgaccagcaacatatgaaagtatctacttccctataccctcgccaaatgcaaggttcaatctaaagttttgtcttttccagtctgatttattcaacaaatatttatggagcatctcatctgttatgtgctgggtattttctaagagccgggaataaagcagtgaatgaaacaaatacaaatctttactctaatggagcaaacgttctagtgggaagtcagacaaagtattattcaatatgttaggagtccatatgtactatggagaaaaataaggcagggaagggaataagaagtgccagggagagcggggtgtgtgtgtgcacgcgtgtgtgtgcgcgcgtgcgtctgtgcgtgcgtacgtgtgcgcgcgcgcgtgcgtgtgtgttcgtgtatgtgtgcgtgtgcgtgtgtgtgttgggtggaggggagtgatgcctgcacttttaaatgaggtggtcagggaaggcctcgctgagactgtgacatgtaagaaaaacttgaaggaggtgagcaagctagccatgatatcgccaggaagagtatttcaggcggagtgaatatgggcaaaaccccagaggagggagaatgaactatagggtacctgtgggagaatatggactctaggggccctagagagaagggggccatggaaagggaagagttataggagatagcggaacacgggacgttgcaggacattgattgcaaggactctggattttgctccacatgagctgagaaaatcttcagaggtttttgagtagagggaacgatatggtctaactgagatggtaataggatccaatggctgctgtcttgagaaaaacct

SEQ ID NO: 3360 - DNA, 4001 bp, Homo sapiens
gtttgcccatccagccaaatgggagttcctcagcctgtgcttggacacctccaatacgagggagctcattactctcaggaccagcctctttctacttcatggaattcagatggttagaaaatgagctttcttatcatgcccaacatttcttcctcataaaattcctgcgttattccttgttctgcacttggagatacattgatcaacatgaaatagacacaagcagctatcccatgccccttctttcacaggactgcccctctgcactacctcctcccactccccactgagccttcttttccgtttgaaagatcactgaggtgatgtggttgccaagtccattccacaggcccagactgcacgcctactgtgtgcagctaagcatggctttccatgctgcagtggatatagggtaggtggaacacatctctgtcctctgaaggtcttcagactcaacacatgaaaagtgatacatttagagccagaagtgaatgtgtcagcaattgctgtgtaacaaaccacctcaaaacttaatgactgaaaacaaccgattattatagttcacaagtgtatgagtcacctgcgtgggtctgtggatctgtgctctgtccagccaagcacaactagagtctcacccatgtatctcagacagctagagggctggccattggctcgctattggctgaaatgactagggtgatggggacattgtgcagcagggctcacccaggctgttctcatagcagctggacagggttctgagacagtgagcgggaatatgaaggcttcttgaggcctagacttgaaaccagtgctcatcacctgccacactctgtcagccagggcaggtcacaggccagccaggacccacaggctggagaaatagattcctccttttcatgagaagagttgcaaagtcacattgtgaaggatatggcaatcaggaggagtggagaaaggggtcatttttaaattacacacaggtcgagtgtgtaagccatggccaaaagtaagaggcccctgagcatgttatctacagaggacatgaagacagtgagaccaaggaggaagaagggggctctgcttggctttccaaattgaaaatactttttttcatggggaaacgctgtctctactaaaaaatacaaaaattagccgggtgtggtggggtggcatgtgcctgtaatcccagctactcaggagggtgaggtaggaagaatcacttgaacccaggaggcggaggttgcagtgagccaagatcacaccactgcactccagcctgggcaacagagtgagactccgtctcaaaaaaaaaaaaaaaaaaagtaaatacatttttttctgattatgacaacaatattgaactcacaatccactcacaaaatcagcttctcttaggtgctgtcactctatggcacgttgcaccactacttctatgggaactacccaggaaataagaaaacgctttattcgtagcatcctgtgagcttaaatacacaaaaggcccaagacataatgtgggaaaatggaaatattgtgcagaagctgactgtattagtccattttcatactgctatgaagaaatacccaggactgggtaatttataaagaaaaagaggtttcatggactcacagttccacatggctggggaggcctcacaatcatggcagaaggtgaaggaggagcaagggcacatcttacatggtggcaggcaagaggaagtatgagcaagagggggaaaagccccctataaaaccatcagatcttgtgagaactcactatcacacaaatagcatggagataactgcccccataattcaaatcacttcccaccaggtccctctaatgacacatgggggtaatgggaattacaattcaagatgagatttgggtggggacacagccaaaccatatgactcacccagaggcagtctctacagggtggattctgcccggctcacaaggttccctctcccgtggcccaagcagccacagcaatgggatggtgggagccatgtttttctctccgtaatccctctcggcattgatgattggacagggagaggacacctgatccagctggaccaatcagattctgactttcaggaaggtggcactccaggccagagagaatccagtctgtctcttgtgggatcttgggagctagggcagaggaatatggggactgaggggccgaaaagacccggaggagagggaagaggaaagctggcactctgacccaacagggacaggagtgagaaggggaggctccacccagcgcaggcctggctatgagcctcgcgtcgtcagaagcctgtctccttacaaaaatactgtttatgcttaaggtatcccgagttgggttctctcacttgtaaacaagagtgcctcagtgctgcagacacgaaggtgcaaatgaacatgagctggctggaggtcatggcaacttggggtccctgagagaggttggggcgtcaaggagctaggggcagtgaggccgggagatggtccccgggtggaccaggaagggctttgaaggagggtgaacgtagttgaggggtgactgcacagcctcaaggatgtagagagggaaatagtggacagaatgtgttccagccactgcctagggaaggagatggagctggggtcagggaaccagctgaaatcttcgctctgcaccaccccagctccaatttgaagcttacaaatttaaaacttctgcttgtaatacaaaacaaaaaaagtaaaacaaggcaaaaaaaaaaaagtagagaaaatacagtaaatgacaaaaaggacattctggtgaatgcaataagcactcttaccaaatcctcagggtaatacactccaataggaaagtgggcaaagggtatcctccaaaaaataaacacagacggctcatcagcttgaaaagaaatacaatctctaataataacaataataaaagcacattgtaaacaagatcctgcttttctcctatcaaactgacaggctttctttttcaagatagtactttgtgctaatgagggtgtgggaacctgtctccctcacacgctgatagtaagtttggggatgcagtgtggggatttcttaagctatttgtccagggtagcagtgcaggtggtgccccacacagatcccctgtgtacctcttcagtgacaagggcgtgtgttttttctcgtcagctctctctgtcagagccccctttgtggcctaatggaagggcagagaaattactactacctgggagtacgtttcaatccctgacgaggcaagtactcaggcacccaacagccgtgttcctcattgggataagtctggggtgtcttttctccactggctcccagagtcacccagcaggattaagctccgattgaccacaagagagccagctgtggatgaccatcaccccttctcactctgccactcctctatcagtgtttcctttacttcctaaataaactcctggcccttgaatcctcatctcaggggaacccagactgagacaactagcaatttgttgtaaagcactttccaacagaagtaatcatgaatatgtggaaagccttagctactaggatgtccagtgagatttttgttgttgttgttgttgttgttttgttgttgttgttgtttttgagacagagtctggctgtgtcacccaggctggaatgcagtggcatgatccggactcactgcaacctccgacctccgaaccccctgaccccggttcaagcaattctcctgcctcagcctcccaattagctggaattacaggtgctggcaaccacacccggctaattttctgtatttttagtagagacggggttttgccatgttggccaggctggtctcaaactcccgatcttaggtgatccacccacctcggcctcccaaagtgctgggattacaggcatgagccactgtgcccagccgaggtcttttttttttaattaaacaaaataataagagtgaatccaaccagaagttatggtt

SEQ ID NO: 3361 - DNA, 4001 bp, Homo sapiens
aattcttctgcctcagcctctcgagtaactgggattataggcacatgccaccacacctggctaatttttttttttttttgtacttttagtagaaatgggggtttcgccatgttggccaggctggtctcgaactcctgacttcgtgatctgccctcctcggcctcccaaagtgctgggataacagtcgtgagccaccgcacccggcctatagttttaaaacttcataaaaatagcatcctactacattaatgattctaaaggttttttttacacacagatttgtgaaaatcttccatgtttaaaagtgagctctaattcactcatttttcactgctatacaatattctgtcatatgaatgtatttgcctgttcacctactgatggatatctaggctgcctctaaattttgttacaaaaaatactgttacattcattctcgtgcttgtctccttgtacatacacgttaggagtttaagttgtgtgctttctgagtgagaaggtatacacaacttaaacttagtaaattctgtcaaattgttctctagagcatataatttacattcctatttaagtgaattctattaaatgccactgtttaaaagagatattccatttctaccctcaaaagcaaagttttatgaagaaatattttctgaatctcttagttctctaactccaagtttacttctatttaaatccgtggaatattttaaatgttaaaaaaagaaaagaaaaaaaaaagccaggcgtggtaccagtagttccagctactctggagcctgaggcgggaggatcacttgagcccagaaatttgaggctgcagtgagctaaaatcaccactgcactccagcctgggagactgagagagactctgtctaaaaaaaatttaaaaaataaaaaaattaaaaatcccagaagtaatccaatcaataatctacagccctttcaaaaagcctataatcatatcaggtttttcctctgaaaactggctttttaaaaaggttgctacatagctctcttttcagaccttaagtcctttaaatttacatgtacctccaagattaccaccattcatataagtttttattcacactattttgatgagtaagtttcagacacaatttagtggccagttttactgtgctttgtctgccaaaacttccaacctaaaccatagcaaattttttaagttggccaatcgattcctatccagggttaagggtcttttgagagaaaagaagagctcttggacgtaaacaggtataaacaggatatacctcagagaaaaactctggtacaggacaaataccacagagaaaagagtttaaaatatggggaacccctacttgaagttctgactcaataaaactgcaaagaagttcaatgctggcttggggagaagtgagaaagaaagaacagtgtggtgcgctggctcttgaatcctacacacctgctcgtgcagggggaggtgcagcccccaccttagagccgggacctcgaacgcgaacgcgctcacgcgcgcaccgaccccagttgccggcctagcgccagggcagtgcctcacctgcgttccggttccacggggcggtgcttgtccacgatgaccggtttcggcggcggttggaacgcaccgggctcggaaggcccagtgctctgctgccggacaggccccgcgtggacccctgcgggagcggacgacggaggtcagaactctcgtgccaaccctgagatcccgcagagccccgcaatctcccccaacccggcgtcccacgggggaccaacgctggggttgcctctgatctccaggttcgcctcccccatcctgaccctgggcccctaacgcgccccagctcgcaagtccggctccacttactgcaggcgatagaggccggcggggggagcagagtcctggcggcttggaaactccggcctaggcccattgcagcccagtgccccgctgcaatgcaggccgccatgccagctagctcacgtcaagactacagctcccagtaatcagtgcgacgaggttgttgctgtctgccaccatatggcggctgctatgggacaaaatggataagtctctcctcgctcctttcctgatgtcttaggaaaagtgcacgtttctctagttcctcgtaatgcgccaagttacacccctccacaggggtgttctcccagcctagaaagctttttcctccccctatgaatccactctatcttctcagacaagctttcgctatgcgaaaatcccattgtaggccgtctttcccactgggtgccttcgattggcagctctgatctcatttgcaattctttcttgtgtaattattagattagtatttaaatctgccattatactataatgaggcaagggaagggataaagtcttctttttgctcaccatgttatcccagcacctagcacctacctgggccctcactaacatcttttgttttgttgagacaaggtcttcctctgttacccaggctggagtgcagtggcgcgatcatggctctgcagcctccaactcctgatgtcaggagatcctctcacctcagcctcccgagtagccaagactacagtctcgcaccatcacgcccagctaatttttctaattctttgctgaatgcacagaaaagagaatagaatagttcctgacagaactgctggcccatagtccttgagactacacaaagcattaaccctttgaggaacccaaatgaatttgggctgggcaactgtgggtatggataggtgggagaagtaaagctggaaaaggtaaattgtaagtcttgttaagaaatttggaaaatgactgggcgtggccaggcatgcctgtaatcccagcactgtgggaggccgagacaggagggtcccttgagctcatgagttggaaaccagcctgggcaatatagtgagaccgtatctctaagaaacaaacacacagccgggcgcagtggctcacgcctttaaccccagcattttgggaggccgaggcgggcagatcgcctgaggtcaggagtttgagactagcctggccaacatagtgaaaccccgtttctaccaaaaataaaaaaaatgatccaggtgtggtggcaggctcctgtaatcccagctacttgggaggctaaggcaggagaatcgcttgaacctgggagacagaggttgcagtgagccgagatcgcgccattgcaacaagagcgaaactccgtctcaaaaaaacagaaaaagaaacacacacaaaaaaagaaatttggaatttgttatttcagcagtggttatataaggattgaacacttagagtaatgtgataatttaactacataatagtcattccagttgcattaatgtcccaaagctacctcaaattcagcctatccatactgagttcatctttttcagctccagacttccttcccagtattggctatctcaaggaatggcttcagcatccactctcttgcctaagccaaaaatctcagtgccattcttgattcctccctgtctcctcctggatgaagttccaaaaactatgcctgacaccgtcaaatatctcaggaatccatatactttctcatcctcccatccatatttccaatctaggtcaacatattttctctcttcaggatccctggagatccctgcaacagccttctcattagtcttcttgcctctggttacctccagtccttcacgcagcaaccaaaaaaagatggctcagaaatgcataccctgttctttcctttccccagtttaaagccttactgtttacttttgacagaagtcaaatgctcataaaagcaaccaacctctgcagcttggcctctatactctgacttgccatcctgaagaacatgagctgttacatcagcctgaggaacagggccatgttttgagcacagaattcaagatgctgtgaagaaagacagggccttctattttaactctagcttctttgattagaacaagaatttattctataaatgacaaggaatctcaca

SEQ ID NO: 3362 - DNA, 4001 bp, Homo sapiens
ccttatctttttcaatttttgggtcaaatctcaccttttcaatgaggtcaacccagatcacatcatttaacattttcacccataccccaactgtcaacactcccaattcctcttcactgctttctatcgtgcttatcttctaacgtaacttaattatctgttaggttttgttgtttagtgcatgtacattcaatagcacgctaattccataggaaaagggtttttagattttgttgttttgggtctgttatattcatagaagtatcccaaacatctgtgtaaagcggtatctgccctatagcagacatataatatatttttgcagaataactgaagtttaaatatttacagacttctgaaggtgtgatagtcaaaagttacaagtttttagagacagagtctcgctatgtttctggtattgaactcagcctcaagcaatcctcaattttcccagtaattggagctaggtgtgtgtcaccacgtttgactcaaagaatacgtttattttatcttatttatttttttgagacggagtctcgctctgtcgcccaggctggagtgcagtggcacgatctgggttcactgcaagctccgcctcccgggttcacgccattctcctgcctcggcctccccagtagctgggactacaggcgcccgcccggacgcccggctaattttttgtatttttagtagagacggggtttcaccgtgttagccaggatggtctcgatctcctgacctcgtgatcctcccgcctcggcctccgaaagtgctgagattacaggcgtgagccaccacgcccggcaaggaatacgttttaataaagtaaaagttactgttaataattaggcacgtaactcctggaccctgaaacaattacgctgtcttctgtaaaacaggaaaatatcaggcatcacaggagaagtatgatcccatttctatttttttaaatgtctgtgaacgtgtgtaatcacagaaaaactctggaaggttgtcagaaaaacgttaacatacccctgggggtatgaaaaaaggcgtttttcctcccccttctcccccccagcgaccgatagttcttttgtctttttacaatgagcatgcatgcaacaggaatgttaaaaatcgatttctttttctaaaccgacaatgtatacaattattaaagggggaaaaacacttctgaaatgcaaaacatggaatcactcttgcagagataccagagatctctgaaagctggaagcgtgtctcttctctgaactcctagtgcctaacaagcagtaggcagccctcattactgcctcttggcaaaaagggcagaacaaacagcttttggtaggtctcgatcaaaatggtaacaaatcacagttttaataaaatggcaaatattctaactgccaactcttggatgtttgcattataaaatgaagcaatacaaagataaaggcaattttctgtcttcattaaaaaaaaaaaaaagcaaccttaatacccagtggcaaccctaagttatgaataaagcagcagcacagaaaatgctgcttgggttccctttcccaagctgtccagcctcggcggctccgttcttgagctccaagagtctgggcacaaaaagccgcgtggccctggatcctgcaaattgggaaacggggggatcctgcaggccaatggccttacgggagccaatgtgacgggatcaggggcagacccatttaggttgccgtaaccggccaattcagtacgcaatagggaaaatcaattaggatctgcagagggttcccggatacaccttgcgaagaatgccgcactctccgccactcattccccactcaccggcacccgctaaaccttcagcctgaaattttcctccgaagggaagcagagcagaggaagaactaccaagtgctacactcaaagcctgccgtcgcagtgagcgcgacctccaaactgaggcatttttgttccggcgaaatccctcccactcaggaaagtccctagaaagagagcgcaggcgcctgggtatcacatgaccacttcccggaagcgcagcagacccgctcaacttcatcctgggttgaggcggaggagaacttccagaattatggcgaagtccgggctgaggcaggacccgcagagcacagctgcagccactgtgctaaagcgggcagtagaactagattcggagtcgcggtatccgcaggctctggtgtgttaccaagaggggattgatctgctcctgcaggttctgaaaggtgagcaatgagccaaggcggggaggacctgaggaaaaggagctggttcctgctgtgtctggggtgaagtgaaagagttaaaaatgatttttccacaccacgaagaagcagttaaatacagaaggtgggatattctataggacaactgggccgctttcttttagatctttaatagattgatgttacctagaaaaggtggggaggctactagtctagattttaaaagacttaagagatataagatataacgcaatgtaatatataagctttgataggacctgggtttgtacgaactttaaaagacatttttggatctattagaaaagtttgaatatagattggggggcattaaaattattttcttaggcaatatgattttttttccaaaactttccttaatttttagagatgcagaccaaagtgttttagaaagagatgctatgatgtctttagttaattttccttaagcaaaaatttcttaaaaatcgaagctctatttgagcaaaaatgctaattttaaaaatttcggtgatgggtaataagggtgtttattatacgattatttttaattttctgtttaaacatttgcatttaaagcaagccaaagtaaaattatgtagcggtagaagaagaaaagtttttcttaaacggatgaggttcggtgtgagaaatgcgcagggttgtggaggagacaagtgagacttttcgtattattcaatgttgagaaatacccaaatattccttaacacccagcacaaccctggctcacagtagacactcaatatttatgtattaaattgataagatcagctcctgctccccaacccccgacactcccggtctggactaagctccctctgttctttctagtttaagcttcttataattaaagtgttacagaagctttggggcagcagaggggagccctttatggtttggtgctttggtcagaactacaaactctaccggccgggcgcggtggctcactcctgtaatcccagcacttttttgggaggccgaggcaggtggatcatgaggtcaagagatcgagaccatcctggccaacatggtgaaaccccgtctctactgaaaatacaaaaattagccgggcatggtggcacgcacctgtagtcccagccacttgggaggctgaggcaggagaattgcttgaatccgggaggcggaggttgcagtgagccgagatcgcgccactgcactccagtctgccaatagaacaagactccgtctcaaaaaaaagaaaaaataactgtaaactctaccttgcctggggcattatttgatgataatgatgacagtgacaacagcaataagcatagatatcacgtttcagtgctgagtgccaggcattgcagaaaacattaaaagcatgatctcgtttcatccgtaccaattgccctatcaagtaggagttgatggtattctcgttttacagcataaaaagtattgttcgctttcaagttctgccactaggaggtggtagagtcacagtcggagcccaaggccccaacgactctggtatactgaatcccaaaagagagatggtgtactgtgttggtcaggtggaacactgctcaagttttggctgcactaggaatctgaagcaggagaatcacagttctgctctagggtgcttcactgatcccgtagaggttacagagacaatgatgtcacatagatgggttaagaccaaaatgcaaatagcgctaatacagggaataagtgccaggagag

SEQ ID NO: 3363 - DNA, 4001 bp, Homo sapiens
acagtatttgtttgtaattaagatagacaataattattcaacacagattcaacaaatattaagcacttactctgtggaaggcactctgggaaatacaaagctctacaagtctatgtctatgtcctctaggagctaacagtactgtatggaaggtgagttggtacatgaggtcaatcaggcaagacatatatgaaatatgtcacaagggtagaaagaacgagagtcagaatatacctctacagaaaccaaaggcaagagattcctatagatccctggggcagggaattttgacataaataactggactgtggcgaaagctacgtgaatcactgaaagatactgggagggaaagcgctaacatacatgtttttcattaacgttaatccaaaagactagctttaaggattttcaatgtcttgagttgcaaggaaaagctgctttagaacctccctatttttaccacaaaatcttctgttattgtctacaacatttattttgaaatacaagtttggtagttctagtctctctggtacagcatggaatctttaatcttggctatttttgaaatgcttataccatgaatgcaaaggattacaaaactcattaaaacagactatgatttaatcaaagcagagtttgttcttctggattcccgtagtgagctccagacacatggcccctggtcctcgatttgaggaaatggaaatatggtggtagtccaaatacagcacagcccaatggtttgtttagaaacagacagtgagctcacaaatcctgggactagaaaagcagcaaaggttccttcaagtatttcaatgctcacagaagtagctcagttcagcaggagggaaaatatttttgaaagagttcataaagaaaaaataatcaactaagtaatccacaaaccaactcttaggaaatcaaggcccaatgcttaatttcatataaggatgtactgggagcagctagactaacaaatccaacataaacaagtgacgtttaaaaaaggaaaaatctttacttactttgacttgctcttggcaacttttttgtagacaggaagggttggaaaagaaaataaaaatataaatgtattctctttcttatgcaaagttcatataaatatcagtaataaccaaaaatatttaacttatgaaatatgccatgaggtgtcactcaagtaactattccctatctattagggatccccttaggattttatagaaggaaggttaaaagatccaatcagaccaacacaattctagatttaatattttgcataatttcatgactgttggactggctaccttttaaatctttctaaagtaatacctgctccattttttccctcttctaaggtgcaagtattcgcgctgcagcaagcttcttgtttgacaagtttaacctttgcaaattacaacaaccatcacatgtggtgaaaaccagatactaaatctaactgggaagtcagccaagggtaaagaagagcactgactcgggagcccgaggacttctttaactgccctgccgcattactcaggcaattcattgcccctctcgggagcggtttccttatttttagagttcgaaataggtgggctgcaaattctgaggtccttcggacaaagattctcctaacacgggctggagaaaaacgccccacagccagactcaacggtccgtgaggacggcaattgaatccagacaccgcagaccccttctcaggcacccacaggtccgcgcagggaggcgcgccgcggggcatgccggacgctgtggtcctgaaggcctggaaaagtacgcagctgcagcttcccgtcctgttcgcacatccttccccgcatcattccggggccctgcctgtcacggccccctaaccctcgccgtaacccctaccggcgtctccagccccacttacagaagaccgcggagaggaacatggtgaccacacctgggcagtctccgtcaccggccaaaaggcccccaaccaacaacaactgcttccggggcacggcccggttctggaagaggacatccggcagtcgcccgaggccacgccccccgcctggaacctgcctccagtcgtctggctcgttcctcggtttctcagagcgagtgtgttttgcttttgtcgtgctggaggttggaatcctcatcattctggaaagggatttacagctcagggttcgcgccccggccctgactcctatttctgggtcaagtgctttcagcgttaggtgctttccatatttgtttcacgaaataatcgcaaccacctgcattagacccacaagaacaactgtgtattgtacttcggccgctccagcgtatcagcccctcgcatattttcttaaaatgttgcctcccccgacccaactccctctccgcctggttaagccttactctcactcttctgagtcccttcggcattaagaaccccacctttccttagttatcccaatctctaggagggcaggaccctttgcatctcaaacttctgtatccaaacacctagcacagttcctgacatagaagccaaataacagattgagagcattcacatcacgtgcctaatatcacagaactaccaggtggcagagtaagaatttaaacctagattttatctgactccaaagactcatgcctttcccagtagacattgggacctaccagtttgcaatcattaatttttcatggctctgtaaggaacctgggctcctctaacaccaaggacctcgtcagtaacctcatttcgcaactaataatcaggacttttggatttttttcctaatccgtgatttgtatctacatatgaagtcttacagatgtgaaataagatttaatcgcatggctcacgcctgtaatcccagccctttgggaggctgaggcaggcagatcacttgaggtcacgagtttgagaccagcctggccaacgtcgcggaatcccgcctgtactaaaaatacaaaaattagctgaacccgggaggcggaggttgcagtgagccgagatagcgccactgcactccagcctgggcgacaaagtgagactccgtctcaaaaaaaaaaaaaaaaaaaagtaataaaactgttttaaagaaaattcagctctctgtgccatcacaaagaagatgaggaggaaaaaaatcagctctccatacaatacaattcaattttttaaattaagaccgtccttctccttagtacctataatactttttttccttctaatcattcttgatatttatcttcccataaccggactccagctactgagtaccttccaggtgccgaaatccttccttaccttgcattggcaaaaaagagcttcagatgttcaagaggataaggtttcttatatttcctttagaggatttataagaaaacacaagactggaagccaaggaacatgatttctagtccttgttctgtcccttagaaagtcactttaactttagcccagccaaatagcagttcttaaactccatgcccctgcccccaactctattctccttactcttctttatgttttcctacagcacttattgccattaatagtattacttgtgtacttgttgatttccctattgtctttggctaccagaatgctgggcaacagcaaaaccctgtctctaaaaaaatttttttaattaaaaaaaagaacttcagcttattccctcactgctgtatccctggttcctacaacaatgcctgctacatctattaaatatctattgaatgaatgaatctgaggtgagaggcaccatacaaatgtcaatatttatgtttaaatagcaaaaaaaaaaaaactaactttaagtattgtcaatagtttcaggatccaggagaatgtataagcttgcttttgaaaagagccaggtgcagtgggtcactcctgcaatcccagtattttgggaggccgacgagggtagatcacctgaggtcaggagtttgagaccagcctggccaacatggcgaaaccccatctctactaaaaaataaca

SEQ ID NO: 3364 - DNA, 4001 bp, Homo sapiens
aaacaaaaacaaaacaaaaaatactctaaataaataagacaaacaatccaataggaaaatgggcaaaatatttaagtggatatttcataaaggaaattcaaaaggccaataaaaatgtgaaacacactatagcttgttattaatcagagaaatgcttatttaaatctcaatgagataccattacaaagccaccagattaacaaaaatttgtaggtctgacaatatctattgacaatatcaatatcaggtgttggtgaggatgtggggcctcaacagtttggcaatatcaggcaatgctgaatatatacatattctctgaccaggcaattccacagcgattttcacacatacccacatcctcagaaacaattggactcatgcgccaggatgagatcaatcagctttgtacataattgccccaaactggaaatggagaattgtggcacagtcatataatattatacagcaggccgggcagggtggctcacacccgtaatcccagcactttgggaggtcgaggcgggcggatcacctgaggtcaggagttccagactagcctgaccaacatggagaaaccccaactctactaaaaatacaaaattagctgggcgtggtggcgcatgcctgtaatcccagctactccaagggaatcacttaaacctgggaggaggaggttgcagtgagcccagatcgtgccattgcactccagcctgggcaacaagagagaaactccgtctcaaaaaaaaaaaaagaattatatagcaatgagaaagcattacagctacgcaaaatgaatgaatgaatctcacaatgtaaaagaagatactaaagcgtatatactgtatgaaccaattcatgtgaagttcaaaaccaggcaaaactatgttcttgagatgcacatatggatgctaaaactactataggaaaaataggcaacctaatagtaactataaaaatgagaacagtgtttatatctgggggggaagtagagaattttgatacataggggagaggaggcttctggtagtgcactgttttgacctgagtgttaaacaggtgtttgctttagaactgttaaatcattcatgcatactatataaaattttcttcatatgtattatatttcgcgaacacaaaaaatactccacataaaaaaagcttttctctaacggtaaaatttacatcgctgcattttcttgactgatctcgtatattctcccacaaaatgttatcctaacaatatattttgtgtgaaagtaacttactgagcatcctatggtatttggatgatttttaactttttgcaaaaagtacttaacgtcacggcaacttaatttagtcgcctttacttctgctatctctcagtcaagaagtcctcataccagcccttgtgccgggggctgtagttaaaaattaaattagccttcaagcttaccatgtgtcaggcactgcccaaaacgctttacgtgcattatctcatttaatccccaggtaggtggttatgacccccattttagaggtgtagaatcttaagttaggagacattaattctcaaggttaaaggtcgtgaatggcaggtcgtagcctctaaatcagaaagttaggtgagactttttggtttccctcgccccctccgttccagtttctctggcttcttttctagggaaaaaaagctggtaaggaagcggcaaatgcgtgacacacaggcccgcgtgagtccgagtcgggggacttggtacgggctgccggtcacaccgccccagagaaaattgggcgcaaccttcttaacttaaataatgaccctttttgcttgttaacctccagtctaaacgcccattccatcccgcaccagtttccccttctgtgaaggcatgcatggagtatgtcgctctccactgacctgaagctgctctcactgcaccagcaaaggcagaggcagccatcttcaccttcgcctacggcggccgctttgggtttaaaagcacaagagcaaaagagaatgaagggaaagcaaggaggcggagtcaaggaagaggaaaagaacaaagttgtccactcaacatttattcaatgtcatctgccgggttccgttcttcgccgctgtaaaacgactgcctatagaaggttctacaaaatttcttattaaaaaaaattcttggggccgggcacggtggctcacgcctgtaatcccagcactttgggaggccgcggcgggcggatcacaaggtcaggagttcgagaccagcctggccaacatgatgaaacccccgtctgtactaaaaatacaaaaagtagccgggcttgggaggctgaggcaggagaatcgcttgaaaccggaaggcggaggttgcagtgagcagagatcgtgccactgaactccagtctgggcgaaagagcgaaactccatctcaaaaaaaaaaaaaaaattcttgccgggcgcggtggctcacgcctgtaatcccagcactttgggcggccgaggcgggcagatcacgaggtcaggagattgagaccatcctggctaacagggtgaaaccccgtctctactaaggggtacaaaaaattagccgggcgtggtggcgcgcgcctgtagttccagctattcgggaggctgaggcaggagaatcgcttgaacttgggaggcggttgttgcagcaagccaagattgagccaccgcactccagcctggggtacagagcaagatatagggtgtattaccttggaacactattgttgccaacttgatctcccacctatggtggccactttgagtccaaaaacaggcacatacgctagacaagtatattgaaacattcataaaagctctttgaattggcaacgggagtcattgcgcacttttttttttttttgagactaggtcttggtctgttgcgaaggcttgagtgcagtggtgcgatcacagctcactgcagcctcgacctcctaggctcaagcaatcctcccacctaagcctcctgagtagctgagactacaggcacacacctggctaatttttaaattttttgtagagacctaggtctcactatgttgcccagggtggtctcaattatttggtatggaatcaaacaggtctcccaccttggcctcccaaagtgctgggattacaggtgtgagccactgagcctggcctcactgcacatttttgaacaagtgagtgacttgatttaaattttgttttttagagacagggtctgagtgcagtggtgcaatcactgcagcctggaattcctgagctcaagggatcctcccaccacagccttccaagtagctggcaccacaggcatgcacaatcatcccctgctaatttaaaaaaattgtttatagagatgaggtttcacttttttttttttttttttttttttttttttttttggagacagactctcgctctgttgcccaggctggagtgcagtggtgcgatcttggctctctgcaagctccgcctcccgggttcacaccattctccgcctcagcctcccaagtagctgggactacaggtgcctgccaccacacccagctaattttttgtattattattattttttttagtagagacggggtttcaccgtgttagccaggatggtctcgatctcccgacctcatgatccgcccgcctcggcctcccaaagtgctgggagaggtctcactcttttgctcaggcaggtctcaaactcctgggctcaagtgatcctcccacctcagtctgccaaaatgccgggatatgagccaccacacccagcccctggtaacaaattttttttttttgagacggagtttcgctttgtcccccaggctggagtgcagtggtgtgatcttggctcactgcaacctctgcttcccaggttcaagtgattctccttcttcagcttcccacatagctgggattacaggcgcgcaccaccaagcctagctaatttttgtatttttagtagagacggggtttcaccatgttggccaggctggtctcgaattcctgacct

SEQ ID NO: 3365 - DNA, 4001 bp, Homo sapiens
gccaggttgatattctaaatgttaagactaaagtcagataaatactggcagtcctttgctatattctacatatatgactggattaattttccctttgatccaattgtcacatgaaattggttcttcaatataaaagaccaagccattagcctaacttttaggttccttatttctgctctaaccatgatactatgttttatacctaagtatgaagcataaatgttaatttcacagattcaagccataaacactagtatgttatatttgcagtcatccctcaatatctgtaggggattggttccaaggactctcctggatactgaaattcatggatgctcaagtctctcatataaatggtgtagtacaggcacacttcgtttcactgtacttcggtctattgtgcttcacagatttattgcattttatttttacaaactgaaggtctgtagcaattctgcatgtgctcactttgtgtctctgtgttaccattttttagcaataaagtattttaaattaaggtacatatattgctttttagacactactactgtacacttaataaactacagaatagtataaacataacttaggtatacactgggaaactaaaaaagtcatgtgactcgttttattgtcgtggtctagaaccaaccctacaatatgtatgaggtatacctgtatctgcatataacctatgcacatcctcctgtatactttaagtcatctctggattacttatacgtaacacaatataaaacccctttaagaaacaaagggaagcaaagtatgaaaacctaggttgaaagtcgtaagatatacatataacatatacacctatataatctgtccaacccataaagtttcttccacctttgagagcctaaaatacttaatcttataataaacaagggaatgggaattaagaagagattttattttttgctataatcttctctgttagaagaccgttcctactggtaggagtacaaagtggatcaacattttttggagggcaatgttaaagtactaatagctttcaaaatttcatactacacatgcgtcccctttacgcgctgttacataggttttaatggcaataatatggagctcataggcccatatatacagagccataaaaaagagtgaggtacatatctttgtaataccatgacaacatgtcaaacacacattattaaagagaaaaagcaagatgaaggaatttaaattatgtaaagtatgatctggtttgaagctataaaaacctgtgtctctctctgccaaacctgttaccagaacagcattaattagggcaaaaatctaaagctaactttttttccttttactctagacagcagaattcaggttgtagattaattttttttctccttaatttacgatgctgtgggctgctttcttcccgcttatcggaattctcaggcattacaaacggggactacaacatccaagtccacataaggaagaccctccagttagccccatttctcccaattttcagtagccaaaatcctaaatggtagtttcaaaacgtcgggaacagcccgaagctctaccgcccgcggcacaaatccattttttttgcctcaggccccgcgcccacagctcacgggtgtctccatcgcaaacttcctaaggcttaacccaggggcgcatcagccgcagacacgacgccgcgggaagaagacccagtgtctgcgaccgccaccctgagacctcttcccgaggtggctcctaccggcgcacgggcggcggcgggcaccgcagaaggcgctgccgctctaactccttctggaagcggaaggcggcgcggaatcccttcttcactccccgaaccggagggaccagcttgggggcgactggagccaggaggcagcgatgtccctgctgcagcaatcttaccagcccggacgccattgcacgagagaaaacgatggaagacggaacgaaagtagtcgggccagtgtccccgtaacacacttcccccggaacccggaacgcggaacgcgaagagaaggctggggcggagacagcccccggggcggggcgactgagagagggcaggggcggagacagccccggggcggggtgattgcggccgccttgaggctacgcttgcgctagttctctcctctcttcgagttactttccaatgatccggacttgagggcgtttgcgcccaaaagtttctgggagaagttgcttcaccctgtcactctcttgttccttcctctctcgttacagcaaaacaaacaaaaatctgtttcgctttcaggttaaggaaacatttaaatcctcaaaaaaagaaaacatttttaatttatatttagtgttctaggccactactgagcaagtatttaccgagcttctatttttgacccagcacgcctccaaaagccttagttttggaaaccctagactcagaaatgttggcttatccaaaattaaaatttttctttaaaagcaatctaatagtacatatttttaaacatccggaaaatgactggaaaaaaacataaaacggtaataggggaattacagtttcttccttctttatgttaacactctttaacaatgtaattctattgctttcctaccaaactgttaatacagtacaatttttaaaagaacatattaagtcacaaagggaggcttgtttgaattcccagttttgagttgcctgctgaacatctagaccctcaaaggggcaatgctttctgtgatctctttgttaaaggcatctgtgtccccagcagtcacccagattgaactcctatgtctttgattgtttttgtttcgacaaaccccctcttcggtgcagtttccaccaagtgctttttccatttatttccactgcaggtacctggtggctctcctcacctctttccgtggttagtgtaattggcctggtaccttcctcccttccccagacacagctcacctacattcatctctctgaaacacagaccacaaagcatgttatgacttagcccgagaatcttcagtgccaggatcatagaactcaatttgggtttctcagcttgaccatttcaaaagggagaatctaaatggttcatctcagcttataaaagggttccctttggggagggagagagcaaaagaggggctgagcacacaccaaaaaacaaactgatggatttctggttgaaggaaattctccaagaaggggtgaaaggaggttacgattgaccttcttgtttcaatgtatgtaaagtattgaaaattcatggaacatcaatccaataaatggattaggagaaaatgcagggaactgtcatttctgtagaatttcatttattaggaaaaataatctaagccagttgtagcacaatcatgttaagttaaaatgaggtgtctctgtgttgagagtttctcagtcatacaacaacgagagcatcatttgcagattaaaaaaatgtaggtcctcaaaagatttcttctactaatgcccttcatggaacttaggaattaaccagttttttaaaatctgctcatacatttgtctatttattcaataaacacataataggaggaggacttggttccaggatccaggctcagaaaactttaaggaagaaaaaggccaatgtgtttttcagccctcaaaaacctgatttttcctttaacctgctgttagccctaatttgatcaaagctcacagatgtcaacaactttcgagttttcattgggttaaggtcaggtggaagggtggggaaaagtcacacttaggaagaggaggtgaggcgattgagggttcactttaacccttggggaacacaaccttttgtgttttgatgccagggatattgcttatatattccttcaatgatggtgaaggcagctggaatacggggcacagaaagatggataacaaagttagtaagctctgctataggaccttcctgaacaatcaagcaattctgaaccacctgggattactcaccactacttcatagattagctaa

SEQ ID NO: 3366 - DNA, 4001 bp, Homo sapiens
cctggctgacatggcaaagccccatctctactgaaaatacaaaaatcagccaggcgtggtggcacatgcctgtaatcccagccacccaggaggctgaagcaggagaatcactggaacccgggaggcggaggctgcagtgagccaaggtcacgccactgcactccagtctgggtgacagagtgagactctatctcaaaaacaagagttgtagatgcggccaggcgttggtggctcacgcctgtgaacccagcactttgggaggccgaggcaggaggatcacttgtgtccaagagttagagaccagcccgtgcaacaggacaaaaccccacctctatttaaaaaaaaaaaaaaaaaaaaaaaaaagatggaactgggatacaacgatgagagctgaaaaaacagcactctgttagtgtttttgttttttttttttttttgagacagagtctcactcttgctcaggctggagtgcagtggtgtgacctcagcctacttcaaccttcacctcctggattccagcgattctcttgcctcgctcggcctcccgagtagctgggattacaggcttgtgccaccacacccagctaatttttttgtattttctagtagaggtggggtttctccaagcaggtgatctgcctgactcggcctcctaaagtgctgcgattacagatgtgagccaccacgctcagcctatcagtgttctttcacacaagatttggtaaaagtaagagggctgggcacagtagctcacgcccaacactttgggaagccaaggtgggaggatcacttgagcccagaacttcaagaccagcctgggaaacatagtgaaaacccttctctacaaaaaaatttaaaaattaactaaacgtggtggcgcgtggggcgtgcctgtagtcccaacttcccagctacttgggaggttcggctaagcccaggttacagtgagctagaatcatgccactgcactccagcctgagcgacagaaacagaccagtcaaaaaaaaaaaaaaaaaaaaaaaaaaaaaaaaagaggtaccttgagtgagtggtaggagaagccagaagccaaattcaaaagggttaagcagtgagtgatagtaagaaagtgaaataaattcaggttcatccagacacctctctgatctagtcttgttccagaaacattgtggtagcagggttttaaactttattttgcgctccgtgacccttcagatagtgatttgaatgattaagtgaaactcttcttaggttaagtgtcctagtccacgctaaaatcatcttgttggtctctttggcgctgtcagcgaccagtatcagcgcccggcttgtccccgctgcccgccgcgtccctggcccggatgtgggaggcgaaggcggtgagcatttccagagcggtgagatgagcgccgcgcataatcaggcgatgcccgtctcctggggaagaaacaaacgagtgagacagggagggaccgcagtgctggggcttaggggcgcgcgggctgctcgctgttccctcctgcccgtctccaccaagcccaccgaacagcacgtccacgcagggctcggagccgtcatgcctcacgtccgcaatcactgagcagttgagattagtggagcggaccttctcactgctcaccgtctgcaggaaggtcctacggtggaaaaacagaggagcgccaagctgagggcttaaagccccggctgaaggaaggcgcaccacttcccgcttctacccacttccccttcgtacctcgtcgattccacgtttttctcgaagggacagaactgaacccgaacctgtttgacaggccgcagaccaagccgagccaaggcagctgccatggtgacctccgccccggaagaactcgtgcaggcggaagtgtcgcattgcgtgaggccgtgaatggctgcgcttctgcgggatagacttccggccgccggctgcttagcaggcctgcgaaccgcagctctgggcttcctagcccaggcggaggaaggcaggaaagaaagaggtggtttcggcacaacgcatgggggagcccaaagtaggctgtcagcaaatacagcctatcatgaatagtcctctcatacgacggtgaaaaccataaataaatggcgcaaaaacctctttgcacgaaaatacgcccgttttctgcagcctttccccttctgtaccctgctgggccacatctaggctaactcgatcttaaatcctggcttcttccaaagagagagcactaacacaagccgggatgatccacaccagaaggtaaacaccattcaggtaactgaagattaaacgtagtgagctctgaatagccaaagcttaaacgtgaaagtactacagcccaatattagtaaatgactgaaaatagtaataggaagggcagtacagggtaatactgtccttggggctgatccaggtatagaaatgcctattaaacctctgtggttctccatgaattagcgtagctcccaggacttaagttgaagtgcattctagccagttttctttttttgagacgaagttttgctcttgttgcccaggcaggagtgcagtggcgcgatctcggctcactgcaatctctgcctcccgggttcaagcgattctcatgcctcagcctcctgagtagctgggactacaggcgcgtgccaccacgcccggctaattttttgtatttttagtagaggcggggtttcaccgcgttagccaggatggtcttgatcggacctcgtgatccgcccctctaggcctcccaaagtgctgggattacaggcgtgagcaggcgtgagccccctcacctggccgagcactcaactctttatccctgagatatcttcagtgatggagaactaggcctgaacctcccaagggtctgaccttcaggttccaggctatggtcttgctctttactctggattccaggtgctggagtgatcttggattttttttttttttttttttttttttgagacgaagttttgcccttgttgcccaggctggagtgcaatggcacaatctcggctctccgcaaccttcgcctcctaggttcaagcgattctcctgcctcagcctcctgagtagctgggattacaggcatgcgccaccacacctggctaattttgtatttttagtagagacggggtttctccatgttggtcaggctggtctggaactcccgacctcaggtgatccgcctgcctcagcctcccaaagtgctgggattataggtgtgagccaccatgccctgcctaatcttggattttttttttttttttttttgagacagagtcttgctctgtcacccaggctggagtgctgtggctggatctcagctcactgcaagctccgcctcccaggttcacaccattctcctgcctcagcctcccgagtagctgggactacaggcacccgccaccacgcccggctaattttttgtatttttagtggaaacagggtttcaccgtgttagccaggatggtcttgatctcctgacctcatgatccgcctgcctcggtctcccaaagtgctggattacaggcgtgagccacctcgcccagcccctaatcttggattcttaagcccaggctctttgtagcttattctccagtatgctttcctccaagcttccagttctgggcttccttaatatgcaattccaaatgtctggattttccagctagagatggggagctcttaactttctggctcctggtcccaggctccttaggattcaggactggttcccaggcaggaaaaaaacggcaggtgccaacggggtcgctggtgttgcctgagggcaagccaggcctgctgatttcccaccaggtagccctccgggctaggtccccttcctcctagtgtgctttgcagctgacctgtctgggctggagatgttccaggctggagcgggggctccaagctctccaggctattgaggcagctgctgggcaatttcgtggtctggacctcctgacaagcacctggtaaggcagga

SEQ ID NO: 3367 - DNA, 4001 bp, Homo sapiens
ccgtgatcgtgccaatgcactccagccagggcgacagaagggggttaaagaagaaacagtaaacacagtttccatatgacctagcaattacaatcctaagtatatacccaacagaaataaaaatatacttacaaaaacattgcacacaaatgtttctagcaaaataggcctaagagccaaaaggtggaaacaacccaaatgttcaactgatgagcagaaaaacaaaatgtggtattcatacaatatcattcagccataaaggatgaagtgctggtacatgctacaaggatgaacctttacaacattatgctaaatgaaagaagccaatcacaaaagactacatattacatgattctacttatatgtaatgtccagaacaggcaagctacagagagagagaaggaaagtacatcagtggttgtgctggaggccaatgggaagctgggaagtgacagctaaaaggtacaggttttctttttacagtgattataatgttggctgcattgctctggtgatatactaaaaaccactgaaatgtacactttaaacggattaattgtatggtatgtgaattatgtctcaacaaggaagccgttaccaaaaacaaaaaacaggcttcggagccaggtgatatgggtgcaaaaaccttattgtccacctagcctaaccttaagcaagtttctgaagctgtgtgccttaactccctcatctgtaaaatgggaacagcagtatatacctcatgaaggcatttcgaagataaggtgaggaaaatgaaggaaagctacaacagctaggagccatttgaacaggaccttgaaaaagcaggagacggccgggcgtggtggctcacacctgtactcccagcacttcgaggctgaggcgggtggatcacgaggtcaggagttcgagaccagtacgaccaacatggtgaaaccccgtctctactaaaaatacaaaaattagccaggcatggtggcagacgcctgtaatcccagctactcaggaggctgaggcaggagaatcgcttgaacccgggaggcggaggttgcagtgagccgagatcgcaccattgcactccagccggggcgacagagtaagactgtctcaaaaaaacaaaaacaaaaacaaaaaaacaaaggaggagacggagacaacacggacaaaacaatgttcaagtcagattttctgccaaatgacttcaggtcaaagattgcagctaaatgagttttaaaatacacatattcgggctctagggctcttcagatttcgaaactacaaacggtggattgtggacttccagtaaaattgagcaaacagaaaatgcaaagtcaatcacggagcgtctcctagagataaacgttatgctggacgacaaacccacgtcaacatcaaatgaacccgggggtcgcacgcgccccaaaggcgatgcttgccagtttccgctcctcttcgccaagcacgctcaagcggtttcgtgaactgggaagaaccctgaagaacgacgtccagttccccctcattttacagacaagagctccgcgacccagagagggagaggacgcgcgcaaggtcacacagcggctccggcggaaggtgggggcacggcgtgaagagccgggggccgcggcttctcgcttccctccgccccgacttctgcaggccccaggcgagccccccactcccggcccgctcagagcccctgctcccggcgtcccagctctcacctgccgtcccgctacacagcacggggaggcagcccacagcgcgcaccgcggtcgccatgctggagtccgagccgcgcctcggcctccgcccagggcagccttgcccaccgcctaccgcgactgctcctcgtcaaacggcaagccttgggccgcagcggaattcctgaggcccgagtccacgcagcagcgcaggccggggtgagggactgtccggacgggccacactgcaggcggagcccggcgcgaccgcggacagccccgcgggcgcctcccgttaggacccgagggcggggcttggactggcggccgggcgtgggcggggctagctggctcctgcagcgccggagagagggcaggaccggccgggtggatttggctgctcgtgcaggagctctgaaggggtccgctggcgggggaccctcggacttacccgagctggcactgcggacccctgcgaggttcatagaagcacggaagggggccaagtgcaatgaggatccaagggatgaataagcgaggaatgtagagaaagtgttcatccccaactccagtaaagctctgagtttcattagattaagcacttaaatgacctgcatttcacatacacttgtggattcatactgattctaacgtttggtcacacatgcatatctcagccctgggccatggtttttttattgcctccataccatctacgcctactcaagtgacccacacacctgcaacacagaagggcacaatgtcttgtaagagggtagcctgctcagatacaatgtcttgtaagagggtagtctggttttcgagtctagcataaaaattttcaaacataccgaagagtaaaaatactgacaagctagacttaacgattatcaagaggaacacagttgtttcatctattattttcccattttctttgctgaaatagacaacttatttcactccaggttattttgatgtacaccattttcaacaggccttttatatattgagttggcgaaattaagagaaaagagattgattacacctatgtgtaaagccaactgcttcagcataattgggaacatggtaagaccagctaattccatgagcaaggacctactgccacacttcatttgctgtggagtgagttcctaagtcagaggcaacagtgtgtgaaataattaaacccaaggatagttgttttggcagatgcattgtgggcaggaacagcaaatccatatccaaagtgtctattctagtgagaacaattgctgccccttccatggtccaacctacaaccagatagctggctgagcccccaggagtgttgccatatcaggagctgtagccagattgtccctggcgagtgaaagtccacgttgaccccatgtgtaacctccatccctagccctttattcatgagtccatttggctaagtaaagaggctgactgacatccactaaatgggttattctatccacctcattaaaatcctctgtggaggtcgccctttgataagcactcatgtgggaaataattatcttcacattctgggctgaagtccatccacatacctgtttcctagacctctttgtcaccaacttcctaattatgttcctctcaagtactgaccatccagccaagtcattagccactgctcatgaaaaagtatagatctatacttctaaccaggcaaaatgaacaaccaggcacattactcttatcttcttcccactgggaggatttcccttcaccgccgtccttcagaagcatcccagagtgggattgcagtactgcagctgtccactttcaggtgataccaacagatcatgcagaaccatgagtaaaccaagcccaagagttttcttcttcaggcaactggtcacaggtaattcctcatgaagctgtgggtaggggttgagagagagaagatcatgtagcttgcatgttcaggtcctgctccagttcagtttcatatgtaccacttccattcgatgatggagtgttgctgtgcacacacaactttatggcttggtgatcatacaacagccagttcatgatgagcagcttaaactgcatggtaagttgctggtcaatggtcaagcctccagactctgttaaggcccaaagcaagttttgattacttagtcgtttgtttctaacttttaaatttgaaataattacagattcaaagatacagataggaagttgcaaaaatagtacagagaggtcccatgtatcctttactcagtttccccaaatggtacatcttacataactatagtacaacatcaaaac

SEQ ID NO: 3368 - DNA, 4001 bp, Homo sapiens
tcagccatttcaggaccatcccttaagagtgctaagggtggatactatcttgtaattgtttgactttaaattgtttacttcacagtgcctggctcaggtaaagtgctcagtaaacatttgccatatgggggaaagaggttgtttcaagaatggtcaaggagatgaaaattaaagtaacaggagaaatcattcttcatccattttactaaaccagtacttaagaactagaccagatgtttactgaaactttattagtgcaaagaaagtagaaacaaagcaaatgtccatcaattgttacattaactttgatatattcttatcatggaatagtatgcagcagttaaaaatgcttttaaaaacataataggggaccctgaaggatttctactttacaatatactgcatatgtacaagagaaaagcagaaagtaaaatgcaatcaaatatggtaccattttttgtaaagtacacctgtgcatgtatgtttatgcatgattataagaacatggaaaaaacatagaagaatagataccaggagggacagaaagttagccatcccccaatacatacattaaatgtcaacaataaaaatactctgtatgatatagtccctctcataatcatgcgtatgtagcaaagatatactcaaagagatgcatgaaaaaataaaaatttctagcacattttccagtaagaaaaaaaaaaaaaacaaatgtccacatgaatagatagaatggactggttgatctagattaaaatataaaggaaagaacatacaaaaagatgtttttttttttaaatatagtttttaaagtatggtatttgactttcctgcaataattggtacttgttatcactctccctccttgaaacattcacctgttttccatgacaccacactggctggtttctctcctgcttctttggtccctcattctcaatctcttgaggcctcttatttcttatttgtccttcagggccctgtccctctgcctactcctcagtacactctccctaggtaatttaatttgtttacaaggcctcagttaccatttacaaggtaacagggcatttcgaaatcagttctcctcctgagctatacacttgactatccgtagacctactggaaatcccagatgcctaaaaacataatcccatactaaactcgtttcttccctctcaaatctttttcctgctctgagatcgcatgtcagtaaactggcatcatcagccatccagctgttgactccccacttctccctggattaaacgaaacgtacaagttctggcctgcatctttccatagagggggattcgggaaaattaagaagccagaaattgcgcatattgaaggcactttcaaaaagtcactgtcctctacacaacgtgactttctccattgtcttccaggcacctgcaggaatccaattcccatcattcttctctggcgcggccctcctcctccctagacagcagggcagggtaggactggacccaacacagacctaggcaccgacccttacttagctcagcagccaaatgaaggaggaggtcgctccacttctaccttcaggtaagttcccctcgctgcaccccgcaaaaaaacaagtaacaacctctagagcggctactgcacgccaatacccacctcctcccccccaacctcagacctccactaaatacctaagatcctagagtccctgcctgaaggcacgcgagacgctgggggaaggtgtccgcgctggctccacatcctcgcgcggcagaggtaagccgcttccagtcttcccaggccttacctgggatctgacatttgtttgcaactcaggggccgcggttttccagaggccttgcttccgggcgaggctacccctaccccagagaagaagccggtacgaaactgctccgccgtaggacacacagggcgccgccatgttagctgtgggagctccaggaccggaggggtgagggggcggggcctagagacggcgcaggcgctaatggcgcggggttccagaggctgtcctgtgcaagagcttctcgggcctttggatcagggggcgtgtcccgcgatccgcgacagctcgtcgctgattgggtgcatggtgtccgcggggcgtatccgactccacccctgctcggtgtcgacctcaagaaggatcgctggtgggtcgtttttctcggcctctttctcttcacgtcctgaactcagtctcttcgggactcacttccacgctctcctagtctctttggcactcacatccacgtggcgctttagccagcccttccttcccagcccccttgctgcacctcgagccggctcttcctccacctgggcagggcggccggggccccagatgcgctccaagccttgattcctgtctgccttatcctagtaggggttttcccctcctctaactttccacgttcgtctggttccaagtcaagactctcctgcagcaactgtcaagcccctctcggttccctggcactctcctgcgttgtttcttaactgtataatgcacaggataaaccttaaaccggtaaggtcaaacactacctttctcgtttttgcacgcccctccctaagcgttggtactaagccttacttgaaacccaatcagaactgattaattgttgaatagagatgagtatgtcttgctttctgaaacttgcgtgctcctggcagttaactcccaggttgctttctacgaaacacatactaaatgatgtagtaacgcactttaaaagggtttacacacacttagatttgaagggtcagtaaaagtaaaacacacagaaaatctgagatcatacaaagttgtcaagcaaataaatgccgtctactatcaccatcatttcacgaaacagaactttttagcattaaaaaggtagaatggcagaatttcacaataaagaaaaatcttttaaatggaatacatttacttgtataaaatgctcatcctgttgttctttttgttattagcttttagactagcaaaagatatcttgagaaattggcagaggtcggaggactaaactctgatttttttatcttgcccaagattcctatctacaggatttggggagtcatgccctacaaatcataaattcttattagatgggttttacttaaccctatatatggtgacttactttccaacctgactctggcataacattacaagacaaggaagaaaatcaaaatattttaccccaaaacatgtttctttgccatatcttgaaatggccctgcaaagctgtccttggaggggtgggatatgcatctgtaaagaatctgtattaacatagctagatctttttcttccagaccctcccaatcctaaagagattaactaagatctgaataggaaacatttgtcatccattgtctctaagggcagccactgtaagacttacagagaactttggtctccacaatctttatcttaaactgaacattccctttctatcagtcccaggtctttctggaccaaaccaatgtatttcttaaatgtgtttgattgatgtctcatgcctccctaaaatgtataaaatcaagttgcgccctgaccaccttgggcacaaattctcaggacctgctgaggactgtgtcatgggccatgatcactcatatttgtctcagaataaatctcttcaaaatattttacagagttcgactctttttgtcaacggatggataaactagcatttgggaatcaagactttatttatttatttattttatttattttgagatggaagttcgctcttgtcgtccaggctgcagtgcagtgatgtgatctcggctcactgcaccttctgcctcccgggttcaagcgattctcctgcctcagcctcccgagtagctgggattataggtgcccaccaccatgcccagctaatttttgtgtttttagtagagacagggtttcgccgtgttggccaggctggtcttgaactcctgacctcaggtgatctgcccgccttggtctcccaaag

SEQ ID NO: 3369 - DNA, 4001 bp, Homo sapiens
ttaaaaaaggaattttcaggtttttttctttaacatttatgtatgcttacatttatttgtatacgtttgtatcagcaaaaaaaatggacaagttatatatatttgtatatgtttgtatcagcaaaaaaaaaatggagaagtagagaacacatctactgcttttgtaatttatgtcactaaaaagaaaacaaaatcaccaatagaaaaaagatgataggagacatgtacaacaaatactaatggttaataaccatagggagaaaaattcagccttaaaaaatctcactagttttcagaacctccttaattcaaagcccccttttcaatgtcctgtgccattcaaatgagctaaactgtgggtgctacagatacccaccctaagacaaggcaccatgaagagtgggtgtgtgtgtgatgggtgcatgtgggggatctggagttggggggaggcagatggataggaggggaagatgaagaagtaaatgcctttggaggggtcagagattgttcagttctaacactgacccttttagttattctttatgggattcgaatcacttttttttttttttttttctgagactgtctttttatttgacaaacgggtaagtgaaaggactaaataaggtcctgttcataccaggcccagaacaaaggacagggagaccctgcccacccagccttgcttcaggtccaccctgaggtgctgtctcctcctcctcctccccgtaccctccttccctgtcacacaagctgtttgcctgtgaagaggaggctctggcttttggaatcttcactgtcttaacttagcctgtctgcctgtgactttccatttatcatgacaccagtgccttccgcatttaagtgattttggtccctgcaacagcatgatttcagtcaaacacaaacacacacacatatacacacgaaatgaaaacaggagcactaaagccctttacttggcacaaatctttctaaataagaatccagatatcacactggatcctatacaaaatacaggttttgttagcaacagaagaaaaggtctcaacgccaaaatggcaagagattaacacttttacattattgaaaaaaatgcatttaaaatcactgaccctttaaaataccttgaacagacagagaagggcaaaataatctgtctgtttgcaaaggatgagcctcccagatgggtggaaaaaactggaggtgaaagtctctgctcatctggcaggtaagtgttctggtgggtccaacaggttacatgtgaattcccttagggtttttcagatcacaagattatcaggcttactacataaaaatcactctacgccgatcattgttcaataagatatccaggtcttcaaaactcctctactcctgctcaggaggctggaaccggtcagtttccccggatggagctcacgcgctctgggctctgggctctctgccgcggttaaggaggtctgtgagttccccgatgtacttgatggtgtacttgagtgtctggatcttggtgagaggctggcctctctggctgtagacaggtggcaggtaattccggagggtgtgcagggcatctgccaaggtcctcatcctgagcttctccctctcgctggctttccgcctccgctggacagacatcctgactttggtgcccttctgggccttggggccaccaccgccctgaaggtgggtgggctggaaagctaacatattgtagtccacctctaccaggccactggccccaccgacactgcagccttcgctgcccccactgctggccccgccgtgctcacagggcagcccagccacagctggacagggagaagaagaataggattccagcgatggagccggggaaaggctctgagagggggaggcctgattcagctcaaagggccctgccctgtccttccagtcccaggaagacagcaggccagggctgtcagaggagcccaagccatcctcgaggctgaggaaagtctcgcgcaggttgtccatgcctgcgagacagctgcagaaggaatggctccctggcaagtgagaaagaaaattctgccgcctggccagggaagagctctcttttatgacggtgggggagaagtgatgaagtgggaaagagggccgtgtaaagagagttcaaaggaaaaaccaaagaccaagatggaaaatgaactcttcaggtgtcattttctcctcattgataattagcatcttccagctaaaatgtctttaaacagaaaggcctccaagagaagaaaaaaggaattatcttgttgtaactaaaccaattaaggctgcataactagacttagcattgtgctgtggaactcattaatgagggagccaaagaaaacaaacctggggcatccgcagcaaggagggggtggccgagggccctggtggagagtagcaaagtgacccgagagggcctccatcccctccaccaggacctgctagatatttcagcacagttgggctgtattgttggagaagcagcatggtctagggacaaggtaacccctctgggctttgattccctaatgtgtccaacacagaaaacaacagctcttatttcctagggttgctgggggtgccacacacatgaggtacccagtggatgccaccttagtaaatttccctgggtcgtatagagtgcagacatgcccggaacatgcctacactcagaacgacaaaggccagcaactccagtaagcctagagccttaaagagcaggaaacatcctaccagaggcataaaacccttgctgttaccgagcagatttggattccgcacagcaaacagatactaggaaacagaaaactcccttaagccagggactttgcagaatacctggcatttagcctaaggaaagtcttttttaacaaacccagctgcaccttgttttttgaaatgagtcacaccttgctttttgaaatgtatggaggaagtgtgaaattaactagggagcctcttttccccaccacagctccaaatgccactgaatgtgttaagttggatggttgtgctagtttgcttcacttcctatatgctctgctagaccctgggttttggaaaagggatctcagattccccatttgtcccatgaacttaatttattttccatgtaactaattctacaaattagtattaacatcaagtcgcagtgagttaaagtgtagagtaatattaacatgtcctttaacaggttatttaagtccccttgcaattattgaaaataaatgtcaatggcctagttagaacatttatgatattttttaattagcaaggctcaaggaagaaaaatctcaagtaggtaatctgtagaagaatgctcttaattttaccatttactgaagaaccccaagccggattttgaaaaataataatattaatgactgtaataaatgtaacaaatgactcttgctcctttttcctctctcttctctcttccaattcttgttgagaagcccagaatctgctgatactatgcaaggaattttatatattttttaatttttcttatttcaatagcttttggggtaaaatgtttttttgttacatgggtgggttgtatagtggtgaaatctgagattttagtgctcatgtcaactgagtagtgtacattgtacccaatatgtagttttttatatccctcactctcctcccaccctcccccttctgagtctccaaaatccattataccactctgcatgcctttgcatgcccatagcttagctctcatttataagtaagaacatatggtatttgatttttccattccagagtaacttcacttagaataatggcctccagcttcatccaagttgctgtaaaagacattatttcattggcttttttttatggctgagtagtattccatggtgtatatatatcacattttctttatccactcgttggttgatgggcacttagttggttccgtatctttgcaattgtgaattgtgttgaagtaaacatatgcgtgtaggtgtcttttt

SEQ ID NO: 3370 - DNA, 4001 bp, Homo sapiens
gattacaagcgtgagtcactgcgcccgccctgttttaaagtcttatgtaaaatctatgtaggtcaggtgcagtggctaatacctgtaatcccagcacatcgggaggccaaggtgggtggatcacttgaggtcaggagtttgagaccagcctggccaacatggtgaaaccccatctctactaaaaatacaaaaattagctaggcgtggtggcacgtgcctgtaatcccagctactccggtggctgaggcaggagaatcgcttgaacccaggaggtggaggttgcagtgagccaggattacaccactgaactccaacctgggcgacacagtaagactccgtctcagaaaaaaaaaaaaaaaaaacatttcagacttttcattggctacagcataaaatttcaacagctcaacaccacactaaaagcctttggtcatctaaccccacccacctgggccagtctccttccttttctacaccagcaacgccaatctacctcgtttcaagccctctccctagcaaacttctagtccaccaagactcaacgtggactttggtgtctcatataacgcctcttccgttgtatgagactcttccaaagtcttccgtctttggcgatcctgccttggcgcctcttgtaacctcttacaagctcacctccataagcctccaacttgaattgtaattatttctgccttgctgtccaatagtgatctctatgaaagtagaggtatttcttttttcatctagtgtccataaccctgcctaacacatttatatctaacgaatgaaacatttttcatcaggagtatcgcatttgcactagtcctctagtcaggactagaatccacaactctgctccccctaggatgctcttttcattagcataactacatagctgcaagaaagcgcaaagaaaacagggagagaagaggttaactaggcctatccagaacatttggcccacatagggtgagacgtttgtagctttccagggagagataatcctggatagatggggtcgggtgacggagagcactgaatgctgagctgaagcagatagcgtccatgactggcccaaggtcacacgttaataagcagaggggcagcgacttgatcccaagcagcccagctccagagtccgttggtcctgaccacttcatcatactgctcttcaacggcgctccattaccagacccttagctggaccggcggtataaatgggagcgtcgtgggagcagaattacgtgtcataaaagggtctcctaaacccccagtctattttaaatctcactcctggctgctgtttgttaataagagattctggccgtgtttgtaatgagcgctacatgtagggccaaggcgaggaatgcgactgctggaaaatgaactagaacaatgcattaaaatgcctggcacgacgtaaacactccgtgatcacaagttcagatccggggcggctggagaggcacgggtttcagggctgaggggggcgtccctccggagccaagcagaacctggggacggcggaatccgcacaagcaccaacgttccgcccccgtgcctccgcactggagaggctgctcaccgcccactctctgaggcgggaaaggagccgcgccacaaggccccgggtccctccccagcacgcgccgtcccggccctcacctgccggccccatgtacttgatcaccccctgggtcttgaacacctcccgggcggccagcagcgcgtcctcgccgtgcgccgtatagaagtcgccccggtcgaaaaggcgcactgtggtggtcggcttctccggcatgccctgaaagaagcgcacgaagccgacctcggccgcgctctccaactgcagcgtctccttcggctgcaccgccatgtcgaaacctcctcacctcctggttgaagaaaatgcgcgaccccacacccactaagctgtttcccgcctcccctcccacgtcccccgagcggcgtccggccacggcgaccacacccaatcagcttccagggctgcgtttcggtgggtgggagtctgccgcggcaaccaatcataagcagacgcggcccagcttcccgcgcacgctggtgactttagctactgcgcatgcctgcgcctaggtcgcgcggaaacccgcagacgcgcatccttagtagagctcctttctgtgtttactcagctgcaaggcttgaagcccctgggtggggtgtatgcaagggtaggttgccaccaggtgggagatttccggcaggcactgagctcgtaatgtgcccggaagcatgggagtaacatcagaaggaaacttgaaaacaaaaaaaaaactagccttcctcctcctcccagtattttgttaaaacgtgtgcccctctccgactgcctccctttttctttctaagcaaactgccaacatcgggattacgggtttattctacacagcctccttactgctgcctgttagccacattatcgtttcatccactcgttgatgattcactcattcgaaaacatttatatggcctgctatgtcccagactcttcttggctctgaggatcgccagtaaaaagaaaaatcactgcctttattctgcttacattctaatatgagaaaattcagataatgaatatagcaagtaaatgaaatggtacgttagaagatatgcgtttgtggcagggcgcggtagctcacgcctgtaatcccagcaatttgggaggccgaggtgggcggatcacttgagcccaggagattgacaccatcctgggcaacatggtaaaacccacgtctgtgatcccagatattagcagggctgaggcgaaaggatcacctgagcccgggaggtcgaggctgcggtgagccgtaaattgtgccactgcactccagcgtgggcgacagattgaaaaccctgtctcaaaaaatacaaaataaaataaataaaaagacaaacgtttgacgccaggcgtggtgtcacacgccataatcccagtactttgggagcacgagccaggaggatcgtttgagcccaggaggtcttctgccgtcagctatgttcacgccactgcaccgcagctggggcgacagagcgagagaccccgtcttgagggggggtaggggaagaccagttaaggaagaggaaggttgaaattttaaaatgttagcaaacagccaggcgcagtggctcacgcctgtaatcccagcgtattgggaggccaacgcgggtggatcacctgaggtccggagtttgagaccagcctggccaacatggcgaaaccccgtctctactaaaaatacaaaaattaccgggcatagtggtgggcgcctgtaatcacagctactcgagaggctgaggcaggagaatctcttgaacctgggaggtggagggggcagtgagcgaagatcgcgccactacactccagcctcggtgacagagcgagactctgtctcaaaaaataaataaaatgttatcaaacacctgaaggagctcaggatccatcctgcaaaattaactcttagaaaaggtttttgctggccgggcgcggtggctcacgcctgtaatcccagcactttgggaggccgaggcgggcagatcacctgaggtcaggagttcgagaccagcctgactaacatggtgaacctccgtctctactaaaaacacacacaaaattagccgggtgtagtggtgggcacctgtaatcccagctacttgggaggctgaggcaggagaatcccttgaacctgggaggtggaggttgcagtgagccgaggtcgcgccattgcactccagcctgggcaacagggtgagactctgtctcaaaaaaaaaaaaaaaaaaaaaaaaggtttttgcattctccagtttagtttaccctttccccatggaagtggttccaaaacctaattcagcagcagaatcaccctggggaggtggggggggatttaaacatattcctgtgcccagcccacacataatgggtcttaatttctggagtagagccttggaacctttgtttgtt

SEQ ID NO: 3371 - DNA, 4001 bp, Homo sapiens
tggtaggccaatgcgggccgatcaagaggtcaggagttcgataccagcctggccaacatagtgaaacccgtctctactaaaaatacaaaaattagccaggcgtggtggggcgcacctgtagtcccagctacttgggaggctgaggcaggataatctcttgatccagagacagaggttgtggtgagccaagaacgcgccactgcactctagcctggacaaaagagcaagactctgtctcaaaatacatatatatgtatctggcaaacagcaaaagcaagcttttcaaaatgtcgccagctgcccggataaaaagccctaaacagaccgggcgcggtggctagcgcctgtaatcccagcactttgaggccgaggcgggtggatcacctgaggtcgggaattccgagactagcctgaccaacatggagaaaccccgtctctactaaaaatacaaaattggcggggtgtgggggcgcattcctgtaatcccgactactcgggaggctgaagctggggaatcgcttgaagccgggacgcggagattgcggtgagctgagatcgcgccattgcactccagcctggacttgagcgaaactctctctcaaaaaggaaaaaaaaaaaaaagcacttaactgcccataaagtgaggacaactcccgacaggcttccccggagtcactcacgtccacacatctttgtccagcgcccgattaaggcctctaaaagcccagtggtgccccataaaaattacactatttcataaaataaaatattttccactcgacacgaatttccacatacgtcaaaatattctatcttcgtctcggtgcacgtgcagcctacctaccgaaggacccagccggatcccagcacttcggctccccacggccccgccccgcccaattaggccccgcggtccccatggtgacacacccccccgcgctcgcagctcgtggcccaccccctcggcggcccctcacctaggccgaaggcccaccgtccccaaggcgtctcggcgaccgcggctcttaactacctctaagtgtctacctcgatcgactactggagccccaactcactatctccgcgccggccgaggaacctcctttcgcaccccacaccaccggactctccccgttcggcctcccgcaggcattcctccttcccgccaccccgccccccgccccgcccaccaagtgggccgggcgccttccccttctcgccccacccccagtgctcccacctcccaggccccctccccacccggagctgcgcgcgtcgccccttccttagcccagcacccccacctggcgggacgcgtctcctccctccaaaaggcccgaactctccgcgtctcccctgcagccctcttcctgcacagcctctctcctccgaccctgtttacaagctacacccccaaatgctccagactcgacccctgcactcattcaagccaactctgcggccccgcctcctccgagcccagggccaggccgtgcacccccccaaccccctgtgcgagcctcccctcgccgggttccaagcgccccgccgctatgcccccgccttcgaccccacccccaccccgctacctggtgggggcagcaggcgctaccgatctccgcagccctccgttgaggttcttcgccttgggcggtgacgcggagcgcgccaagggcctgggcccaggcccagcctcgctccaggccgcatccccgcctggggaaggagaggccccgggggcagcggcggcacggccgccttcgcgtgaggccctggccgaggccttgttggcatcactcagcgccggagacttggggaagaagctgtacagggtgctctgtcgcgacataccgacagccggcaaggcccaaccgttctgtcggacggagctcctaaaagcaccgcatctaccgcgcggctcctgctggcgggaaatctggggggaggcgcgctccgccggaggaacccgggccccagtggccaatcaacaggcgcctcgccgtgcgcgggcggtgcgcgccaggccccgcccccgggcgcgcggcgacgtggggaagggcggggctggcacactggtgggtaggggcggggctggcacgctggcggtgaggggcccgccctgccgccgacgcctgggccccgcgcggggaactgctgagctccccttccctcacgccgcggggctggccgggccggaacactccgacccggggttagttgcggccgcggggctagcaggctcggaaagccctgcctctctggagcggaagcgggaacagcgggggcgcgcaccgcccgggcggggataaccggggggacccgaaaggcctcggaaaggggctcgcggggagaaacgcgtccagcgctcgcgtgacctcctgccgttagagcattttcgcaaggagacggagcgaaagggaccaaactttagtcagcagttcaccttcacgttgtattctcaagatttgtatagagtaggcacttggtaaacgctaaatgaatattgtaatagcattcgttagcgatgctgttgtgtatggtgaaagcctgcagctgtacaaagttttcctttgccaggcactgatcccagcattttacatctggtaactaaatcgatcctctcaataacctgtgacgtaagtacttaagggccacagtccgttatctgagccctttgacccaggtgtgtctttacaggatttttcaaattttagaaagctaagagactatgagaggccgggcgcagtggctcacgcctgtaatcccagcactttgggatgccgaggcgggcggatcacctgaggtcaggcgttgaagaccagcctagtcaacatggtgaaacccccgtctctactaaaaatccaaaaattagccgggcgtggtggcatgcgcctgtaatcccagctacttgggaggctgaggcaggagaataacttgaacctgggaggcagcgtttgcagtgagccaaggtcgcgccactgcactccagcctgggcgacaagagcgaaactccgtctcaaaaaaaaaagaaagaaagctaagaggctatgagaataaaaaggttctattcaaattcaagaaagatagtggaagacagacaattgtttgtccccttatccagattgtgaaatccagattgccggaaaccagtcacaatcaacagctgtacattggtaaaaacctatgtaaaattagttgtttgccttgttcttggagactgttctgccagaaggttctcctttgctaggcaagtaataaaatcaatctaaaaaaaaaaggcgggggccgggcgcagtggctcacgcctgtagtcccagcactcggcacttcggggggggggcggaggtgggcggatcacgaggtcaggagatcgagaccatcctggctaacacagtgaaaccccgcctctactaaaaatacaaaaaattagcctggcgtggtagcacacgcctgtagtcccagctactggggaggctgaggtaggagaatggtgtgaacccgggaggcggagcttgcagtgagccgagatcgcgcctctgcactccagcctgggcgacagagcaagactccctctcaaaaaaaaaaaaagaatattgccaaaggtggtatgtgctaagaaaaatacagtatgcttcacgaatttgcatttcatccctgtgcaggggtcattccaattttggtatatgtgctacccaagcaagcacagtgaaaccaactgtttgagataatatttgagagttggtctctttcccccaccggcatacgtaaacacccccagagagtctgggggaacatgctgaaatcaaacatgcagtaaaacttacatgcttattcatactaagtagaaagaatacagaatatagactataaatagcctcaggtcaaaatttgctaccaaatgagtttacccccaaacttttggtttacagagctttttggatttcagaattgcacgtaagaggctggttatcctgtatctccatatcatggatgaagctgag

SEQ ID NO: 3372 - DNA, 4001 bp, Homo sapiens
acctagtatcaaatgcccatctttcttgaataccctggaatcctctccataacgggaggtgaaatgtatacgttttatttttacaagtctcttaaactcaacctcaagaaacaaataacatacgctattcaatatgaatgtaaagtacatccttacaataaatacacccgtttggtttggattcaacaatcaattcatgctcaagtaaacaatacgtcatgcttttctaaccaggagtttgttattgcggatgctggctctgttccccacaagcatattctactaatgcacaactatatatatttaaactgcgggaaagggtcgcttaaacaagggtaacactataattacacttagaaaaatctcagaattcctttaggacactttaaactggatttaaatggatttgaaatccattactcaaaaccactaactagcggccgggcacggtggctcacacctgtaatcccagcactttgggaggctgaagtgggtggaccacttgaggtcagcagtttcaagaccagcctggccaacatggtgaaactccatggtgaaaaatcagccggaccgcggtgggcacacccgtaatcccagctactcgggaagctgaggcaggagaatcacttgaacccggcgggcagaggttgcagtgagccgagaaagcgccacagcactccagcctgggcgacagagcgagactccatttcaaaacaaaaccaaacaaaaaacacgaactggctcttatcttgaatgagttattttttctgagcctttatttcttcgtttgttcaaatagcgaccattaaactttgtgtttagtatctgacaaacggccgggctcggtggttcatgcctgtaatcccagcactttggtaggccaatgcgggccgatcaagaggtcaggagttcgataccagcctggccaacatagtgaaacccgtctctactaaaaatacaaaaattagccaggcgtggtggggcgcacctgtagtcccagctacttgggaggctgaggcaggataatctcttgatccagagacagaggttgtggtgagccaagaacgcgccactgcactctagcctggacaaaagagcaagactctgtctcaaaatacatatatatgtatctggcaaacagcaaaagcaagcttttcaaaatgtcgccagctgcccggataaaaagccctaaacagaccgggcgcggtggctagcgcctgtaatcccagcactttgaggccgaggcgggtggatcacctgaggtcgggaattccgagactagcctgaccaacatggagaaaccccgtctctactaaaaatacaaaattggcggggtgtgggggcgcattcctgtaatcccgactactcgggaggctgaagctggggaatcgcttgaagccgggacgcggagattgcggtgagctgagatcgcgccattgcactccagcctggacttgagcgaaactctctctcaaaaaggaaaaaaaaaaaaaagcacttaactgcccataaagtgaggacaactcccgacaggcttccccggagtcactcacgtccacacatctttgtccagcgcccgattaaggcctctaaaagcccagtggtgccccataaaaattacactatttcataaaataaaatattttccactcgacacgaatttccacatacgtcaaaatattctatcttcgtctcggtgcacgtgcagcctacctaccgaaggacccagccggatcccagcacttcggctccccacggccccgccccgcccaattaggccccgcggtccccatggtgacacacccccccgcgctcgcagctcgtggcccaccccctcggcggcccctcacctaggccgaaggcccaccgtccccaaggcgtctcggcgaccgcggctcttaactacctctaagtgtctacctcgatcgactactggagccccaactcactatctccgcgccggccgaggaacctcctttcgcaccccacaccaccggactctccccgttcggcctcccgcaggcattcctccttcccgccaccccgccccccgccccgcccaccaagtgggccgggcgccttccccttctcgccccacccccagtgctcccacctcccaggccccctccccacccggagctgcgcgcgtcgccccttccttagcccagcacccccacctggcgggacgcgtctcctccctccaaaaggcccgaactctccgcgtctcccctgcagccctcttcctgcacagcctctctcctccgaccctgtttacaagctacacccccaaatgctccagactcgacccctgcactcattcaagccaactctgcggccccgcctcctccgagcccagggccaggccgtgcacccccccaaccccctgtgcgagcctcccctcgccgggttccaagcgccccgccgctatgcccccgccttcgaccccacccccaccccgctacctggtgggggcagcaggcgctaccgatctccgcagccctccgttgaggttcttcgccttgggcggtgacgcggagcgcgccaagggcctgggcccaggcccagcctcgctccaggccgcatccccgcctggggaaggagaggccccgggggcagcggcggcacggccgccttcgcgtgaggccctggccgaggccttgttggcatcactcagcgccggagacttggggaagaagctgtacagggtgctctgtcgcgacataccgacagccggcaaggcccaaccgttctgtcggacggagctcctaaaagcaccgcatctaccgcgcggctcctgctggcgggaaatctggggggaggcgcgctccgccggaggaacccgggccccagtggccaatcaacaggcgcctcgccgtgcgcgggcggtgcgcgccaggccccgcccccgggcgcgcggcgacgtggggaagggcggggctggcacactggtgggtaggggcggggctggcacgctggcggtgaggggcccgccctgccgccgacgcctgggccccgcgcggggaactgctgagctccccttccctcacgccgcggggctggccgggccggaacactccgacccggggttagttgcggccgcggggctagcaggctcggaaagccctgcctctctggagcggaagcgggaacagcgggggcgcgcaccgcccgggcggggataaccggggggacccgaaaggcctcggaaaggggctcgcggggagaaacgcgtccagcgctcgcgtgacctcctgccgttagagcattttcgcaaggagacggagcgaaagggaccaaactttagtcagcagttcaccttcacgttgtattctcaagatttgtatagagtaggcacttggtaaacgctaaatgaatattgtaatagcattcgttagcgatgctgttgtgtatggtgaaagcctgcagctgtacaaagttttcctttgccaggcactgatcccagcattttacatctggtaactaaatcgatcctctcaataacctgtgacgtaagtacttaagggccacagtccgttatctgagccctttgacccaggtgtgtctttacaggatttttcaaattttagaaagctaagagactatgagaggccgggcgcagtggctcacgcctgtaatcccagcactttgggatgccgaggcgggcggatcacctgaggtcaggcgttgaagaccagcctagtcaacatggtgaaacccccgtctctactaaaaatccaaaaattagccgggcgtggtggcatgcgcctgtaatcccagctacttgggaggctgaggcaggagaataacttgaacctgggaggcagcgtttgcagtgagccaaggtcgcgccactgcactccagcctgggcgacaagagcgaaactccgtctcaaaaaaaaaagaaagaaagctaagaggctatgagaataaaaaggttctattcaaattcaagaaagatagtggaagacagacaattgtttgtccccttatccagattgtga

SEQ ID NO: 3373 - DNA, 4001 bp, Homo sapiens
ttttaaaatgatgatgattagagagaacaagagacactgtggaggaacaaccacttagaattctttgggaatctgagtagttacacttactgagcagctgtaccaatcagtctggaagaaggaacccttcccccaggcctgaattacctggggacaagacacactgagcaacttactgagcctcaggaattagtagaaaacacagtacatctgttacattttggctttggaataaccttttaaaggagcaaaactaagcagataattaacacaaaaattttgatgttatattcaggctatctgaaaagttcgaaagtattgtctttagggccaggctgtcatgtaagcacaagcactaacaatttcttttattttggttttccaaaattgtctataaaaggtaaatctgctccagacctatttgatagcagagtcttaaatggaaattctttgctgcattgtaacctgattacttaataagggaaataatattttaaaactgtttggagtcttgtttaaagtatataaagcattgtattaaagcaagataacaggtaacacaaaatttttcttgccatgccttctctgtcaaggtgcctgtttctctttcctggagaaagtattcttttgagctgactgcaaaaggaattgtatgaaatatgttatctgtcagaagcagtgtagatactacaggtaaaagccctccctctcaggaagaataaaatattttagaaggttattaagcactgtgcctgcttggaagtacacaaactgggtactctcaataatagtactatggtcaaggtacaaggaggactttgtgagccataacctacccaattaaaatgtttatttcttaggcattttctaatatttagttcatgatgattattatgctatgtttacttcattattgttcttactaacacattaagatatttaatttttgcatattcttcagtgtaatagctctcaaaattaaatttttaactgtgaagaacaaaaaaattactgagagagtttcaaataacagaaatcacttgaggttttcagcagtgctcaagtaagcttaaacatccagcaagtttctttttttttttctgttattagtgaaaaaaacttattttacacaactaaatacaattctaaaatctaatgtaagttttaaacactgcttgtagtatctcccagtccttgccttggtggtattattgtgaaagcataagcatgctatctatatttgccttattaaattaatgctatgcaagtactttattttttagttttttgtctctataagaaaacaaataatgcagcagatttttgtctcattaatatattctcatgcaatcttgaaaaagagaaactcttttcctttctacttacatacaggccaacagcttgtttaaaagagcctgaaaatagatctgtttctcataaacactagaacaacagtcagcagaactgttgatatacactaataggactacttacactctgtaggcatggtaatgattgtttccgttgtagcgtgataatcgtcatcttccaaagagccatcgctgctgtcatccctctggacatcatactgatcaatcagttcccggagtggaggagctttgggtaaaagttgtcttataacatctttgctgatgttaggagctgtttccagacgaagtttactgaggatttgtatcttaatggcttctattcttgaagatttagtgttttgtctccaagtacatgcattacacagcccctctttttccacattttctttttgctcactgttctcatttagatccactggaccagcaacaatcagcataaacaggtaaatataaacacagagttgcagtttttgcatgattttaaaatcaatataatcttttttcttgttcttgtttcttccttttacttttcttttgcttttgagtaatgccaagcaaaattttaatgcatgtacagtctgagagacaacttgccacaccagtgaatcttttatactgtattccaagtggctttttatattccaacttagatgagacaagtgtcgtcaggatctatgattggctcttgctccacaatgaatctcgctgtcagaggttaaaaccctgtctgtcccaagtcaccaagcagtattttgttacagtcaagggtgagctgattcatttgactacttcataaaagaaataaatctacaaataataaaagatatttgtgacatttgaaaaacaaaagtctatgttggcaataatataaactgtacttaaatcttactaatcctcacacaactcttattgtaatttaaataagtcaattttaatttatactacatatttaaaatatgaaatattacttcctcaaaaactaaaatgattttatattgtttaggcaagtatttgaagtagaaaatatttttatttgttgtattaaattatttttagtgccaagtaattaggaaaataaaaattaggaagacctgaattaaaagttaagattatgatactagttgagaattttcatctataatttgagaaacttgttttctgactaaattcttagtaaatattggaagtcattgttattataacatattgtgcatggaattatttttacatagtttcatgtcttttattaatatgaaaattatactgaacttttgactgagtgctattatttcctattctaaagatgcagattaacataactcagaagatgtgtttttcattgtttattaccaagagggtaatgccagctagtagaaaaatctctgaacatagactaagataatgaattttataactggcatggcagagattattacagtttgcctcagatttccagcagtaaatatccagagagtaaaaagtgcagtatctattctctataaattatatcagaatattatgagcacataaaagagaaagagcatcatgataaaggggtgaccttttgttgtttcccaatactgcgatatgtttgcacccctttgccaatttctcattttgaccagagggcagacacctggcagggatttggggtaaagtctgggagcagagaatagagctttttgttctctaaatttaagtggcctctgtagggatcaaacgttcaaccttagctttgggagccacaagatctagtcaaatgaactattaaagagctaagcaaacatagccagcaagaaacagaagatatttctaggccaaaggagatttctttttcctactcctttttgggaagctaaggattcctaagagatttagtccattactttttttttccaagagaatacagtggctcatatcaaatatttatttttaaagtcactaccatttttgcacactgtacactaatttactgcctcggtgcactaaaatgcaactcagtagcctgaaaagttaatgcattttcatcaaattcttaagaggtatctacatctcttgagaaaaaaatggccttacataatgcattggatttgctcatcattaaagattaaggaaaaccagacacaaaccagatgccctgaggatttcagatactctttgttatgggacaatattagatctggcttctaaggttttatttgtttggtaaattcatttttcaatgtgtaaatctttcaaatgttatgatcattgtaacacatgcatctatacagttccaagtaagtcaaactttttttttaatatgcttagaattgtatagcagttgaattgagaactcaggctctggagtcagatagacctgagttcaaatctcaactttgccacttctaactatgtgataatggatgagatacttaacttccctaaactttagcttcctcatagggttttggggggatataatttaataatgcatgtaaattgctgaatatggcacctgtcatatagtaagtaattgataactggcatttgagtgcttgctctttgttttatgcagaagggtttgagattatgcttaaaattatgctccacatgaactagaactgcttc

SEQ ID NO: 3374 - DNA, 4001 bp, Homo sapiens
actctaaaattctacctttaaattgtaatgcattctaaagatttagatatgaagaccctaaataccatcccgagtctaggagagaatctggatgtaatacttctcaacattatcttctcaaagtacaaagaatagaattggctttaagaatgctctctaaaccagattatattgagacaagcctatcatttctgcatcactgttttctttgtttaagaaaacgatttgggtattgctgctgcagcagtggttgatgatattaaaatcaaataaaaatattactcttgaaacaaatgaaatgatttaagcctatctctctaagaaatcgcatgaaaatatacctaggaggcacacattgtattgtcatcaaattaatttgttttctaagctcaaatgtaatttaaaatgagatatttcttcaactggttcaatcaacagacagtagaaggattctacggagagaacacaggaaataaaccctacaataatgttagagcaaacaatcggcactatagttctgtcttctattgcttgtgatgcttctagaaagtattttttaacggcttcctgatgaattggctcttggtatcaagccaggctcatctctggctcacatctgcaaacttttccccatcctcacgtcctacaacaaatccatcttcaagacctgcaaagttcttggtctcagcgtttctcagaacagacccttcttcatcttcacagacacggggttggggatcccattcctgggttgcgaaatgaccttctccttagaatgacccaaagtgcaaaggcatcttcctgaaataaagctttcatcaagccatttctgctatggaaacctccagggattccattgcttatgggatccaatttaaatgctgcagttgagatccccattgtttcagtgggcaagtgcattatacttcttcacagactttaaacctccacattcgagattttgctactaggaatgttttgccctttctctgtgccaactcatggccatcagcacctccaattctgtcttgaaactcactttcttacagatatttttcttgtttaatatctacttagtagatactaaacagcaaagtagcagtatctacccagtagacactaaatagcaaaatagatactgaatagcaaactatttagtagatactaaagtagcaaataactcctgtttttgagcttttaatcacatttagtgctcttaagataaattatccaagtctggggataaacaactcacagagattttcattctttaagaagccaccgagagtgattttacttaaaagacagcactcacattttcagttgtctgccttttcactaggaatccacttaagaaccagcgcaaaaggactccgtttggcgacctctagcgggcaccggacaatcctacaaaattacgaaaagtagagggcaatgaaaaactcttccctttaaccagccaggttaccctgtggtcagatgaccgcatctcaccctaccccacccttatttttttcttctagtatttgttttgcatctaacacggttcgccttacaactcacctgtctcgcctccggcgggctgggctgccggtgtcgggtgtcaggtgaatgaattgctggtagcagtttaaaataatccctgccaagtggaacccgctttctgggcacggacaagagcgcggggtagatcgctctgcggagccttcacggggctcttcccgctcggagggccggtgctgcagccgggtcaggggtgcgcgggggaaatcaagatattttgaaaaggaggatgcagacgaagaccaagagaaaggctgtttttgccggtgacaaggcgttcctccccagactttcatcccactctaagggcagcatctcgagagggtccaggcgcgctacacgttaggcgccttctcaggactcgcgccccagaacgtgggggccggggccgggtcggggaccgcttccctccgcgggctggcaggcggcaccgaggctgggggatggggcgtgtagccgccctctgagcacgcggtacgtgggtcgccccgcgcggcggtaggaagagcaaagtcggcaggaaaagccgtggctgggatgccttccctgagaaatccttaggggcgatgtcagaacccgagctgggctccggacagtttctggaaaaagctctccaaacgccgtctgtccccgcacccgagtccacactgggctttgaaccagggctgttaaaaggggccctggggactgcccaattcatcccgatggcccagggcaggacgcgggagcaggcatcccggcgctgggctccccgctcccccgccctgcggacccctccccgccactacgggccggagcggagggggaggacggcgtcacgaggcggggagcccgaggtccagggcggggcgcccgggaatcccagcccgagcaagccggggaggtgcgggcgcgggcgggaagcggagggcggcgcggagggaggtgagcggcgcgcgcggagccggcgggcgaggaggaggactgcacagaggccccgcccccgccgccgcgagccggctcttcgccgcctccgaacccgctcactttgcctctcgcctctggacggcggcggggcggccgccggattcgcggccgcagggagcgccggagacggggagctattccgccccggcggctccattcggcgcccgcagccctcagggggtcggccccgcggcttgggagagggcaccgcggcctcggtgtgcgcagccctcgggcgcgagggtcggcggcgcggacacagccgcgttcccagccggtggggctcagcgctggcgccggcgaggactccccggccacccgcaggtaccgccgggcggagggcgcgctactagcagcgccggagatactcgagcccagggacccccgggccagcggagggcaggagcggagccccgagggagcgcgggccccgacggcgcgctcccccgtcagccacgggcaggcaggccccgcgtggcggcttggggtggggggctgcagcggggccctcgggccgaaagtcccccgggcggccagccatgaccttcgggcgcagcggggcggcctcggtggtgctgaacgtgggcggcgcccggtattcgctgtcccgggagctgctgaaggacttcccgctgcgccgcgtgagccggctgcacggctgccgctccgagcgcgacgtgctcgaggtgtgcgacgactacgaccgcgagcgcaacgagtacttcttcgaccggcactcggaggccttcggcttcatcctgctctacgtgcgcggccacggcaagctgcgcttcgcgccgcggatgtgcgagctctccttctacaacgagatgatctactggggcctggagggcgcgcacctcgagtactgctgccagcgccgcctcgacgaccgcatgtccgacacctacaccttctactcggccgacgagccgggcgtgctgggccgcgacgaggcgcgccccggcggggccgaggcggctccctccaggcgctggctggagcgcatgcggcggaccttcgaggagcccacgtcgtcgctggccgcgcagatcctggctagcgtgtcggtggtgttcgtgatcgtgtccatggtggtgctgtgcgccagcacgttgcccgactggcgcaacgcagccgccgacaaccgcagcctggatgaccggagcaggtactccgccggccctgggagggagccctccgggtaggacgcactgcttctctacccgtcccgtccgtcctgtcgcgtctgtccgtcccgtccatacgtcccgtctccgtcctgtccgcctccgggcgaccgagccagcggggtgcgcgcccagcgaggcccaggcgcggccaactacgggaccggtcggtccccactcctaccccgttgtccggggcaccagcggggtctggcccttacactagacgcacctcttgagggcgaaatcctcaggcatggggaggggcgtgtagagatagac

SEQ ID NO: 3375 - DNA, 4001 bp, Homo sapiens
aaactattgacctaagacacattcagagcagggagaaaggcttcacagtccaacctacatttcaatcactacttaaaaaaaaaaaaaaaaatcagatgagcagaacaggttaagaggaagaacgctgacaaacttttccacagttttacctgggaagatgaggaaaaaagggggccgggggatcacttctaagaggcaaagtgttctgggggtgatatcagcatcttttttacccttttaccatatttaatccagatccatttaatgtcttgtgattaagaaattgctgcaggctttcaactaaaaggataaaatttttcaagtgtggcttttcctctcatctaataggcttgctggaaacttcccactgtgtgtttatccgaaaggcagctgcattgttattgtctatcttagtggctctttcgccgctctcttctgcaaagtggcctcatttagccaggccattcccaccaccatccatcagaagctcggctaatgagcagagaaggaagagccagtctctcatacaaacacgccacttatctgaattattattttaccaggaaagagggaggagggcgtcgtgagtagggagaaagtttgtttgaccttatttctctcttccgcagaagactgggaaggaggcaggcagcagagcaaacgtccaggcagagctcaactccccacctccggctgaggttcccagctcccacgaagccccattcgtgggggactggaccagaaacgaaaaggaggggggccgaggaaggggaggtgcagggccccggcacgcaaacaggcccgtccagctgggcccctggctgggcccccaccgcccccacccccacccccaccccaggctcccactgagtggggaagaagcaggagaggggatgtcccctcatcctctccagcgcctagaagccacgcaagaaggccaccttctcagggggctcgacgggccctaccccgatgagggtttcgtggaggggggtgtctggtaattcgtacccccaagtagaggcctggccctaaacactgggcggggtgcgagggtgaaggtggccccgggccctcgcgagcccgcgtggggggaggggaagggatgggtgggggtggggagtcccggcccctctgcgggccccggcgccccagcccactgcgacctcagccccggcgcccttggctcccggcagttggcgtgcactcgccccggccccccgctcccggaacccgctcccacacgggccgggtcgggccgagcctgcctacctccgacccggtacatgttggccgccatgtccgcccgcccgcccgcggagcccgagccgagccccgcccgccgccgccgcctcctcctcagcctcagccgcgaccgccgctgccgccgccgccgtcgctgctgcctcgccacgggggggaagggagggaagggaggggacagggggtgggggaagtaaaggggatggtacgccgaggggtgggggctggtgcccgcccccagcgccaggctagcaaggccgagtgggccgggccgggggaggcccggggaggctggagcgctgcggggccagcgggaattgggggggagggggaggggaaagggagtgggagtgggagggagggtggggggccttgctggaagtggagggccctggggtcagggtcctggctgaggcagaggcctgcactcaaatgcggaccaggggctgttagagaattagagtgggggctggggcttagcctctccccagcacctcttcccccacccagggtaccccgtcacctgtccaccccaagacaggtcctccttccctacctctgtccctggggaacccccctgtggctgccctagtaggcaagcgccagtctcaatgcaaactcttggatgcaaataagtgcaggcagcagggtgccttcctcgcggtgagattcaaggggccggcctggagcctgcaggctctagggccaggaagattccgggtgcttcccgcctcgccagagacccagctggggacagaggtagaaaaactcccttcctaggccaccctaactgcgtcatcgtttaccccaaaactgggctgagcagaaccaactgtccaacacccagatggaggccctggctctagacgggcactgtatatgcagggcctgttctgctgggaaaagggacctttaggagtgaggggcttcctttgtccatgggggaacagggccctacagttcacaatcaccaccacccccaaacagaggagattgtattcaatcagtttcatgtcgatggacacttaactggttacgtgcctaaagcttctaaatggttattgtcccaggccaattctctaaacaacctctgttttcacggccttcctactctcacagatacaaaaaaaaaaaaacaacgttgaatcttagctggcgatcccccaaatgaacacaaataactttctttagagaagccagtccattccaaagtactcccagacattgctgcataataaacacgaagaagatttcttggtgtggtggcttgtttggaatgtgtggtgatacacagctgtgtgctgtcgactctgggtttaaggtctgtgcggggctaagaggtgcccccagaaaagaaggttgtgttttggtggtttggtgatgacatttgtgatggtcacttatcacaaagtattgagatgaaaaaactgtgcatagctgaggcaaaatataaaaataaaaaataaagcactattgaattacattgactctatgacctgtttcctcgtctataaaatggggacgtgagttcccccttcacaggtgtggtaaggatcagttgcgatgatatctgaaaatgctttgtaaaccagggaacacagagcaccatgcaaataacaggtgtctcttgctttctttttaaccccagaaaaccacagattcccaagggttctctgctgtgtgtcaaattctgagccatgtgtcaaattctgacccaaagaagaaagcaaaagtgttctgttccacacattgcatagctgtcattcaacatttaccagagatcccaccaaaaacattctgacaaaactgacatcactccatttctgagctgacacataaatagggttgaataattcacctggaatcacacagtaaactggcagcaattttgggattatgaatcagccctttcctctggcctagaatgttctgaaccacagtgtttctccaagtacaaaagccacctagaaaccataaagtgcaaagaagtggatcacaagctttaggatgttttcccattaatttttcataagcaatttctcctccttcgaaatctttccctgtttttgttaattcattgtgtgcctgtctcatttcccaagcttagtgctcttgccaggtgtttatgatgactgtgctaaccacaataaatggtgaaagatgccgagaaaactcctccctatgtccccttaggaacagcctcatccagaagccccccatgaaaggcctcaaagacttgaaggggactagcaggaggtaatgatggtggcaggccttagaaccgttttttgctctagattctatatattagtctcttccatgtccagctcctaggccaatgtcctctacatttctgagctgacacagtagatgctcagtatctgaagaataaataccaacaaatcgtggactcaaagaatcagaagagctgaatacaaggactttgtgaaacttttatatgtcctaattccagagaggttcacacataaaggagttcagcaaatgtttgtagattgaaagaaacctttcaaccaaagacgggtggaaagcctgcacctttaaaaaagcaaaggcgcctctcccttcttagctacatggtttagaccacaaacttgtcatcaaccagccctaacttcactcctagtttggcagtttaactataaagaccttgagcaagttacttaacccctctgagcctcaagaggggttacaaaatatgactactggttgatacctac

SEQ ID NO: 3376 - DNA, 4001 bp, Homo sapiens
actcagtgtataccttgttgagttcttctatccttcttattaggtatgggttgctggaggaattctcaaagtagacataatctgtaattaaaggaagtacagaacttaatctttttaacagaaagttcagatttgtcaatccaagactttttatgttaggcatttcacgtttgaaattaagctcataattcattcactggtaaaagcaaacataataatgcagccttaatatatcctctcacgtgcctactattcacagacctttattttcttggcattttcatttcaattaatgttttatcagtttctcctagacttctgtcccaatacgtcatttctttaataataaacaaaaaagacacctcttatcactgtgtagtcagggcacgctaaacatgtgtcctctgtactataactacttccacatctttttcctccaatacaatttgccctgcaggctgcttctcacataaaactattgacctaagacacattcagagcagggagaaaggcttcacagtccaacctacatttcaatcactacttaaaaaaaaaaaaaaaaatcagatgagcagaacaggttaagaggaagaacgctgacaaacttttccacagttttacctgggaagatgaggaaaaaagggggccgggggatcacttctaagaggcaaagtgttctgggggtgatatcagcatcttttttacccttttaccatatttaatccagatccatttaatgtcttgtgattaagaaattgctgcaggctttcaactaaaaggataaaatttttcaagtgtggcttttcctctcatctaataggcttgctggaaacttcccactgtgtgtttatccgaaaggcagctgcattgttattgtctatcttagtggctctttcgccgctctcttctgcaaagtggcctcatttagccaggccattcccaccaccatccatcagaagctcggctaatgagcagagaaggaagagccagtctctcatacaaacacgccacttatctgaattattattttaccaggaaagagggaggagggcgtcgtgagtagggagaaagtttgtttgaccttatttctctcttccgcagaagactgggaaggaggcaggcagcagagcaaacgtccaggcagagctcaactccccacctccggctgaggttcccagctcccacgaagccccattcgtgggggactggaccagaaacgaaaaggaggggggccgaggaaggggaggtgcagggccccggcacgcaaacaggcccgtccagctgggcccctggctgggcccccaccgcccccacccccacccccaccccaggctcccactgagtggggaagaagcaggagaggggatgtcccctcatcctctccagcgcctagaagccacgcaagaaggccaccttctcagggggctcgacgggccctaccccgatgagggtttcgtggaggggggtgtctggtaattcgtacccccaagtagaggcctggccctaaacactgggcggggtgcgagggtgaaggtggccccgggccctcgcgagcccgcgtggggggaggggaagggatgggtgggggtggggagtcccggcccctctgcgggccccggcgccccagcccactgcgacctcagccccggcgcccttggctcccggcagttggcgtgcactcgccccggccccccgctcccggaacccgctcccacacgggccgggtcgggccgagcctgcctacctccgacccggtacatgttggccgccatgtccgcccgcccgcccgcggagcccgagccgagccccgcccgccgccgccgcctcctcctcagcctcagccgcgaccgccgctgccgccgccgccgtcgctgctgcctcgccacgggggggaagggagggaagggaggggacagggggtgggggaagtaaaggggatggtacgccgaggggtgggggctggtgcccgcccccagcgccaggctagcaaggccgagtgggccgggccgggggaggcccggggaggctggagcgctgcggggccagcgggaattgggggggagggggaggggaaagggagtgggagtgggagggagggtggggggccttgctggaagtggagggccctggggtcagggtcctggctgaggcagaggcctgcactcaaatgcggaccaggggctgttagagaattagagtgggggctggggcttagcctctccccagcacctcttcccccacccagggtaccccgtcacctgtccaccccaagacaggtcctccttccctacctctgtccctggggaacccccctgtggctgccctagtaggcaagcgccagtctcaatgcaaactcttggatgcaaataagtgcaggcagcagggtgccttcctcgcggtgagattcaaggggccggcctggagcctgcaggctctagggccaggaagattccgggtgcttcccgcctcgccagagacccagctggggacagaggtagaaaaactcccttcctaggccaccctaactgcgtcatcgtttaccccaaaactgggctgagcagaaccaactgtccaacacccagatggaggccctggctctagacgggcactgtatatgcagggcctgttctgctgggaaaagggacctttaggagtgaggggcttcctttgtccatgggggaacagggccctacagttcacaatcaccaccacccccaaacagaggagattgtattcaatcagtttcatgtcgatggacacttaactggttacgtgcctaaagcttctaaatggttattgtcccaggccaattctctaaacaacctctgttttcacggccttcctactctcacagatacaaaaaaaaaaaaacaacgttgaatcttagctggcgatcccccaaatgaacacaaataactttctttagagaagccagtccattccaaagtactcccagacattgctgcataataaacacgaagaagatttcttggtgtggtggcttgtttggaatgtgtggtgatacacagctgtgtgctgtcgactctgggtttaaggtctgtgcggggctaagaggtgcccccagaaaagaaggttgtgttttggtggtttggtgatgacatttgtgatggtcacttatcacaaagtattgagatgaaaaaactgtgcatagctgaggcaaaatataaaaataaaaaataaagcactattgaattacattgactctatgacctgtttcctcgtctataaaatggggacgtgagttcccccttcacaggtgtggtaaggatcagttgcgatgatatctgaaaatgctttgtaaaccagggaacacagagcaccatgcaaataacaggtgtctcttgctttctttttaaccccagaaaaccacagattcccaagggttctctgctgtgtgtcaaattctgagccatgtgtcaaattctgacccaaagaagaaagcaaaagtgttctgttccacacattgcatagctgtcattcaacatttaccagagatcccaccaaaaacattctgacaaaactgacatcactccatttctgagctgacacataaatagggttgaataattcacctggaatcacacagtaaactggcagcaattttgggattatgaatcagccctttcctctggcctagaatgttctgaaccacagtgtttctccaagtacaaaagccacctagaaaccataaagtgcaaagaagtggatcacaagctttaggatgttttcccattaatttttcataagcaatttctcctccttcgaaatctttccctgtttttgttaattcattgtgtgcctgtctcatttcccaagcttagtgctcttgccaggtgtttatgatgactgtgctaaccacaataaatggtgaaagatgccgagaaaactcctccctatgtccccttaggaacagcctcatccagaagccccccatgaaaggcctcaaagacttgaaggggactagcaggaggtaatgatgg

SEQ ID NO: 3377 - DNA, 4001 bp, Homo sapiens
tgtggattttcttccgcctctgccacccttgagacaccaagaccaaactctccttcacctcctcttcagcctaaagaccttatgaggatctacttcctcttaatgaatagtaaatacattttctcttaggattttctttttgttttttgagacgggggtctcactctgttgcccaggctggagtgcagtggtgcaatcatggctcactgcagccttgacttccccaggctgaggtaatcctcccacctcagccttctgagtagctgggactacaggtgcacactacaccctgctaatttttgtattttttgtagagacggggttttgcccttatgattttctgaataacgttttcttttctctagcttactttaagaatacagaatgcaatatatatatatacaagatatgtgttaactgtttatgttgtcggtaaggcttccagtcatgagtaggctattagtagttgagttttggaggagtcaaacgttatacactgattttcaactggtgtgggggcggtctggtgcccctaacccctgtgttgttcaagggtcacagtaattagtcaacttgcatacacaattccagttgacctcaaaagtcttcagtggttcaggctggtgcttaacaaactatgcacaaatcatccaggcactctaagccagcagtcttcaacgtttttggcaccagggactggcttcatggaagacaatttttccacagactggtgaggggtttcaggatgattcaagcatattacatttgttgtgcactttatttctgttattttcacgttgtaatataagatgaaataattatacaactcaccataatgtagaatcactgggagccctgagcttgttttcctacaaccaggaggtgccatctggggttgatgggaaacagtgacagatcatcgggcatcagattctcataaggagcgcaacctggacccctcaaaggcgcagttcacaatagggttcgcgctccagtgagaatctaaggcggctggtctgacaggaggcggagctcaggcggtaatgccagcgaagggagcggctgtaaatacagtctggctggctcacttgccgctcacctcctgctgtgcagcctggttcctaataggcaagggacggtaccgggggttggggaacccctgctctaaaaccttcacatcggtcccaaccccttctccagcgtcatcgattgtcgccctggggccaccctgccaagcccaagctctggctgctctccagcctcccctgtccagatgctccctccgccaggaacacctggcagtcgctggggtcagcgggcgcggcccgtggaactgggctcaagcctaaagacctctatgctgattccgcttcctcttaatgaaaagtacatgttatcttccttgtgaagttcaaactcttgttcaacagtcaactcaggccgggcgcggtggctcacgcctgtaatcccagcactttgggagttcgaggcgggtggatcacctgaggccagaagttacagaccagactggccaacacggtgaaaccccgtctctactaaaaatacaaaaattagccaggcatggtggcgggcgcctgtaatcccagctacttgggaggctgaagcagtagaattgcttgaacccgggaggcggaggttgcagtgagccgagatcgcgccattgcactccagcctggagacagagcgagactttgtctcaaaaaaaaaaaatgtcaactctatatcccacaataattgagcagagccacgggtccaggatgccaaaaccaggtcagcgtgcacggacctccgggagggctccacgacctggccgtgaaacactcggcggccgcggttcctctgcgtcgctgcccgcccgcctgcgacccggagaagcccgcgcgcccagctcgagcttacctgacggccgaacgcagccatagcgcggagaagatggcagcagttacggcgccggaagcagcggtcctcccccgtccttcacttccggcccccggtccgtcaccgacgccgttcccagcgccagcgcggtgtggtggatcgtgattccggcccggagctgtgctgagcgttcacggccccgcggggctcaggtgtcccggggccgccccttagaaagccggaaggccggagtcgcgcccgtcaccgtgccgccgcctctgccgcggcctcagccttcgggggcctcggtgtccggttgttcccgttgcactgccgtgtcccgtttcgcagagctctgggccgcgtgaacgaatgggtcgtcctggcccatacttgtgtttcagatgacctgagaattcctctcaagagtacaggtagaggggaactggttccttgcttcgggaacttcacccgagagcgcagaaatccttcccgaggcaggaaaaatggattccgttccatgtagagatatttaagattttattgtgtaaaaatctgtattcagcgtgaacaccggggccacctacgcacaaaaagaagtctttaccgcttttctttctttttactctcagccagtggaagatgagaatttgccgtttttaaaagacccaagtaaaatgacaggaattacggcacatttccctttataagcaagagccttcccaacttcgaggtctggttccctcttaggatgaaatatagtaaagttttagcccaatgtgtattcattcttaaatttcctctctcgacctaagagcgtaggcatctttcacaaggtgatgcttgtgaagaataaaaaggtgtgctttctcagctgcctaaatcctgccaccaaagccttaatttataagcatttcttgttttatctacttcattctggactgacataaaggatttgattcttgcatgggcacacatttacatatctgctttgcgccaggcatggagtggggtgccaaacaatttatgtaaaactgtcttttgacaaaaggattatgtcaaagaaaaggaaggttctaatccgtgtagaaactaaagaattggttgctttggcagagtgcagtggcccacgcctgtaatcccagcactgtgagaggctgaggtgggggggattgcctgggctcaggagttcaagaccaacctgagcaacataggaaaatcctgtctctacaaaaaataaaaaattagccgggagtagtggcgtgcacctgtagtcccagctactcaggagcctgaagtgggaggatcacttgagtccaggaggttgaggctgcagtgagccatgattgcaccactgcactccagcctgcgtaacagagcaagaccttgtctcaaaaaacaaaaggaaaaaaaaaattggttgcctttgttgttttttataatgtaattttcttctcaaaatactcaactgtcaacatctcacaataaattgtgttaatgctacaccaaaagcctaagaaaatcccatgagccaccccaactccctggaaagaatcaaggaacctgaacagtttgtctagctctagaaataaaatgacagctgggacatggggattactatgaaaaattgacatgagcccgggtgtggtggctcacgcctgtaatcccagcactttgggaggccgaggtgggcagatcacctgaggtcaggggtttgagaccagcctggaaaacatggtgaaaccccatctctactaaaaatacaaaaattagccaggcatggtggtgggcacctgtagtgtcagctactcaggaggctgaggcaggagaatcacttgaacctgggaggcggaggttgcagtgagccaagatcacgccattgtactgcagcctgggcaacaaaagcgaaagtacttctcaaaaaaaaaaaaaaaaaatttgacatcaccttcagtcttgtgtgaaaactttgctctctcgaaccatactttaaaaatatgcagtgggttgggcacggtggctcatgcttgtaatcccagcactttgagaggctgagatgggtggatcacctgaggtcaggagttcgagaccagcctggccaa

SEQ ID NO: 3378 - DNA, 4001 bp, Homo sapiens
caaagaaaaaaaaaaaaagaatgcagactcatatttttaaaaggatacaactttttaaaaataagcagtatttaaaaataaacagtattttaaaaaataagcagcagtaagaaagcaatatgtgggaattgtaaatagcaaatgtgcagtacagataatatggattgctttcagagatgtggatgaagcttacttgttctttcagaaaggtagtgaaaagagcatttgttattggagagtgtagacaaactggcccagttctttaggtaatgaatgagagcatctttataaatctcttttggaccatggaagcctaggaaaggtctggtccacagtcacatgaggccagcactcaggaagagggagaaggggagaaaacacacagtaacgaaacatgggggaggtcaagagtcagaccagggaaaaccctgaaagtcccctcccacgttttccttcaagaactcattgctccaacaagcagcgcctttgaaatatttctaacagcatttccgcactgactggaaattacacgcgtgttctgccccttgtcaggaacatgagctccattaagaacagtttttctcatctttgaattcgcacagcttggcatagtgtctggtacacagtgaacgttagatgaaaaaaagaaggggctgatgttgtaaggtgcagggctctaacaatgccaacaatgccagcgctctaatgaccgaccaaatcaccttcccaaggaaacccaaaaatgcaaacagagcttttcctttcctcctcccctgtatatttttcccaattttgttattgtggtaaaattcacataacataaaccttatcaacttttttttttttttttttttttgagacagggtctcgctctgtcgcccagactggagggcagtggtgcaatcacggctcactgcagcctcgaactcctgggctcaagcgattctcgtgcctcagcctcggcgcgtgtcaccacgcccggcccatcttaaccatttttaagtgcagttcagtggtattaaatacgttcatatgttgtgcaaccatcaccaccatccatcttcagaactcttcatcttgtaaaactgaaattctgcaagtaccgctgaaatatgggtacttgtcactctccattccccctttccctaaggccctgggagcctcccggatgtttgccacctctatgtacgcagcccggcactgacaggctctggtgggctgcagccaaagctagggtgcccagagtccgttcatgttcctggcagagcggaggcagcgcgggccactcccaccggcggagggaggagggcggcgcggggaccccgagcaagtcggctccgcgatttcatcagctgcagcagcgccctccgccgctagggtccccgcaaggacaactcgccgagggctgctcttttggaaccctcgcctgttctcccccagacgactctcagcatcccagccagaggcggccggcgctgtcggaaggctccgcgtaaactgatgccttcgcgttccgcacgccacccccgtcccgcccgccgactggccacgggccccggcgacgccccgagtcgcaggagagcggctccctccgaaaggcgggcttcgggtaccagccctccgcgccgaggaagcgccccagtcgagagctgcggcggcgctcggtgccacgtcgccccgccacacccctcagcggccaccaccgccggggcggagatgttcgggaaggacttccctcggtgtccctcgggggcccggcgtgcccctcgccctccgttcccctcagctttccgcgctgaccgagctctgtgaccctcttaccgaactgccgcgaggtggaaagggcgaaggcgaagggagcagctgtgcgcgggctgcagcagccgggcagccaaagcagacattagagaagtcgcagccatagaccgcgccggtgactgcgccgggagggaagcgcgcgcgcgggccacgcggttatactgcggcctcgtggcaggccccgcctccctccgccacccattggtccctgccgcatgccactggctgtctgttgagccaggtggagccgaaggggccaaccggttttctttattaaacgtaagcgaagtccgaaagagccctgcttttgattggagccagaagagcctggagcgaggtcctgtaaggcgctgaagcctcggcaacgtgccatgataggctgaggaagtcaaactcctgcctgacgccgctagtgtcaccgaaggccggacaacacaagagaaaagttcattcattcattcgttgaacaattatatgagcgcctactgtgtgccaagcactgtaaagggtggatgaaaagacaagctgatagaatgccaacgaacagaagtaaaaggaatgatggagttagaaaatcaccattttccaaaatcagtacatggtggcgcgtgactacagtaccagctactggggaggctgaggtggaaggatcacctgagttcaggaggttgaggctgcagtgagctgaaggcgcgccactgcactccagcctgggcgacgagagtgagaccatatctcaaaacaacaacaaaaaaagtaaaatcataaaagatattcagagacagacgtcagggttgcatgtgcaaccctgattcagaagcagcaatagatgtcaaaacaactgggtgaaagttggatgaggagcaagatatttacatatagggttgccagatctagcaaataaaaacacaagatgcccaatcaaatcagaattttagataaacactttgggaggtcatatttatactttatttatggcttatctggaattcagattcaactgggcttcctgtattttttcccgcaaactttttgcatagtctcaaagtatctctcccgcaaggaaacttaaggagggcagggcgcggtggctcacttctgtaatccccagctctttgggaggccaaggcggacggatcacctgaggccaggagttcgagaccagcctggccaatgtgttgaaacccccgtctctactaaaaacacaaaaaattatctgagcatcgtggcggacgctgtaatcccagctactggggagactgaggcatgagaatcgcttgaatctgggaggcagaggttgcagggagccgagactgtgccactgcacttcagcctgggcaacaaaaagactctgtctcaaaaaacaaaacaaacaaacaaagaacaggggaaaccaatcctgtcaacaccttgacctttacttctagcctccaggaaggaaaggaaaatggtaaatttacagtgaagaaacatgacagttactgcttcaaccacgtgatcaaagttagcaccacccagtaagggaacacacatatatgccttctgataggatccattgaggagacacatcacttcgtagctcttaacaagtctgtaaatttaataaggtgattttcctaaaccaatgagtctcctaaaaacggttacagattcctcatttcacattgagaagaaagatcacagacctagaatgttaaaactgtccaggaaaaaaaacagttgtaaagctttggaacacactagtagatcttaatctattcacaaggaaatatcagacaagcccaaagtgagagatattctacaagataaattgcttgtactcttgacagctccaaggccatgaaagacaaagaatgagaaactgttctccattaaaggagcctaggcatgacagctaaatgctgtttgattctggattggattctggacccaaaactttttgtctttctttttttctctttcttgcttctttttttctctcttttgctatagatgacattataggacaattggcaaaatatgaataaagtctgcaactagctaatagcattttatcagtgttagctaatcgcatgcagtaatgtaagagaatatattgcacttgcttctagtactaaaggaccatgtctgtaacttacttttgaatagttcagaaaaaaataatgctttgtatgtataagttg

SEQ ID NO: 3379 - DNA, 4001 bp, Homo sapiens
tggagttttgctcatcgctcaggctggagtgcaatggcgtgatcttggctcactacaacctccacctgctgggttcaggggattctcctgcctcagcctcccaagtcgctgggattacaggtgcctgccagcacacccggctaattattttgtatttttagtagagacggggtttcaccgtgttggccaggctggtcttgaactcctgacctcaggtgatctatccgccttggcctcccaaagtgctgggattacaggcgtgagccaccgcgcctggcctatactgaatattttttaaaagaaagaaaagaaatgataacagaaacaagtacagtatagcaaagaaagtatcttattaggcaacaaaggaaccttaggtggacactcactctgacagtcagtgttatctggactcagcaagtcacttgtttcctatgggcctcattttccggatctctgttaaaaataaataaataaataagtgtttgaatatctgtccttcctattacaagactaagaggagaaaatgagatgatgtatatactttatcatcagctattttaaaaccatatcacatgtcttgatactcgcttataagctttgaggattcattgcttataagttaaaaatattcacaagtcattaacttgtttaccttcggacaattatgaggttgtgtatgtgtgtgtaatcgagcaagcattttaccttaaaaggcttattcgagtaaagatcaaggaaaaatctaacttaatgccaacgaaataaacacattaagatttagaaattcaggctgggcgtgatggctcatgcctgtaatcctagcactttgggaggtcgaggcgggcggatcacctgaggtcaggagttcgagaccagcctggccaacatggtgaaaccccctctctactaaaagtacaaaaattagccgggtacggtggcgggcgcctgtaatcccagcgacttgggaggctgaggcaggagaatcgcttgaacccaggaggcagagactgcagtgagccgagatcaggccactgcactccagcctgggcgacagtgagactctgtctaaagaaaaaaaaaagaagatttggaaattcattcaatagtatttacacacattaaatacttctaagaatggcacatggaaaatatcttatttacgtttgtgcccctggaccaagaagtagagtgctcaggtaacacaggattccttgagaaaataatttttaaatcagtatgaaaccagatttgagaagagcacagattaatggagtgggaggaaggaccctacgagatattaaccaaagcacagatatgtaattgaggcaggaactggaaagacacattggaggcaataacccaaatgtcaaaactggaaggaaacttgtcacttactccaagctcctcattttacagaaaaggaaacggaaatccagaagggtcaaaaaagcttctccaatgtcataccgctagttaatggcagtcaagactagaacccagacgttctgactcccagtacggtgttgtttcgccgctaggatatccttgtcaaggaatctgaaaaaagtatgttgcaaatacgtagttgcgttagggaaaacgtctgaatgtgagctggaagctttggaacttaccagaaaggtaaaaataaatcactgcagaaaaattacggatctggggtggctcgcctcaaattggagcccagaaggccttgggcccatgggaggctgggaagtgaggacctgcacccacagccgcgcgcgaggaggggaagccggccagccgcttccgagagaacagtgcacatgccttcgtgaatgcctaacgtgggctcacgcagggattaaatgcatcttggaaaggcttccgaacgcacaatgtttatgaagttcgcgtgatttgtgccactgacacgttaggcgaaacaacacacaccacctgcaccggacaaccctggttaagggatcctacccacttaactcctacctacagccccgggcccctggattctgagcacgggcggagatcaccttctggacccggaagaatggtcggtaggtcagtccgtccccgctacggtccccgccgggcttccggtcccgctggaaaaggttctttccggaattcagagagttgctgtcgccgctgggggtgggactgtctgcggtgtccgcggcgggcgtccagcctgggaggcgctggttcaacctgtggctcctcccagggtcagccgcgcgtggtgaatcgtttctgcaggtcccttccatttcttactttcctttcctttctttctctctttcctttttttctttctgtccctctcctttctttccttccttcctttcttcatttcttccttcctttcctcttccttcctttccgtttttctttctcttttttttttttttaagaaaactgcctttattcaattagaagttggaaaaattaactggtacagaaaaaaagtgtaatcagctggagaaaaagtgccacccatgagaactgatggctcctctgggagggaatctggatacagtgaggatttctaggaagcaaattacttcttctctggggctatgagaggcctcggtggtgcttaacactgtaggaaacgttaaatggagaattgtgggagaaatgatacctccttcaaagatacgtgttcctaacaagaaggaaaaaacaaatgcaagcgaacagtggcggtagaaccagttagtattgtgcgaacagtactttctgttttctcctaagtcagctcgtgtgtatggcattaggagtaatagagccagagtgcctggtttcctatcccagctcattcctagtgtgtggttgggaatgttttgtcaactgtccatgtcccagtttgttcatctacattatagtaatgacagtagctagttcacaggattgtaataaggtttttgttgtgtttttgtttctatttgtttttgagatggagtttcgctcttgttgcccaggccggagtgcaatggcacgatctcagctcaccgcaacctctgcctcccgggttcaagcgattctcctgcctcagcctcccgagtagctgggattacaggcatgtgccaccactcctggctaattttgtgtttcttgtagagacagggtttttccatgttggtcaggctggtctcgaattccctatttcagatgatccgcccacatcggcctcccaaagtgctgggatgacaggcgttagccacctctcccagactgttttttgttttttttgagacagtgtcactctgtcgcccaagctggagcacaatggcgcgatctcggctcattgcaaccaaactccgcttcctgggttcaagtgattctcccgcctcagcctcccgcgtagctgagattacaggggcacatcaccatgcctcactaattcaccatgttggccaagctggtctcgaactcctgacctcaggtgactgcccacctaagcctcccaaagtgctgggattacaggcatgagccaccacgcccggctgcaataagcttttaatgggttgataaactgttgataagtagtgcctggttcatagtatgtgtttgctgttatggttattactgcctgcccccagagctttccctcatcttgcttggacattatgactttcagctggtcgttttgaccacaaccatcaccacctctcaaatataaatattgttttattatctctgtcttttggtaaaaggaatttgagaagaaaacaaaatcaatcaattaatctttgtctttaagatctaccactcccctgggtaattggtatggtacagaagttcattactcaaaagcatacttgccattgagggaagagagagaccctctcatattgttttatattgttttatactcagtacctgttttaagagagaaaaaagaagtgaaatcaaagacaggcagtccggcgccaggcccaaaaccaggcctggctctgcctggcctaaacccagtagttaaaaatcaactcaggctg

SEQ ID NO: 3380 - DNA, 4001 bp, Homo sapiens
tgggttcaggggattctcctgcctcagcctcccaagtcgctgggattacaggtgcctgccagcacacccggctaattattttgtatttttagtagagacggggtttcaccgtgttggccaggctggtcttgaactcctgacctcaggtgatctatccgccttggcctcccaaagtgctgggattacaggcgtgagccaccgcgcctggcctatactgaatattttttaaaagaaagaaaagaaatgataacagaaacaagtacagtatagcaaagaaagtatcttattaggcaacaaaggaaccttaggtggacactcactctgacagtcagtgttatctggactcagcaagtcacttgtttcctatgggcctcattttccggatctctgttaaaaataaataaataaataagtgtttgaatatctgtccttcctattacaagactaagaggagaaaatgagatgatgtatatactttatcatcagctattttaaaaccatatcacatgtcttgatactcgcttataagctttgaggattcattgcttataagttaaaaatattcacaagtcattaacttgtttaccttcggacaattatgaggttgtgtatgtgtgtgtaatcgagcaagcattttaccttaaaaggcttattcgagtaaagatcaaggaaaaatctaacttaatgccaacgaaataaacacattaagatttagaaattcaggctgggcgtgatggctcatgcctgtaatcctagcactttgggaggtcgaggcgggcggatcacctgaggtcaggagttcgagaccagcctggccaacatggtgaaaccccctctctactaaaagtacaaaaattagccgggtacggtggcgggcgcctgtaatcccagcgacttgggaggctgaggcaggagaatcgcttgaacccaggaggcagagactgcagtgagccgagatcaggccactgcactccagcctgggcgacagtgagactctgtctaaagaaaaaaaaaagaagatttggaaattcattcaatagtatttacacacattaaatacttctaagaatggcacatggaaaatatcttatttacgtttgtgcccctggaccaagaagtagagtgctcaggtaacacaggattccttgagaaaataatttttaaatcagtatgaaaccagatttgagaagagcacagattaatggagtgggaggaaggaccctacgagatattaaccaaagcacagatatgtaattgaggcaggaactggaaagacacattggaggcaataacccaaatgtcaaaactggaaggaaacttgtcacttactccaagctcctcattttacagaaaaggaaacggaaatccagaagggtcaaaaaagcttctccaatgtcataccgctagttaatggcagtcaagactagaacccagacgttctgactcccagtacggtgttgtttcgccgctaggatatccttgtcaaggaatctgaaaaaagtatgttgcaaatacgtagttgcgttagggaaaacgtctgaatgtgagctggaagctttggaacttaccagaaaggtaaaaataaatcactgcagaaaaattacggatctggggtggctcgcctcaaattggagcccagaaggccttgggcccatgggaggctgggaagtgaggacctgcacccacagccgcgcgcgaggaggggaagccggccagccgcttccgagagaacagtgcacatgccttcgtgaatgcctaacgtgggctcacgcagggattaaatgcatcttggaaaggcttccgaacgcacaatgtttatgaagttcgcgtgatttgtgccactgacacgttaggcgaaacaacacacaccacctgcaccggacaaccctggttaagggatcctacccacttaactcctacctacagccccgggcccctggattctgagcacgggcggagatcaccttctggacccggaagaatggtcggtaggtcagtccgtccccgctacggtccccgccgggcttccggtcccgctggaaaaggttctttccggaattcagagagttgctgtcgccgctgggggtgggactgtctgcggtgtccgcggcgggcgtccagcctgggaggcgctggttcaacctgtggctcctcccagggtcagccgcgcgtggtgaatcgtttctgcaggtcccttccatttcttactttcctttcctttctttctctctttcctttttttctttctgtccctctcctttctttccttccttcctttcttcatttcttccttcctttcctcttccttcctttccgtttttctttctcttttttttttttttaagaaaactgcctttattcaattagaagttggaaaaattaactggtacagaaaaaaagtgtaatcagctggagaaaaagtgccacccatgagaactgatggctcctctgggagggaatctggatacagtgaggatttctaggaagcaaattacttcttctctggggctatgagaggcctcggtggtgcttaacactgtaggaaacgttaaatggagaattgtgggagaaatgatacctccttcaaagatacgtgttcctaacaagaaggaaaaaacaaatgcaagcgaacagtggcggtagaaccagttagtattgtgcgaacagtactttctgttttctcctaagtcagctcgtgtgtatggcattaggagtaatagagccagagtgcctggtttcctatcccagctcattcctagtgtgtggttgggaatgttttgtcaactgtccatgtcccagtttgttcatctacattatagtaatgacagtagctagttcacaggattgtaataaggtttttgttgtgtttttgtttctatttgtttttgagatggagtttcgctcttgttgcccaggccggagtgcaatggcacgatctcagctcaccgcaacctctgcctcccgggttcaagcgattctcctgcctcagcctcccgagtagctgggattacaggcatgtgccaccactcctggctaattttgtgtttcttgtagagacagggtttttccatgttggtcaggctggtctcgaattccctatttcagatgatccgcccacatcggcctcccaaagtgctgggatgacaggcgttagccacctctcccagactgttttttgttttttttgagacagtgtcactctgtcgcccaagctggagcacaatggcgcgatctcggctcattgcaaccaaactccgcttcctgggttcaagtgattctcccgcctcagcctcccgcgtagctgagattacaggggcacatcaccatgcctcactaattcaccatgttggccaagctggtctcgaactcctgacctcaggtgactgcccacctaagcctcccaaagtgctgggattacaggcatgagccaccacgcccggctgcaataagcttttaatgggttgataaactgttgataagtagtgcctggttcatagtatgtgtttgctgttatggttattactgcctgcccccagagctttccctcatcttgcttggacattatgactttcagctggtcgttttgaccacaaccatcaccacctctcaaatataaatattgttttattatctctgtcttttggtaaaaggaatttgagaagaaaacaaaatcaatcaattaatctttgtctttaagatctaccactcccctgggtaattggtatggtacagaagttcattactcaaaagcatacttgccattgagggaagagagagaccctctcatattgttttatattgttttatactcagtacctgttttaagagagaaaaaagaagtgaaatcaaagacaggcagtccggcgccaggcccaaaaccaggcctggctctgcctggcctaaacccagtagttaaaaatcaactcaggctgggcgcagtggctcacgcctgtaatcccagcgctttgggaggccgaggcgggtggatcacgaagtcagga

SEQ ID NO: 3381 - DNA, 4001 bp, Homo sapiens
gccaatttcttctcttatggattatgaattcttaagttttgcttaggcctcttctgctatccaaggattattaaaataatctatgttttcctctaattattttattacaattttgttgttttatatttagatctttaatcaatctggaatttattcatgtggtgtaatgacttagtagttgttccaacaccatttattgaattatccatttttaaatgcttcctcctagagtaacagatcactacaaatagctaagacggcagacagacaaaatgcctagaaatttttaaacgtcactacttaaagcagtatccaaagtttattaaaagacattcatcattttctcattaaaagaaatcacatattaggacacatgcacacagtgaaccactcaacatacactgtgaagttttttttttcaacatagtagcaaactaaattaaatcgctgatctaactatataagcctgattttgtttcaacataaatggtaaaagcagaaataatcattgcttgaaatctcaagattagtcattgatttgggtcgcaaatatttattgagcaccaactgactatggatacaatggggaacaaaacaagtttgatccctactttcaggaagcttgcaatctagtaggagcttctctcctctaaaaaataatgtttttaagtgaagaaggaaaaaaaagaaatgtacgttcacacaaacgcaaagcagtgaaaaacattccggcaaattttatgacacattctgtacttcccatttccaaaatactatcttattacttcaaatgtacctatttattgtggtgactgtcttcattactgtactcatgttgaaaacactgctagggagttatgactaattccattagcctctatctcaaagtacctatgtttagtctcctcactttctcaacaatatttaatttctttcattacaataaataaaaacctcaataagagaaattacaaacctatatacatcagtcatgttcagtccaccgactcaaaagtatttctttaaagtacatgcagatttaaaaattttccatgaatccgcgcgggcgtggtggcgggcgcctgtaatcccaactactcgggaggctaaggcaggagaatcgcttgaacccgggaagcggaggttgcagtgagcccaggttgtgccactgcactccagcctcggtgacaaaagagaaactccgtctcaacaaataaataaataaataactcctagagtcttagcaaatggcactactgtgtcgctgggagacgaagcaagaagtctggtgttccctcaacaataggtaacaactgattagtgacagtcaccttaaactttttgagtaccaagacccagaaactgccaccactcttagactgaagcgttcagatgcttgcccctgtggtaacgccccccacctcaatcccaatccaaggcctccccctcatactccagcacctcccaactgaatggggaggtgggacaaagtaccgcccaagggaaggagacgggactcctgctcctgcggggtgaccttggccaagtgtctccttctcagttttcccatatgtgagataaggttggtagtccgtgcccgcctccaccatccgggccgggttcagcgtataatgccgcaaggctggaggaaagctccagccctgtaccccacgcggctccccgagaccgcgccgccaccttctgggtctgcggccagccgcgctacctgcaatctgggagacgaaggcttccgccactagagacatgtcggctgggaggcccggcgcccgggtgcctgccccccacgggcctcagcgtcctccaccgcaaacccggaggctctcggcagttaacgagcctagccccgccaacgttcagactcgcaaagcccactccaacagcagcggcggctgcagtgaggcccccaaggttaccgccaggcctggctagggacttccggcgcagccgacaacggcactcgagcgcttccgccggccccgcccccgcgccgtcctacggggcgccggcgcggctagctccgtccagccaattccaggctctgcgctgggggcccgcaggtggaagcgaagtacccgactcgtctcccacccaggggactggcaggggaatctgggagatttttagcgtcctttctgtaagccagaattttgtaaccgagtaacatttgtaaacgcccactggataccaggcacttatatacctatatctacacacacatatatacatatatacacacacacatacacacatatataatatatacacgtatatatgtacacatgtacatatatacacatatatacatatatatacacatatattctatttgacttcgtcttctcaacaacccattaaagtaataatattatcgccattttacggataagaatataggcttaaggagtttaaactgcctgcccaggcagtcctccaaggaccagattcaaggctgcatgaattccctctattccattatattgctgggttgattagtccgtggatagacattagtgttttttgttgttgttgtttattcaaacatgcttggcagaaaggaggcttgagcagcgcctaagccagaaggtaatttgtccttcaactccatacacccgaaatgatgctcagcttggagaataagatactttagtttcacacacttctcacctttcgggggtgaacggggcaggaagaggagaaactaaattccctgagtaactttgtcttaacctaatagcttcttaaattacacaattaaagaaaaatcatatgcattacagattggtggtattacaagtgggacaggcttcagagctggtaacccaaagcccccttcactgatgagaaacaagttcagagaggtgaggtaactcattttaaatcacacagtaaatcaaaaagtcagacagcttactaggtttttgcagaggaaacctgtattctaagaattactgtccatgacatttagaaagctatatttccattctttatatccgtagatctctattactgttcattctgcctccttaactagcgtggttggtttcctagagctgccagattaccacaaactggttggctaaacaacagaaattcattctcacaattctggaggctagaagtctgaaatcaaggtgtcagcagggccatgctgtcttgcaaggctccagagaagggggttgccggcaatcttccatgtactttggcttgtagatacatcactccaatctctgccaccacatcacacggcattccccctgtgtgtcaatgtgttcaaatttctctcttcttgagaaataacaccagtcattgtgttagggacccccaccctaatccagcaggacctcatcttaacatgatttcttttcttttcttttctttttttttttttttttttttgagatggagtcttgctctgtcacctaggctggagtgcagtggcgtgatctcggcccactgcaacctccaccttccaggttcaagcgattctcctgccttggcctcccaaatagctgagattacaggtgcgtgccaccatgcccggctaatttttgtatttttagtagagaccgggtttcaccatgttggccaggctggtctcgaactcctgacctcatgatccgcccgccttggcttcacaaagtgctggaattacaggcgtgagccactgtgcccagccccataatttttttaaggttaagtcatattttcatctccctcagcaaaaggaagcttcttaaacagcatttaaatttacccaataatttacattgacataaacacagcagcgtcttaggaagtagtgtcttctctatagctgaaattcagagttgacaagcagctgtgaatagtagaaatacagggaagataatattaataggtttttcttgtttgtgcagagagaggtaacactgatagtaaagaatacatgagatccaatttcctcctcatcccataggtattattgaccaagagaaatgagc

SEQ ID NO: 3382 - DNA, 4001 bp, Homo sapiens
tagttgaagggatctaatagaacaaatttcctagccaactatattttaagggcaaagaaggggggaaacgggcagcaacattgatggactatttgcatgtaccagaaactatgcataggactttaatatgtgatttaactgaccatgaaccaaatctccagtgagattcacagcttttaagaactacggtataagataatcgataaggctaacatggaaaagttgtagcatattaatattttggtattatatattcctctatcactaaagaggtaggttttaacctcaatcattcctctttgccattacaaatagagatgacaaattagagtatcaaacaaaccactgtatttaatttacatgtcaagtatgagatcctatcacttatgccaagtcaggtactttaatgtgtttataaaatcattactatgaaaagtaaaagaaatggataatgtccagcattttgacttatagaaaacttgccctgaatctgcaacttctgaagggaaaatactgtcaccattgctaatctcacttgaagcttccacagatttttttgttccaaaagggaagaaaagtgaaattaaattttgaataaagttcataaagaaatgtaaaacatttctatttttcttttcagttccctcaacccaaacagaaacagcttcctgcaatggcttaagtccatgtgtacattactgaatcatgacggccacaatgtaattttatagggttataatcacaacagaaaacttacattcagcagtttgtgtcacctacaatataatctaaaagacagaaagaagtatttaccaaattacctgctactgctgttattctttttggatttgttcctccgttttaaggcatctctgtccttgttattgtatggtaacatggaggcataaccatgttcagcttctagaaaacaggaggatccagttaatgaatgggcccagaatatttaatgctctctcctctctacagtatttcctttttcctttatttatctttaaaagaatattgtggaaataattaaatggagtaaggtggaattctgagaacaatgatttaaaaaaaaattgtgtgaatatcgtcaattcggagcaggtgtaaggaggattccagctgctcattgttgagaaagacacagtagtggctaggctcacgcagcctgggtttcccactggctacatccagcaggttggtgcgggttaagtggaaccagctcaggcgaaggtgcggggcaagcaccgtgagccggggaccgggaggcgctgctcctctgcccaggagactggggcgccgggcccacctgggggccggccgggaccagcccgggtgaggtaaaccagggaggctatcggagggggccccggccacccactcgtgaagggctggggaaggggcggcgttcgggaccccggcgggcggcagccccttctccaccccattcattgctttggggcagcggcggcttcccttcggaccgcgcgtggggagagccagaggggttgggagcgctcgcggtctccccgcctccaaccacccccggagcggctgggcgcccggacctgaggccggccccacaggacccccggcctcgtttcgagtggacccctccccgtccccgtgcacctctctcccgccgctccagatagtcggccgcctccagcagcatctggatgttcatccgaaccgccgccgccattctgcaccgggggccggagccacgggaccaacccccactgcccacgggctcgctgccgccgccggaccgctgtggagcccgctatggagcccgctgtggagcccgctgtggaccccgcggagcagggctgagggagcctctctggcaaccacgctcgacaagagagggagggggccagtgagctgggcaccgccgacacagtgacagaacccggagcagagcagcagccgccaccgccgcggagtgtttatccccgactcaccatctccccgcccccagccccttctcttgacaggccagcttcggccgcgttcctcattgggccccccaaagaatgccccgcccctacacttgtgcgattgggagagggcttcagggctccaccccgcaaagtccgctcctctcgctggttggtcacacttgacaaggcccgggctccaccccctctttccaactggtgacaggattcgcaactccgcctcgtgctccttccttgtttcccattggttctataccaacaacccgggcccccttttgctttgttagtattggccaagagctgcagaaggcaagcacctcgccggtctcccattggtgaagccttcggaaacctcccagctacgatgatgtcacctttctccaggccaggcgagccctaagtggctgatggtcagcagcctggctgctcctcaccgggtctggcattggctgggagggccggtccggcgctgggcggcgctgattcaccagccgctgcggagctctgctccacccggccttgcctcggacctgttgccaagacctgtccccggggaaaacttccggggacctgccaggcgtccatcgaatggaaggctggcacctcgtgtcgcctgggcgctctgccccgcttgggttcggggccggagccctcggtctggtggccgcggccctggaggttctgggcttcgcggaactcgggctggcgagggcccagcctcgaatcctcccgaagagcggtgcaggctagtggccggtgagccgggagctagggcaggcgccacgtggctgctgcggggcttgagaagaaaagccggccgttgttaaatgctcgccgctcggcgttttttctgccctcaagaaagagctggaatcgggctgcagtatacagcattgagctcatgcgccttttccgcacccccctccacccccgggaagtgatggaataattaattactttcacgcgagcggctttttaaagctcagagacttcctgaacctacagaatggcattaaaccctaagattctttgcttaaatctcttttggggttttcccctcccttttaattctagatgaaaacactcacaagattattgtttttgtttgtttgttttgaaagggagttttgctcttgtcgcccaggctggagtgcaatggcgcgatctcggctcactgcaacctccttctcccgggttcaagcgattctcctgcctcaaccttctgagtagctgggattacaggtgcccaccaccacgcccggctaatttttgtatttttagtagagacggggtttcaccatgttggccaggctggtctcgaactcttgacctcaggtgatccacccacctcagcctcccaaagtgctgggattacaggcgtgagccaccgcacccggccaagaatactctttaagacgtctgcaaattgtgtgtttccgcatggggtggtaccaatataaatgcttaatagaatgttacgtatacagaactaaaaaggttaaagatcggtccctaaacctattaaaatttttgaaatgaaagctatctggcaaaccaagctacactgccaatgtactgacagacatctccaattttaaaagtagaaataaagttcttggtaggttgagtccccaaaatacaaatgagtaaagcatgaacatatttctttttttaaaagtttattattgttgccaatatataatagcttactatgtgtaggtatcctacctacattatctctaatcctcaatataaccccatgaggtaggttgtgttaattacattttgcacgtgaagaaactgaggcccagggaggctaaatgattttccctgtcatgcattcagctgcagacatggaaactgaacctatgtatgtctcacccagagcccaaattaccaatcctcctgttggtagttgtataaagacaaggtggtttaaacagatttccagactgagtcacaaaacactgacaactcaagtactgaagaaaaagaaagacaaaggtgtaaatgtaattatggtgggaaata

SEQ ID NO: 3383 - DNA, 4001 bp, Homo sapiens
ttctcgcgggcggagaagccgctccacatgcagtcctggaggatgaccgggttgggggtgaggccacccagtccccccaggccgaacgcgtcctcctcggccgggctgccccacagctcgttctcaagcagcatctccgtgacccagctcgggggctcggagctgtgctccgcgaagccacggctgggcgacagcgggggcgtgggcagcagctcaaacttcttccagatgtcctcccccgggggggtcgagtcggggccgccgaagtagaagtcatcttcgtccgggtagaagcagggctgtagcgagtcaaactcgaggtctgggttcttgcagatcatgcccggcatggtggacgtggagcagctcggcatcggctcgcctcccggccggcgactgagggcttctttccgccccgttcgttttaataccgggggtgcttccttcccgtggggggcgcggaaggcgggggccggcgccgacctccaacactgcaaccgacagacacaccggagagggtgggcaaacggggcagaccgaggggataggcaatgggcgccccctctaaccaggttccccaatcttccctccaagccccccactctgcccactgctcccgaaggtggaggaagttgtgcctctcgctccctccctcccgccctccttttgtgtacaagctgtctacgacagggggtgggagggggcatgcagatgcagggggtggtggcgaggctccgcaactttggaaactgccatttcattcacacaaggcactgcctgggggagggggctgttcctggctgcagaattctagctctcacgagcacgcagacaaccgcactcgcagcggtgtggggccggctgctcaggggaagccccaggctctccgacccagctaccgggaatggtatttggagtaccttctaccccctttgtaaaaatgcaacctcaggagtgcaaatgatagcaggggatttagaaaactttgcaaataaaaaaaagcctttctctagacagagaccaacaacagacacccatatccacaaatccttcccctccccaaatttgagcaaacgcccctcggcattcacccgctgcagggatactcctgccaatagcttaattggaagctctctaagcccacccctgctcttccaaacccacgacaacgtcctcttccagggagggagaggctgagcccctgttcccgggaatggcaggggcgcccgcgcgaggagggtcgccgggagagccgcctctcctccaagctggagcagccgtgacccagattgcgaccgcggcggcctcgccctgcctaatccccccctcttcttcctccaggggcaccctttggagaagaaccccagcctggggtggggacgcaccggctctccgacagctcaaacacagacagatcttctagagccgagggaatttcttttcgcagaagccattactccccccggtaagggctgcaaaaggattagggcgggtctcctctagccaggatgccttcggggctggaactggcttttctgggaaaacccagagatggttttgtttcggaagcagaaacagtcccccgggcatattagggcgcccggtgcgcacgtcgcaatcccgtccagggcttgccttgccccggcgctcgtcgcttccctgggcgccgggcggtttgcaagccctgctccttacctcccgccgactgcaggggatccggaggcgattctgcgcgggtgtctccgggtgggccgggggggcgggggtgtcctcggatggctacagtctgtgcgcgcttgcgcctggctagcgcttgctcggctccaacacagttcccaggagccccccgcatccacccagcgcgtccagacagatgactgtcacagcctgcgctttgaagctcgggggatattattaactgaaaaatctgacacacccggggggcggggagagaagggggctgtggcgcagacaagggggagggagaaaggagaggaaagcggctttaccccgccctcctgatttccataaaaatcaggggaggcgccaaggctttcgcgccaaaagccacttgcttttctttgcagagagaaggctgcaaagctgggaagcccagggtgtgctcctcccgcccttttggacccccgggcttgcaccggctgcactctgagaaccagctgcgcgcggagcggtgcaatgcagcacccaccctgcgagcctggcaattgcttgtcattaaaagaaaaaaaaattacggagggctccgggggtgtgtgttggggaggggagaccgatgcttctaacccagcccccgctttgactgcgtgttgtgcagctgagcgcgaggccaacgttgagcaaggccttgcagggaggttgctcctgtgtaattacgaaagaaggctagtccgaaggtgcaaaatagcagggagaggacgcgcccccttaggaacaagacctctggatgtttccagtttcaaattgaaagaagaggggcgccccccttgtttgaaaataaataaataaataagtgcgagctacgagggtggcgccgcggtggtttcttcggccgaaggcgacacctcgcggagactgagcagaaagcggagctgcccggccttggcgcggacctggagtgcggccactccgcaggtctcccgccgcccccgcgggactgtccacgcgtcctcaccactgcggaggaggaggcggcctggctctgcttcctagggggaatgggcgtacgttccctgcagccgtccccagggctcccaagttaaccttttcaaagccaccattctccccagttatgggcaggcgaatctgatttaccgagatggaagtgctgtccacacctcctgagacccagcctcggctcaaacagcttgattccaaactgttgaagggaaaaaggaaagctgctgtcactacttcgtttctttgtgcctcagtttcctcaattgtgaaatggagttcgtagtgcctcctacctgagagttatgaaagctcttataagtccccagcccataatagttgtgtcagctattattatgatgatgaccacgacatgctattcttctggggaaaataacacccctctgtccagcagcagcattggccccttcccttcccgccaccatcaaatcctggctttacttcactctggtctagcttttcttacaggtgtatttgtttgcagggggtcagacattattgcccctgccctccaaactctccaaaaacaaccctgatctcctggacagcccccttcacaaccaaatacacagtgaggtgggattttgccttgaaaaacattccttaggcttgtttggagagaggggaacctggccctgggattggggtgggaaggcttccccgcctctccctacttttttctccaaactggaaatgccattctccatcgcccccacctcttcacctcaccattggatctagttaaggaggaggatgctgagggtcagggggcaacccataaaatgctcacagattagcatttgtgaaggcctttccagccctgaccctggacgcctacagagctctagggagaaagattcccagagttctaggaagaggcccatgaatgcggatgagcagcccttccaagcacctttattattgttatttccctcacaaatgtaaaagccttcatctttgcaaaagccttttacagccccacttctgcttttccctagccccctaatcgccaccaagccctcctgctgaattctcgcctagcatcctgtcctttcctgtccagcactcacctccatttgtaatgatccatgcctgggagtatttgtttagtgctcacttccgtgacactgtggaagacaggctcagtctccctcactaacctgtgacctgggtcagttttgctccagagggaatccttacggcacagcagtgtacctgtatatagtaagtactcatggtattattcaagaccaagatcactgaatgagtccttctaaggtggccag

SEQ ID NO: 3384 - DNA, 4001 bp, Homo sapiens
cagaggccacaaacatgcgaaattgagcccatcgcctccactcaggatcccttccctctctcttctgggaatgaaaccacttccccgaggaaactgacctgctctgcctctgaggttctggtgccccgctgctatcatggaccgtccactgccacaactccacggcagtggaaaaaccatgtcacaacccaagctgggcaatctgaagccctcaggattttgggtcctgtttagagtcaaccggtgacagagggagcagattcctctgacagcagcaccctggacagctggccacaggtcctgctgctgccctggccccagcattcacaaggccgcttgctcagacctgccctgatccccacatagctgcatgcccttgttccctttcagacactctcagaaaagccaggacactcagtctcctcccctggcttctcagccaccctccctgtccccatcagcacagtaagccacgcgcattctaccacttgaagcttgtccctacctccatctgcctcattcacaccctcttcaactctcctgttctccctgctctcatttttctaccctctcacccgtaaatgctgccaccctacagagcaagtcggagcctctcactccccactgtaaagccctccggtggctccacatcgcctaggactgtgaagcctaggactgtaaaacaggactgagaagcctgggtttaatggaagtgcttcgggagcggggtgcacagagccaccctctttagcatggttccagatggtttcacgatctgggtagggagagagtccctacccactgtctcccctctctctggcactgcacgctcaaccatgttaaacgacacaacattcccttcccttggtgagccagtcggcatcccccaacccagggctctgctcctgccgggccttcatcccccactacctggcaaacaccaatgtgtcccccagcatttggccacagagtcgactcctcagctgtacctttgctgagccccctcaaagccctgagggtccatccgtcggtgcgccttcggctttctatgacacctggtatttgcaatcagccgctctgccatgctattacctccacaagcacaagggctgcctctgaccacctctgcagcccctaagctttgagaaagagcacataaggccctgacatgtaggagctggcctgccactctgagctaggctgtggtgctctcctgctgaccataaaccatctcagaacgctcacatcagacaaggtcactctgtgaacacaatagagaccaacaaaaccccaagacgactgtataatcctgtataattaaaaagaagaacgaggccactacgcaaagcacataaatgccagatgtctccttttccgctccgacaggaatgacggctgctccagtcttccctcattctagttaagattaagaggcccaatcggagaattatcctcgcttccaaggcacagtaaagcccactttcttcccccaaatcccctaacacgagctcaaatcccacacgaggttatggagacgcaccgcgggcccccatggggtgctgcagccatcgaagagcagcaaacgcaactcctctgaccacgggtgtgttcccgggggccgtgggggcacccagcaggcactcaaccctcaggctgcgcctcctggtcccccgggctagggcacacgcttcccgccgcggtcggtcgccgcctttcaccaggtgctcggagaaaccgggatttgctctccgcggggcagggagcctgggagccgcgcccatcgcccacccgcccggcctcccctccccgggacccgcgcaccaggacgccgcccttccgctcccccttccccgctccccacgctcggagactcccgccgggcccgtgccacctcgtccaggtccacgtagggcccggcgccctcggggaacatctcgtccaccgccggcttcatctcggggccgcggcgctctaggctcacttccggcctcagagccgcttccggcgcgcgccacatggcagatctagacgccggaggaccgcgcctctgtggtgcccgcccgctggggtgctcccggccgccggcgcgtccgcggccaccggcgtttgtctttgcgctggcgagggcgggcgtctgcaacgcctctgatgggcggccgggcggccacggggagaaaaggctgccagcaatgggagcagtgcctgcagagcacgcctccgaccagaggccggatccagaataaagaaggagcctcagactctgccgcaaagacggccgggttcacaggagcccagggcttgaccttcagacgtttgtctgaagaagacacactcgcggccagtgagcagatgaagaggtgaaagcaaaccagggccccacggccgctgcacccctgggacgcccagagtcaaaaaaacagcaaaacacgggtggaagggtgcgcggcacacggggcccctcgcaccgcggcggggagtgagacgcggcagccggggcgggagacgggggggggcaggtcccagaaaatcaaacacggacacccacgtggcccagcactccccttccgggcacaagcccagaggaccaaaagccgaggctccaaggggcgtctttaccccacgttcacagcagcgttatttataataaatgaaaaagggaagcgtcccccgctgtccctgcccatcgatggatacgtgcataagcaaatgtgggccatgcacactgtggaacattactcagcctttaaaaggaagggaatgccgacacctgctgccacgcgcaggaacattgaggacgctctgccgagggaaacgggccagtcctaagacaaacaccgcatgattccactcagccgaggcccctagaggagtcaaagtcatagagacagaaagtagaagggggttatcagggtctggggaaggggaaatggggagttcgtgtttagtggggacagattttcagccttgacagatgaaaaggatctgtagaggctgctggtgatggctgcacagttcgtgaatgtgcttaacgtcactgaaatgtggttaagatggaaacaatttgtgaagttttaccgtaatgaaaaaaacaacaaaaaagaatgtgacagaaatgcgagggaaaggagaaggaaaggggtaagaggagggagaaggttggaggaagagagggagagaggaagaacaggggagggaaggagagagagcaacaggtcctggaactagactttgccaaagattccttgctcagccagacttcggtggcctcctaacctcctcccaggcccatctgtgcactgcattgtcaggttcagttttcgcagagagccctgctaagttggtttagccagagccccccaccctggatattggatcgggttcctggtcccccagcatccccaggatgtctgatggcccagacctgtcttcagcgaaagccctgcggggtcggccgagccagcatcccgtcccgcactgtgttcctcccagtcatttgccacccgcgaccccacctgctcctcagccgcaaacccccactgcctgtgctgttcggagctgagcctggtctccctcccccactgcaagatcccgttgcagtggtccccacacccgtctccagggttcggaacaacttctgaaaatttccaataatgttttcctttaacaggccttagaggagttgggtttgggggttaggctgtagagaaggggagtggggggcggcatggatgagggtagttccagggacaggaattgagctgaaatgtgaggggtgtgtgtggcctgaaaaggggccgcctggcctgagtggacagtgtgggacgcagggagaagctggcagtggatattgggtgagcctcatgccatgccaatgtgcatcaccctgaaggacccaagtgaaagtcagtccgatggaacaggggcttggcagtgactaagaagattgacccattaagtcaaggtctttactagctaaggggtggagctgtgggtctccacgg

SEQ ID NO: 3385 - DNA, 4001 bp, Homo sapiens
cgaaattgagcccatcgcctccactcaggatcccttccctctctcttctgggaatgaaaccacttccccgaggaaactgacctgctctgcctctgaggttctggtgccccgctgctatcatggaccgtccactgccacaactccacggcagtggaaaaaccatgtcacaacccaagctgggcaatctgaagccctcaggattttgggtcctgtttagagtcaaccggtgacagagggagcagattcctctgacagcagcaccctggacagctggccacaggtcctgctgctgccctggccccagcattcacaaggccgcttgctcagacctgccctgatccccacatagctgcatgcccttgttccctttcagacactctcagaaaagccaggacactcagtctcctcccctggcttctcagccaccctccctgtccccatcagcacagtaagccacgcgcattctaccacttgaagcttgtccctacctccatctgcctcattcacaccctcttcaactctcctgttctccctgctctcatttttctaccctctcacccgtaaatgctgccaccctacagagcaagtcggagcctctcactccccactgtaaagccctccggtggctccacatcgcctaggactgtgaagcctaggactgtaaaacaggactgagaagcctgggtttaatggaagtgcttcgggagcggggtgcacagagccaccctctttagcatggttccagatggtttcacgatctgggtagggagagagtccctacccactgtctcccctctctctggcactgcacgctcaaccatgttaaacgacacaacattcccttcccttggtgagccagtcggcatcccccaacccagggctctgctcctgccgggccttcatcccccactacctggcaaacaccaatgtgtcccccagcatttggccacagagtcgactcctcagctgtacctttgctgagccccctcaaagccctgagggtccatccgtcggtgcgccttcggctttctatgacacctggtatttgcaatcagccgctctgccatgctattacctccacaagcacaagggctgcctctgaccacctctgcagcccctaagctttgagaaagagcacataaggccctgacatgtaggagctggcctgccactctgagctaggctgtggtgctctcctgctgaccataaaccatctcagaacgctcacatcagacaaggtcactctgtgaacacaatagagaccaacaaaaccccaagacgactgtataatcctgtataattaaaaagaagaacgaggccactacgcaaagcacataaatgccagatgtctccttttccgctccgacaggaatgacggctgctccagtcttccctcattctagttaagattaagaggcccaatcggagaattatcctcgcttccaaggcacagtaaagcccactttcttcccccaaatcccctaacacgagctcaaatcccacacgaggttatggagacgcaccgcgggcccccatggggtgctgcagccatcgaagagcagcaaacgcaactcctctgaccacgggtgtgttcccgggggccgtgggggcacccagcaggcactcaaccctcaggctgcgcctcctggtcccccgggctagggcacacgcttcccgccgcggtcggtcgccgcctttcaccaggtgctcggagaaaccgggatttgctctccgcggggcagggagcctgggagccgcgcccatcgcccacccgcccggcctcccctccccgggacccgcgcaccaggacgccgcccttccgctcccccttccccgctccccacgctcggagactcccgccgggcccgtgccacctcgtccaggtccacgtagggcccggcgccctcggggaacatctcgtccaccgccggcttcatctcggggccgcggcgctctaggctcacttccggcctcagagccgcttccggcgcgcgccacatggcagatctagacgccggaggaccgcgcctctgtggtgcccgcccgctggggtgctcccggccgccggcgcgtccgcggccaccggcgtttgtctttgcgctggcgagggcgggcgtctgcaacgcctctgatgggcggccgggcggccacggggagaaaaggctgccagcaatgggagcagtgcctgcagagcacgcctccgaccagaggccggatccagaataaagaaggagcctcagactctgccgcaaagacggccgggttcacaggagcccagggcttgaccttcagacgtttgtctgaagaagacacactcgcggccagtgagcagatgaagaggtgaaagcaaaccagggccccacggccgctgcacccctgggacgcccagagtcaaaaaaacagcaaaacacgggtggaagggtgcgcggcacacggggcccctcgcaccgcggcggggagtgagacgcggcagccggggcgggagacgggggggggcaggtcccagaaaatcaaacacggacacccacgtggcccagcactccccttccgggcacaagcccagaggaccaaaagccgaggctccaaggggcgtctttaccccacgttcacagcagcgttatttataataaatgaaaaagggaagcgtcccccgctgtccctgcccatcgatggatacgtgcataagcaaatgtgggccatgcacactgtggaacattactcagcctttaaaaggaagggaatgccgacacctgctgccacgcgcaggaacattgaggacgctctgccgagggaaacgggccagtcctaagacaaacaccgcatgattccactcagccgaggcccctagaggagtcaaagtcatagagacagaaagtagaagggggttatcagggtctggggaaggggaaatggggagttcgtgtttagtggggacagattttcagccttgacagatgaaaaggatctgtagaggctgctggtgatggctgcacagttcgtgaatgtgcttaacgtcactgaaatgtggttaagatggaaacaatttgtgaagttttaccgtaatgaaaaaaacaacaaaaaagaatgtgacagaaatgcgagggaaaggagaaggaaaggggtaagaggagggagaaggttggaggaagagagggagagaggaagaacaggggagggaaggagagagagcaacaggtcctggaactagactttgccaaagattccttgctcagccagacttcggtggcctcctaacctcctcccaggcccatctgtgcactgcattgtcaggttcagttttcgcagagagccctgctaagttggtttagccagagccccccaccctggatattggatcgggttcctggtcccccagcatccccaggatgtctgatggcccagacctgtcttcagcgaaagccctgcggggtcggccgagccagcatcccgtcccgcactgtgttcctcccagtcatttgccacccgcgaccccacctgctcctcagccgcaaacccccactgcctgtgctgttcggagctgagcctggtctccctcccccactgcaagatcccgttgcagtggtccccacacccgtctccagggttcggaacaacttctgaaaatttccaataatgttttcctttaacaggccttagaggagttgggtttgggggttaggctgtagagaaggggagtggggggcggcatggatgagggtagttccagggacaggaattgagctgaaatgtgaggggtgtgtgtggcctgaaaaggggccgcctggcctgagtggacagtgtgggacgcagggagaagctggcagtggatattgggtgagcctcatgccatgccaatgtgcatcaccctgaaggacccaagtgaaagtcagtccgatggaacaggggcttggcagtgactaagaagattgacccattaagtcaaggtctttactagctaaggggtggagctgtgggtctccacggtctgcttgtacacccta

SEQ ID NO: 3386 - DNA, 4001 bp, Homo sapiens
aaattaatgcctgttttcattagttagatacttcatttgcttcttaggtaaagaggtacattttcttttctttacagaagtttgtaataccagatacaaacaggtaacattgtcttataaatcacaataaataaaggactagctttgacactgattcatatctcttatgttactacagagtgcagagttaaagatgagggacaatcagaattactatcatggctatgatctcacttattgtgtaatgtagacagtatgcatctataaaggatacattaactaggattgctggagatgaaaaatttggtttcctcttaaagaactgtatgcatgcagtcctcaagttagaaaaacatttatcagaagacctgacatgcatttttttgtcctcctaaatggatatccattaagaatagttcttaatattatattccatgaccaatttttttcaaatacttcaaatacctacaaactaaagattaaatattcgtgataatttacttatactttaaacaaaatttcatgtttaattggaatgttatataaattataaatatatttaacttcattacataatgtctaagggtgatctaactaaatatttttgggacttaaaaaattctatagttatattaaatggtcaatgaaatgtttgtttatgggtcagcatcatagttacaagtaaacaatggtaaattggcaaaattgagatttattacatatacaacttttggcttaagtgaaaagttcacctcatgggtactattgctcattgattttccatataaggcaggtttccttagataaaaattttcaagttgtaatatgagccaatcagaactcagtgaatgaagagaaggtgcacatttaatgagtcacatcactggaagttaacagacgtacctatttttccaaaagcagataatcttttggcaattgagaactttgatcacagcaaagtgttaacacaataattaatcacatttttcttagtccaagatcagtaggcaaatactctaagacataagctaaaagccatgtaaataacaaattttataattatttttgttagtttcatttagaagaaactcacaaattctgaattaaatactgtgtataaataaacaagatgacagttacagtcactgaaacacttgagtgcataattttctgcactgagatctcatttagtgttgtatcaaattttattaggcaaagctgaagggagaattaacttgaattgcaaaaaatcttctttttcagaagaaggaaagtaactgtcaaatacataaaggacaaccgggccatcagctgtttttaaacttctggaaataagtaggggctaaaacgttccttttgatgtaatttgtaagtaagggatctggtttccagagagattttatttaaacccaaacactggtttaaatattcttaaatgcaacactgttaagcatatatacttttctcctaaacagtataagtgcaatttaggagaaaatggaaacttgagaataaaaaatagagcaagcacaggcttcacatatgataccatactctaataatttttgaaattatatgctggcattcattttttaaagcaggattctcttcttcataatctaccagctcactaaataatgctattcctctcaatgaaaaatacacgcctttgcaagttcctagagatccttactattgaaagatgtttcagtgaccaaacagttcatccatttagttaccttaatggcagagaggtcaattttttcttctttgggtttggctggggcaggggcaggtgcaggtgccggtgccggggctggggcagccgcagccgcagccacaggtttcttcacgtctttctttggtgccatttttttttttaaaagggtgggttaaaaagagaaggagttcctccaaaagaacctgtcaaaatgattcttggaagaggagtggtggttgggttgatccacagcccagtgtcttgaagatggacccagagtgttaaacggcataagggcatgcatatatatttcacttagtgcctaatagaatcttgacacatgcggctggattggacagttctctagtcaagggggatggcattccggctcagactataaatggaatctaaagggtcagggcttcatcaattttttttaactctctttcctttttttctcccccccccacctccatatataaaggagaaagatatatgacaaagccagcttcagatcctttggtgacagtgaggtagattgactgtactttttcttggtagaattacagttctgctgaagttgtaaatctttttttcccaccttgcctaagagactttactgaaggattccatttcaacttggaattttggcagggagtatcaccaactttcacacagctcctttgctcatgctcctccccccttgccataatttgcaaggaaatgttggtcagcaaagaggtggtggtggttaaaaataaaaaagcagacgtataaggaaagcccatcatgtcttaaagtggcttcccttctagggagcacagactctggcactctttctctcctttaattgtagtgaattctatgccaaaaaacttcaacatgacttcctataatttaattttctttgtataatttaatgaagcatatcaaatggatggaaatgacagcaagatttaccttcttgcaaaacaacttttctaatagtaaagtagcttccaagaaaagtagatacttatagatatttattttctaaatggtgtaaagtctaattatttatcacataaatcttttgtccatactagagagacaaaatacatttttagagacataaagagagagaagaactttaattatcaacactgtgcaagttgtggtaacttgaaagtttttccttttctgtccttggtttcctcagtttgcaaggctagactcatatcgagaaatttaagaccaccaatgggcactttataactttgtatgtggtaaattctgccagagagggggttacaattagtaatcagttatttctcagtcccactctcatctctgttgttttaacttgtgagatatttaattaatgagtagttattaaccagtttaaaaaaatagtttgggttttaaaagagcacatttatacattttatatatataaaggatatatatacaaacacacatatgtttactgtatgtgtatatatacatatatacatttactgtatgtgtgtatatatacatccatacatgtgtacaaatgtatgtgtaaatacacacatattctaattgttaaatatagttgtgtttaaagatacagattaattagccactttcttgggtctgatataaaagcattcaccaacttggagaaggtcactatttctgtccatatattacaactaagcaagattaagactctcagatcagaaataattcacctaagttacaattgacccacagttaatcagtctcctttttcacatggtggcacgatctactgaattatattatccatgtatattacaggaaaaacattttgatagctccctcctttgtttccccatatcaaggactcaatcattatctaaatttagctgctgatactcattttttacatacaggacagtcagaagaatctgaacatattttacctagaatactgtctcatatttaaataatcaggatagatttttaaaataatgctatgtttataacagaaataccttcataaatagcagaaatttgttcaccagttttcctttggatcattcaaagatagattgggattttctgcaattactgagagatagatatatcttgctttaactcatagtttttatcaatactttgtttcatgtgcacaaatcccttaaaatctgtgacaaggttaaacagataaaggagatttatgtgttctgggcaaaaatatttttgtcttccttgcatttggaaaataaattaaaacaatataaaatatattaatccatatgttttatccactcac

SEQ ID NO: 3387 - DNA, 4001 bp, Homo sapiens
ttgtgtctcagttcacttagatatgtgactctttcactccataaaacattcctccctgcacttgctaatgaaaacatcaagctcctgtggagtatgggatctgttggatccaaagacccaaaggtgaaaaggttgactttttagggaaactattcagattctcttgaatcttaagagtttggagtctcctagctagtaattgtttttataaaataaatttgtaatcaacttaaactaatgtcagattttgctcctatcactaattctttgagtcattgagaaagtcctgtcacctctctggagtctgtcttgcatatctcagggaggggttaaaccaggagacatttaatgttccttctacagttctatgataaattaatccttcttctttgtttctgaattcatttttgttctacaactcactatgttatccattgaaatgatataggtttagtaattgggcagttttgtaatcaattttgtttttcaaattgacaattcagacttgtcaaatctctctttaaggattatattagcaatttagccatctaaaatctacatctttttgggatatatatatatatgtatggtattatctattgtatcaaattggttttatttagatatcagcaaatataagggcctatttgtggtgcttatcttttgtttgttaaacctttgattactgagtatcagcaagggtttcagattgagctaatttatatttagagtgatcgagagcaatttatattcagaatggcaacaccagtggggataattaggaagagctaaactcatcccaagggagttggttttcacacatgccatctttatgagtgtgcacatttaagaaccatagcttttaaacttaccatcctgctgttccttagagaactcgatctgttagaaagaaattgaccacaaagaatgttttaaccaaacaaaaatgtgctgatttttagttgtatccagctcattccctgagtaatcttcaaagtaagctccaaaagtcagcctacttttcagagttcaggcgtagcttggacactaacaggttaagccatagtgtaacatgccttgaagataagtaatattgcagaaactaggcagtgctgtgcctacatctgtagcagacaaactcaattcacttaccagcaatctggtcagcactgaaggactgcagtggcgaagaagagaaagaaagaaaaaaaactagtactctttcaaatgcattgacagaagaatgagtgctggttgctctgagatttttaggaagctatgtaggtgtcttggcattagaaggttgccttaggatacttttgaatctaggaacataaaaagctattgcaaaagataattagggaatatctttctgcatcttaatgatttaactaaatgctacatttaatacttcctagaaaaataatctatagtatatttaagatatgtctaataagatacacggtgttaaagtacagatatacacattaaaaagactaccttaagtctgtcttctatttaaccagtgcttaaaaaaatagtacacaaaacccaatgcatcaaaagcagtttacttagttttagctatcagcatcactggattgtattttaatgtataatattttgctgtagctacaggtttttttcttctaaatttagatataatgaatcttatgtgatacagcaagagttggtgaagcataaagcacagctcttggaagatgtatttttccagctgataaacagctctaattattttctcctatctttaatggatctcaacaaaacccaaaagtagatactaaagactcatattgaatatgttctctcctcagttccatttttgcctatctttcttctcaataagatcatatcctctatctattttctcctataaatgacaaattattgtctcataggacccaccatgatggagcggctgggctgcaacacagcagggaagctgaagagtgagttgagggctgctccggtccctgagtggggtcatccctggctgaggcttccttttatttctgggcaagctttgacctcacagctagcatcaggtttcagagataagttgccacaccccttggagagttctttagctttcttagggcaaagggaaagatggatctgtaccctgagagctatttttagatgaccagaaccttggagtagacagccatagtgagatggaagcctgccggtacttttatggtctttatttccaagatgttctcttggagcatcttcctttaagaagcttcctatttgtttgatggcagaagagcttagaatttctttaaggtcttgggccagacccttctcttgatgacagtggactttacaaacttctagtcagcaagttttggtattaatgcaagtttttggatgggactggtttggggtttcaaatggcaactgctatagcaggagcatcctctgaagtgtactgtcctttatggtaaagttcagaggacttgaaaaggccatgcacattctgcatgtttcttagagcgcacccaagtgacaatctggtcaggtctttcaatctccaattaaagatcactcttttgcaagcataatctaagccaggaatagttttgatctccgcttttcatcattctcctttagtctccttacgttaggtctggttattttcttccctccttgttatctttataatggctgagtagtcattttttttattttcagaagtttttctaggcaggaaagctgatagatcatttttacattcttttactctcatcctatacattttttttaactacacataagttcttactagatcatgctgtttctatttctacttctgccttggcaaacactctatggctcagtccctagaccaagaagccaaaagaatgcatggcagagcttgtggaatacaaaattgtactttattttattttattatttttgagacagagtcttgctctgtcaccctggctggagtgcaatggcacaatcacagctcactgcagccttgaactcctgggctcaagtgatcttcccaccccagactcctgagtaggtaggactgcaggcatgtgccactgcacctgactaatttttattttgactttttgtagatacagggtctcgttatgttgcccaggctagtttggactcttggcctcaagccatcatcctgcccattgttgagattacaggcatgagtcaccttgtccaaccaaaactgtattttagaattttaaaggtatctaggggattggccagcaatgggttttcatggtagcttacctgaaaatagcgggcaactcccttctggaaatggtactgggaaaagtggtacaggaaaagatcctcctaggatgtccactaaagttcacacaaaatatttatcagttttctacatgtttaaagcagctcacaggcataatgtatattggagattaattgtaacttgagtactgcttcagcaactgtttttagggggatggtcacaaaaaacatgaagtcttcccttctagaaagacatatactttgtaacttctcctgaaaccatttcagaagaaatcagcatttaatatgcatatcacttttggctctaagtttataagtaggaaaaaatatctcatagaatcttgagttccaaaatgaagattgaaaatacaattttaaaattattagtacacaggtaaacattttcgtaaatagcttgacattttgaaaggttattgggaaatgaaatttaatagaaaaataaaaaatgctttgaatcattgggggaaatggaagggaaagacaaaggtggaaatgtgtaactttgaatattacaagatttggaatcttataatttttgacataaatgaaagcatcagagcctaccatgttatctttgtgttcttttttagttttgtaattatatttatgtaattatgttattaaatttgaatcatcttatgattattgagaactagcatatatcattagttgagctaataactataaat

SEQ ID NO: 3388 - DNA, 4001 bp, Homo sapiens
ccccacagcaagctcctaattagccttctaaggttaagaggctttcaaacttggttcatctcaaaataaatggccaaaggggtggtttaatggcggaccctcagcttgtcaaagaggcagctctgggccacttcccagccctgtctgcagccagactactacaacagaatgtctcctaaattatcaccacagtaatgctaaccttcagtccgactttgggaatcctcccaccagtgtcccacaggcacaaaccatgaatgcctggaaatgtcagcctcctcccaaaacagttttgcttggaataccccattcaaaaaacacacatcattcaatcccccatagctccctccctaggtcagccaatcctttggcgagtctcgattccaatctaggaaaggtcacttaacaaatgtctgacacattacatttaattctaccacctctaaacgatcctcacacagagagtgaaagcacagaacacttcaatgccagggctcctcagttcaaaccccaaacgctggtgtgtgtggtgtgtttcctgggacagactgtaaaagggtttttcaattgtgttacatagtctgattcatttatttatagcaatgtctaattttctggtggtttctgccctcaaacagtcctggaaaactgttgtactatattatactataaaacaattttacgtcaaaattgattctataaaatttgtctcctacccattccagccaatatccactagctacacacacagacccagaggcacacacatacacaccaataccatagttcatagcaaaattttttcaaatctcaaaaaaaaaggggggggggcttctttcactgtaactaagaagatttgctttgagcaatctaacattgggaacgcctagaaactcaagaagcacacaacttgttgcagcaataaacgctgggccgaagcctgaacaaagcactacaaataagctctagaaactcacatggcccttgaacaaaatgttgtgtgtttgtagttacctctccagcgcgctctcatcaccctctcccaaccctctccccaactctcttcccggccccaccacccttcgtagctcccgtctctaatctggtttccattccagccccgcccccttccccttccctctctgggaccgtgaatcaatcccatcccgggcaggaaacgagacccagggcaaccccctccgctgcggcggaacaaaggaggcgagcgcagctgcacgcgcagggaggcccacagcgtcccgggcccctcctcccccgccgccgccggggcacaccgcacctgaaccccactccccaggacgccccattgttctccctccgctttcctgcccggaggaagccacaccgtgtctttccagggggccaggaaacagctgtgggccagaggaatggaggggctgtgggtgaacacgaggacagccgagattcgactctgcccacaggtacgagaggcatggggcaaagtaagagcaacttagtttacaagcccttcttccctcccgccacccccgaagccactgcggagtcacgaccaccctccgcaacctacagcgtgcgccgttcccgccgcagcgccgcgtctcccaagagagcggcagagcccgctgacccccgcccgcagggtgcgacggggccagggaccgcgggcacaaaggcgcggagcaggcgcctcgggggccgacgacggacgcagagggaagggcaggggagagagagagaaagcgctcgcgctacctcgcctggcgctacctcgccgggcgccactccgcctccacgtcgtcctcgctctccggtggcgctccgggacgcgggcccagcccggggctgcggggctcccgccgcggctgttctgccaaggctgtcccgcggctgccggccgactgcgcgccgcgcgctctggtactgcctccacgcgccgcggttgaggctcccgtgcgcacccagctgcggagtgctcagcggcggcgggaggagcccggccactcccctctcgcccgctggcggaggggccggccgaggggcgggggcggcgacctcgctgcctgggattcgcccctcggcgcgcgggcaggaacgggagccaccgcctccgagccgactcacctctgtccgcccggtgccggcttcacagcgccccccggtgagcgtcgcggcggcctccgcgccttgcgggtttgcggcccgaccctccgcacccggggcgagcctggatgggacgaggcttgagggaaggaggggcgatcgtcgcggcccccacggaaggcagtctttctaccttttttgcttccagactcactgacataaaatgagaaatacaacatttgacaactcgaagccagcctggggtcacattccggcaaacagtgggagtaagtctcaatttttcctcctccccaagatgaaaatttttggatgccgagaatatcagaaaatattagtttcacagaaaaagaaaaaaattatactgagtggtgtggtgtgtcttcatttacaagacttttagtatcttttaaattacttaatctcacattgtgggaaatagacactggccaattctttgtgttataaatacatgagaggtagtttaaaagaaatttcaaatacccatacgtatttgaatagagtgtattaacaggtcctgagtaatgatcagtgatggggtatattatacaggcatgtaggggccagagaatcaggacaccccccctacacacacacacacaccttctcactcaagccctattgcctcattggagaatttagaacaatcctcttgacccaggtcctggtttcttcatcctcgcacagggaagggtgcgcattcaaacttactcactgggtgagatgaggattacttggctgaggtgttaaaagcactgtagacacagtaattattactcatggttctaactactttatcctataatgaaataaattgccataaatgggccaggtttaaatggactgacctgtatctggaaactgtcactaaagtgaggtgaaccaaagaattcagaccatatatagtaactgttcccactggcataagaaccacaggcgctgggatttgttaaatgccactagtagagtttggaaaggtgggaccttcacagactatatctgctgggaactgtctcatcattgatgtcaccatcagcatcacttcagatgtacaagtggtgtgataatgggcgaaactaacacatactgggtaccagggactgttctttgtttaatcctcacaaaaagctctgaggtaagtttctctcattatccttgttttacagaccagcaaagccaaggacagagaggtcttcagggaatacatggctatggtggtttgaagactcccattagagagtggatattaattgccctccttttgaatatggtctggacttagtgatttgattgtaacaaatagaatacagcagatgtgatgctatgtgacttccaaacctaggtcataaaaggagatgaagttttcacctggctctcccttgggacactcacccttggaacccagctgccatattgtgaggaagctcaagccacagggaaggccatgtgtaggtgtttgggctgatggtgccagctgaggacctggtctactgccagtacaacttatatcaagcatgtgagttggcgagcttttgaaagaactccagccacagtcactgaccacgctgcctgagagacctagagagaaaacctagctgagccaaatcaggccccggaaacgtaagtgataataataaaagattgtcatctgggtggttgttacatagcaatagacacctagaacagtgacagagctggaatttgaacccagatagtctgactctatagtcttcactatcaagcacactacctcagaccttgataacctagcataatgaaaaccctggagatcccagccttcacaataggcaacatatgaacctgctacctggtgacgtgtgttagactcacttctccat

SEQ ID NO: 3389 - DNA, 4001 bp, Homo sapiens
atcataatggctcctgaggacaactcccagtgcttttcagcctggcctgaaaatttgaccacatcccccacgaaaaagacaaaccctcagcagtagcttatacagctcttttccattaccacttagtgggcaggagatatttttttcccccacagcaagctcctaattagccttctaaggttaagaggctttcaaacttggttcatctcaaaataaatggccaaaggggtggtttaatggcggaccctcagcttgtcaaagaggcagctctgggccacttcccagccctgtctgcagccagactactacaacagaatgtctcctaaattatcaccacagtaatgctaaccttcagtccgactttgggaatcctcccaccagtgtcccacaggcacaaaccatgaatgcctggaaatgtcagcctcctcccaaaacagttttgcttggaataccccattcaaaaaacacacatcattcaatcccccatagctccctccctaggtcagccaatcctttggcgagtctcgattccaatctaggaaaggtcacttaacaaatgtctgacacattacatttaattctaccacctctaaacgatcctcacacagagagtgaaagcacagaacacttcaatgccagggctcctcagttcaaaccccaaacgctggtgtgtgtggtgtgtttcctgggacagactgtaaaagggtttttcaattgtgttacatagtctgattcatttatttatagcaatgtctaattttctggtggtttctgccctcaaacagtcctggaaaactgttgtactatattatactataaaacaattttacgtcaaaattgattctataaaatttgtctcctacccattccagccaatatccactagctacacacacagacccagaggcacacacatacacaccaataccatagttcatagcaaaattttttcaaatctcaaaaaaaaaggggggggggcttctttcactgtaactaagaagatttgctttgagcaatctaacattgggaacgcctagaaactcaagaagcacacaacttgttgcagcaataaacgctgggccgaagcctgaacaaagcactacaaataagctctagaaactcacatggcccttgaacaaaatgttgtgtgtttgtagttacctctccagcgcgctctcatcaccctctcccaaccctctccccaactctcttcccggccccaccacccttcgtagctcccgtctctaatctggtttccattccagccccgcccccttccccttccctctctgggaccgtgaatcaatcccatcccgggcaggaaacgagacccagggcaaccccctccgctgcggcggaacaaaggaggcgagcgcagctgcacgcgcagggaggcccacagcgtcccgggcccctcctcccccgccgccgccggggcacaccgcacctgaaccccactccccaggacgccccattgttctccctccgctttcctgcccggaggaagccacaccgtgtctttccagggggccaggaaacagctgtgggccagaggaatggaggggctgtgggtgaacacgaggacagccgagattcgactctgcccacaggtacgagaggcatggggcaaagtaagagcaacttagtttacaagcccttcttccctcccgccacccccgaagccactgcggagtcacgaccaccctccgcaacctacagcgtgcgccgttcccgccgcagcgccgcgtctcccaagagagcggcagagcccgctgacccccgcccgcagggtgcgacggggccagggaccgcgggcacaaaggcgcggagcaggcgcctcgggggccgacgacggacgcagagggaagggcaggggagagagagagaaagcgctcgcgctacctcgcctggcgctacctcgccgggcgccactccgcctccacgtcgtcctcgctctccggtggcgctccgggacgcgggcccagcccggggctgcggggctcccgccgcggctgttctgccaaggctgtcccgcggctgccggccgactgcgcgccgcgcgctctggtactgcctccacgcgccgcggttgaggctcccgtgcgcacccagctgcggagtgctcagcggcggcgggaggagcccggccactcccctctcgcccgctggcggaggggccggccgaggggcgggggcggcgacctcgctgcctgggattcgcccctcggcgcgcgggcaggaacgggagccaccgcctccgagccgactcacctctgtccgcccggtgccggcttcacagcgccccccggtgagcgtcgcggcggcctccgcgccttgcgggtttgcggcccgaccctccgcacccggggcgagcctggatgggacgaggcttgagggaaggaggggcgatcgtcgcggcccccacggaaggcagtctttctaccttttttgcttccagactcactgacataaaatgagaaatacaacatttgacaactcgaagccagcctggggtcacattccggcaaacagtgggagtaagtctcaatttttcctcctccccaagatgaaaatttttggatgccgagaatatcagaaaatattagtttcacagaaaaagaaaaaaattatactgagtggtgtggtgtgtcttcatttacaagacttttagtatcttttaaattacttaatctcacattgtgggaaatagacactggccaattctttgtgttataaatacatgagaggtagtttaaaagaaatttcaaatacccatacgtatttgaatagagtgtattaacaggtcctgagtaatgatcagtgatggggtatattatacaggcatgtaggggccagagaatcaggacaccccccctacacacacacacacaccttctcactcaagccctattgcctcattggagaatttagaacaatcctcttgacccaggtcctggtttcttcatcctcgcacagggaagggtgcgcattcaaacttactcactgggtgagatgaggattacttggctgaggtgttaaaagcactgtagacacagtaattattactcatggttctaactactttatcctataatgaaataaattgccataaatgggccaggtttaaatggactgacctgtatctggaaactgtcactaaagtgaggtgaaccaaagaattcagaccatatatagtaactgttcccactggcataagaaccacaggcgctgggatttgttaaatgccactagtagagtttggaaaggtgggaccttcacagactatatctgctgggaactgtctcatcattgatgtcaccatcagcatcacttcagatgtacaagtggtgtgataatgggcgaaactaacacatactgggtaccagggactgttctttgtttaatcctcacaaaaagctctgaggtaagtttctctcattatccttgttttacagaccagcaaagccaaggacagagaggtcttcagggaatacatggctatggtggtttgaagactcccattagagagtggatattaattgccctccttttgaatatggtctggacttagtgatttgattgtaacaaatagaatacagcagatgtgatgctatgtgacttccaaacctaggtcataaaaggagatgaagttttcacctggctctcccttgggacactcacccttggaacccagctgccatattgtgaggaagctcaagccacagggaaggccatgtgtaggtgtttgggctgatggtgccagctgaggacctggtctactgccagtacaacttatatcaagcatgtgagttggcgagcttttgaaagaactccagccacagtcactgaccacgctgcctgagagacctagagagaaaacctagctgagccaaatcaggccccggaaacgtaagtgataataataaaagattgtcatctgggtggttgttacatagcaatagacacctagaacagtgacagagctggaatttgaacccaga

SEQ ID NO: 3390 - DNA, 4001 bp, Homo sapiens
gtgaatgtctgcagttagtcaagcctagcgagcatgatttaaatagaaacttgcccagcaacattttatactcattagaaaattcatgatgaagatttccattgctcagtatgctattcagaatattttttctagatgttatagtatggtatatatgaatcacaaatcatagaatgctttcaaatctagagaatagattttagaaagaagaaatcggaaacctgaactgtgaaatgtcagaggaaatctgtacaaatattaaatataacacccagagatacacagaataaggaaacacataccatacaagcgtgagtaaattagagaataattccaaaccaatacataagcaagtgcataatagttgtgttagtccattttctgctgctgtaacagaataccacagactgcatcatttataaacaatagaagtttatttggctcatggttctggaggctgggaagtccaagatcaaggggccacatctggtgagggccttcttgctgcatcataacatggtggaaggtctcacatagtgagacagggcaagagagtgagagctcaagagagagaaaaaggagactgaacctatccttttactaggagccgtctcccacaataacagcattaatccattcataagggcagagccctcatgacctagtcacctcttaaaggtcccatttcttctcacaatggcaattaaatttcaacatgatctttggaggggacattcaaaccataaccatggtaaagacgtaagagtaggaactggcttcttcacaaaccacctatctggatgctgctagatagggcctgttcaagtatagctcaaatgtcttctcttctaggaggcctttcctaattttcccactagaactgacctttatggttccactgattatgtactcttttcctttctttaaattttattttattttaagttccaggttacatgtgcaggacgtgcaggtttgttacacagataaacatgtgctatggtgggttggctgcacctattaagccccccatgcattagctatttatcctgatgctccaggggagacactcaggactggcatttgacagagcttggtagaggaatccaatgatctctaggttgatctctaagttccatctctaatgttctatggattttaaaccttgaatatacaaaattactgagaggaagaaaagaatcatggcataatggaatttatctactattgtttacattgtcatgttaccaaattaacaaatctgtcatgatattgcagtcactaaggaacaatacatacccacagctcttacaaatgattaactaaatgatcagatttttcatttccccaccaaagcatgaggaaatttatcttagctttagctgcctgaaacctctcttgggtgaaaaacattaaaaacatctgcaaattactgatgactaatgcccttcaatttggcctcaagctgagaaattctgtgcagaaataaagtggtttataatcccacaggtccattctattataaactgcaggtggcaaatcaagtgactatgaactatgctgtgtgtatgtgtgtgtgtgtgtgtgtgtgtgtgtggtgtgtgtctgtgtaaaaagcaatactcaagagggtgtttatcctactccttcaagagaaatttaaccacccagacaaaaggcaaatgctaactgagaggacccaggaatctgggtgatgtcagacagaggcccaaagccagagtggctgtcatccccctccactgcccaccagccagggcagctgcatctgccctttgcagaaaaacaatctaaagcaagcacagaagaaagctggaaggaaaataactgcaactcacatcgatgacctattttctgaatccggcttatgagagattggattctcattcctccaaaaaccagcagaacacttcaggcccagaaaatggtgtctttgatgactagaatgtatgacacatcattaccaaaggactttcgatctaggttccaagaggtgttagcctcagatgactattgtgggaggagctgataaatccaccaaatccttggtgactttgcttcactattaggcaagattaagatgatgctaattggtagtgagcctgatctatttagtgtctcctaccaggacacagagcagaatcaaaaccattctcacagatcctgtttgcatgtcatttaacagttccaatgtgatattcccccaaccttttaaagttccttcattccagattaaattccttcattccaaatgctgcacaatcaaaactaatcatctttttgtgagcaaagggcataatcaaagcatgtagtcagggtcacttttctgaactgcagataaacccaggggaaacaccatgagtttctgatctgaattaccaagcaatgaaacagtgactattcaacagtgactattcattcagtagcatgccctgggctatatacagaacagtaggttaagaggaggcagggggtgggggggtggtgctgggcatggtggatcacgcctgtaatcccagtactttgggaggccaaggctcgtggatcacctgaggtcaggagttcgagaccagcctggccaacatggggaaaccccatctctactaaaaatacaaaaattagcagggtatggtggtgtgcgcctgtaatcccagctaccagggatgctgaggcaggagaattgtttgaacctgggaaacggaggttgcagtgagtagagattctgccactgcactccaggctgggcaacaaagtaagactccatctcaaaaaaaaaaaaaaaaaaaaaaaagggagagaggggaagtgagaaacaggagggtagggtccccagaaagcttcttttctggccagctaacatgacacataggcccatgtgaaatagttgaagactgtgcaataacactggataagctatatccatcaattctgaggaggagtcagttcaacccaggaccaagacttgagtgggaatgcttcctggagcagataaatctaggtacagttttgaatgaagaagtgaaaaggattagtgtagatgaggcaggagagaaacccagagccaagaaacagcacacagagaatgcaaatatgaagaaggtgatttaaaggacagcgatcttactcccgctagtcaataatggcctttgtgtttccatttactgtcataagaatcttaagaatggggataatgtgttctatcttcctatatttcctacagtatttgcacataataattgctcatattatagctagtagaatcatggattcctacagttggactgaacttatcatcccatctgcttgcagaataaattaataaataaatgaacaggttattaaaattaacaggttgttaaaaagatcagcctggttccagtagaagaattataaaaataatcaagagatgaagttgaatttgtatacaagagtcagttgaaggcagagctttcaggcagcctggggggctggaatttttcctcaaaggtgagagggtgccacaccaggcttttaaacagtagagtaacataggaaattttctttgagaaagagtgtcttggcagatttttgcaggaaaaggcaaatcagaaggccagcaggattccattgcaacaaggagttaaaggctatacagtctggaaggtgaccgacagcctgcccaggcccaagggaaaaaaaataccagatgccccagcagaggaggactggctagactgtcttcaccagggatttgcccgaggccctttcagccactgggccccagtaatttatcctaatttccttccccacagccccgcctctccacctcaaccctgatagtacttattagctcaaaatggaccatctgaaggaagggacaacctcttgcgaacgaaccgagggcctggtctgctccaaataagtgtttcctctaagaaagaaattataatgcattcctagtgtgagtgcagcagcaatagcctgacagccatttgcataatttc

SEQ ID NO: 3391 - DNA, 4001 bp, Homo sapiens
cagagaaacccagcccaggctctcgaggagctcatagtccagtggccttggtcaaatccttccttctcctcctcctccttctccttctcctccccctcctcctcctcctcttcttcttcctcctcctcctattccttcttcttattcttctatagagatggagtctccccatgttgtgggctcaagcaatcctcccacctcggcctcccaaagtgctgggattacaggcatgagccaccaccatgcccagtctcctttacccttcttcatctcttctgtgaaaaatgtgctaagattctggctcttcctccctgaacagcttggtatgtggaccaagaatgggcacacaaacatcatttaaatacatgtgttaagtaaaatgtatggaggccattggttttgtctgagctcctacacaaggccaacagaccagaccaaaatggagtcactcatgctgaagttccacaccaccaggcccaaacgaaggttatctgaccttccaagaatcaggagagagacaatagctggagccccagacaggccagtttcagcgggcatgataaggaagttccctcagctctatcctttacaaggaaaataaattgaaatgactaatccccttttgttttctgtttctctcagccccattctgtctataaagccaaactcctctgctcggctcatcagatcattcattgtattctataagtggggtgttgcccaattctagaattgcaaataaaagccaattaagatctttaagataaattttttataattttgtcttttgacatatgtaaaacaggaagcaatatcaacacatataggtcatccctgtggtgccgcctctccacagagccccgtgctagagctgtggatgcagcaggccccaagacagccgcctggggaggattctcttagaggtggcatctgaggacagacgtagggcccccagcaggtccagggagatggggtgggctgatgagctgagtggttcctaacaatgattcactgagggtgtgtgtgaatctctgaactaaaatcctaaacaaagtgcagggttctgataaattagagcaaaattcaagtccagggttacaaagtggagcctgaaggggaggcctcgtcatggagaatttgggggatctgggttgggggccccacacccaccagctgtctgacctgggccagctctcacaatctctgtgtctcaagtttcgtcctctgtgaaatggggatgggacacacaccacctggacagctcaagggggacagcccatgtgagccccggtgcggtccctctcctcagccacctcttcccccacccccccccccaccacaccccagacctgtcctgcctctccctagggtcccagccttccagaggtgactaaagccaattgcccaaggtacatgggtaaggcggataagcctgggctttggagtcgaatccggctctgcttcttcccgtgggcaccttcgcttccatggtcctcagtctctgtgtccataaaatggaggcaattccaccactgtgttgcgaggacgcagtgggatgtcacacacggcacagctgacatctggcaggggctcatcatgggacccaggctatccatgatgtcccatgattccacagtgaggccctctagctgtgaggaggcttcagggtgggagcagccttggcacctgccgttcccctcctgcagggagtttgcccttctacagcagagggctagacagcttctccccctcctcctcctcctcagccccccaggtgctgcccttcagcccgatggactgagtcccctgctgcggtttctggtttccaggctcctgaagggcttctccactctctatccctcagacctgttccatcttatttccaggggacctgcctcctgcccagcgaccctcttcagagaggtgaccccctactccccgctggcagacacgcccccggcacgcccttaccttgtcaggatgggggtctggctgactccccttcccctccaccctgggcaccctgaaagagccaggaaaggaggcaatgttgggactccgggtgtgtcagggagtaagggacagaggaagaagaggtagggctccaagaggaaatgactgggagcactctgggcccacgtaatttattacaggactttgtccctgggctccaggcacttccactcccacacgcctccctcagccccagctggcagagcctcatgatacctgctctttaacccaggccccttctgcagagcagcgatgcatgctgcccggaggccaccagggtttgcagtctgtgcacctgctctggccaccagccagatcccatggtgacagtcagctgaccatccgggggctcagcatcttcccaggtgctgcatggcaggagctctgcccccaagcaccccaagctctaattgagggtggtagtataatataaaatacagtatatttggtccttgttcccggttggtgtcacagaactcctaaaacccttagaatttccaaagtgatcgtcgggcatggtggctcacgcctgtaatcccagcattttgggaggccgaggcaggcggatcacaaggtcaggagatcaagaccatcctggctaacacggtgaaaccccatctctactaaaaacacacacacaaaaaaattagctgggcgtggtggcgggcgcctgtagtcccagctggaggttgaggaaggagaatggcgtgaaccggggaggtggagcttgcagtgagccaagatcgggccactgcactccagcctgggtgacagagcgagactccgtctcaaacaaacaaacaaacaaaaaatttcccaagtgatcatctcataatgagtccgtttgataacacctgaagttatgctgaggaggtgaccatgtgggggccctacctagcctcagcatggggtcagtcaccagaaagacctagtgaatagagggttggaactttcagccccgcctactgacctctgggaaggtaaaactcttgaacaagatttgacaagcttccacacatctgaggtccctggggggtggcatgcgggagagggcatggaagctccatgaccttcccacacaactcacctgtgcgtgtttattcggctgctcatctgtaatcctttgtaaaatcttttcccacgaactggtcaatatgagtgccgtcctgagttccatgagctatgctagcaaatccaacctcaggtgtggggcatgggaaccccgatttatagccaattggtcagaagtataggtggcaacctaggacttgagactgcatttgaagtggggcagttttgtgggactgagcccttaacctgtgggatctatgactccaggttgacagtgtctgattgaattgaattataggacatccagacggagtctgctggagaactgcttggacacctggtcaagagagtgttctgtgttgagtgtgaaaggagcatacacctgggacatgtctggggccatcaggaagccttagagacaaaggccatcagacaacaaggttcccaggagggtacctggcaacaaattgggcaggcttgggctggcacttgatcaagggggatttgggcttaaggcaaatacagactgtttagaagggaagtgcaaccgcagtgggccctgggtggggtcagactggaggggccaggcagtccctggaagtgagcaggagggcgaggggagctcatttatgcaaggctttgaaggcgggtggataataggggcaggtagttacctggtcagccacaggccttgtgttgggtaaaaaaggggtctggtcatccttacagttggcccaactagagccaatcagattcctttcttttccttggacttggagggacttgggaactgcaggcagaaatgtgggaatgagccatcgtcttttagaactgaggtcaaggcagggtggcaaccctgaacatggacctttcgtggggacacagaccaagcggtggtgggagagaaaaggagaggt

SEQ ID NO: 3392 - DNA, 4001 bp, Homo sapiens
tccaaccaagattggtaattaactttttgtgggtgggggtggggaggagagaaaaatcaactgtgctatctcataggtttttttagatgttgataattttgattcacgaatctgaagactatatgtacagatcaaaagacaacaacataatccttcatattataatatagatccagatctcatattactgattcttatagtcctctgagaaagctgatgtcactttaaataatcttcataatctatcagaattttattgttttaaattctttaaatgcacaattaatatttaaaataaacttatttctctgaaaatcaagctaaaatataaagaaatatggctgattaaaagcagaaggattatataacaactgttattgtttatgaaaagtgtatgatagtatggtaagagttttcaaagtgcaatcaagtaaagtaccatcacacacacacatcagtagtggtctatgttagttaataaagaaaatttatcactcaagtataactttaaggagacttttaagcaattaacttactgcatttgaggtgatagaatcatacatgttcttttaggtcaatcagaaaaaacaaacttcctttttttctggaatgtttctcttagtagcatttataacttacaatcaacactttggattcaaagttcttgagaggtgaaaacttataggaatgcaatgctgtttttttttttgaaaaggaatattttataaaactcttttcttttaaaaataattacatttttatctgtatgggagacatgactttattatttttaaagctacatgacactaaatgaagatgaacaattagaaagaccctcatatgccagtaagggtggttttgggatgctttggtctatgacgttaattttgtttagtagaaaatataaacatttgaacaaaaaggctcttatataaaatagttttactctaagtaacttagaaattatttagcttatatagctttgatggtacaagaaattgtcatggttaatactaaattcaaaatctgttctctatattttatatagctaactttcatataaatatttacatatatatttttgctttattcagatctatcttaaaactaaagtgtagagtttaatcttttagtttattaatttaggtgttacaaaaagacatatttctgttataaataacattttctttcattattatgaacttcaaacatttaagttaaatttaaaaatctttatttgagtttctccacttaaacaatataaatcaactttcttcttaccatcaggtaaattcatccaaaatagctaacattttaattgcctttgcataaaatgatgtgcttcatttgtaatgtaaagtaatccagtaaagtctctgggaagtttttgtttcagtatcctcttatcctccaaacaccatacatgcaccccgttttgtttttgtttctttttttcttaataaacaacatcacagttaagtcatgcaacctaatacccattttagtttaaagacagatttttttgtggattacaaagcctccagtccaggaacatttcagctaccagccatgctgtaaaaataactttaaaaaggagcagacaatggaatagcagcctcagcccttgagctacggtaaaacacatcctgctcactaagttccccgaaaaattaacctaacgaacatcacgtacctcacaatgaccacaaccgctcacaagcgaaagacaagttcaattttggtaactgtgctggctcaaaatacacagacagggaagaaaaccctgttccaccacaagtttgaaaggatgatgagacacatgcatgccaccaagacgcagaaaaggtggctttttgtcttcagtgagtatggatatcataacccatagtccagggaatgaaaaaattaaaatgcacccaccaacaatgagcaaaaaacccggggtgcttcaacaagactgcagggaaaagctctctcactgtttagtgtgcagtagcttagggaaaaaaaaaatgtcgcccgggcaggaatgacaaatgcagcgcgataggctcgcaggcctcagggatctgtttgacttccacacacccccatgcacacgctcccactcatcctctcctaggcttttttttttttccacatttttttttcacaagctccaaatccccggcatatgaccttctgttaaatagataaaaaaaaaaattgcttatcagtcatgcaaatgaggctgaattcattttccacaacagatggcctcatagataatgatgatggaagagagaaaattgaatgtctctcacaaggtggccatggcaaccgagagcagaataatatcaataataaactcactgcataataaggttgtcagtcctacaaatcaaagtctccagctaaatcaggtataccaccccagctagttaccaggtaaatagtacacacacacacacacacacacacacacacacacacttccacagagtggcttgaaatctttcatggtcactgtaaaatgtgtacgtgtgtgtgtctgttggtggcaagaaggggttgggggagagaatagttggataatgaaatgacaatgtgacttttttcttttcctttcctttcattatgttttctgcaatagactcggtttcatgcaggaccttctaactagccatattgaaatcgggatgcggtgctgaaggctttctctcctccctctgcctccgcgctctcgctctgatgtgctgcattgatgcaatagcagctcgcctcaggcttccaccttggctcccagggggacatcctgcaaaatgaatcagcagccatcctgagcaggctgattaaaatgaaaatggcaaggcacatgtctgggcggaactggagctcagctttgctgcttgtctggcaagcatgctcaatatagctcttgctaataatggcttactgcctttcattttttaaaaaggtatcacccttttcccccttcactgactggtgttgtctgtgtgtgtgtgtgtggtgtgtgtgtgtgtgtgcacgtatgtgtgcgtgcatgtcgcggggggaaacgagaatggatggttctattcttctaattttctgctgctcacatgcagactgcctgcctgacagcaccattattttaacactgaacttacttcagcttttcttttgggacagggtgggggggcggttgataagtcttggggcagaagggctagttttaaaatcaagctgcctaaaaggcccagacaagatttttacactccagattcaataatttctaaccaaatctgaagcaacagacctcgagagaactccgatgctctgcttcacaggctcacagttggacatgctgaaacacagcctatgaagaaacctatttctgtttcgagcatttgcaaccagcctgttactgtatcctagatattatgcaacacagagaattaaaacagagaaagctactagctaataaaataatcgaacacaattgaaaaaataaatcttggatattttgttgtttaaaattctcaggcatagcttcaagattgccctcaaataagctttactttgcagcacctctgccgagtattccagggtttttcaaggcattctggaaattagaccattatcacctctcaaaaaaatggttgaaaaattagaacgaataatttttctaaactcattttactctacttctcctatacatcttattctatgttataaacagtctttaaattttgctaaattgtcagttttgctttcctttggtaacagatgcttgatttttgtataaaactatctatctacttatttttgtctttgtaattcctgtttctgagacgtgatttttttttcttctgagctctagccctgttgctgcagtgtgaatcagaaatcaatagcgctgccctaatggagactccactcggcacgcggcaaggcagctgcagtctcctctctctctttctctctctctcttgcacacacacacacacacacacacacgg

SEQ ID NO: 3393 - DNA, 4001 bp, Homo sapiens
tgtccccggatgccagcccgactgtggggtctagagactgccacaccatgtctctaataaaccgagtcagaaatagtgccctgtggctaagcggcagggcagcggtggcctgcatgatcctgcccttgcagctcaaagctgcttgggcctcttggggccatgcagtttccatgaaaacaaggaagagcaccaacccccagagataagccaataaacgcaacctgcaaaaggagagaacaggcagcaagagaggcggagggaacccggggggcctggagagagaggtgagtgtgtggcagctgggctgtggagcataaccagagaggccgcaggctgcgggctggaggaaaacgagggccttgcaggggggctactgttcctggcagagagaaaggaggcctctggaggtcagagagagacacaaagagagcagacagagcgagggtcagtgaagaggccagcacgcaggtgcccgggccctcttgggtcagcgggcgtgggtgcccaggccctggcacttcccccatgaaggcagcctgctttccacgccttctcatgatgcctgtgagggtctcctcctgcttccaggcagggagccagctctgggcctccttccattggcctgggaggttgtgctgcatttcagagagagccatcgggagcagaagcaacatgcggagaggatgagcagggacggaggctccaccatgacactctcagtcccagcatctcctcagcccagtcaccacactggagagggaggaggcccttcagaccccgcaggcctctgcaccctgggagttccgcgtctaactctcttcctgcaatcatcagaggcaggaactgggcccaggtggggtaaaggcaggaagacgtctgcctgccctgctccctgggcacttccctggatgctgtataccacaggacagagatcgagactgtcttttgaaaaacatttagagacaggatctcaccctgtcacccagactggtctcaaactcatggcctcaaaggatcctcccgccgtggggtcccaaagattataggcgtgagccacggcgcccagccccaaaccgtcttgattcccgactttgtaggatgaaggcctgagtgaagaggtggggaggagctaagcggaggagccctacccagcctggaccaccctggggcacgcactctgcgtccacctgacctggacgtgcctcctaaggctggcagcgaagcccaggagcagagcccacggatgggccctgcaggtgctgggcctagaccgaccgacagacaggcctggccactcagggccacgccgccgctgtgccgcgcctgccccctccccgcccgccacccccgccactggggcagggacagcgggcccagctctgacctcgggtctcgggcacgctcgacgtgggcagagacacggccgcagggtcctggggctcgctcgctagcctctgcccggcacacatggacttgagcatctggaagacggcgaggggggccacgttcagcttcagcaggtccaccaggatcctggcggggacagacgcggggccggtgagccctctccgcccggcgcggccacctccctgaagaccggacaaggacgggggcgggggcagcgggggctcctcccgaccagcgggccgggcgtacccggagagcagaggtcgggggtgtctggcgagcatgcggcccccacccgccccgctcacttgaacacgtcggggtcgataccgccgcccgccgcctgagccagctcgtacagctccatctcctcggtgctcagcaccttcttgcgccgcagcgccagcttctgccgggccgcctccagccccgggggcgccgccgaccccggcccaggccctacgccctgcgccgccatccgcgaggcccgccgaaaggtgcgccccgccccgccgcgccccctagcggatgcgcccaccgccctctccctgcagcgccagcgtctggcctcccgggctgccctggcgggagcggcgggagcgcggggacggggccgcctcctcggcgtcattggagcccaacagttagtgggcgctcacggtgtgctgagcggcgcgctaggcgtcgggagtggcatggcggactgcaggggccagctgcttggcggtcagggcgtccctgatagacttgcattggtcgtgctcgcttaggtggcagcacccagcccagtgccaggcatacattgggcgctcagtcaatacctgtttcaagaaagcgtgcaattttctggtccgcaccggtgcaccactaggggtcgctcttcggggggggtggggggcactaatcaacaaccctgcttacgcgcacgcgcattccttgctagggagaaagtgcgtgagccctaccttggggcgccagaggccgccacaacgcaggcgcattcagctaaggaccactccctccccccgcactcctgcctcgccatttcccctccctggccggccggccggccttcttcgctttgcgcacgtaccttttgaggtaacggcccaaagaggtagaagcgcttttcccgcccggccgcggggcgtggctctgcgcgcagcttgatgacgacgttttggcgcggtggcggaatggcggcttccacctctgaagcgggcgacgctatgggtcccacaggtgagtggcgcgggacgcgcgcgtgagacggtccgacgccctgggggcttccgcgagcccctgcggaggccatctccgttcctccgcgagccccaggactcgggcggcccggcggctctgcccaggccgggcaggctggggagtggagggccccggctgagtcttcctgccactcctctgggccatgcctttgtgccaccttcccgcgccgctcgtacactctgttctggtccggtaggtgttcgttgaaggttacccgtcgttgaaggaattgagggaaggagagctttgtgttgaaattgagccttgggctcaacaggcggtgtgggaggaagagccgggtgtgggtcccagctcgacccttcccctgtgcgctccacatctccgagccttggtttcggaggctcccgaagcccaattcgcaggagagttggaaacaagtgggcgcgtgctgttaagggaggtcttggcatgacagaatttgcttggaatgattagcgttgcccaagggctgtcgctgtcagaaaaacaaaacaaaacgaaacaaaaaaaacaaacgggtccgaagcagctcctggagaaaataggtgttggagagtcgcgacgaagtggactctaggtgcatggcacgcagagacctgtgacgggggagggtggccatggcagggtcagagaacaggggtgtgggagacacctcttgggagttctcgggtttgaatttcctctcttggaaagttcctagaaattcctctgggcctcattctttcagtcgctgcccatgaaagcttttactgagcagagatgctctccccttcatcatctctagagctccgcacttatccagcagtccacagtttaatgctgctttgatcattttgcagtagtgcagtgttttcttgaccaagtgcattaggactgaggcgtttttctttaacactgcaattgatagctaggttaagaattgaggccgggcgcggtggctcacgcctgtaatcccagcactttgggaggcccaggcgggtggatcacgaggtcacgagttcaagaccagcttggccaagatggtgaaacctcgtctctagtagaaaatacaaaaattagccgggcgtggtagcgggcgcgtgtaatcccagccacttgggaggctgaggcagagaattgcttgcacccgggaggcggaggttgcagtgagctgagatggcgccactgcactccagcctgtgcgacagagcgcagagcgagactccgtctcaaaaaaaaaaaaggaaaagagaaagctggccgggcgcggtggctcacgcctgtaatcccagcactttgggaggctgaggcgggcttatcacgaagtcagg

SEQ ID NO: 3394 - DNA, 4001 bp, Homo sapiens
gaacccggggggcctggagagagaggcgagtgtgtggcagccgggctgtggagcagaaccggagaggccgcaggctgcgggctggaggaaaaggagggccttgcaggggggctactgttcctggcagagagaaaggaggcctctggaggtcagagagagacacaaagagagcagacagagcgaaggtcagtgaagaggccagcacgcaggtgcccgggccctcttgggtcagcgggtgtgggtgcccaggccctggcactccccccatgaaggcagcctgctctccacgccttctcaggatgcctgtgcgggtctcctcgtgcttccaggcagggagccagctctgggccttcttccattggcctaggaggttgtgctgcatttcagagagagccatcgggagcagaagcaacatgcggagaggatgagcagggacagaggctccaccatgacactctcagtcccagaatctcctcagcccagtcaccacactggagagggaggaggcccttcagaccccgcaggcctctgcaccctgggagttccgcgtctgactctcttcctgcagtcatcagagggaaagctgaccaggactggccaagcccctgcgcaggaactgggcccaggtggggtaaaggcaggaagacctctgcctgccctggtccctgggcacttccctggatgctgtataccacaggacagagatcgagactgtcttttgaaaaacatttagagacaggatctcaccctgtcacccagagtggtctaaaactcatggcctcaaacgatcctcccgccctggggtcccaaagattataggcgtgagccagggcgcccagccccaaactgtcttgattcccgacgttgtaggatgaaggcctgagtgaagaggtggaggggagctaagcggaggagccctacccagcctggaccaccctggggtacgcactctgcgtccacctgacctggacgtgcctcctaaggctggcagcgaagcccaggagcagagcccacggatgggccctgcaggtgctgggcctagaccgacagacaggcctggccactcagggccacgccgccgctgtgccgcgcctgccccctccccgcccgccacccccgccactggggcagggacagcgggcccagctctgacctcgggtctcgggcacgctcgacgtgggcagagacacggccgcagggtcctggggctcgctcgctagcctctgcccggcacacatggacttgagcatctggaagacggcgaggggggccacgttcagcttcagcaggtccaccaggatcctggcggggacagacgcggggccggtgagccctctccgcccggcgcggccacctccctgaagacccgacaaggacgggggcgggggctcctcccgaccagcgggccgggcgtacccggaaagcagaggtcggggggtgtctggctagcatgcggcccccacccgccccgctcacttgaacacgtcggggtcgatagcgccgcccgccgcctgcgccagctcgtacagctccatctcctcggtgctcagcaccttcttccgccgcagcgccagcttctgccgggccgcctccagccccgggggcgccgccgaccccggcccaggccctacgccctgcgccgccatccccgcggcccgcggaaaggtgcgctccgccccgccgcgccccctagcggctgcgcccaccaccctctccctgcagcgtcaacgtctggcctcccgggctgccctggcgggaggggcgggagcgcggggacggggccgcctccgcggcgtcattgaagcccaacagttattgggcgctcacggtgtgctgagcggcgctctaggagccgggagtggcatggcggaccgcaggggtccgctgcttggcgatctgggcctccctgatagactgcattggtcgtgctcgcttaggtggcagcacccagcccagtgccaggcatacattgggcgctcggtaaatgcctctttcaagaaagcgtgcaattttctggtccgcaccggtgcaccactaggggtcgcttttcggggcgggcggggggaaggggggggcactaatcaacaatactgcttacgcgcacgcggattccttgctggggagaaagtaccttggggcgccggaggccgccacaacgcaggcgcattcagctaaggaccactccctcccccgcactcctgcctcgccatttctcttccccgcccggccggccttcgctttgcgcacgcgccttttgaggtaacggcccaaagaggtggaagcgcttttcccgcccggccgcggggcgtggctctgcgcgcagcttgatgacgactttcggcgccgtggcggaatggcggcttccatctctgaggcgagcgacgctatggatcccacaggtgagtggcgcgggatgcgcgcctgagacggtccggcgccctgggggcttccccgagcccctgcggaggccatctccgttcctccgcgagccccaggactcgggccggccagccggctctgcccaggcagggcaggctggggagtggagggccccggttgagtcttctgccacccctctgggccatgcctttgtgccaccttcccgcgcggctcgtacactctgtcccggtccggtaggtgttcgctgaaggttaaccttcgttgaaggaattgagggaaggagagctttgtgttgaagttgagccttgggctcaacaggcggtgtgggtgtaagagccgggtgtgggtcccagctcgacccttcccctgtgtgctccacatctccgagccttggttttggaggctcccgaagcccaattggcaggagagttgggaacaagtgggcgcgtgctgttaagggaggtcttggcatgacagaatttgcttggaatgattagcgttgcccaagggctgtcgctgtcagaaaaacaaaacaaaacaaaaaacaaacggggtccgaagcagctcctggagaaaataggtgttggagagtcgccatgaagtggactctaggtgcatggcacgcagagacctgtgacgggggagggtggccatggcagagtcagataacaggggtgtgggagacacctcttgggaattctcgggtttgaatttcctttcttggaaatttcctagaaattcctctgggcctcattctttcagtcgctgcccatgaaagcttcttctgagcagagatgctctccccttcatcgtctctagagctccgcacttaccgaacagtccacagtttaatgctgctttgatcattttgtagtagtgcagcgttttcttgaccaagtgccttaggactgaggcgtttttctttaacactgcagttgatagctaggttaagaattgaggccgggagcggtgactcacgcctgtaatcccagcactttgggaggcccaggcgggtggatcacgaggtcaggagttcaagaccagcctggccaagatggtgaaacctcgtctctagtaaaaaatacaaaaattagccgggcgtggtagcgggcgcctgtaatcccagccacttgggaggctgagtaagagaattgcttgcacccgcgaggcggaggttgcagtgagctgagatcgcgccactgcactccagcctgtgcgacagagcccagagcgagactccgtctgaaaaaagaaaaagagaaagctggccgggcgcagtggctcacgcttgtaatcctagcactttgggaggctgaggcgggcggatcacgaggtcaggagatcgagaccatcctggctaacacgtgaaaccctgtctactaaaaatacaaaaaacaattagccgggcgtggtggcgggcgcctgtaatcccagctactagggaggctgaggcaggagaatggcgtgaacccgggaggcggagcttgcagtgagcccagatcgcgccactgcactccactctgggcgacagagcgagaccatctcaaaaaaaaaaaaaggagaaaaaagaaaaagcggccgggcatggtgactcacgtctg

SEQ ID NO: 3395 - DNA, 4001 bp, Homo sapiens
gaataaaataaaaatctacagttcctcaatgttgtcattattacattattattgataccttcacaagtaacaagagaccatcagagtcgggaaaaaaacatttttaatctcgaaatggcatattaactttagtgcaaaatggtaaaaataataaaattgaaacaagaaagcttcttccagaagttccttgaaattttctttcaagacctaatgttccaatatctaatacccaaatcagggataaaaaaggctgacctagccagtcatctacaaagactcaagaaaacccttatttgtatgttaataccgatgaaaaaatataatcttttaaacttaaagataatattgtatgtcttaaatgacaccaatatggagaagaaaaagcctttcatctaagagccacttttactggcactcagattagatcagaagcagctctttcaggtcttcaggaaaagctcaatctccacccaaaacagaaaaagcaaatcctatgcatcctctctcctcatacttcttataacccacacacaaattatgaaatatcataattcagtatgttgttcagggaaaaattttcaaaaaagtgaaaacctaggaaggtaagtcattgcgtgaacacttttacaacagctaagcatttcctacgtgactaatctattttaaattcggctcctctgttcctatgcaatctcatattatctattaaaactgccaaaatatttttaaacaagatctgagaattcctctttcagcttctgatctttgcactctttgagttggcagacacgtcactggcaaaccaactggtagtgacaagttactccaaatcgactctttcagatgaaattttaaattaacagccatcccaaaattttccgtgcctcccgaatctcagggagcgaggtgtaagtacatgcaagtctacgattcctcccgatcactcgctgcaaagcttggtctgcagaatcgacaaatgtatattccatctcaactatccctttccccgagatcctgcaacattcaggcttaacagaagtgtcatttcctatctcaagctttggaagctctgagtttgcagaccacaaagatttgatagtattttcagtgtttctccatgataaggtcacacacacacacctctatatccaacgcttgtatgtcccacatgtgtttccaaattcctcatcggccttagagacacaaagagtttctggcttccctgcacctcagcgccaagtttctgtaagccacttccatgtaaaactctccttccgcttttaaaaagaaaactacattcggaaagggaagatacccaagaagaaaatcgagacggtaagtgcagcacttttataaagtaaacaaacaaaaagactgccctgacgaaggtggctgcaaaactctggggccggcgcgcacaacccacatcgcacacccccagagcgccgtgtgacgcccccagccccgttagcaaaacggactcggcaccccaacctttctcggagggaaaatgcacgagtcagggccgcgctccccgccgccctggcacacagaatgtctccgggaatcgcccacacgagcccggggccgccctctccttccggcggcggccgcgcggagcccgcttcccccggacaccgcccccaaagtgcccgcgtggccccgcgactcagccgccccaagttcgcccgtggccgctcagccgcgaaagtgtcccgcacttggcggaccgggagtggcgaccgtccgctccggtacgtactcagccagcggctgcagcggtcttggcgcgctctccccgaggactgctcagccccaactccgaagcgacggcccccggctctccctcctctggcggctgcaggagccgggacgcccccgctcccatcgaggggggaagggaaggtggtgggcgcgctctctctgctcccccccacctcgggcccgccgcttcttcccgcccacccgccccgacggcgctcgcttggccgcggcggcggcggcggctcctccaggctgcggcgcgcgggcggcggcggcggcggcagcgcctcccccgccgcgccttgccctcccctcccctgccttccccgcgcgcgctacaccctcctccccctcccccgcccgcctccgccgcctccactcccccaccccgcgctgtcacattgggagattccgctcttgctacattcgccgctccggctcccgcccacgcgcggccgagtgacgcagatcccggcgtgggccgccgccgggcgggggcgggggcggccgctgggcccggggctcggccccttcccgccgccccctccgcggaatccggaggacggcccattcacacggcagctgggaggaaccaagtgggcgccgggagtgggcggctcccgcgagtcccgctccgggcgcggggaggggacgacaaagagggagacgggtggggaacgccgcctccggcctgctctccagctgcggagtgaactgggaaggtttgcaattaaaaaaaaaaaattatgtgtgaggttcccgatatagtatttcaaagagcacacccgccaaatccaacatcctctaggaggctgactttaaaaaaaaaaaaaaaaaaaaaacaacagcgcgccgggctcccctggcccccgcaggctcggggcagaggcggggaggcaggtggtccaggtgcgcccctgcccgggggggcgaggcgtccggcgggaaggctgcagcgaccgcatggaggaaggggcggcaggtgcgcggcgctggaagaaccggcggctgggagagcatctctgcctcgcccatcttgccccctccccacctccgctctggcgttgggacgggaggaggagggaggaatggaaccagggagtccgaagtacagctttgacaactgtcgcgctggccgggtaatttaattccaacctttttaacctcctgaaaatctgccttttattttactgtttaatgttttttgtgtccatggtgtagaaaaactacggcgctagtatagtgctggtgtgtgctaaattagagttcccaaggcacaatatagaattttttggtttgcataaactttgctaaccaaagtattaaagcaccttcaaaaatgtacttaggctggccagggctcacgcctgtaatgccagcactgtgggaggccgaggcgggcggatcacctgaggtccggagttggacaccagcctggctaacgtggtgaaatcccgtctctacaaaaaatacaaaattagccgggcgtggtggcgcatgcctgacatcccagctgcttgggaggctgaggcgggagaatagcttgaacccgggaggcggaggttgcagtgagccaagatcgtgccattgcactccagcttgggcaacaagagcgaaactcagtctcaaaaaaaaaaaaaaaaaaaaagaagaagaagaaaaatgtacttaagctattgccaaaaaaattttggaagtctgttttttaaatctatatttcaattctttgcaaaaagtggaaaaattaaagaattttagcattgtgttcttgaagattagagagcattcattaatataaaactactgcaaagacaggtagaatcccattttaacatacacataaaaatcaagttttataggaggccattcccacaccctggctggcctcccagagtgtgcctacttcgctgatggggatacaaggcattctttgagatgggaaattcttcaaaccacatctttatgttgcagcaagggataggatgatgatgatgatattgaaagaaaaagactttaataaagtacagaacctttttttttctttttgcgaaatcatgttatagaaatgagtaatgccgcaatggaatacatataattaaagttaaatctttttcttcagtattagtgacaggttttgtctggagtagttgagttgatatttcaaatgaataagtctgcttaattcctgaaattctttaactgcagaaatcactgctggaagtttctcttagtctccc

SEQ ID NO: 3396 - DNA, 4001 bp, Homo sapiens
caatctattttttaaaaaaaaagttctagtattttttaaagccacctatccgccaactgactcttttggatgaaggtattgtagatgcctttctgccaaacattttctgtgtatccctttggtttttgcgcaacatccaccttacagcagaagacacaagaaatcattttggagaatgagccttccagatactgtaaagtttccctctttttccaagtacaaatttgacatatcacagaatatgctaaatcctttacctataattttcatttatgtccacatttctaaataacatatgtaaaatactggccaggatttcaagtcattaaaaatggagaaggggtgggaaacaactgagtggcaactacactagagaaaacaacttataaaaaagaaaaaatatggactataccagtctcctaaaaagactcactgactcagaatagaactaaaaatctatgccgggcgtggtggctcacgcctgtaatcccagcactttgggaggttggggcgcgcggatcacttgaggtcaggagttggagaccagcctgggcaacactctgaaaccccgtctctgctaaaaatacaaaacttagctgggcgtggtggcacacgcctgtagtcccagctacttgggaggctgaggcacgagaatctcttgaacccgcgaggcggaggctgcagtgaggagagatcacgccactgcactccagcttggcgacagagcgagactcggtcccaaaaaataataataattaaaaatctacttaacctgtaaaccggggtagaggcgcggatttcccagctgaaaccgactgcctttcactgcaaaggtctgttacatcccagcgctgcccaccacccaaagttaacaccaaaggagttcaaaactcctcaagagtggcccacagaaaaggcgggggacttcagggcttgccaagatcccaggagccggccaatcccgattctgcagactgttaggtcccccgacttttttgcacacctaccctctggtcaaccgaataatatcccctggctgtataagacctccgatctcatcccacacggaaatagtgatgctgcccgttttatctgctactttgcacgatctcacttcatggccgtctttggttttggtcacgcgtcctgtgaggatttaaaaatcaaagggaggggttgttagataatgaggacatccagaaaggctaactcctcctccggtattttaatacatctggaaggtgggaagtgaccaagcccagggctcccgcctcaggtaggatccgatctcgggcggaggccactagagccacgtgggtgggggaggggagggaggaggaggggagccccgggcgcgcagcggccggcgcccctgtctcccgccccgggaggcacagcgggcggtggagtaggctgcaaaccccacttacctatctccaggacaataaagacgacatttaagtttttcagtccgggcttaatatctcttataaaaataagtgggtcgttgaccctattcatattgggacaggcgcggctacggctgcggagacgcgagtgggcagggcggggtcaaagcttcccaccctcccgggacaggggcgaaggcagaggggcgaccttgggcaggggtggcgagagaaggggcagaaagccgttagtcagggaccgggcaaaccagcccggacagcactgagcctaaaaaaagaaaaaaaaaaaaaaaaaaaaaaaaggctcacaagttctaaagaaaaaaaggcgaaccactccgcacaccaaccccgctcccaaccgggcgacaggaaggcaagcgtactaactgccccgttctttggataaaaggaaaaaaaaacgcagtgaggggacacttctgccctgagtcccgctcactcacacgggcgcgcgcccagcctgtcccgggctccgggaaggaacgggctgtgacagcgaaacgggagcggagacagaacaccgcacacccagcgtcccaaacagcgactgatgaacacgcccgcgcgccggcaggaccctcggcccgcccctccccttgtgaagtcacgctgcgtcggcacgcctgctgccacgcccgcctggtgctggggaggggaagcaaaggggcgggacccggccgccgcagcccgcagagcttccctcgctcctccccgggggctgtcagcgcgggctccgccccctcgtccttccaatcgctctcggccccgcctcccccgccctcccgttctccacccacttcagctgtcgccgcgcagcagcagttctgttcggtttcgccttcctgctgtgcagtcttttgacgcttgctgtccaactttggagttttcttgcctttttttctctcagagttgagcccctgcccgggccctttagtccctcggtcacgaggaacggtagagtttagaacctgtgagtacgttagaaagttcgcagtcgaggaagaacagggttcgggcaagggcagctggtccggtaccaagggaaaacaggctgggatggtgaaggcgtcagtggctacaaggctggaagtttagcaccagaagggaatttggagatcaattcaaccgcctcatttcaggcatacttaaattgaaacccagaaagatgaggtaatttgcagaaggtcacccagcaacccctgagcaggcaggactgcaacacaaatgtctgacgtgggcttccactgtgtaatgctaagcagataggacgtaaattcctttgcagacttctcatttttccttaccccctgcctctcatattacacaccttccccatttagcttttcttcttttactttgcacttgcttttgtacatctaaaaggaattaattattcaacagcagtgggaacccttgaaacataatctggaaaaaaagattaataaagttttttttatgtcgcgtagtgaaaagagcatgtgctttagagacaaacctgggctccagctatttacttgtgagagctttaggtcaattggcttttattacagctttttaaccataataaaatggggatccctgcctagcagaagattgattaaatggatcataaattgtccaactagtgcctagcaaatagtacatactcagtattttcccctttttaatccccgttttacaggcgatggaactcaccagagaccagatagctagagaatggctgagctgggttttaaatctagtcaatcttgaccccagagctctccagcctaaaggtaatgtttagacttaacttccagtggtgtcattataagagtcaaaaacagactgaagaaataaaatagcagaataaagtagtggggcattaaagaatcatctagttaattcttggtgatgataacagaaatgttgggaaaagtgtcagaagccttaattttctccccattctttctgagtatctttagatcaaccaccacttcccaagtatttgcaaacaagcagcatagatattatagccctagaaagagttggaaacattatcacaacattagcaagagagtcaaggcatttttaaggaaacagaagcttccatttcatgaactaataaagcccaaggtgccaaagacactgatgtcatactggaaagtggtgtaaaataaaattataagcataatttcaacatcaaataaaacaaatgatgaaacatgccagttaatggcagagccagcgtccaacctcaatcccaatccagctcagaagctctaattctaccatggttatctggcaggacttgacacttcaattggattgtactcaaagctgtattttcttaaacaggcaaaatattctcacagaagcaatatttaaggcagagctctttttttttttttttaaggtttgacaagatcttcaaaagattaagaatagacaggaaaccaattaagaatgttaagagttacggccaagagtttgggcaaagaaagtttgccactcaactctcaatcatttgcccccagaaaagggattaggttgggctgttcaggctaatta

SEQ ID NO: 3397 - DNA, 4001 bp, Homo sapiens
ttttggatgaaggtattgtagatgcctttctgccaaacattttctgtgtatccctttggtttttgcgcaacatccaccttacagcagaagacacaagaaatcattttggagaatgagccttccagatactgtaaagtttccctctttttccaagtacaaatttgacatatcacagaatatgctaaatcctttacctataattttcatttatgtccacatttctaaataacatatgtaaaatactggccaggatttcaagtcattaaaaatggagaaggggtgggaaacaactgagtggcaactacactagagaaaacaacttataaaaaagaaaaaatatggactataccagtctcctaaaaagactcactgactcagaatagaactaaaaatctatgccgggcgtggtggctcacgcctgtaatcccagcactttgggaggttggggcgcgcggatcacttgaggtcaggagttggagaccagcctgggcaacactctgaaaccccgtctctgctaaaaatacaaaacttagctgggcgtggtggcacacgcctgtagtcccagctacttgggaggctgaggcacgagaatctcttgaacccgcgaggcggaggctgcagtgaggagagatcacgccactgcactccagcttggcgacagagcgagactcggtcccaaaaaataataataattaaaaatctacttaacctgtaaaccggggtagaggcgcggatttcccagctgaaaccgactgcctttcactgcaaaggtctgttacatcccagcgctgcccaccacccaaagttaacaccaaaggagttcaaaactcctcaagagtggcccacagaaaaggcgggggacttcagggcttgccaagatcccaggagccggccaatcccgattctgcagactgttaggtcccccgacttttttgcacacctaccctctggtcaaccgaataatatcccctggctgtataagacctccgatctcatcccacacggaaatagtgatgctgcccgttttatctgctactttgcacgatctcacttcatggccgtctttggttttggtcacgcgtcctgtgaggatttaaaaatcaaagggaggggttgttagataatgaggacatccagaaaggctaactcctcctccggtattttaatacatctggaaggtgggaagtgaccaagcccagggctcccgcctcaggtaggatccgatctcgggcggaggccactagagccacgtgggtgggggaggggagggaggaggaggggagccccgggcgcgcagcggccggcgcccctgtctcccgccccgggaggcacagcgggcggtggagtaggctgcaaaccccacttacctatctccaggacaataaagacgacatttaagtttttcagtccgggcttaatatctcttataaaaataagtgggtcgttgaccctattcatattgggacaggcgcggctacggctgcggagacgcgagtgggcagggcggggtcaaagcttcccaccctcccgggacaggggcgaaggcagaggggcgaccttgggcaggggtggcgagagaaggggcagaaagccgttagtcagggaccgggcaaaccagcccggacagcactgagcctaaaaaaagaaaaaaaaaaaaaaaaaaaaaaaaggctcacaagttctaaagaaaaaaaggcgaaccactccgcacaccaaccccgctcccaaccgggcgacaggaaggcaagcgtactaactgccccgttctttggataaaaggaaaaaaaaacgcagtgaggggacacttctgccctgagtcccgctcactcacacgggcgcgcgcccagcctgtcccgggctccgggaaggaacgggctgtgacagcgaaacgggagcggagacagaacaccgcacacccagcgtcccaaacagcgactgatgaacacgcccgcgcgccggcaggaccctcggcccgcccctccccttgtgaagtcacgctgcgtcggcacgcctgctgccacgcccgcctggtgctggggaggggaagcaaaggggcgggacccggccgccgcagcccgcagagcttccctcgctcctccccgggggctgtcagcgcgggctccgccccctcgtccttccaatcgctctcggccccgcctcccccgccctcccgttctccacccacttcagctgtcgccgcgcagcagcagttctgttcggtttcgccttcctgctgtgcagtcttttgacgcttgctgtccaactttggagttttcttgcctttttttctctcagagttgagcccctgcccgggccctttagtccctcggtcacgaggaacggtagagtttagaacctgtgagtacgttagaaagttcgcagtcgaggaagaacagggttcgggcaagggcagctggtccggtaccaagggaaaacaggctgggatggtgaaggcgtcagtggctacaaggctggaagtttagcaccagaagggaatttggagatcaattcaaccgcctcatttcaggcatacttaaattgaaacccagaaagatgaggtaatttgcagaaggtcacccagcaacccctgagcaggcaggactgcaacacaaatgtctgacgtgggcttccactgtgtaatgctaagcagataggacgtaaattcctttgcagacttctcatttttccttaccccctgcctctcatattacacaccttccccatttagcttttcttcttttactttgcacttgcttttgtacatctaaaaggaattaattattcaacagcagtgggaacccttgaaacataatctggaaaaaaagattaataaagttttttttatgtcgcgtagtgaaaagagcatgtgctttagagacaaacctgggctccagctatttacttgtgagagctttaggtcaattggcttttattacagctttttaaccataataaaatggggatccctgcctagcagaagattgattaaatggatcataaattgtccaactagtgcctagcaaatagtacatactcagtattttcccctttttaatccccgttttacaggcgatggaactcaccagagaccagatagctagagaatggctgagctgggttttaaatctagtcaatcttgaccccagagctctccagcctaaaggtaatgtttagacttaacttccagtggtgtcattataagagtcaaaaacagactgaagaaataaaatagcagaataaagtagtggggcattaaagaatcatctagttaattcttggtgatgataacagaaatgttgggaaaagtgtcagaagccttaattttctccccattctttctgagtatctttagatcaaccaccacttcccaagtatttgcaaacaagcagcatagatattatagccctagaaagagttggaaacattatcacaacattagcaagagagtcaaggcatttttaaggaaacagaagcttccatttcatgaactaataaagcccaaggtgccaaagacactgatgtcatactggaaagtggtgtaaaataaaattataagcataatttcaacatcaaataaaacaaatgatgaaacatgccagttaatggcagagccagcgtccaacctcaatcccaatccagctcagaagctctaattctaccatggttatctggcaggacttgacacttcaattggattgtactcaaagctgtattttcttaaacaggcaaaatattctcacagaagcaatatttaaggcagagctctttttttttttttttaaggtttgacaagatcttcaaaagattaagaatagacaggaaaccaattaagaatgttaagagttacggccaagagtttgggcaaagaaagtttgccactcaactctcaatcatttgcccccagaaaagggattaggttgggctgttcaggctaattatatgaacattttataaaaagaaatcagacacagaaaatcaagccccacaaaagcagaagctgg

SEQ ID NO: 3398 - DNA, 4001 bp, Homo sapiens
gactctacttacgcttcacctagtcctcgaaaccttttctgaggtgtggcccaccccaacgaattagttaagtctccgttagttaaaccttcatagtgcctccaaagttattaaagtctcctctgtatgaagtgtgtgttcagacgctttgtgtccgcctctcactagacttcaagctccactgggtcaagctcctgatcacttacttaccctctcagaacgagcacaggagctggcacaggcaatgctcagcaaacactcctaagaaaaatggcacatctctctgcttccctcacaatagctaaagactgcatttcaagatccagctgccaaggtcttcaagacacctttgctagaaatgctgaccagatggcagggtgacttcatacatacttaagcaactaaaccttcaaatgttgattactgggggtcacagtagttcacagggagatctgtggtgatgggatatatgtttctttattgatcattacttttaggaatggcagaagaagacactgaagaccgctcatcaaactcaaagaggacatgaaatttcaagggggtagttaatacatgaggtggcagattccacatccaaaagcatgtcttgacgaactggaagaaacgggtcatatcttacagatgactataacaaggatgaatgcagactcctatactgttttttttaagtgctacaaatacaggatgggaaagatcattcctaacaattcatgtgaaaagactttggggtctgtgaatcagcagtggggtgtggctgccagagaagtgaaaacaatcacagattcgaaagtacagtgccctggctgagaggccagcgacccccattattccctgatttgacaaactcagattcacagaatgttgccactggcagggacatagcgatcttatttatccctatcctcactttgcacatacggtaactgtagcccagggagggtaaatatcttgtccatggtcatacccaggggcagagctattacaaaaagttcagtaaacaagcttctgagcagaaaaatgcaatctagtgaaagcagcatggaaggccaacagggatggagcggttttcagacatcaggacaacctagtactctggctcgcagctgctccagctcccggataacctcagccaagatctttgtcccgcttctccccactcccactccccaccctgcccgcgctcagcaatttcacacctgacacctgttctgcaaaactctgtccgaggtcaggaataggaaaaaggagctgcttctccagctgaagacagcggagtgggtgtttcgtggaagaaaggggcgtggttccgccaagaaacacaaaggatccccaacccggggtgtggctgttgcacaggcagagtccccgtaaggcatacagctgtgcgctccagggcgcccctgcgcgtgcacacacctcttcaccgcaaggtcccgccgcccaaagtgcccggacgccgaggatcaaggccaccagcttgccaggctggccacggccttccgccccgccttcgggcccaggctccctccgccgggccgcactcacccctctacacccccatagatcgcggccatgctgctgctaccgtcgctgctggtcccgccgtttgcgtctctccccgcctgacacctccttccctccagctgtctgggcaccgccccacttcccgtgacctcccgcgcagccagctgactccctgtgcgcgtgcgcatgcgcggggcggggcgccggtaggagccggggatggctgcgtccctcaggctgtcttccttctggtgtctcctccaggtggagcgactgcggtccgcagcggcccctcccgtcctcctggatcctgcttccagagatggacactaatcccaagaggaggaatcaaagaggggtatctaggtcggtcggacccttaggacacatcactgacctgcctgcctgtaaacgcccggaagttgctggcagtcccgcgttaggttgcgcgtgcgcactgctcttggccgcgtaggttgtgacgcatgctcggccagacccccgcgaagctgtgggctcagggacctgcgcccatggacctgtaacagaaattactgtaatgttctactgaacatctgccacgcgatggcgagtcacacgggcacacacgaacactcgctcagattgttgccctgcgctcgtgtgaatgtacggatccgggaggaattgggacctaaacagacaagccctcgaggcggtcccggcagccctgaggagggagccttcacctcttcctacccacccagtttacttcttgtggaggatatttgcagggacatagcccactgggagaactagcagatacggctttacaagttttttattgcctttcagcccccattccgctccccttccttgcgctgcgtcgggaaagggaatgggatccctaggggtgcaaatacaggccaagtcagggagagctgtggctcctgagggcctcctctggctcctccgggaagttttgggccctcaaggagcagcttcgcgggccaggagggcggttagctgcccttggcatctttttggggaaatcagttggcctgtcgcgggtcgaactctgtcccccttgactgcctgccatcttctggagaaacccctaataggctgctgtgtctggttatgctttagtgagaaaattaggctttttaagctttctcatttcctaccctaccacgttgtaattcacaaaagtaaaaagtaaatcactacatgatagactctgtatcatgtattcatttatagaatatatatcatatattctatatcagatggagaatataatagagggtaggatttttttatgcctgcctatggcatttttttaattcacagcactttagagctggaagattatccaacatacacatttttagaattacagttagtagattgtggtgcaattaaactgggcaggatttttggagactagattgtaggtggattttgaaataattgtttctgtcctgtactactgcaatgagccatgggacgtatgtgtataaatattaagtttgtctttgtattgcttgtttaggcaagcaagcaaaagggaaagtgcccaggtttaagacaagaattgagttcaccatttactagctggatgagcttgggtgacttacaggtaattgctgcagcctctcctctacaaaatggaaatgataaacatctacctgctggggctgacgcaagatttaaatgccaaaagagttttggaaaccataaagtacttcacagatcttaactaacttgtatttacattaccaattagtgtgtgctgtcctgcacagtatccatatgtgaatactgagcacttgaaatgtggttagtccaaaatgagatgtcccgtcaatgtagaatacacacaggatttcaaagacttactacaaaaaaagagtgtaagatacctcattagtcactattatatgaatcacatgttgaaataacattctggatgtagtagatcaagattatagattactaaattttgccaatctattatattttttagtgtcactactagaatatttaaaattttgacctacatatttctgttgtacaaccctgttgtctctatctggaccataatatttcaaagtcactgaatgcctatttatgaaataaataatggccatataattgatttaaagaagaaagtagccgggcgtggtggctcattcctgtaatcccagcactttgggaggccgagggggtggatcacccaagatcaggagttcaagaccagcctggccaacagggcgagaccctgtctctactaaaaatacaaaagttagttgggcgtggtgacaggcgcctgtaatcccagctacttgggaggctgaggcaggagaatcacttgaacccaggaggtggaggttgtggtgagccaagattgtgccattgcactccagcttgggtgacaagagtgaaactccgtctcaaaaaaaaaaaaaaaaaaa

SEQ ID NO: 3399 - DNA, 4001 bp, Homo sapiens
tgcagcccttctcactgcagagacaggttcctctccttgagtttggggaagatgcaacacatgcaggggtttgaaaacacatttgtttgtttctgcttttgtttttgctcctctgcaatttccttgaaaccatgcctgaggtagcctgtgggaaaacgaaacagcaccattgacctagtctttcagccaatcccactgcatttgtacaatgcagtctgacaccagaggaactgcccagccaagctcaggcaaaattgctgacttcagactcatgaactaaataaatatttgtttcatttggtggttgttcttatgcaacattatgctggcactagaaaaatgaaacagatgggaatcaaaaagactgaatgaagcagaaacccagaagctaccccacaagcaatcacatgggactcagatgtgaatggacaataagcttttattgcattgaaaggtcattgcagtgaaaggttggggattgcttgctgctacagctgaatggattctattctgaccaatacacacagaaagagatcacagactccctaccttagaagaagggaggtggtagatgaaatgaactgtatgaagagccactagcctggcccacacacagaagaaggactggcccgtcttcttgaagcccatgctctggtagagggccatagcagagagctggatggtgccggtgtccaggataacttcactgtagccctggtcccgggcaaactggaggacagtcctgaccagggcttttgctatcccctgacgacggtgctcactgtccacaaagagatgaaacagctgcaaccgcttctccctcaaggtgggatcatcaacaggcagagctcctaccatgcccaccaccttctcttcagactcagccacccagaagcaggagccacgctcactcaggtaggatttggtaatgtcagacatgtctgtgcacaatgtcatgtccacatactccgtccagggttttttggcaaggaaccacagggcagggaagaggctgatgctgaacacgagggctagaagccaggatccagagaccaggagtagggcgaggggccccccaagtaagagtatgagggttcgaggcagcttcagcaattgccggaaggtggctggggcatgctcggccatcccccgggagagcaagcccacaacccactggcggtcgctctcctggtatttgcggatgtgacaaggagccatggacagacttctgtgtctgaaatctctaagtccaggagacagagctaggcctccctgcacgcctttacgtcagactggggaagagagagaaaatcatgtgagtgcctgcatggctcccagccttgcaggaacagggagacctgctcaagggtgtgtctttccgcgtttgcccatgaggaagcaggcctctgccactgggagaaggtagggtcagaaagacctgcattggaatctggttccatccctttctagctgtgtgaccttaggcatgtcacttaacctctctgagcctccatttcttcaactatagaacaggggagaagaaaacctgccttctagagttgttttgaagattgaataagatgccttctataaagccctggtagatgaactacccaccgctcttcctttttctgtttcctttttctggctctctcagcttctccgtgcattgagggggcacctacctcaggcaggccacacgtgcaacccttttgtccttctccagggaccatacatcgcaaaaattctctgtccaacacaagtttcaggaaaggctccctccagctttattgtaagtttttaggttgctgaagtggcataagagccaagcataaaaaacagcccagcctccagatcccaaggaaggtgcatgctcagagcactgtccttccacccagtcccctcacctgtcaccacaagagccttgagtgtccagggagcttcagctctcagccgctcactggcatccaggagataccgtctggggcttgctcacccctggaaagtagactgcctgccttattgcttggctcctgaatgtttggtaatcatcaaccctagggtcaaagagctgggctgtaacacagcagggagcccagtgtgcattcctctttgtggtcaaagggaacgacctggagggggagactcagggtctggaaccgcctgggttccttgcccttctggaaggcctgccacctctcttgcctgttcaggccccgtgcatctctctgccacctggcacacttagtactctcggtccctgtccacatatacgatccaccctggtccttgtacacatatacgacgagcctgagaactgtaccattcaccctgcaatcagtcaccattggccagaagccgagtccccatgcttggcaacaaggcccttcccagctaggcttctcctcgctgaggtttccctggtccacgaagcatctgttgttggcagttccttgcactcacctcaccaacccccatctccacccattcattgattcagtcaacagttgtgtgtcatgcacttcctgtgtcctggggtcatttcagccatgagcaaggttgacattcggcttgacaggcatggctgtgtgtggcttgtgtgtgttctggctgttggtcagaggctgtgccacacccgttgttaaatattttgcactgcagatgttggggaggcccaaattcatgctcttgtacccgacgtggagctgatcccaaacactgacacatgggtgcttggagatagagaaagttgtattcgatttggccaaagcaagaaggcaggagagcaagatctctcaacttcagttcaacaaagaagcagcagcagaatgtttttatgcagctagagagtgaggaagggggagttcagggggattgagaggaaaagtctgtgtttcctcagtctgagataacaccttgtgcaaccaggcttctcagtgtcagcagctggtcacagtgtccttcaaggcattcattcattctgcaaacttttcctgaccctgaaggaatgtcttcctgctgaacaaagaaacagtacatgagcagtttatcattatgttgtgggaacaaggaatattggaccaaaagcaagtggttaacatgtgcaagccagcaacggtctgatcagaatgttcattatttcagtcactaaaacatggtgtggtgctgaaatctcaaggggcccaattacaaggatgcaacatatacaagataggcaaaagcaaaacctaacagaaaaagcccttttccacaccaacttacatgctattgaagggaaacttcccttccaaagattagctaacctattgatgatcagccacgctgggcccgtcatctaggttaggtagtttggactctattccaagagcaaggggaggacattgatatgcacggaggggaggaggtgtgtgtgtgtgtgtgtgtgcgcacgcaagcatcactctggctgcaggtggacaatggatctgaggaggtaggaatggaagcagctacccctcaaggctcatgccacatccaggcaagagcggggcctccagtacagggatgcaggtgctcactgtacaagagcagctggcccagaggctctggtgggagctaaaactgggcctccctctggttgccaagccatgagccatggcacgaaactgagactggccaaaggaaaaggcaaccttttcttatttgctcaaaggcgttgcttgcctgctaaactctgcatccagtgggctgcatggcttgaggctgtgcctagctctgggttcacaaagaagccgcctgggttagcagaggcccatgagacagcagtggcttcaccagagggaggaagtcaagaaggtgagacatgagccgtatggaggtgcatttggggcagaaatggcaggagttggaatgattcacacagggaggaggatgaggaagggctcagagacgacagccaggcttctggtaggggcattcaggaaaacactggagagagcccagatctggaaaagtcaaggctt

SEQ ID NO: 3400 - DNA, 4001 bp, Homo sapiens
acttgtttttgatataacagcctcatgggtggaaggcatttgccttgaggctcagatgaaactatggattctggacttttgagttgatgctggaacaagctgagacattgggaaactatcaggaagggatggttgcattttgcaatgtgagatgacatgagattttggggtaagaggcagactgatatagtttagatgtttgttctctccaaatcacatgttgaaatatgacccccaatgttagaggtagggcctagtgggaggtgtttcgctcataggggtggattcctcatgaatgggttggtgctctgtccatggtaatgaatgagttctggccctgttagttcacatgtaagctggttgtttgaaagcacctagcatctttcttgtgtgctgtctcgccgtgtgacacacctgctcccccttcagcttccaccataagtgaaagattcctgaggccctcaccagaagcagatgcctgcactgtgctttttgtacagcctgcaaaaccatgaaccaaatacacctcttttccttataaattacccagtctcaggtattctgttatgatcccctggaagagttatactacttccaggtctagaccatggtaaatcccacactcccctctgaggccaccttcttccctctgcagagaccctgtggttagagtggattggttgtgtctctggccccaattcttctcccgaggctgcattccacccttttgctatgtgactttgcagcccttcatgatcattacagaggcaggttcctctctccttgaatttggggaagatgcgacgcatgcaggagtttgaaaacacgtttgtttgcttctgcttttgtttttgctcctctgcaatttccttgaaaccatgcctgagctagcctgagggaaaatgaaaaagcaccattgagctaatctttcagccaatcccactgcatttgcacaatgcagtctgagaccagaggaactgcccagccaagctcaggcaaaattgctgacttcagactcatgagctaaataaatattgatttcattttatgattgttcttatgcaacattatcctggcactagaaaaatgaaacagatgggaatcaaaaagactgaatgaagcagaaacccagaagctaccccacaggcaatcgcatgggactcagatgttaatggacaataagcttttattgcacagaaaggtcattgcagtcagaggttggggattgcttgctgctacagccgaatggattctattctgaccaatacagaaggaaagaaatcatagacgccctgcctgagcagaagggaggtgatagatgaaatgaactgtatgaagatccaccagcctggcccacacgtggaagaaggactggcccgtcttcttgaagcccaagctctggtagaggcccatggcagagagctggatgttgctggtgtccaggacaacttcactgtagccctagtcccgggcaaactggaggacagtcctgaccagggcttttgctatcccctgaccacggtgctcattgtccacagagagatgaaacagctgcaaccgcttctccctcaaggtgggatcatcaacgggcagagctcctactgtgcccaccaccttctcttcagattcacccacccagaagcaggagccacactcactcaggtaggatttggtgatgtcagacatgtctgtgcgcaatgctatgtctacataccgcgtccagggttttttggcaaggaaccacagggcaggaaggaggctgaggctgaacacgagggccagaatccaggagccagagaccaggagtagggcaagggcccccccaagtaagagtatgagggttcgaggcagcttcagtaatcgccggaaggtggctggggcgtgttcggccatcccccgggagagcaagcccacgacctacttgcggtcgctctcctggtatttgcggatgtgataaggagccatggacagacttctgtgtctgaagtcactgagtccaggaaacagagctaggcctccctgcacgcctttacgccaggcctggggaagagagaggaaaccacgtgagtgcctgcatggctcccagccttgcaggaacagggagacctgcttaagggtgtgtctttccgcgtttgcccatgaggaagcaggcctctgccactgggagaaggtagcatgagaaagacctgcattggaatctggctccatgcctttctagctgtgtgaccttgggcatgtcacttaacctctctgagcctccacttcttcatctatagaacaggggagaagaaaacctgccttctagagttgtttcgaagattgaataaaataccttctataaagccctgatagatgaactacccaccactcttccctctgtttcctttttctggctctctcagcttcttggtgcattgagagagtacctacctcaggcaggccacatgcccaaccctttggtgcttctccagggaccatacatcgcagaaatcctgtgaccaagcacaagtttcaggaaaggctccctccagctttattgtaagtttttaggttgctgaggtggcataagtgccaagcataaaaaacagcccagcctccagatcccaaggaaggtgcatgctcagagcactgtccttccacccagtcccctcacctgtcaccacaagagccttgagtgtccagggagcttcagctgtcagccgctcactggcatccaggagataccgtctggggcttgctcacccctggaaagcaggctgcctgcctcattgcttggctcctgaatgtttggtaatcatcaaccctagggtcaaagagctgggctgtaacacagcagggagcccagtgtgcattcccctttatagtcaaagggaatggcctggagggggaaactcagggtctggaaccgcctgggttccttgcccttctggaaggcctgccacctctcttgcctgttcaggccctgggcatctttctgccacctggcacacttgatactctctgagatccaccttggtccctgtacacatataccacgagcctgagaactgtgccattcaccctgcactcagtcaccattggccagaagccgagtccccacacttggcaacaaggcccttcccagctaggcttctccatgctgaggtttccctggtccacaaagcatcgattgttggcagttctttgcactcacctcaccaacccccacctccacccattcattgattcagtcaacaggtgtgtgcgatgcacttcccatgtctgggggtcatttcagccatgagcaaggttgacattcggctgacaggcatggctgtgtgtggcttgtgtgtgttctggctgttggtcagaggctgtgccacacccgttgttaaatattttgcactgcagatgttggagaggcccaaattcaagctcttgtacccgacgtggagctgatcccaaacactgacacatgggtgcttggagatagagaaagttgtattcgatttggccaaagcaagaaggcaggagaggaagatctctcaacttcagttcaacaaagaagcagcagcagaatgtttttatgcagctagagagtgaggaagggggagttcagggggattgagaggaaaagtctgtgtttcctcagtctgagataacaccttgtgcaaccaggcttctcagtgtcagcagctggtcacagtgtccttcaaggcattcattccttctgcaaacttttcctgaccctgaaggaatgtcttcctgctgaacaaagaaacagtgcatgagcagtttatcattatgttgtgggaacaaggaatattggaccaaaagcaagtggttaacatgtgcaagccagcaacggtctgatcagaatgttcattatttcagtcactaaaacatggtatggtgctgaaatctcaaggggcccaattacaaggatgcaacatatacaagataggcaaaagcaaaacctaacagaaaaagcccttttccacaccaacttacatgctattgaa

SEQ ID NO: 3401 - DNA, 4001 bp, Homo sapiens
ctatacagacaatgctactaacaaaacatacacagatacgtaattgctatattaaataattccattccataagtatagactgaacacaccgtgggtaggttcatgacgctaggcactgcataagatgcactaaagtgctgtcaagaaaagcacaatggacatacagtaagtgtagacagatttttttaaaaaacacagaaaagttatttcactcaataaacatgaattgattgttggattcatgcaagacacaatttggccctgggaagagatataaagatgaatcagatgtctgccctccaagagcttataattcaacagctgaaatcaacagaatgcagaaatcgatagaatgcagaaatcaattgaactcccccacccccaacacacaaacacaaaacaaagtgctaagggtttcaaagtaagttaattctgtggttacttttttggaatcaatttatggtaagcattctgaaacattactgcaattaaccaatgagtgttaaggagtggaaacttatctaaccagctgcctcagcaacagcttcctagctgcataacccaaaaaatattcacattaagacaaactaagtacttgaaattaaacagtaatatatgcagatctctacccgtctacaaaataaattattcatgataagcacaaactgcagtgggaaggaggctacagaggaaaaaaatacaaactttgggctgaaaaatgagtcgtttctccagcaaagaaacactcagaaaaaatgtaagataactcacatgggctggactacataatctttaataaaggttcttttcgatctggctgcttcctctgggtctaaaacagtaactggcacgtgttaagcactcaataaatatctgttaaataaacatggatccaaaaaataataataataaaaaataaaataaaataaacatggatccatggttcctactcttcatcacagacccgggaggccttcactaccaaacaactgataatcccaagatccagtccataaattatcaacctctataacccttctgtagcggagatcccaatcccagtcagcagctctttactctgcacttccgtggcattttgctcacatcgctaactatagcgcataaaacgctaggttatgaaaaacgtttacgggactgtctcccctctagacgagaagctccacgaaaacatattcatctctgtatccttagcacctagcacagcacctgtgacaccgagacagacgaacggacacgcacacccttattaaatgctcttttattgaaacacacaagacctggcgcgatccagcccccagtatgggtaaaggctcagattctgcgctctgcaccagcctggcagatgctgcagactgtaaggtcctggaaaattctcccatcgcagttgagcgtcggcccagactagccctagccagaccgcgagaagggaccactgagggtccagataggagaaaggaccctcgagtccagcgctgtgccttcccctcctaatacagagagcgacactaacaatcccctctcctcccaatacagagagcgaaactgagaaccaaagtgggatcgtacgctccccagagcacgaagttccagcccccaacaaccgaattctgagcccaggaagaatctcagggaccaccaccccaccccgccctagacccccgctagcccaaggtgccgttgccaaggcgaccgcacaagccaaccggccctagtcccccacccacccgtctccactcccctacgtggctcctgctacgtggctctacccacgaagcgcccgcgccaagctggctgctgctgtagatgggcctggttcacctgtacttcagtctccggtggccactcggtgttgaccaacaagtcatagagaatcgtctcctcctcaccctctgcagtgcctggactcaaagccggccctgactcgggggccgccatgttcgccgaggactcaggcagcggaggagtgtctctacggaatccctcacaggacaagcttctctatccgcggccgcttttgtttcacggcaaggaaatgctaggttaacccttttatgagtaggaaggacagggactattgcttgtcttgggaacgacttgtgtcccggtcctgatacactccttgttcattaatctacatgagatcggccaagtcattgagcctctcttataactcagtttccataaaacagaaatggtaaaggtaccccactgaaatgctaatgttcatttgtatattctttgcctaacacgtagagagagttcaaacagtggttttaaaataaacaactaaagttatccaatgaaaggtagcagaggaaggatgctacaggagctcagaaaaggcaacgaaggccagagtctgcagggatttcctggaggacgtggagcttgtccctgcgtctttaacaataggcagaattttaatctactggagaagcatttcaagtagcgggaaatggaatgagcagagacagaggcagaaatacagagttgaaagaactctttcaacgtgtcgccagtgagtgacgactttctcagtgtgggagtaaaagaatttaccaagacagtggtagataaagaaagacagattaaagaaagtatgaaagttcgttgccagggagcagcgggccgactcagcagaggaggagctcattgctaggaaacaaaggcttgttgagaattttatagactggaacttggagtgattgataacaccaggtagcagggagttaacttgctttttttttttctttctttctttttttttttttttttttgtcagctgaagtgtttcagaaattgaggcatttgaaggtaagcaggaagtttgtgagttaagtacgttatctgggtagaagggccatatgtcctgggccataaagaaaagtagacctatggcttatttgtttcttccttttgtttatatgttttggaccatgaagaaagacagacgtatagctaatttgccttatctctttgtttttccctgctcccactagcctgcctttttttttttcctaattagtactcaacaagacgggtgaatagaacccaagttgagaaagggtgtaggggcaataaagttgaaataataggttgagaacccgcatggagggagcgaaaaggtcaaccccatttgttcattcattcattcattcaacaaatacctctttgtggacagttataagcagagcctactgtaacatgaatgaatatatactgtacaaagtattacactgtttcacatcaaaagaaacacaaatactgaatatcccttgagataattatattcatgatatccatcaagatgcattaggcggtgatgcaattaaaagcctctgctgggaagcctctaaccagctcccatttctctcaaagtttaatgacctcaaagccctacgtcatctgcctgctcccctaaatctcacacctcatttcctgctccccctactaccttcagccacactggctctatttctgaacacaccagacacacatcaacttcaggagttctgcaaagcctgtcccctccacttggaaggctttctaccagatgtttacctggttcctcccttatctccttcaagtttttgctcaaatgtcgtctctctctgaagcctaccttgactgctcatttttaaatttgcaatgaccattctccaactccagctttccagagctgctctattattttttccattacacttgtcatcacttaaatggctatacagtatatttgcttattatctgtctccattcactaaaaggtaagccatgccaggtgctctatctatatgcatgcaaatgctatatccatccctgctatatccccagaatttataacagtgcctggcatagagcagaggacaaaatatatattatttgttgaataaatgacagacttcccagaaaatcttttacacattgtctccccatagtatttctctgcatagcagctgtgcccttcaatcaaacccctc

SEQ ID NO: 3402 - DNA, 4001 bp, Homo sapiens
tggcagtcacacagcacgcagttcaatcaataaccttgtgatgcaatttcaaaggttcattccaagaaaaatgcttaatgcccttctcataaaaatgtctctatcctacactcacttgtgggagaaaatgaaaagcacaaacaaaaataaaaatattttatttttctcttaagggcataattttacttatataattttaggatcatttggggataagtatcaaataaaagccgcaccctacagtttttaacagtatgccaatattgtatgtgtgttcaaacctgaaaaagaggaaaacagaaaatcctttaaacgcttttaagtttggggttattcattatgactaaatacactattatctattaaataaagtgttactactgccagtcacaaattttataataaagtattttaaaacataaaaataaaaaggaaagcaattacctttgtacaataaagcatccaaagttcaaagagcctctctctggatgccattctggctttcactctggcactttaagttttccttaaaaaaattatgttcaagactacagcatgtccattttattttccaagtttttcagccgttcagtaaagctcatagcagtaaagaaagcaaaaagaagtgaaacaaatggactgtcctctggttaaaaacaaaaaggcaatttcagcagtcactccaatatatcttcatcagtggtagttgggcaattaaataaatctgtgaaagagaaaaacatccacaggttagaaaaagaggccatactaaaaaatctagacttatcaaaaactaaagatgtatcttcttcacttcccacaaacaacccgctatactttcacatggactgattagatttcatagaaacttgtgtttcaggaaaacatcacagctaacacagtatgtccaccatagaatcctctagggcagacagactcctagagatgggtacatgttcataaccaagaatgcgtccagtgagaataaggagcaagactcccttcccactcataccttttgtacagatacaaggaaaaggcccacatctcagacatttcaaatacatcaaagctcttagaatgttcttgttctggtctcctcttcaaagttgttggggccaggcgcggtggctcacgcctgtaatcccagcactttgggaggcccaagtgcgtgaatcacctgaggtcaggagttcgagaccagcctggccaacacagtgaacccctgtctctactaaagaaatacaaaaaattagccgggcgtggtggcgggcacctgtaatcccagctactcaggaggctgaggcaggagaattgcttgaacccgggaggcagaggctgcagtgagcccagatcacgccactgcactccagtctgggcgacagagcaagactccgtctggggtggggtgggggtggagtagttgggactgtttgctgtgttgcagggcagggcgtgggggcgggggaggaattcccagttcgtttgttctaacaatcctcggagagtggaagtccacccgcccacctggcctctccacctttccatccaagagaagtgggcacgcacacaccggcgaggaacttcccaaagaagcatccaagtgtttgggggaatcttttaatttcctcctcacatcccaagacaacccaaacagaggcaaacttaaggtgtgccgagctgccaagagaagctctagaactgaggaatgcggactcggcgtctcccgaccgcgatcccagcctgcactacagtatcggaacactccctgacagcctagcccactcaaagccgcccctcactctgcagcccctccaccaccaagcaccggggccctcccatttcttgccatgccgccccctcttcccaacggcccgctccccatcaccgggctcacattgtgtgccgcgcggcagccgccgcccggcagccgtctaactgcttccctcgaccccttcccaaggcgaagccccgtgtcaccccgcagccaggcagacgagcgggcgggacatgggggcggggcgagaggccgggaggagcagggggcggggctgccccctgggctaatcatttcggccgctgaggatttacccagccgttgggcggcagctgttcaatggtcgcgtaggctggggatgggcggggtgacctgaagccccgccccagcatacctgcgcagccgcagtcgacaggctctggctgcccatcccttggcgggcgccggccgcggcactgaaacgagccttccctcagctggacatggaggagggctgacgtgctgacgtctacgcccgccccgcttttcgctgatggcgtcatttccgtgagtcatctgagggcgtgagaccctacggtgttaaaggggattttgtttcacttatttgtagaaccgggattggttctgggaatttagagtaatgtaaaaagacaaaacacacacagacaccccccaaaaactcctcttttccttttgtgcctgctttcgtcgtcaccgagtgtcatatccaaagggcttattttaccaccactaaagacttcgaaagggtttttctttttcagaaaagaagcaaaaggctttactaactatagacaactttcagagagatttggtttttgtataaggaaagaaaaacgcgtaagataactcacctttgttaaacatttccacaactttttattgtgaaagatttcaagtatattctaaagtaaactagtataacgaaaccctgtataccgtcacccaacttcaaaaatgatcaactaatgtcccatcttgtttcatttgtaacaaggatccacaaattgcctgtgaagagccagagacgaggcgcagtggctatcgcctgtaattccagaattttgggaggtctaggcgggcgaatcccttgaacccaggagatcagcctgggcaacagaatgagaccctgtctctgcaaaagaaattttaattagcttggcgtggtggtgcacgcctgtagttccagctacttagaagctaaggtgggagaatcgcttgaacctgggagtgaaggttgcagtgagctccgatggcgccactgtactccagcctgggcgacagagcgagacactgtctcaaaaaataaaaataaaataaaaagagccagacaataaatgttataggctttgcagtccattctggttgcaacttgcttaacgaaaatcaaaagaacaatattttgagatgtgaaaattagacgaaattcaaattcaagtttcagtgtcctaaaattttagtggaacacaaccatgcccattcctttagtattgcctatagctgctttcactctaccatggcagaattgagagtagttgcttgcaaattacaccttcaattttttatcctgaaattacattttacattcagcatttctccttggttgtccattaggcatgtgaaatttatatgtcaaaattttggggggaaaatatgcttttcctttgggataccctattttagtacttagcaactctattcttgtacttgctcagtacaagaacctaggaagtgtgcttgctgtcttcctcatgtacttcacttccaatctaatcttttcagctatatctccaaaatatacctaaccatctctccacactttcttccttaaatggatggtggtatagtagtagtaaccactatctttatttcttttcccttttttttttttaaattagaggcaggggcttcgtatgtcgcccaggctggtctcgaactccttggctcaagggagcctcctgcctcggccttctgaagtgctgggactccaggcgtcagccattgcacctagccgtggctactgtctttaaaatggtttaagttatacaaaatactttctagtttattgtaatagccttccaacttgtttccctgactctgcccgtgactctaccccaaatccgtggattattctcaacatagcaaacacagagatcttttaacatggaagtaagatgtcacttctctgctaaaaagcctccaatgg

SEQ ID NO: 3403 - DNA, 4001 bp, Homo sapiens
agaccctgtctctaaaaaataataggccgggcgcggtggctcatgcctgtaatcccagcactttgggaggctgaggcgggcagatcacaaggtcaggagatcgagaccaccctgactaacacggtgaaaccccgttcctactaaaatacaaaaaattagctgggcgtggtggcaggagcctgtagtcccagctactcgggaggctgaggcaggagaatagcgtgaacccaggaggcggagcttgcagtgggccgagattgcaccactgcactccagcctgggcgatagagcgagactccgtctcaaaaaaaacaaaaaacaaaaaacaacaaagtaaaaataggaagggaggaggcaagagacatttttagaaactgaatcaagaggacttatgaggacagtatttggatgtgagcacagtaggctacaggctaaggaaggaacctggacctttggagaggataccttaacagaaataggaagcacttaaggagaaccttgtctaagagagaaactaaacttggaattagaggcatgctttaattctccaaatcttctttccgtggtttctctccttgcctttgatattatgcatccattcattcaaccgatggttactgagctcaaagacacttcctatgtctacttcctcatttcccactcatttttcaacccactctggtctggttcctattccaacttcatgagaactatcttttcgtgatcatctataacttccatgttgcctaaaccctatggtcattttctggcctttctcttggaatccagcagcatttgaaacagctgacagtcccttccttgttgaaacactcttggcttcttcctataccactgtcttttgagtttttccagctcatccttctctatccagcttctaaacgttggtcctagatgtgcagggccttcctagtgttctcacctgttcccatggttttatggtctaatggtctatatgataatggtatccaaatttatttctcaatccatgggtcacttccctgagtggtccatataactcccctgagagccaaattctcacctaagtgattatagatcccttcacctgagtctctcccgtaagtcacacataccatgtccaaaatgtaactcaatttccaaatctcttacccaaggcctccagaccctgcctacgtgtcaggcctcactaagcttggtcacaatgttctggtcaggtcctaggccaggccaggctcttccctgcctcatttttgtacttgctccttctgcctgaaacacgttccctagtatctgcctaaagatcttccctgaacccctggcggagccacccctactctgctatactcaatcacagcactcagcctcatgtgtaattatttcttttgtttactgtctgtctccccaactccaacagtatagagatattatcaattttgttcgcccaacgggagagctcagtacttttgaatagatgcaaaaataaatgcatgcatgctaagcatacaacggtaaccacatcgcttccaaagccctgaaaataacgtctattccaggaaaaccaccattttaatggagagacaccgagcacgctttaggagcccaaggaggaggccgccccaccgcccgcccgggaactgaggagtgtgaggcagggcccgcgcgctctccgactccggccgaagccgctttctgattggctgagcgcacaaggtccgcccgccccgcgccggccctcccctccccccgcaccggcctctgctgtcagccgcagggccaagacccgagctgagcatatcctctctccccgcccaggccagcccgccagccctgcccgcccgaagtactgcttcgctaggggcccttcccgccgcgcctcccgaccgcccggctcacctgggccgggaggtcccatctttccttggcgtctcctgagctggttttaaatcgcgcgcgtcgagacgcctgagcgccgtaacggccgcgtgacgtcgccggcgggccgggccagcagcgcgcctgcgcagaccacctcgggcctccgcgggcggcgtcagagtgagttttgggttgaggaccccgtctgattgggcttcttggggtcggtggaccccctgaaatagtatgaaaaccccctccttcgaggactaggtgcaggactgggcttgggaacccagcgtcgagcagggtgagcaaggcccgtctttcgtggaatttactttcttttttttttttttttgggacgaagtctagctcttgtcccccagactggagtgcagtggcgcgatcttggctcactgcaacctccgcctcctgggttaaagcgattctcctgcctcagcctcccgagtagctgggattacaggcgcctgccaccacgcctggccaatttttgtgtttttagtagagacggggtttcaccatgttggccaggctggtctcgaactcctgacctcaggtgatccgcccacctcggcctcccgaagtgctgggattacaggcgtgagccaccgcgctcagcccgtggaatttactttataatggggaggcagatgatcgagaaaacgaggtttatttcccttagagatctgtgctgtgtgggcagcaaaacgctgaaaacctccgggaagagggacggaggggagcgggagcctacgtgggaatgaggagcggtccaggtggggaagaactgatgcagaaatgctatgtatacattaaatatagtacaaaatgtacatttaatatagtgtaagatgaaggccatcgttttattcagattcttgtgaatagcttcctgtgaacaccccccacccttcaaaaaataaataaaggtcgaaaaagcgaaataagcataaaatgccatctgtcccctcagtttcatctaaccctaaggattgaattatgggagtaaaggccagggtgattccctggaatatccccagcacatcctagaatttcttgtaactctcatatctggcatcttttacagtgtttctcttcaagggcactgttggcattcagggtgaaacaatccttggcatgataggatgtttgccctctttgtgggctcttaagcccccgtaacatcatttgcccactaaatgccatcagtgctgtcgctcattttggcaatcaaaaagtgccaccctttgttgaaaaccactttttttttttttttttttgagacagagtcttgctttgttgcccaggctggagtgcaatggcacgatctcagctcactgcaacctccacctcccaagttcaagcgattctcctgcctcagcctcctgaatagctgggattacaggcgcccaccaccacacccagctaatttttgtatttttagtagagatggggtttcaccatgttggtcaggctggtctcgaactcctgacctcaggtgatccacccgccttggcctctcaaagtgttaggattataggcatgagccactgcgcctggctgaaaaccactttttaagcctatctgttgttcgtataaacttgttcttctagtgaccaccttcaaatcttcagcgtaaggctgtgtgggttagagaaaacaggttgacactgtttatctcagcaaatgataccatcagccacccaagaacccaaatcagcacccaggagtcatcctgggggattccctccctttctctccccacacaatccatcatcaagcaagctattttcacctcctaaaaattgccaatcctgcctttctccttccatccacattaccttctcactggcctgctctggccccccctcaggccctgagtagtgtatgcggagtccaaatctgagctgtcactcccacttgtcccccaccacttcctcccggaagtataacacttcaggggttccaccaccctgggaacctctaagcgtcctacaaggtcctggaagggtcttcctgccagcctccccacccctgcagcctctccagcctcctcagggaccttgctccccttgctccctgccctccagctgccctggcct

SEQ ID NO: 3404 - DNA, 4001 bp, Homo sapiens
ttgttgtcttaatattaggagtcaaacccaatctctttcttgactgcaaaaccctactgtagtagtccctctgaataaaatctgccttactgttcttcaacaaatgtcatgaataagttttttctttaaaacggtatgacatactggaaaagacaaatctatggagacagtaagaaaataagtgcttgcctggggcaagagggaagggagggatgcaagggtgaagcacaggatttttaaggctgtgaaactactctgctcaatactataatggcggacacctgtcattatacatttgttaaaatctataaaatgtgcaacatcaaaagtgaacataacatttttccaaaatgaaaagtttatcaaaacaacaataaatagatgcgtgtattatatatccagtaaagtcaattttggaagtaataaatagcaaaagtgtggctgaataaataaaataaataatcaactattttagcaactctctacttcttaggtagaagatgaaccaatattctttaagcagaaaaattcaatattcagtccttaaactaactagacatttctccaaactagggagaaatgaatgatgaaaacactcaggactaaaatccccttcctccctgacagagaagttctcattattgtatagggatgactttaggattacaggggacctatgcacattgactccatggaagcataaataccatttttaaataacatattttctactagatgctaaaaaaatttttttataaataatacacgtttctttcatgaattaacttccaaatttaaagataacaaaccttttgggaaggaggaaagcctctgcataatatatacaatattcaagaggataaagtttacatgaagctcctatcagaactggagacaattttgttatccactttcagaaaatctcaagtgcataccatgtagaactcactaacctgagctttatgtcagattagacttttgaaagtcataaaggcagattttctaagtaacaagaagaagagcaatagcagtaacaggaatggaatattcagagaatattccatctgaataccacatttcttaattacacaatttccacaaggttttaacaagagcagcccatcgcttaagaccagtcaagatctcgccaatcaaagctgtttattaatatttcctactgcatgaagggtagttaagtaaagagctggctgggcaggatctattttcacgcacaccgaacatcatatagaagctttaaaaattccactgcctgagccctactgcaagccaattatatcagtatctttatgaaagaggcctgagcatccaaggagttttacatcttgccatgtaattcttccgagccttagatgggaaaggccaagtgagagaaccgagccacaaaacaacaccccacagaacttcccctgggccacaaccctgagctctgcgaaatgcaatgggaagtaaatgttgagcagtgatgcgcacctgccacatgccaaggcgtttaatcttgggaaaacacccacctttcagggaggtgtcatcctttaggagactgtgtcacagagactgagtgccttatttaatgacagtcaggatttgagcccaggcctgtggacctcccctccccgacccgcccaaccgtccgatgcgtggtctgcattttgataggcttattccaactcagaattctaagattctaggacacgtgaaaattaaaagttcccatacaactaggaaatgactgcctattggttagccatagcaatgggtttaaccctattttaatggctcaatgacagcccccatcaatttaaaccaaaccaaaacaaaacaaaaccgaacctgcttctgaagaccagtcaatcgacgtccggctcgctcacttactgcactgacgcccaccaattcaccaccacctcatatcagagggccagccaataaacgaccacttcactccagtgaaatccagcaatcaaaaactaagtcacaccagacggccagccaatcaacaactgcctcactgcagtgagactgcttcagagggacagccaatcaatgacagctccattggcgtaatcacgcctcagtagctaaaggttaaccaatccctgaacgcttccgcttctgaaactcctggagcactggaagccacacttcccaagacccttagaaagctcagctctggccgggtgcggtggctcacgcctgtaatcccagcactttgggagccccaggcaggcgcttcacgaggtcaggagatggaaaccatcctggctaacacggtgaaacctgtctctaatacaaaaagagcagccgggggtggtggcacgctcctgtagtcccagctactccggaggctgaggcaggagaatcgcttgaacccgggaggcggatgttgcagtgagccgagatcgcgccactgcactccagcctaggcgacagagcgagactccgtctcagaaaaaaaaaaaaaagctcagctctgtgccggacaccgacttagcagcccggtatcctcaatgaaggaggcaccccctacagttttttgttctgaagctgagttatggccatgcactgatacaacaatggctccctcatttacacagccgggctgggctgctgccctcagagaccccaaaacaagtgggaaggaagagtgccccatcaccctgtatcctcacaggcttcggtcttttctctctttgccaacacaggttggaaaggctggctggaagcccatctggagggtcttgttggccgagagttgaagttgcatcccttggacgctgtttcttaaaacccaacaggaccatgtggtattttcagttaagagtaatttgctatggtgcaggatggatttgaacagaaagagactgcagatgacccattattctacaataaaattagacatacaaactgacaaatttccaatgtgaaaaagcctcaacagaagaaagtctgaaaaaaaatgcattccagctaattgactactgaaattttaagtcagagatggtattctgatttagtctaggcaagaccatcatagaagtctgatccaaagaacaacgcatgtttttctctctagcttagcagttcaaggaaacctaatttttggcttcattactacagctagttaagtttattactcaggtctagcccaaagagagaagggctacaaatttgatattatatagccagattacatcttgtatgtcatgtgaccactctaaaacacagcttagcaagacccccaagttatgctggaaaaacagctctcagaacctcatgagctaagctgccttttcaagtcttggatgggaatgggtttaaaaacaaataggataggtataaaaactttctcagctcaacagttttcactaacgcctaaaatacgagcaatcctactctaagaccctattttctttctaaagacaatcctatgaaccgtatcttgctgggttaacacactcctgatagtagccagtgcccctacaacattaaaaaatggtcatagagatttccaaagaggtcacggggatcaaggtgaaccaaatattacagaagaaaggagttaagggtctgagattcaagcttagctgaaccatttgtatgttctccttggatttcagtttcttctgtaaaatgggacaccgccacctgcctcggaagatacttctgatgctcaggagagacatgaatacaaagtgctttagagggcaaggtttaacatttatataggtgtgggccttactgccaccttagcccagctgcctcttcaatagcccagggtaatacctcatgaggagcttgtaaacaaagtcctgaggccggatgtgccagcattaagagagacttaagaatggcaactacagtcataatgaataccctctgaatatttatgtcatacctgtcaggaggggccatgttctacccatctctgcttcatttaactaggatttactgagttttctaagcaccaggttccttgcaga

SEQ ID NO: 3405 - DNA, 4001 bp, Homo sapiens
cagtttctccacaagtggacagagggggttatgcagcagccaactcttcctgatggcaatttgtgacccaatttcatccagtgtttcatgaccaacccccctgaatgtttatgaagcaggaaagaagctcagaatccaggcgaggcctccgggacaggaagtgggccaggcacctccacagcttcctatgcctaaagttctccatttcagcctcaagtagccgccagaagaccactaagattccgccaccttctccaatcaaaactacatctaaccaacctccagggcagaatatactgaggtaggattttccctcgtgttcacttcttcacaagcaggttaacacttgcttctcaggaaacccctgttccaaacgtcaaaaaacctccatgtctagcccaatctccaggtgaagtcaatttcttctccacgtgtccgatgactgccattctctttacgtaaaactcgcaaggcttgaatcctgttactaattcacctgcttatctatgaagcttgcaaagtgaattgagggagtgttcacacgcacagttccgttttggtaagttaaagcggcccaggttaatttcattttcagtcacttttgagacttgataactacatctaaaacagaggcatgaaaaacaccctgaatcactttcattcctacacaaaatcccttccgagaagcggggactgcgcctgggccaggaagggactcccctacctgtaggtcccagcaagccacgcccaccggcctctcagggttgtttctttctgggtcgagggacggagctggcccttgcgatattttaggccccctcctgcccacactggggcctgctcatcccattatgcagatgcaaacttggcagaagcagccttaaacctgttggcaaaataaacaaagccaaataaagaggaatctgccaacctgaattgtgtgaagtggccaaggccgactccacgcacgctcggctttgtccctgaagctgttacaatactagtttaagtcaggtgcctggggtccaccagccaatgacccctagcatccaccgcagaccttcacagagatccccattgtctacaaattaaagcgttttgcaaattaaacccctccacacaatgccaagctaactgtgctcataaggcagttaccctccatgccttaaaactcacatatcaaatttttccaaaagcactcggtgattaaatcgccctgaaaaaaaccgagagagccgagcgattgtgagaaactttggttcattcaggtggctgttagagtcctgtaaatctggggcagggcgcagagcctgaagccgggcacaaaagctcccttcgccgaagcgaggacctcctttatgcaatgtgacagcagctttgtgcgcgaacataaatagttgtaataaacacggttaagttctcccggccgatcgcggcctcccccgtccctgcgccggggccctgcgatccgcggctattcttccccggcacacgcgccctggcgaccctggccaccgcacggtcccacgctagccccgagctccgtgccggccgcccgcctgcaggccaggcgcagcctgcgcacccgggggtctccagtccccgggccccgcagccgggccccctgccctgatcctcgcccgcgcccttggctggcgtccccgcccctgggccggcccccgatggtgggggttagggatgggaaggcgggcaggaaggtgcagagccgggaggtgcccggcagtccgcggtcgggggcgcccaggccgcggcagggccgagagcaccggaggggcgcggaggggacccgctctcctggccccttcccgggcgcaccccggcccgcgagccccgccgcgctcccaactccgcccaacggccccaagtttgtggcccccgccccacgcccgcctagccgcgcttacctcgccgtgggccgcccgcggagccggagggcagcggcgcgggtcccggggcggtggccgcgctgcgcccgcccaggcgccgctctttgtctgcgccgctccctcctcccgccgccgggcggacgctgccggcccgggcggaccctgccggcccgggcgccgcgagcctcccggccgccaagccctcccctccgcccgccgcccgctcggccgcgcggctccggcctgacgatccccgcggcagcggcggcggcggcggcggcggcggcggcgaccctcccccggcgcgcagcgcccgcctcctccgcgctcttcctcctcctcccgcgctcctccccggccgcgccgtgacgccgcccaggggccggcccaggcccgggcgcgcggggcggggacccgagacccacctggggcgccccccgtcgtcgccaggctccgcgcccgggtcccggtacgggcgccgggatagcgcggggctgcgggacgctccgctctggaggcgcagcacgggccgggcgccgggggcaggaaagggtccccacgcccgaaattgcgtgcgggcggtggggggcagggtaggtgggtggggaggagagtgaaaacacagacggcaacttccagcctgggatgactgccgggtgggctttgcgtcctcttttttgtttgttcgttgttcttatcacgaagctctagttgctgggcagccgcccccctcccggaagcattcccacggcactcagctaagcaggcctgttgtccatcagaaaagtgacttaaataaaaatgtcacttcctccctgtaattgcttgtgggcatttttatttatttgctttgcatctatttactttcccaaccagacacatttttagtccatcatccctgtccgaggcacttcctaaaagaagaagaaactcgacctctgttgcctcccaggcatccaggccagccccagcctgtggaatcctggttgcacacccgtgggggcagaacccgaagaggagctgcccgaatgtgcccctagaaggagtgtcgctaatgatgggaccgttcagctcacccagcctcgagttgtggctagcctataaacaaacttggaagatgaaaacccaagagcaaggggaaagacacaagtttccctttcacagacacatgcatccggatgtcttttctcctccccatatggtttcccaaaggaaatcctaatattcaaatgattctgatttcctggcaggatagcctgcatccatgttaatgagattctttcttaggctcctggtctctgcttactattaaggcaataataatttacccaaggttacaaggctgtattatttgattcactcatctcctgcttccttccagaagggaagtacccaaggataggtaactagagtcagcgtagctttgaagtcagacaggtgagtgtttgactgttgacttcctgaactgtgtaacgttgcacaggtggtcctcagcctttctaaaatctgtcatatggggagataatatttacttacctcctatgtgaagtaccctggcagtaggtagccctcaatagctcagtaagtggaaggaagcacagtacactgagcaggaatcaggtacaagctcagggaatcagaacagcctcatttttccttgttttgaccttgtgaaagaagctacttcagttcatccttttgtgcaagttttgtgttactaatatctagctttacaataagaaaagaagaattctagtcatcagtctgcccaattttagattaatttactcaaaataagtatagcaatattgacccagtttgtagcttgtttgctttgtaaactttcactgaatcgtggttcttgcatgcctcttctttctctgattctttagaagtcaccgatgtcattctctatctaaatccagtggccctttatcaatctttatcctgtggagttttctgaaatatgtggcatttctgctatttcctgaaacaccatcatcttttcattcatcaaacacagccagttctgattctcttacctttctgacctgcccatctgcctcctctagagaggttgttgtcttcccaccc

SEQ ID NO: 3406 - DNA, 4001 bp, Homo sapiens
acaatctattgctatgattaaactaaacggtaacattcacgatatattaaaaagccaacaaatagttatgaaggtatgacatcaaagacacattggaaactcgatggatctaaattttccaaatatctctttttctctttatcaaattgtttaaaacttaccaaccttgccttaaggggagagattttgttgttttgtcctacgataatgaatgtaattatttgttctatctttacatggacttttctaaacttccagtggtcttccactccttactgtactgaggacatgtaaaagcctttaaatgggcctattagctatagttgctcaaattatcagactatgctataaatcagcagcaattgcaacatttttacggtttttattttgtacagacaccgaactttaagaaatggtattggaaaatctaacatgaggaggagtacaggggaaagagtagaaggttgttattccagttctagtgactcacagcctagaagtatttcagaaaattggttccaccctcacttccccctcctctccaccttcaaaatgaaataatcccaaatcgtcaacacactctcaatggctttttatttagcaatctaaaataaagtggcaaagtggaggggatacgggattcatccaatcagcccttctctacccacattcccacaccaaaaaatggggatgtggggtgtaatccctgttcactgctgccatctccgtaagaatatggaacactcaagttttcctacccacctagaatttcgcccacccaccaccctccctttcctatgggccccatcatgggggcgggggcgccgaggaggggacagctcccggctcccagcggcgcccccaccccgtgcgaggcccagcgcccgatcccgccgccgggagccgggaaatggcttctctgccttcggccggccggcgaaccacagggagaggcgcccgggactccgcattaggccgcggcgcatccaggcgaccccgggccgggcctcgggcggcgacgccgagatttctacacccggcgcctcctgccgcccccaccccacggcctcccttgcccttcatccctcccgggcccgcccgcctccgccgcggcctccccggcccgtgcgcaccttcttgatgttgtagaggcgggtgagcatgccgacgccccggtcgttgaggatggtgagcttctccgccagcttctgctgactgggctgcagcactgagcgcgacatggtggtgctggtgccgccgccgccgccggccgcctcgcgcccagtcacgggcccgcggccttcgcagcagcctctctcgggcctcctcccctcccgcccgcgacctccgccttaggagagcgcgcccatggccctcgcgccccaatcccgcgccggcgacagagcgagccgcggcggactcctcggagccccttctcccgcagcagcccgcgccccggcagcctcctgccttccgcccgccgcccttccgcccccacccccggcgctctccgccccagcccccaacgagccgccttccccggctgctccactaggtgtggcggcggcggcggcggcggcggcgtctccggcggctgagaacgaggccgcttcccgcagccccggacgggccctcggtcacctgatcggcagcgccggcgcccccgcgaggccggacggggaactgcggccgacgggccctcggcatggcctcgccgccgccgctctggccctggccctggcccggaccgcccactacgcctgatgccgggatgggagtcccaagcggggactgagtggggtcgcgttgtgtgctctttccacttcgccccacaccccactccttcaagttcccaaaagttgcttttccgcaccacccttctaaagaaaccggcagaaactctgctgggaggcggggtgttttccaggcgagtttcgcttaagagtgggctggtggctccaagcgctttttcctcccactgcttgacaggcgctcgccgcagaacacagcagatgttgtgctccgcgaggtggggatcgcctctgccagcctccccagcccatcctcagtctccccgcctggaaccagtttgtgagagaggaggtcggaagtgagggtaactcaagtccttgagataatcacaatctagactttgtcggcgaggagcacccatccggaggagacgcagtaggtcctggcatgtggaaggcaaaaaataaatgtttgttcaatgcctaaaggaaccgctcccatttttttacagcctccaccctaaatcccacttcttcttggaaacattcttctttgccatctcatttttcctgatcaatttcttcttagcgacactccaaggctactcccttgtcaaatgtattagacatgattccaaaagtgaactaactgaggacttacgtaattgaggtgagaaacttcagccaagaggactcaggcctctaatatttttggctttgccttttctcgatatgttaattttttatattatattcattaattttaagtcagtaacaaaatgtcccgccacattcaataagacattctaagagtaataagccatcactggatttatcaaaactctttaagaaaaggaaattgtaatgaatagctttaaaatattttttaaagctactatatctactattcgtaaagaaatcttcattttaatattccaacaagaaagaaggagtggactgaatggatttaatctaaggggcatttaaaagagtcctgttcccaccaaaagaagtcataatcatacctgccagtgtgcctgaaattctatatacaaagctgcagtaccttgaatgaatgctttgtacctagagagtcttaagaatacaaacacttcagagagatcatctgtcgagctattactagtcattaactggtcaaggaatttaatttatctggttacttctcagcctgatagttaacattttaatttagaggaggcaaggttgtggggcctggaatagtaagggcagacctgagaaggggaggctgcgaggaggggtttggggtagccagataagaaaatttaaaaatgttgaacattggggaaatatgtgctcctttagggagactacaaataactaagtctagacgcagaattacagagtgctaccaataaaagattgtctcattttctagtttttaaaaactgctgtatagggagaacaagaaaatggcactgtattataaatttgaacacaactcttactccccaagaaaaactatcatgttgccatataaacttgaatactagtagctgcttataactcaggaagtacccaataggagaacgctgtagatagtagtctcattattcaatatttattgtcactaattcatagacatactggccctagactgtaatgaaatgtatatatttgcgtaaaagagattagatgtagatgaattacaatttttgtctttctctacattttgcattaaaaagaacaagtgtacgggaatttttcttaaactttttaacttttttgtagagacagggtctccctatgttgtccaggctggtcttcaactgctaggctcaagctccatcacacctgtaacccccacactttgggaggccaaggcaagaggattgtttgagtcctgaagttcaagacaagccttggcaacatagggagacccccatatctacaaaaatttaaaaattagctgggggtggtggcgtgcctgtggtcccaactactctggaggttgaggtgggaggatcacttgagcccggaaggcagaggctgcagtgagctgtgatcacacccctgtactccagtctgagtgacagagcaagaccctgtcttaaaaagaaagaaagaaagagagagagaggaaggaaggaaggaaggaagcaagcaagcaaaggagggagggagggaaggaggaggagagggaggaggggaagggaggggagaaaggaaagaaagaaggaagggagggagagaggaaggaaaggaaggaag

SEQ ID NO: 3407 - DNA, 4001 bp, Homo sapiens
ctagtgaaaacaatgaggaacagacaccttaagaaatgtaacgagagccaaagacaaaacgggaatgttctctctttgccagaccaccttcatctgtacacctgcacatagccctgttcctacaagaaggcataggaaccgcgtgtgggtcccatttctttttcaatatttaagaacttgagaagtgggacacatgctggaatgaacacaggaagctcagtttctagttgtagctttgccaccatcttactgggtgctcttggacaatcacttctcttccttgtgccccaagttttcttctgtgaaaggataaactttgatgaatagtttgaaatctgttttagcagcaagtcccttattttaagcaaagaattgcaaagagcactgagctctaatacacaaaacatatctaagcctaatgtgttctgatggaaaaaaatggagctgacaaagaggcaggatgttacccaccttaggactccctggaaaacagtcaaatattttgaggccttttgacactggcttctcacaattctgagactagagacaaggaaaaggtagtgaaggctgtcaccatgtttctgggctggtgacagagcagctgaattcaggagcaagccaggctcctgagtgagtcatggggttcacatgcggagctaacaggctaacagccacttcttgccaatccgtgcagcgggctgggctgtcaggtctagagggcaggaatcagctgggatttgctactggttgcaagaggctgaactgcaggcactgaggagcagagctggtagcttgaaggacagaaagacaatttttcactgggctcttaagcagaactcccgggtggcaacagagaatagctcacgggccagccggtgcaggtgggataagaggttcctgtccaggctggcggcatacatgaagctcactcttcctatttaaatcccagagaatatctggagagttttaaagagccctgaggcaggcaaaagagaacatgtggattttgtataccgatctagctcagtgtcaaagtttgcctttttcagtagtacattaacttgggttccaactcagaagacaagtcagaacattgaacatttctccagatactcaatgtgaaaagaatccaaatagaaacagtttcaatttcaaaatattttttgatacatacacattcctgaggatgaatgagcctgtgtgtgtgtgtgtgtgtgtgtgtgtgtgtgtgtgtgtgtgtttggggagagagtgtaggtaggaggggacgagagaccataaacatcaacatccacacactagaaatccataaaccacagaaagaatcagagacaaaaagtgggttctccctgcagtgtaccagttcatgaaaaagtagccttcatagttgtctgctaaactttctagatcagcctaatagttttttggttggttgtatctctttaaaaaacaaaaacaaaacaaatgaaaaaccaaacctgacctccctgcagaggcaaatgaggattagccattcagtatctccttatcatctgcatcctggtatttgttctcagagacaaggggtcctctacccctaattccagtccactttagggccctatagttacttagaacaaacgcatacttgctgtgacagccgaaagagcctggagaaatatgtaaacatcatcatctcactttagaaggaaaacaagctgtataaataagaaaaactgttacaagagtttaaaaaaaaaatcccaacagtcttacttgtagttagctcttcagtcaacacatatcacagtcctggagacagacacaggaactacaactctctccagctaaaaatttcctcccgcggttggttatcctctgtttatttttgaagcattcaaaggccacgctaacagaacagactcggttttcctgaacatccacagcggctgggaagtcctgccgtgaatgcggagcaagtttgcggagacttgctccctgggctgcggctccgtagttgcttcgagcttgtaaatacaagctccgtggacaaagtcccaaatgacatcactggcagctgcttattgttgagtctttattaactgactgtcaaaaagaaaggagggggtggggaggaagagtatctcttctgcagcaaaatcggcatcttggagtggattccagttatacatgcgtaaataatcccattgattcacatttttgagaggatggcttctttcaggtctgaaaaagacagagaatcgcctccaccagcttacactggaatagctggagacctggaggaaaagtttgaagtgccagcacagccctaccaaattgtttacccacctgtttcgagtcaacttcagagcctgatgattcatgaatatatgaatactggttgtgtcttacattgcttaattacttttactgtgatatatacacctggccgacatttttcctagatagattgtcttgggtgcaactccttttagatacattctagtgtctcagcttggagtagaaggaagggatccttgaaatcacagcaacattttgtgtgcatttgcaaatatgcaatttttcttttcctgagaagagtgctggaggctttcttctgattcttaaaattttaaccacccacctgcaccacccccgacactccaaaaaacaaataaataagaatctgtgccaagtctttctaataatctcacagaacactgtaaatcccactcacaactatcaaaataaaagtgggccttttctcccctattttccactctctcatggaatctctcttctgtccgttggttcttatagtttttacagttatctcccctccaacccctagcccccacctagagaaattccacagatccaacacctagtctctgccacgaagcgcgaacactccagcccactgttttccttccttcctctggactgctataacgatgcttactatttatatttacttgctgctttttatatactgactagtatttttagtttgttttttagccatctgtgttctgtctccccaactcagtttgaaaggtctttgagggctgccttgtaagtgttatttgtttatacctaaatcacttgccatagtgaatcctaaacagaaatgtgggaggtggggggtgagcattgagggtggaggcaggaacaaggttagctgattctgtggcatggagtgtatgtttagattaagctctctccctggccttggaaaacaatgacctcacatctcactacccccagcagatgctcattgcatgtctgaaaattatttcctcaaagagtagcaattggttattgatttggtagggtcccaagaccccaatatatgctactttcatgtgggaaatagttaaagacaacacaaattgtgtatgtcactgatgggtcttcaatgagccccatgttaagagaaagtaaattagatgtacctaaagattttacaagtacagacccttagacccagcaattccacttttccatagtgatcccacaaatacactcacaaaagagcacaaagatataagcacaagttctttgcagcattatttgtaagccaataaaagggagactaatattcatcaatacaagaaaacaaaaatggaggtaactgtgaatatactgatgtggacagaagtaggttgttgcttactgagtggataaagcaaggtgcagcgtagaaggtggcatattgaacacgaaaaagaactttgcatatgatgagaggaattatataaatgattaacagtggttaccctcgggaaaaaaggtggaaagaactttcacatttgtatgctttgtgtgtggtttgactttttttcaatgatcatgtttcatttttgttattagaaataataataaaaagacttggtggtacattttcaaaataagcctcaaaaagaaaaattgctatttcttcactaaatgtctgacctatagtaggtgctcaagaaagaggtattgattgaatgaatgttgatgaagtttctcccaggatg

SEQ ID NO: 3408 - DNA, 4001 bp, Homo sapiens
ggctaaatataaatattccttacaaaactatcacacatcaaagagtgtgcatggtagtttgataaaagtcatcatttagctacattaaaatcccgtagttttatcaggcaatgtgtggaagagtaaaactttcattcagttctcaacgagaaacctgagcacaattcagtgctcagctgtctttatagtgagcaaataaaaggccaggagtgctaaagagggtcaatggtaacacaaagagaggtggcagccctcagtctacaccagagataactataaaacacagtgagtagtattacaaagtttatatataatggaatggagaccaattaattttaattggaggctaggaaaggaatctggtaaggttatcctcagctctgaatacaatgcccagctctacatgtgggggtgaggctaacatgttgaaactggaaaaatgtaatgatttaacacaacaaatcacactccaagccctgcagaggaacatgtaaaagaaattcccagatctcgtcttacactcacattcaaatacttagccaaatgacatcttgacatgtcaatgaagagcttgtgaaacactcaaccactacaataagacatacctgaataaaatcttatttttgccacagatatccaatttcatgtcttaactctccattttgtagttttaacataattctgcattaagttggataaaattacctcttctccactgctatcatcttcttcatcttctgacatttcctcatcttcactatcttcttctacctcctttggaggaggagccattttcttggggtcaccttgatttttacctgcctaaaatggacacaaatagatcattacacctccacctcgacatttcaggccattcatattttgccattagtgttcatacgccatcatctccgtcctcagatccatttctcatagtgccaaacaccacaactaacatagaaactactcctgatggcaatgcaagagggactactctcaaccgcccacatttttcctcccaggctttaccaacagaaaacctgccctaaggtaaaaagtcaacctgaggaaatgatttctcctcccgttaccttagttaagcacaaccgtgttttaatactacaaatcccggtactttattctaccaccctcatctgaatccaaattaacggtgaagatcattaaggcacttaaaaaaatgactaccttgattttctcatgaagcttatgcctttcccagcgagacaaccccgccccttaaagaggcggcgcggccacgtgggggtacctggtaggccaccacgtgcccgaaacacagcgcaaaaggcacgcggcagagccaccttccggggcccaccacgtgtcggcttgccaggccggggcggagacatccgagcgcagccgggactccgactagggccgataccgccatttcccggcccaaggcacccggtccctctggagattccaggacccacgcggcgcggcccacgtggcaggccgcgctcccgggcacgtgcgtcaggagtcgagtcccagctcgtacgcgtcgcaaaagtttggtctcatctctccaccccgaggcccagcgccccctccccgcgctcagtgactctgtctttcccgccgcgttcgccgcccccagcacctgcagaagctcttcacctcgccaccaagtagccagaagccgcgagacctccccactaatcgcgcgagacttcccgcagcatggcgccctagaacgcgcccgggactgcgcgcaggccctcctccccgcggcgccgcgctcgcccctcggaaagcaggcctacacgtctgcgctcgcgctcaaggccgtttaccttcgcgagcttcaccatgatggcggcggagtgtgaagcggacaagtggcgcagatgagtccagaagaagccaagcgacggcgatggcggccgcgggtgctgaagatcccggagcacgtacacccgaaggccagcgagagctcgagactgaggcgaaagactgagcctgcccagtaatcgcctgtggaaaggcgacgacggcgccctcgtgactccgcgccgaccaaccaaagctcgcggccgtccccatgagccaatcgcgagcctctaaccgtgaacggcgcggggcggggagtaggcgggccgaggcggccacgggagggggaggggctggcaacggcgccgtgggggcggggctcgctttgtgcaaggtccgcgctgattgggccgtgggcgcgcgggtcccggcctgcgtcgtgggactggcgtttttggcgccggctgtgaggggagcgcgggggtggtggaatcgggcggtctccggttcgccaatgtggctgggtccgtaggcttgggcagccttggagttcctcagagaccccgcgctcggtcccggcacgcactcacgccgcggctcctggtggccctggagcgaggagtccgccagcaccggaagttcagggaccgcggagttcccgttggcccttttggaggcacagcttatccctgcttgcccgcgagcatggggccggaggcaccccccggctgcaggcagtctcctgagagctgttaataaaggcagtcgcgggtctgtgcgaggttttctgtgagaaatgcacgaacctcccctaccccacagaacctcaagcgggagatatttctcgacatggggaacggcctcggagaagtaactttctggcctcacagggcagggagaggggcctgggagggccgaccgcagagccgggcctttgaccgcccacaggttccctggttattatttgggtcgaatgcgccaattaaggtggtggctgcgaagtcagtgtcaccagatggcccgggagcaggtcgagagccaccggcagggttccccggcggcagggcgaaggaggccgccagtgacttccacggttagctttgtgggtgggtctcactcgatgccgggcttagcaaaccagagcatttccctccgtccagggcctgccggggatccatcccatccataggtccagctatggatccatccatacctcattgttcctacagaaccaggatatctgcagctacggctgtacttgttaaaaatcacctcaggccgggcgcggtggctcagatccgcaatcccagcattttgggaggccgaggcgcatgaaccggggaggcggaggttgcagtgagccgagatcgcccactgcactccagcctgggcgacagagcgagactccgtctcagaaagaaaagcatttgttaaggccgggtgcgatggctcatgcctgtaatcccagtactttgggaggctgatgcaggaggatcgcttgagtccaggaacttgagaccggcctgggtaatataatgcgaccctgtctccacacaaaaaataattagcgggcatggtggcgctcgcctggagtcccagctactcgggaggctgaggtgagaggatcgcttgagcccaggaggcggaggttgcagtgagccgagatcgcgtcattgaactccagcctgaggaacaagagcgaaaccccatctcaaaaaaaaaaaaaagaaagaaaataaaattatttgttaaatgaatgaagtatttaggtagaagcagcagcagggagagccggcatggctcaagtggcgttgctttggagttggtctggggcagcaaaatagcaatatctaacacttcataatgctgattcagtgccaggcgctcttccagctctttacatattaattaacttactcttcaaaataacctttccaaaaagttaccactgttttacagaaactgggacatagaggtaaattaacttgtccagggtcgcatagctagcagtggaggcgtaggatataagtgaagacactgctgtgtcatcccagtttcttttttttgagacagaatctcactctgtcacccaggctggagtgcagtggcaggatcatggctcactgcagccttgacatccccagctatatcaatcctccctcctcagcctcccaaaggtgagc

SEQ ID NO: 3409 - DNA, 4001 bp, Homo sapiens
tgggtagatgctgcagtgagcccagatcatgccactgcactccagcctgagcaagagaggaagatttttgtcttaaacaaacaaacaaacaaacaaacaaaaagcctcaagcaattctcacacctcagccacccaagtagctgggaccacaggcgcacatcaccggcccagctaatttttttttttttttttttttttttttgagaccgagtcttgctctgtcgcccaggctgaagtgcagtggcacgatatcggctctttgcaagctccgcctcctgggttcacaccattctcctgcctcagccccctgagtagctgggactacaggagcccgccaccacgcccagctaatgttttgtatttttagtagaggcgggttttttccatgttgcccaggctggtctccaactcctgagctcaggtgatccacccgcctcagcctcccaaagtgatgggattacaggcgtgagccaccgcccctggccccaaatgaatctttaactcaatgcaatcgtaattaaaaatccttcatatgtttactttttaatttgatgaatatattctcaagttaatttggaaaaatatcaaagaataaaacagttttgaaaaactaataaaagaggactttaaagctacaataacattaaaaatacatcataattatgctgtgacagataattagatcaaaggaacattaatagagacaaagaaatatacgtgtatatgaaaatcttacattgggtaaactatactttgaaatcttggtaaaaatgaaacatttactaaatgctatcagaactaataatctagatttctacatatcatttataaaaattatgaaagattaaatacttaaaaatatttaaagaagacgaaagaccaatagccaataaacatatgacaaaaggaagtcaaaaatctgtaacttaagtggcattccttttttaatcttttagattgccattatgttaaaaaaaaaatctgtgaatgtgtctgcattcattgagatgtatgaagcatttggaaatttctacactaaaaaaagagaaaaaatgtagaggaaaaagtagatctgaatacttaaacatttcaaaacttctatacataaaaaaaatcacaaagtaaaaaggcaaacagaaagggtaaatgtatttgcacaaaacatgacaaatattcttaatatattcaaaattcatatataatgctacaaaaattggtaagactccaatggataagtggatagagaactctaaatacaacaaagaaacaaattaaaatgaaatgcaattatctacatgccaatttagcaaacactagggtgggggaacacccaatgggataatgtggtgaagcaggcatgctcacttgctgacaatgaggaaaggctgacacaatcttactaaggagcaatttgacatattaagaagaaagaaccttaaaaaaagccaacagtattattaaaatttgggaaagtcttcaattctagcctcacatttgacagctgcattacaggaaaagtcacataccattttgaacaccggtttcttcaatgtaaaatatcaatatcagtcactaattcatagagttgtaatatttaaaagagaaacaaagcctgtaaaaacgtctgaaatactgcaaagcacagggttgcccaatggtctgtgaactttaggaagttttcgaagatcttcaaactctgactgaacatgtgtgaatgtttgtgaaaagatctacacagctttaagcagactctcaaaggggccctgatccaaaagaaaactgaaaaccactacaggcatggaaaataagagaaggaattttcttcccagtgcccaactgttgcctgacacactataggcccaaattaggaattcactataaaaatccagatagtatttaagatgatattcaacttaccctgttaatttctaagcccctcagagtagtatttagtgatttctgaggagattaactcattctctgatatagctgtaactggaacctgaaattaggaaaacagtaagtcaatcaattggatctacttggatcaatcacatgaaattaatgcagtctactttggaaaatgggtggggggagcagtaaataaacttaatatatttaaagtactattctgaattcattaagatatgcataattaatatataaactacactgggacatttctcttgaagcaaacaaaaacaaaattgtatatattttaataaaatggaatatagataattaacattctacaaaatacttcttttttatcatttgaaaaataatagctttttaaaaaattgacatttagtaactatatttatggggtacggtgatatttcaatacatatatagaatgtttaataatcaaatcagggtaatggcatatcaatcaccttaaacattcatcatctttgtgttaggaacattcaaaatcctctcttctagatatttaaagatacaaactaaattcttgttaatgatagtcaccctacattgctacagaacaccagaacttattcttatctaacctataattttgtatctgttatccaacctctcccaatacctgcctcccgattatccttcctgcctttattaaccacaattatctctctacttatacgtgctcaaatttttttagctcccacaatatgagtgaaaatgtgctatatttgtctttctgtgtctgacttatttaacttaatatacagtcctccaggttcatccacattgctccaaatgacaggatttcattcttctttatggctgaatagtattccattctgtatatatatcatattttctttatccattcatctgttgatagatatttaggttgattccgtatcttggttactgtgatatgctgcaataaatatgggaatatagatatctcttcgacatactgttatcctttatgttgggtaaatacctagtagtgggattgctgaaacacatggcagttatatttttagttttgaggagtatccacactggtttgcataatggtggttctaatttatattcctacaaatagtgtatgagtgccctttcctccacatccttgccagcatttattttttgtcttgttgataatagccattctgaggtgaaataatcctcattatggttttgattttcatttccctaatgattactgaagtttaatattttttccatatatttgttggccttttgcatattccttttgagaaatgtctagtcagatcattagcctatttattaactgaattattggctttttgctgttgagtttcttacttatttttgatattaatctcttatcagaagaatagtttgcaaatattttctcccattcttcaggtcgtctctttaccctgttgattgttttctctgctgtgaggttttttagcttgatataataccatttgtctattgttgcttttgttgcacctgtgcatttgaagtcttagccaggaaatctttgcccagataaatatcctgaagcatttcagattttacatttaagtcttaaaccatttggagttgatttttgtatacgatgagagatgagggtctagtttcattcttctgcatatccagttttcccagccccatttattgaagaggcttgtcttttcccgaatgtatgttcttggtgcctctgttaaaaatcagttggctataaatatgtagatttatttctgggttctcttctgctccattggtctatgtgtctgtttttatgccagtgcatgctgtttgggttactactgctttgcagtatattttgaagtcagataatgtgatgcctccaaggtcctctcccacccctcaggaattctttgcctatttggggtcgtctgtggtttcatacaaattttaggatctttttttctatctttgtgaagaatgtcattggtattttgatagggcttgtgttgaatctgtacattgctttgggtagtatggtcattttgacaatattagctctttgttgatccatgaacatgaaa

SEQ ID NO: 3410 - DNA, 4001 bp, Homo sapiens
aaataatttaaaaaatgattacagagttaggacaagacaatgagtaccatcctaaactgctaatggtaatgaaacctagaggacgctgggtctacagcattaggaatccattcaaagagtatatacataagattgacctataaggatgctcaatgaagtatgatgtaacaccaaaaatgcaaatagaaacccttaaatgtccaacaacggaggaatagttaaacaaaattaaggcatatccatattatggaatactaagtactcagaaaaacacaaaaatattaaaatactttatagtgaaatttaaataaaacaggagaatatgaaatatcaagatatttttcgatcttgatttgataactgaagagtaaggaagaaacaagttacaaaacaaggcaaagcagacaacccaatttaaaaatgggcaaaagatgtaaacacctctcgcaaatgaaattaacgcagatagcaaataagtatatgaaaagatgaacactgtatatcatgagatattccaaagttgaaacaagataccactacgcagctatcagaatggatagcaatccaaagtaaccgacagccccgcatgctggcgagcacgcagagcaacaaggagagccttcacttctggtgggagtcaaatggcacagtcactctggaagatggcttggcagcttcttagaaaactagtcttactacatgagtaatcgctcttccaggtattacccaaatgatataaaaatgtatttccaaaaagaaatctgcatgtacacgattacagcagctttattcataattgccaaaaacttgaagcaaccaagatgcccttcaattgctgaatgaattgaagtacatccatgcaatgagatattactcagtgattaaaaagaaatgagttaccaagccacgaagacataagtgaatcttacatagatatttccaagtattcaaggcgtctgaaaaggcaatatattgtatgattctaattatatgacattccagaaaaggcaactatggaaatgttaatgagatctgtggttgtcaggggttggagaaaaagaagggtttaataggtaaagcagaggggaattttttaaggcagtgaagctactctgtacgaacctataatggtggagacatgctattacacacgtgtcaaaacctatagaaccttatagcacaaagaaaaaatccatagaaccttatagcacaaagaatgcgctcaatgtatgcacattttaaaaaacgcattaggtagaaggatcccaagatgtaaggcagaatgtgacaaagcaatccaactgtgttacaaatgtatgaaacgatttcactgaagaaggtgggggcaaaatgctaagaaatgagagtagtcagtcagagtaaaggcaaaaggaagcggacacaagcactgaactccgtgtctgctcaacatggcatcacccaagcacccagcagggcccgacctttaaacggctcttgacagggctgctacgtgaattatctaatgacaagcgcgtgtgcccccggcctgccacctgcacacgggcctcccgcatcagggcagcctcggggccctgatcacctccgcgctccagcgttttgcttaaagctgagataaaatggcctggagaagctcgtggccccctgaggtctgtccacgaccaaagaccaaacaattccggaggcaggaggggtcccccaaacccacccggagagcgacctgggagccgccgccagaggccgggggagatgtggaactgctccccaccccgccaccccgccaccctgccaccccgccaccctgccaccccgccgcccgctcaccacgcgctgggcgcccgccgccacgacccgggcggacgcggacgtcgctgccagcttcaggagccgcaaggccatggctacccggtcagctcaggatcaaggacccaaggggacgcggtcgcgacggggccctctctcgcggccggcgcgctgccgtgacgtcacggccggggtgcccgcggcgcctgtcgggaaccttccagggggcggggccgcgccgaggccctcgggggcttccgcggagacagccagtgcgctgccagggtcctgcgggttggggcgagggccgagaggtgggagttggaggtgaacgtgggggcagcatgctggctgcccggcccctgcctgggttctgagttgctgcggtgtcgcgggagctgaggccgcccagggcgtggagcgacttctgcgtctcgtcccagggtcctgtgctccccgcagaatcccccaggcgcggtgtggacgtcaaagcgacctcctagagaacattcctagctctcagaacgttctcgctggggagggaaagtggaaaaagagggggcgaggagcggagggacggggtgggacccctgtcgcggggcgcctgtcagggagagggacctggcaaggccggcctgggtcgcctccggagctgaaggctaagtggtctcatccaggggacctgctgtgaacacattgaatagcatagaaaacaaaagcacacgctccaagtccatctctttttttttttttttttttttttttttttttttttttttttgaggcagagtcccgctctgtcgcccaggctggagtgcggtggcgccatcgcgctcactgcaagctccgcctccctggttcacgccattctcctgcctcagcctcccgagtagctgggactacaggcgcccgccgccacacccggctaattttttgtatttttagtagagacggggtttcaccatgttagccaggatggtctcgatctcctgacctcgtgatccacccgcctcggcctcccaaagtgctaggattacaggcgtgagccaccgcgccggcaagtccatctcttaaaatgtgctcccgtcaggacctgggctctgggctccacgaaggagccttgcatgtgaggtttccttccaagtatgcctgctgttgggaagggtttttataatcttttgtgttccccaggctttttgttcttaaccccttaaatattctttaactttgttttcaacttttcagaaatgatcatgcgattgtaaaacagtgggaatgcagctgtgtaaactacggccggttctatggatgtttctataattgaagaattgctttttgtcaaaaatacggattcccggtccccaacgcaggagggtctggtttttagatcctggagggcacctgaaatccatttaacaagctttagggttcatgtctgctgttttttgccttgtttcctttgcattttttttttttttttttttttgtgccttccaatggatacagtacatttttttagaattccatcttgatttactgataatgtcttgggaaatatcattatgtatagttttcgtagtggttcctctaggtatcacagcacgcagacgtaacttctcacaacctgtttgcgtggatgttttgttgtacctgagcgagttagaaaaacaccacctttgagacgaattaagagtcctttattagctggcgaccgagagacggctaacgctcaaaattctctcagccccgaggaaggggcttgattaacttttataccttggtttaggaaggggggggggtctagttaaaacaattttacagaagtaaagtagtcaaaaagttaaaagggtaaatggttacaggaaagtaaacagttcaaggtgcaggggctttaagactattacaagatgatagacccggggctttgggcgttatcaatcggacaaattcctgggaactgcggatgtagcttgccacagtatcttaccagttaattgcattcttggatgtggtgggagtcagcctgcacaagttaagtccttgagaaaggggctgccagtgaaagagccaagatggagtctgtctggctctcttagctaagggagagtcaattcaggtggaaacagggctaggtgattaaaggaaaagggagagtctgaaaacagttagtaaaaaccaggttgggcattacagtttta

SEQ ID NO: 3411 - DNA, 4001 bp, Homo sapiens
ttttttttttgagacagagtctcgctctgttgcccaggctggagtgcaatggcgaaatctaggctcactgcaacctctgcgtcccgggttcaagcgattctcctgcctcctgactagctgggattacaggcacaagccaccacgcccggctaatttttgtatttttaatagagacggggtttcaccaagttggtcaggctggtctcaaactcctgacctcgtgatccacccgccttggcctcccaaagtgctgggattacaggcgtgagccgccacgtccggccctgaacgccagactcttacagcgaattgcctactttctatctccacctgcatgtcactgctaacaaaatatgtataaaatgcagctcctggtgtaggccctctccctagtactcctccaaacctggtcctgtctgtcttaatctcaataaaaggtaccatcatcacccaactgctcaagctaaaagtacgaatcagccttgattcctccgttccatcactcaatccatcggcaaatcctgtcagtccctttctaaatcaccctcttctatttctagtaccaccacactagtctaagccacctatcttgcagccctgcctaaccggcatcgaaagaaagataccggccttgggtaaacctcgacactagagtcacactaccatatccaacaacaatggccaatctaaccccagaattccacagaggtcatatttcaacccagcaaaagatgaaatattctaaaataaaggactataggctttcaccaaatggctctgtagaacagacaaggaaacgtgggtcagaaagctgtgactgtgcctaatcctagaacagtgaagacgacccagactgcattctcaactgcacatgtgagaaaacccagcacatgtctccaatgccagctgaagccattccaacacagacgactttccaggcagtaattcctatttccagctgcctgttggagatttctacctaagagtcccacacacttcaaattcatataccagcctgaactctccatccttcctcccgtattccttctcccaaagcaatgaatccacaccacccaccatcagccaagtaggaaagtcatccttcccgcatcataaatccaatcagctacattctgtctcctaaacacccttggaccgtgtcctctcctctttactggcactgcctctgacgtgagccagccctgaccaactgacaaattatctgtccccaggtcctcagaaatggctcttcccctggcaggcacccccactgcctgggctgagaaccttcgggcttctccctcctggcttgcacctcgcaaatcggctagagagggcctagtcctcgggctacccgacccataccttggctggattagtcaacacctccttcatgtactcggccacagtgatgggaccagtagactttattttgtacataagatgccgcagcatcggcgtcaccgggttttctgcaggctcattcccggagctgaagtatttccctctccaaataaaaggaatggctgcgaaaaacacaaattaaacagaccccatgataaatctgaccattcacgagcgcaagccgcctgagcgttttcaaaacagcttcgtgaacccttaacctcgccccaccgcagaccgcgggctactgtgcttagcacgcccacggggcgcagagacagcacccacttgcccacgactacgcagccctattgcgtttgtaccggacccgtttccagcccagggtaccttcaaggtggaagtgagcccccgagcccttgatcccccggtaccctcaactgaagagctgaggaaggcgccccacgcggcttccacggcaaccgggcttcgaggggactgacgcttacctgcgcgcgccacggcacacaacggccccaaacctgacctcagcagtacactcatgctgaaattcgcaggctagctcgctccgccaggagctggggcttagaccatttccgggagaagacacgccccgacaggaattacgccactggcagagcggaaataggctgagtttcacgcgcgtatgctttgcccgccatggccgcagtcaaggagcctttggagttccatgccaagcggccttggcgccccgaggaggcagtagaagatccggacgaggaggatgaggataatactagtgaagccgagaatgggttctccctggaggaagtgttacggctcggaggcaccaaggtaacggccgcgggctccggggaacgggatcaggcgtggagagttccgaaggtggctaggctgactgccccgccgcttccgcgctgcgtagagcgcgggcgtccaggaccgagatcccagcctctgaagcatgtgttcggtgcgcttcccacgccggtttccactgctgtttacaaaagaaaagtttcgaattgaacgttgtattctctggctattcttaggatgtaggcgatcttctgattttattgacgtggtataaccatcacaccatcaggtcggagagtggcttttcttggtcctgaccttgtggtatgagtgttttgaacaccagtggtattggaattttcatttctgttctcatagagtacatgcacgtgtcactgtatgccccagaagccctcttttttggagcatcctaattaagggagagaaacagtaaacaaacttttaaacacatagtacagcagacgcggggtagtgctataaaagaaaataaaacaaggaaggacgataaggagtgggagcgcgttagtattaaatgagatgatcgacaaacacatcacggaaatgtttgagcagaatcctaaaggacaggaaggagtgagctgccattccagtcagttggaacagcaaatgcaaagacaggcagaagagtgcctaacctattccatgagcagccaaaatgccagtgtagcagaggcagagtgagttaaggggagaatagtaagaaaggagggccgaggggtcagagggcaggcttttgctctgagtttgatgcaaaaccactggaagattttaagcagataaggaacagaaattaactttgtttttaatattattttgtttggagactggactttcaaggtggaggagttagttagagataggcagattcacagtttgctctgtgcttgtgtatatttaagttttgaataggtaatatatacacatgaaacacgtggtgcaaactttaaaagatacatagtgaagtcaaattgtttccacttttatctcagccataaccattgccctgataggaagcaattatttttacaactgcattttatatctttcagggatactatataccttttcaagcatatacatactcatttatgtgtatgaaatacgggtgtatcttttttacataaatggtaccatatatatacacctatctctacattttgctttcttttctgtcttagaaatccttctatatcagtgcataacgttctgtgtcattgctatggctgcataaatcattttgtctgtcttaatttatctaaccagccatttattgtgaatatttaaattattgccagtctttcactattttaaataatactacagttaataaccttaatcgtgtttttcccccacttttgtaagtgtatatgtagtataaatttgtagaaatgagccaggcacagtggctcacacccataatcccagcactttgggagtcagaggtgggaggataccttgagtccaggagtttgagaccagcctgggcaacataaggagacctcatctcaaaaaaaaattttttttttaaatagctgggcgtgtagtgccagctacaggctgaggttggaggatcacttcagcctgggaggttgaggctgcagttcagccatggtcatgccactgtactcaagcctggacaacagagcgagaccatgtctcaatcagttagttaatttttagaaatgaagctgctgggccaacagatgtgtgccttgtattaaatagttgtgattggagttgacaaattgtcctcc

SEQ ID NO: 3412 - DNA, 4001 bp, Homo sapiens
agtgcagtgggtggtgcaatgtcggctcactgcaacctccgcctcccaggttctagtgattctcctgcctcagcctaccgagtagctgggattacaggcgtgcaccaccacacccggctaattttttgtacttttagtagagactgggtttcaccatgttggtcagaatggtctcgatctctggacctcattatccgcctgcctcggccacccaaagtgttgggattacaggcgtgagccaccgtgcccagcctaagaaatatgtttttaaaagaacctttatagccacattgtttattctctctcccaactgtaaacaacccaaatgtccaataacaatagaagggattatggtatagtcacactgtagaatattatacaacaaaaaactacatgcaaaagtgtgattgaatctccacaaatatggataatgagcaaggggtgagtcagaaaaaaatacacatgcactctgaacccatttatatagattgaaatgcctaacaattcattttttaggaattcatcatagacggaaaaattaaagtaaaacaagtgagtgcttagcacaagtcaggataatggttacctcttggtggaggagatggaatcacagaaacatactgggagattctaaggcagtgtttttcaaccaatttttaactattgtccctgtaaggaacctttctagacattttattcctaatcacaccccccgccatgaaaatttaacactacatatatactgtataactgtttatatactgtggccctttggagggacacaaatcattgtagtaactaagattccgaccccggccccaccaattttcaaccccttgaaatgtaaaatcacccctgttaagactgcatgttctaagttattggcaatgctttattttctaatctaagaggtggatacaggagtgtctgcttctgttagttataattttttaaaatgtatgttttatacacccttctgtatatatacttgacaataaaaaataaaaatagaaaaattgacttaaattgtgctgaggactgaaaaatggtggttatttccgtttcagagcagctcaaataataacagtaaggaaattagttaaataaagaaaaaacatgcaaccaaaaattttaaaagctatctatgtctgaagtgaatctaaaagtctcatgaagatcaacctccactaaaggaagctggctctaagaaaatgtgctggtatcctttccctaagaaagaaataagaagataatgctacttccactacatgcaattttagtttaccgaagactatcaagtatatatcttaacttcctcgtattaaaaactgtgattatatgaatattagaacataaaaaacaaatgaactgttattacttttagtgatgctgttcttctgcctttgcgatccaaaggcaaacaaagacaattttgcgtgtggcagaagcgggaacaagcacctggatttaacaactacagtaatgatcactgaatcctccaaccacctcttcctaccccaactctaaactaggacttcattagttctcgcctgctagttctttgatctccctcccagcctcccatccttctccatttagtctctccttttctgcactccccagaatagagtctagctcttaatcctaatcaacgggcctcccaccaactccctaatttacctgacagcaatctgacctctcaggacactcaactctgcaaccggagccaaccggaaacggaggttgtcacctcgagtttctcacggcaggaaagcggagaagccgcttaacgttccgatactgggttagagattcctgaatcaggtagagactacatgagggacgctggaagtcgattattttcccagtatatgtgcatcctcaatctgactgaggtaacagatactgtagaaaagagaagggcggggaagataatatgttgtccttgcttggggacggaatccttagacaccgcacacagggcggggctgccggcatactgcagccaataagggaggctgttgttgagagcgtgttctcacccaatgagagggttggttgttgcgctgcagttggcaggctgctgcgggaggcggcggcggtaggaagccggagacagcagggtgacaggtaggcggcggtgctgtctttgggggaggcaaagtgctagatgaagaggggttttcttctccttcggccgcggaaactacagacgggagctggcgagggtggtctggaaaggcggtagccggtgtgttggtggtcccggaacctctcgtaaaccaggtagcatcttgggagggtcgtgaggaggagaaggcggcagccgaggcgggtggaagccgagccttgtggggcgacgtgggggcccacctagggcgtgggggctgcggtggcgccagcagagagggaggagaggcgggagcaaggcggtgtcgtgagggctgaagggattctttgcacaaagccccaggcgagaaaaggacacggcattgaagacagttaagagaaatcccagtgattgcttcttagggccatttcctgggggtggtgagggggagcggagaagaaaaatatttactggcggtcagattctgaacactcattattgctgtacattatgtaatctttggctgttatttacccaaacaactaggttgtccctcctgggagaggaggtcttgcaacctattaatgtgttagaacacttttttcattggcttgagtgccatttacattggcaggttctctaggcgaagggtggtagcatggaggatagagtagtcacgaagagcttatcccaattatggacttgacagatactagtttgcgatgaatgtggccaggttcatgttttgtagttcgtgaatttatttgagggtcaaggctgacaacattttttaaagatcttcagaaaagtggggaatcctttaaaaatgtacagtaggagctcagtgtaagttggaaaatgactagaaaattagttggtagatcccttcctccccccaggatattgtggaagttagggactgtgcaaataaggtggtggtctgaatatggggaaaaaaataaactttttttttttttgagacggagtttcgctgttgttgcccaggctggagtgcaatggcgcgatctcggctcacagcaaccttcgcctcccgggttcaagccattctcctgccccagcctccggagtagctgggattacaggcatgcgccaccacgcccgactaattttgtatttttagtagatacggggtttctccatgttggtcaggctggtctcgaactccggacgtcagatgatccgcccgcctcggcctcccaaagtgctgggattacaggcgtgagccaccgtgcccggcagaaaaaagtcaacttttaagtagtttgttctgtaagcaagtctgagaagctacttatgaattatttattaggtttaaaaagtggactctgaacctctcggacagaggcaaaatatatttatagatataattaactaaattatcttatttaaaaaaattttataattcattgtttccacaataaaatgtagaattaaaataggaattctattcagtatgtgttatggaagggcaaacgacataaaaacttgattttgtaggtcattgaaaaacaattttgagagcagcactggaaaatgattttaaaagaagtgttataaatttctaaaatgtaaggtgtttgaaatattgcctttagcttaggagataaggtctaatgtagtgtcagcaactctacaattttcctaaatttatttcggtactgcatgtcagaaaaactttataagatgtgatttttttctattaatggtaatttatattcctatatatgaacctaaatcaaaatttcattttttctcaaaaatttaattgggaaagaggtgcatcattaaagttgtttgttcccagatgttctcagtactgagacatttgtcagtgctttagataaaaatttttattgatgtttggtgtttt

SEQ ID NO: 3413 - DNA, 4001 bp, Homo sapiens
gcataaatataaacctaaacttactccattagagcactgacagatttgaaatcaacaatcagtatttcatacaattttaaaactttaatacttttttatctccaatgcaatataaaaatagtactcactttggataggaaatcaactagaactagactgttgacatccagcaacaaagcatagcccaacataagaaatacagatttgcaacacttcgatatgtgctttgaacattgatatgccaagtagcaatagaaataattatctctttggatggaaaatgttaatgactaatcatttcttaaactagactggatacttttccatatagggactatgctattccacgttctccaacatggatccatccatttacttcttgccttccaaggtaccaccctatcccaatccaccatcactccttgcctggagtatttcaatagcttttttttttttttttttgagacagagtctcgctctgtcgcccaggctggagtgcagcggagcgatctcggctcactgcaagccccgccacccgggttcacgccagcctcctgcctcagcctcccaagtagctggactacaggcgcccgccaccacgcccagctaattttttgtatttttagtagagacagggtttcaccgtgttagccaggatggtctcgatctcctggcctcgtgatccgcccgcctcggcctcccaaagtggtgggattacaggagtgagccaccgcctccggccttcaatagcttaacaggtcaccaagcttccacactattcccacacagcctctcccctcttgccaccggctgtgacctcagactgaaatgctcttccctggcccctccttatccttcaaatcttggcttaaaagccttttctcagtttcattgaccaggctatctaacatttacgattcccccagcatatcatccattttattcttctttacggactcatttctggctcgtagtaaatgttcaataacggttaagtgaactgaatctctaatttctggtcgttaatttgtagagaccactttcccggatttaaaaagtgcaggtgctctggcagccttaagtcggtgaaaacaagaatattccgcaaaacaaaaataacttgtttattcatcaaaaacagttaacgttacacttctataccgtcaattcgtgtgtgaacagagttgtgtctgatccaagaccttacagttcaagcactggatcccaataacctgtaaacaacgttttgttatttgcaatgcaatcctgggctaacttttcaaaagtcgtttttctcaatttcccgttagttaaaggaataaaaaaatgctgtccaacgtggtcaatggaccaaacaaacaaggacaacaaacagaagcgtgagccattgctaacacaacagcgaccaaacaatcatgcactgtatcaggcgtgtaaaaatctggggggaaaggcttagtcttaaggcctaagtcatcggacactggtcctctcccggggaataaaacggcctcctcctctgagagggaaatgtcctgaattttccctgcagagggaaggtcacctgcaagcctacattcgtgacagcgttcccgaggaccccctgatcctcatcttcttttctgcttcatcagaccagagaccgtggctaaaagccccccatctgccggctctcaggggcttccgaggcggcggggcgggaggcggcgcccagtcaaggacaacagaagactacgtcgcgtgggccaaaggaaacagtcccgtcaataaataagcctctggccgacgcacctcacccttcccatccatacaagacctcaccttctccccggagccgcggaggctgttctgctaaactgtctggaccacgacgaccccctaggaggccgggtcgcttattcaatatggcggcctcggctaactctgtcagccgggcctggagaacggaaagcccggagggactagaatccttgcattcgacaagtttgtcggcaatttccgtcagccgaccagagggcggagctgaggtcggcccagcccggaggcgggaaggacaacttggacccgcagttccgccggaagtggccccagcctcgaggccgggcgtcttcggtcatctccggcgcttctagggctggttcccgtcatcttcgggagccgtggaggtacgaacttaagacatgcctattttattaatttacttccaaacgcaacgaaaggtccatggacaatttgtgggccatttaattcagggcccccaattcgtacgtggagaagtgggaatgcaaaagtactttgacctttaaccttcggtccggcgcggtggagggaaacgcctccgtctctatataaggaattttccggtctcttcgggtcctttttcctctcttcagcgtggggcgcccacaatttgcgcgctctctttctgctgctccccagctctcggatacagccgacaccatgggtttcggagacctgaaaagccctgccggcctccaggtgctcaacgattacctggcggacaagagctacatcgaggggtgagcggacgggctgagtcggggtggcggggaggtttctccgcccggggccggggccacgtggcgcagcgtgtcggctgccgcgggagggagggaggccgggcccggggccctttcgagagggaggggaaagcgccccgttgccgtctcccaaggccctcgtgtggggcgagcccggcctccggggagcggttcacgagcaaggaaaggttaaaatgtgctttatttacacttaattcagccaggtgtttccgcatcgctgcccagttaatacatgttaagctgtagatagagcaacgccagacattgcagtatttgaggtctacttagtggcagacatttctcaggatagcgcggtgacccaaacatatggtttgatttgaaggagctaataagaaaagaaaagcattaaagcaaccctgctggggttagtgcccactaattaatgtgatgcatacggtatttattatttattcgctggcgtttgtttttcaaaggtgtgtgtgaatgtttctgtgtccttggcaggtatgtgccatcacaagcagatgtggcagtatttgaagccgtgtccagcccaccgcctgccgacttgtgtcatgccctacgttggtataatcacatcaagtcttacgaaaaggaaaaggccaggtaaaatcatctttgtatagagctgaagaataagactgctctcgaagtttatcaggatgttcacatgacaaaactggacccaggctactttagttttgttgggatattgtaagctaaatttttctgtaaccttagaaggccaagagactgaagccctccattttttcacagaacaggtagaacatggacagcagcaattcaacttttccccacactgccctgccaatgtgcctcgaccttgacctggggggcccacctctggggtgagagggtggctcattcattcagtccttggccattcttctgaaactgccaacaagggtggaagtttggggaagtggactccagttcactaagaatggaactgagcatacttaatgaaatctcaaacagaaatgttcatactgaaagagtaaatcatagtgagtattgaaaataatgtctcacatggtactaatgcttgtcgggtgaggagttgaacatatgacagtgtttacctgggcgcatgtgaaagggtaaattatgattgcaaaagggatctagtgataagtagtgattaaaacaagttattttgtattttctggaaaaggatgttatactagctcaatagtggttgaatttaaatgtttttcaagcctgccaggagtgaagaaagctttgggcaaatatggtcctgccgatgtggaagacactacaggaagtggagctacagatagtaaagatgatgatgacattgacctctttggatctgatgatgaggaggtatggcgtcttctataaagaacatatcggccaggcgcagtggctcat

SEQ ID NO: 3414 - DNA, 4001 bp, Homo sapiens
cccgcgtcgacctcccaacgtgttgggattacagacgtgagtcaccgcgcctggcagacaaccaattttaaagcactctttctttgagctctttttctttagtaccagtacacactgtgtagatatttttgttttacttactaaactgtaggttagtaatcaattttagtacctaccagactgtaagctccttgaggacaaggaatttggacatttcccttttttgaagacctagcacaggacccttatgaaaataaccaccaaacagtcttatcaccaagttctagaactagagtagcatctgtcctattaaaaactactgatggcataaatataaacctaaacttactccattagagcactgacagatttgaaatcaacaatcagtatttcatacaattttaaaactttaatacttttttatctccaatgcaatataaaaatagtactcactttggataggaaatcaactagaactagactgttgacatccagcaacaaagcatagcccaacataagaaatacagatttgcaacacttcgatatgtgctttgaacattgatatgccaagtagcaatagaaataattatctctttggatggaaaatgttaatgactaatcatttcttaaactagactggatacttttccatatagggactatgctattccacgttctccaacatggatccatccatttacttcttgccttccaaggtaccaccctatcccaatccaccatcactccttgcctggagtatttcaatagcttttttttttttttttttgagacagagtctcgctctgtcgcccaggctggagtgcagcggagcgatctcggctcactgcaagccccgccacccgggttcacgccagcctcctgcctcagcctcccaagtagctggactacaggcgcccgccaccacgcccagctaattttttgtatttttagtagagacagggtttcaccgtgttagccaggatggtctcgatctcctggcctcgtgatccgcccgcctcggcctcccaaagtggtgggattacaggagtgagccaccgcctccggccttcaatagcttaacaggtcaccaagcttccacactattcccacacagcctctcccctcttgccaccggctgtgacctcagactgaaatgctcttccctggcccctccttatccttcaaatcttggcttaaaagccttttctcagtttcattgaccaggctatctaacatttacgattcccccagcatatcatccattttattcttctttacggactcatttctggctcgtagtaaatgttcaataacggttaagtgaactgaatctctaatttctggtcgttaatttgtagagaccactttcccggatttaaaaagtgcaggtgctctggcagccttaagtcggtgaaaacaagaatattccgcaaaacaaaaataacttgtttattcatcaaaaacagttaacgttacacttctataccgtcaattcgtgtgtgaacagagttgtgtctgatccaagaccttacagttcaagcactggatcccaataacctgtaaacaacgttttgttatttgcaatgcaatcctgggctaacttttcaaaagtcgtttttctcaatttcccgttagttaaaggaataaaaaaatgctgtccaacgtggtcaatggaccaaacaaacaaggacaacaaacagaagcgtgagccattgctaacacaacagcgaccaaacaatcatgcactgtatcaggcgtgtaaaaatctggggggaaaggcttagtcttaaggcctaagtcatcggacactggtcctctcccggggaataaaacggcctcctcctctgagagggaaatgtcctgaattttccctgcagagggaaggtcacctgcaagcctacattcgtgacagcgttcccgaggaccccctgatcctcatcttcttttctgcttcatcagaccagagaccgtggctaaaagccccccatctgccggctctcaggggcttccgaggcggcggggcgggaggcggcgcccagtcaaggacaacagaagactacgtcgcgtgggccaaaggaaacagtcccgtcaataaataagcctctggccgacgcacctcacccttcccatccatacaagacctcaccttctccccggagccgcggaggctgttctgctaaactgtctggaccacgacgaccccctaggaggccgggtcgcttattcaatatggcggcctcggctaactctgtcagccgggcctggagaacggaaagcccggagggactagaatccttgcattcgacaagtttgtcggcaatttccgtcagccgaccagagggcggagctgaggtcggcccagcccggaggcgggaaggacaacttggacccgcagttccgccggaagtggccccagcctcgaggccgggcgtcttcggtcatctccggcgcttctagggctggttcccgtcatcttcgggagccgtggaggtacgaacttaagacatgcctattttattaatttacttccaaacgcaacgaaaggtccatggacaatttgtgggccatttaattcagggcccccaattcgtacgtggagaagtgggaatgcaaaagtactttgacctttaaccttcggtccggcgcggtggagggaaacgcctccgtctctatataaggaattttccggtctcttcgggtcctttttcctctcttcagcgtggggcgcccacaatttgcgcgctctctttctgctgctccccagctctcggatacagccgacaccatgggtttcggagacctgaaaagccctgccggcctccaggtgctcaacgattacctggcggacaagagctacatcgaggggtgagcggacgggctgagtcggggtggcggggaggtttctccgcccggggccggggccacgtggcgcagcgtgtcggctgccgcgggagggagggaggccgggcccggggccctttcgagagggaggggaaagcgccccgttgccgtctcccaaggccctcgtgtggggcgagcccggcctccggggagcggttcacgagcaaggaaaggttaaaatgtgctttatttacacttaattcagccaggtgtttccgcatcgctgcccagttaatacatgttaagctgtagatagagcaacgccagacattgcagtatttgaggtctacttagtggcagacatttctcaggatagcgcggtgacccaaacatatggtttgatttgaaggagctaataagaaaagaaaagcattaaagcaaccctgctggggttagtgcccactaattaatgtgatgcatacggtatttattatttattcgctggcgtttgtttttcaaaggtgtgtgtgaatgtttctgtgtccttggcaggtatgtgccatcacaagcagatgtggcagtatttgaagccgtgtccagcccaccgcctgccgacttgtgtcatgccctacgttggtataatcacatcaagtcttacgaaaaggaaaaggccaggtaaaatcatctttgtatagagctgaagaataagactgctctcgaagtttatcaggatgttcacatgacaaaactggacccaggctactttagttttgttgggatattgtaagctaaatttttctgtaaccttagaaggccaagagactgaagccctccattttttcacagaacaggtagaacatggacagcagcaattcaacttttccccacactgccctgccaatgtgcctcgaccttgacctggggggcccacctctggggtgagagggtggctcattcattcagtccttggccattcttctgaaactgccaacaagggtggaagtttggggaagtggactccagttcactaagaatggaactgagcatacttaatgaaatctcaaacagaaatgttcatactgaaagagtaaatcatagtgagtattgaaaataatgtctcacatggtactaatgcttgtcgggtgaggagttgaacatat

SEQ ID NO: 3415 - DNA, 4001 bp, Homo sapiens
aagctagtcttgttgacttgggtaaatataatgaagttggtaggaaggtgtggctccaacaatcgctgtgaccttcatgcctttatttatatttgcttgtatgtgtgtgtctgtgcacatgtgtatgtattatgtataaagtctcacatctgcatataatttcatacatatgattattctgaatatctaacccatgttaccctatagatgattagctagttgaagcaaagaataaggagtagatcttttcttctattgctatacagatactaagagacagagttccattttcagaactttctcttcgtctctgtccctttgaacatcggggttgggaagtggggaagaaagcagttttagaagacgaattaaaacctgcctttactccaacttggttttttgagagcttaaagaaaagcaaaagtgggaaacagtgatatttcctgtcaattctaaatcccacataattatagtgaaactgaacataaaatattcctttcttatgctttaaatgatgactctttgtgaagttataatagacaatgtatttttcgaatgattaattcacctacacagctttgattgtcactacataaaatagtttgctgtcagtgttttttttttaaatcttacctccaccacctcctcatagtcttcgtcatctgccatttttccagagtagtagtggcacctacaaacttttcatattccatacaaatgaaaacatattagagtctattcccagcacagaaattatcttatgacattataaaaatagaatttgaagctaaactattgtacaaattcatatattgttgcaggctaaaggagagaagacatttaaaatacaagtataaacagcagaagcttcaaatttctttctctttattccttcagtgttgggaattgctacttctacataatcagtttagttaaaattgtaaaacgaaattgaggtaaggaagtgagagagtttggactcagggaacagagaatttaaacttccaaacacttagagaaaagacattttccagcaaaaattttagtgaaaggtcagcttgggtttcagaagaagctgaaatttatcccccagcaccaaaattctaagagggctgacttagttttccatactgccctgatccactgtttgcaatatatcttaggcttcaaattggaacccataaaaatacatctgtcaataaattttaaaagaaaaaaagaaacctcaaggcaatggggttattttcttcccgaacaccattggcttatacagactttttctttcgtttctgtagctctcgttcaaacctgaaaaataacaaagttgtaaagcattgattgaggtacatataggattgtcagtccttagcctaagcttctaatgcagaaaacagcgaaaggatctctcaaggcctctacagtttgacgccagagagtaagactcttgatatgaagtggatgatgagttggaacagctgtcccttcatccaaagatgtttgccatgtaaaccaataccctgcagtggctggttttgttaagctagcgaaactgccactcctcaggcaaatgaagcccagtagaacaggataaatataggaacgtagagcagcgtatcttctttttcacactaatatatttagagaaaaatatcaaaggcaaaaaaatgttagacaagagagccaattcagtcaagcaataaattggttagcaaaggacttgactctaatcacacacggtacatagcagatattagtagggccttagtagggcaatggggttaaactctcctagccatatttctaccactaatttcctcagttatggcccaaacctttgaaaaatacttcgagggaagttgtggagcatctcctgaaagagtattacagaaaaagtcataaactggccttaccttcaatctaccaaataaatttcctcagcagcaaagcctctcccaactctcccctcctgagaaccccaggcaaaagccagcgtgatgcctgggctccgaattatcatgtggcaagagcaaccaatcagatcttgagttgctcaaatttcagaagctaaatttaccaagtgatcttctgaaaaccacctgttcatcaattccactaaaggataaagggtaacaaattgcttgcttagaacaattcaaatggaatcaaattttacctaacttccagcctgtgcagttcaattttaggttgaatttcccatttactgaggccccattcaatgtcatattcatgcaaaagaatttagtagaaaataagcatgactttgagaggctttaacccttccgtgactgctttcttcatgtcatttgtccagtcatggtggtaaatgtactcactctggtaaggttcaccaggtgagctacaggtaagttactggtgctagtgtgaaagaaactgaggaataagacccagtaaacatcaagttgacaaaagcaatttttaaaaatgtgatgagtgaagttaaaggtgaaaatatttgacaatggcactaaataagatatccacagggtgtaattagaaagattagaccccatcatttttctgttactaaaccaagagggtataccaaaatcctatttagcaccttctccctccttagataaggcaagctgctaggaatacagaacctctctcatatgtaaccgagttagtgatttttctattaactcagatgactcctggctcccagaagcaacgtgtgaatgcggacacaaacaggctcaatttctgaacagcaagagcagataacatggaaatcagtaacttatcaggagaaaataatgccctatttggcaaatccgaacgtaagacatttccttcataaaaattatctaaccattttcttaaaacttgcctgatgtctttcttgcactttctttgctcctgaagtattttttctaatttaaaatctaattctatctgtctgtctgtctgtccttacacacagcgacagaaatcacaggctcttatgtgacagagaactgctctttctctgggttgctcctgtattcaggcaaaaccctgtgagtcacctatatcttgatatggatttgagattaaacatattgtaatattttttcttttttaagttaaacattagaaagtaatctcgctgggcgtggtggctcacgcctgtaatcccaacactttgggaggccgaggcgggcagattgtctgaggccaggagtttgagaaagtaatctcatatttcaaatacatgtaccttttccccctccatgattcacatggtagtaaataaaatctaacagaattttatcatcttaactgattatacctgttcatcttgtatgttctcacaggtcttatgaccaaaggatatttatgtaatatgagatcactcacttggtagctgcaaactagaattgtgacttactagtcattacatgctttaaaatgtgttgttgaattaaaaaataatacaggcccatactttaaaaacatagagtacaaaattatataaagtaaaaaatgagcattgaccttcttagtcatttttaagtttcagatattttcaatatagatattgacataaatcgatatacttaatatgcaatagacatttttatgaaacatcacataaacatatcctactctaatttccacaaataattctattgattggatagagtataatagtttaatcattattaatggacatctaggttgtttcgaggtttttgctattacaaaataaagcaaaacaatgcgaaacaaaacacacagtaagcatccctgtacattacctttgtatacttatatgaaatgtatctgtaaggtaaatttctagaaatagaaatactgaggcagaagatatatgcacattttgaaaattgatagatattgtcaagttgccagtcaaaatccttacactattttatgtttcactaacagagaatgagggttcctatgtatacacatctcaatatccttagggattattagactgaaaaatcattactatc

SEQ ID NO: 3416 - DNA, 4001 bp, Homo sapiens
agcccgtcattggtgctctgggcctggaccctggctcggaggtggcttctcgcgttgagggtcaccaccctctgctccccagtctcgacttcggccacctggcactccagggtgtcctgggccacaaagtgccctcgcgcccacgtgcgcccatggtcatggctgaggaagcagaaggcagaggggatcggcctttggatggggtgaagtttccggtaggcgtaggcgggcaccaccaggctccgggccctgtcgtgaagctgcaaacaatgccccgggcccactgcaaaggtggaccactcccggtaggctgggccgatggccgcatcagtgaggtctctgggggagctccaggtcctcccgtggtcagtgctggtgacttggcacagccgcgtcacattggccctggtctgcagctgctgttgctccgtgacttgcccagggatggcaatgaagaagaggaagagggtccccgtctgcgcgtcatacaaggggcatgggttcatggaccggtggccatccagccgggcctgggccaccacctcctgagcttgccactgagtagggagagagaaagaagaaggcagccttgaaacagctggggatggtgccaggagctgcatgagtgggaggggtgggcacgggtgtgtctcccgggttagagtcaaaagtcatcgagaagaactcttcacccaacactcatatcctccttgcaacgtttccccagagctgcggggcccagggtgccacctcacccctccaaggcagccacactcggctgagtgattctgttccttccattgccatcaatatgcatttacagaacacccacctgccagaccacaagatatgaagatgactcgtgcatgagccattcccaacttcatcctggttcctccacttcccaccccagtccagctcaccatccttgaatagcaaagccctggcggaaggtgcaataacctgaccagtacaagacagaatgtgacggtcacctctcaccttctacactccatatcctactcatgtagccaaggaggagtcacattgagcttccagaatccccaagtctatgtcacatgtgctgtctgtccccatttattaacagctacccccattgggcaattctaagcacagacacagcaccaaaagtctaacatccatggtctcatctaatgcctcaatccccagggaacaggtgttagtagctccattattacagtgagcaagagaccgcgacagggaggaggagttgcctaggccacatctgtggtcagtggcggaaccaggacttgaacccaggtccatctgcttcaaatcccatgctttgaacagctgtgtagtaatgaccacaaaggaatgataataatattaaactcttcaaatatgatcagccagccttgggtgctgtcatcaggattaattatttaatctataaaatgggactttaggacacaagccatcaccccaccccaagtccccaagttaattttactcaaaggacacaaccctccattatgcaacactgaactattcctccgtgaggtcatcacggatgctgggcaactcattcaatctttcatgaaaacagatggaggccagctggactaattcacagtgaacccagaggtccagggaaccattaggggcactttctctgctctatctctcctccggagtacagccattgagggataaagttgtccctgtatttcttgagatccaggactggcccctgatcacagcagcaaagggtgtggcagagccctggggagccagtgcagacacctcctgcctcacctgaacctggtgggtgggtgcgtcgtagtctcctctgcgcaggacaatcagctctgcgtgctcatccttcttgcttgcccgctgttccgcgaaggccagcagggactgctgcccaggcaggtagagcagggcagggattctgtaggcatgggctcccgactggaacacgctctccttctgcaggacaggaagggacgccatggggctggggggtggacaggaagagaagatgtgtcacctgcagccacacctgagatgggctcagagtcattcaccaagacaggtggtgctcaccccctggctgagtggaccaaagtcagggcggcctgtcctcttcccgcgtggggttcattctcctttcctacatctcaagaccctgcttcttaattctgcctttgcctcggtggatatcgggagggggtattgcaaaagcgtgttttggattcgatttttattctaagttaacaatgctccttacaacagattttcgataacctccagctgcttttgccaaacccagcccatcaatccaggggcaaacctcgggaggacagcagtgcaggccgggtggcattcggcagctgcccaaatgccagaaagtgacacatgggagctttttataactccagagccctagaaagttgtttcaaagaaaaggaaaaagaaaaagcatggcttctaaggctctgctccccaggctgcctgaggctgaggcccgtctgcccccgctgctgcgtgggctccccctgaggcagcgagggggcggcgctgcagtgggaaaggaagagacaggggctcctgacagctaacccaggctgggggcgtggggtgctccagaggtctaagaaaataacaattaaaaataagtcttcagctaaaaagggtagggaggggacagaggtaacttggggacagtgggtgacagtgattttcgggctaagctgcctaggtccctttaggaggatgcatcccgcagctctggggagtgttggctgcagggccctggcctggggaggatgggccagttgttcccagatgaagaatctgccccaggtcatacccaagaagggctgcttgatgattggtccactcagagcctgaagaccctcttcctgaactcctgaccaggaacagtgcggctccggagctccctccgggcggctgggccttccctgagactgcattacagccgcctctttctctgctgctcctccctttcccccagaggctcttgcctgccgtgggtctccgtgtcagagccggcgtcctgggcaccccgtctgagacacagcctttgcagagggcaagtgggcaagaggccagcaagaggggcaaggtttgcctttgtgcacccttttgtactgctctcatttttctaccacatgcatgcgttatctatttaaaacttagcttctttgagaaataaatgtaatctatcagtctttcattcaaccacagtgaacgttaatattaggacgatgtgagaaaataaaactgagaagggcaaaagctgcacaaggaaaaaatgtgctattccctgaacttcggtgggagattcatggcttggtgatagaatcaccaaattataatccaaggacacaggccttgataggtatcgggaggcctatgctgaaacgctgttagaaaatgtcagcaggaaagaatcaaatatgataacaagtaaaaatgaaaatggagaactgtgcagtttcacagtgttctctggaaaattgatcaaggatttatttaagctccatagagtgggctctggaaagtgtccttgatggaaattcagcagagttggtataattcagtttaaaatgtttgtatttaaaatgtcctcagggccaaaatttctgtatggattacaatggctggccttctctacacaatgtgggaggaaaggagagaagaagtttagctgaggaaatctttttttttttttctttttttttagatggagtttcgctcttgttgcccaggctggagtgcaatggcgagatctcggctcactgcaacctccgcctcccaggttcaagtgcttctcctgcctcaagctcccgattacaggcatgcaccaccatgcccagctacttttgtatttttagtagagacggggtttttccatgttagtcaggcaggtctcgaactcctgacctcaggtgatcctcccgcctcagcctcccaaagtgctgggatta

SEQ ID NO: 3417 - DNA, 4001 bp, Homo sapiens
ctgggctgagcaggcacaagcaagacattctctctgcacttggctccctccccaaggcccggaccacaggagcaggtgtcagcaccccctgcagacatgaggcccaggcccacccctggggacagagagggagaggaggagactccagaaaccagctggtcactccccttgttgcacagaggggaaactgaggcccacagagaggacaaggctgacacacacttggcttggggcttccttgccacggccaggccctgggttccacagagcctccgtgtcctccatgtggccaggccctgggttccacagagactctgtgtcctcaggaggtccctctgtcttgggggaccagccgtgctcagtgtggccaggccctgggttccacagagcctccgtgtcctcagtgtgaccagttccctgggttccacagagcctccgtgtcctcggcaggcccctctgtctcggaggccagccccgctcagtgtagccagttcagcacattccaggggtttggcttgactgggacagccatgtcctggacattaaccagtgccccccgccctccctgacagggccctccttgggggtgtggagtcacagaaggggaaaccgaggcccaggggagatgggacctccaggagaacctggccttctggtccgtggacccctggaccggttgtaggggtcactctggctcagcagggggccatcacagaccaccccccccacccccgccaacccctcacagcccatcctgtgtgggtgccccaagagccttgaggtcagaccaggccctccacgcacaccctctggggtccgcacacaccctctggggtccacgcacaccctctggggtccgcgcacaccctctggggtcagcacttcttgtcgtgggaagtgtcaggtgcagggtaggaacatcttggcgaggggcattcacatgcacccacataaagtgcagaggccctttgcacagaatcccggcagggggccctcggcggctctgaccctcagcctgcaccgtgagcgtcctgggccctggccagggcgaagactccgaccacagacccttcacctggtagagcgtccccgaccagcccatctgcagaacgaccctgtgggctggggccggccccctgcattgggcccctcacaaccagtctgtctccatcccatgccctgaatctgcccccaggaaccctcagtgtcacacccaccctgtgggccaggtaagtgtcccattgggagatgcatgtgggacctcttgctggaggggccctcggaatccctgcagcccgccccttgtttgagagctgaggagccaccctggggttggcaaggagtgggactcgtccagcacccccagacagagggggcggccagctggacagatacctcaggagcgggtcctgaccccgggcgcccgggtagaggggtgagggtgctgggggtgcaaagggcagggactcaccagccaccttgggaaggctgcagagctcatcatgggtggctgcctcgcctgacccagagcagagacaagggcccactgtgcgggcagcaggccagggagctggccacgtctcagggctacgtcaggaccctggacactcccacggtggcacggctccactgaagcccagagcagggccaggggtgcagatgggcacccaggagccacacagacgcccgggaccagcacaggctcccctctgcaggtcaaggcactcaacactggggtgctgaggacacgggggtgcgccctccaacaagggctgtgctgggacaggcccagctgtgaggccgcagttgacctcccagagggacacgggtctgctgctccagagacgcggccctgccaggagggctccgtgagtgcacactctcctctgggcttcccgggtgcggggcctcccctggcacagcacagcccctcacagcacaggcctcactgggctctagctctgtatctgtgctcctggcaggccagcaccccatcgcaatgtcctgtgcctctcagggcccagggtgacccctccccagcacagctgccgtgcaggactcctgccagtcccattcacgctggcctgcccccagcctgtccccgcaggactcctgccagtcccattcacgctggcctgcccccagcctgtccccgcaggactcctgccagtccctttcacgctggcctgcccccagcctgtccccgcaggactcctgccagtccctttcacgctggcctgcccccagcctgccatttcagaggcagccttggtaaccaatgctcaaatgaccactgcccaggccagaatctcagaggaggccacaggtgcccggtatgttctgatggggcagcctccgtgggggatccctgggccctgaacaccctcctttctcactgtccctccctcccctgcgaagggcatcctcagctgcttctgaaacctggggcgctgtggtgggaaacaggtaggtcacgtggtttccaggctgagatgataaacctgccgcgtccctccaggtcctaggggcctgaggggatttactgggggcagctgggaggggggcggcgaggaagcaggaggggtgggccccagctccttctgactcatctgaatgccccccgtggcccctcggccgccagagctcgtgaagacggttaaggaaagcttcccccaagtggctttcaccccacggggacagagccccagaggtgcctgtgggcccagtgtcctgtgcactcacagccccaggaggggcggacccagtccaggcaacttggccatcgtacacatcctcctgctcacagccgagaatcctggggcaggggcaggtgggtgggaagggacaacctccccacccctcagaagccccaccccagcccaaccagaactgggtggcccatctcccttctcgtgtcccccaagtctgggactggtggagtctgaccagggccatcccctaagtacccaggcttacagggaaacgggacctccaagccccacgtcaccttgcaaagtcccctcctgggccaccctgagacacaggccgggtctggagcagggctgtctggccagggtgtgcccgcagagctggggtggggggcaggcctcactccctctgctccaggcttttcaagcccactgttttcaatctagagatttcacagaaaaacccgtgttttcagcttctcttgaaaagtcagatctgccctcaggtgccacccacttcccctgggcatctctgcctggacaagccaccgtctacccagggtatatgacagccacgggtcccaccaacccccaactgtcaccccatggcccacggctgctcagaggtccctgggcccatctggggctctgtccccgtggggtgaaagccacccgggggaagctttccttaaccgtcttcgtgagctctggcagccgaggggccacgctgaccccagcatcacacggaaggctgggacgtgccccctcccccaagagcagtttcggctactctgtgtcccccttttatgggctgcacgacgtggcagcattttaaccgccccttctcaatgcacagcccggacaggctgttctcaacactctctactgcaaactacacacagttttacgtcgccagaaagaccccaaatttctattcaaaaagaccgtaccagtttcagttcccgccaacctcaaaggcagagacaaaaggacggtgtgcccctcctgtaacttcatttcttcggtgactgtgaagctgagggcagagtccacgcctggggacagggctgccaccgcagcggccactgcgtccaaccctcgctcctcctcccagagacgacctgcgttccgctcagggacagggctgccaacgcagcggccaccgcacccaacgctcgctcctcctcccagagacaacctgagctctgctcagaagcggcacctcctcatgctggactcactcgggcccacatgtgccaagggggcctggttttggggccggcgggttctgcc

SEQ ID NO: 3418 - DNA, 4001 bp, Homo sapiens
cgtgagtgcacactctcctctgggcttcccgggtgcggggcctcccctggcacagcacagcccctcacagcacaggcctcactgggctctagctctgtatctgtgctcctggcaggccagcaccccatcgcaatgtcctgtgcctctcagggcccagggtgacccctccccagcacagctgccgtgcaggactcctgccagtcccattcacgctggcctgcccccagcctgtccccgcaggactcctgccagtcccattcacgctggcctgcccccagcctgtccccgcaggactcctgccagtccctttcacgctggcctgcccccagcctgtccccgcaggactcctgccagtccctttcacgctggcctgcccccagcctgccatttcagaggcagccttggtaaccaatgctcaaatgaccactgcccaggccagaatctcagaggaggccacaggtgcccggtatgttctgatggggcagcctccgtgggggatccctgggccctgaacaccctcctttctcactgtccctccctcccctgcgaagggcatcctcagctgcttctgaaacctggggcgctgtggtgggaaacaggtaggtcacgtggtttccaggctgagatgataaacctgccgcgtccctccaggtcctaggggcctgaggggatttactgggggcagctgggaggggggcggcgaggaagcaggaggggtgggccccagctccttctgactcatctgaatgccccccgtggcccctcggccgccagagctcgtgaagacggttaaggaaagcttcccccaagtggctttcaccccacggggacagagccccagaggtgcctgtgggcccagtgtcctgtgcactcacagccccaggaggggcggacccagtccaggcaacttggccatcgtacacatcctcctgctcacagccgagaatcctggggcaggggcaggtgggtgggaagggacaacctccccacccctcagaagccccaccccagcccaaccagaactgggtggcccatctcccttctcgtgtcccccaagtctgggactggtggagtctgaccagggccatcccctaagtacccaggcttacagggaaacgggacctccaagccccacgtcaccttgcaaagtcccctcctgggccaccctgagacacaggccgggtctggagcagggctgtctggccagggtgtgcccgcagagctggggtggggggcaggcctcactccctctgctccaggcttttcaagcccactgttttcaatctagagatttcacagaaaaacccgtgttttcagcttctcttgaaaagtcagatctgccctcaggtgccacccacttcccctgggcatctctgcctggacaagccaccgtctacccagggtatatgacagccacgggtcccaccaacccccaactgtcaccccatggcccacggctgctcagaggtccctgggcccatctggggctctgtccccgtggggtgaaagccacccgggggaagctttccttaaccgtcttcgtgagctctggcagccgaggggccacgctgaccccagcatcacacggaaggctgggacgtgccccctcccccaagagcagtttcggctactctgtgtcccccttttatgggctgcacgacgtggcagcattttaaccgccccttctcaatgcacagcccggacaggctgttctcaacactctctactgcaaactacacacagttttacgtcgccagaaagaccccaaatttctattcaaaaagaccgtaccagtttcagttcccgccaacctcaaaggcagagacaaaaggacggtgtgcccctcctgtaacttcatttcttcggtgactgtgaagctgagggcagagtccacgcctggggacagggctgccaccgcagcggccactgcgtccaaccctcgctcctcctcccagagacgacctgcgttccgctcagggacagggctgccaacgcagcggccaccgcacccaacgctcgctcctcctcccagagacaacctgagctctgctcagaagcggcacctcctcatgctggactcactcgggcccacatgtgccaagggggcctggttttggggccggcgggttctgcctgatgctcagagggtaactggatgctgaaaactgtgagtctttcttcaactcaggggaatgtttccagggcacgccaggcctcactcacgcaggcctccgcgacaactgttcagcactgactgagggtgaagtgaaatcctgaaagctgagagccagcgccctcacacgagggctgggacgtaacaaaagcccatcaagagttttgcccagggctttcttgggccttgaagcatgacgagaccaggacccgtttaggattaaacaagttttactgggggtctgaaaaaactccccaggcctccacaaacaagtggagaaggaactccccaaacctccatgatttagcagaagacaagataagggtaaacacctgggcccatttagatcaagtaaatttactgagtcttcagaggaagatcttcaggaccagacctcagttagagatgagaagaattgaatcacgtacgtctttagacgaatgcacactgacacggagacacagagcttagaaggtgtgtaagctctggaaaaactgtaatctggagttggtctggcgatcatttccaggccttctccctgtaaccagttacagaaataaaatccctcttcttccccagttcatctgcatctcgctatcgggcctcgggaatgagcaacccgaccctgggtttggtccgggaacgttttgttctctgcgtgaactgctttctcatctgtggtcttttctgtcttctgggactcctgttgttggcacgtgggctcctcccgggccactttccctttacctggcaggatcctctcctgtgcctttcctgggctgaggggggagggagggagggagggagggtggcctgccgaggtccctgggctaagaggggagagtggcctgcagaggtccctgggctgaggggggagggaaggtggcctgcagaggtccctgggctgaggggggagggagggtggcctgcggaggtccctgggctgaggggggagggagggagggtggcctgcagaggtccctgggctgaggggggagggagggaaggtggcctgcagaggtccctgggctgaggggggagggagggtggcctgcggaggtccctgggctgaggggggagggagggtggcctgcggaggtccctgggctgaggggggagggaaggtggcctgcagaggtccctgggctgaggggggagggaaggtggcctgcagaggtccctgggctgaggggggagggagggtggcctgcggaggtccctgggctgaggggggagggagggagggtggcctgcagaggtccctgggctgaggggggagggagggaaggtggcctgcagaggtccctgggctgaggggggagggaaggtggcctgcggaggtccctgggctgaggggggagggagggtggcctgcggaggtccctgggttgagggggagggaaggtggcctgcggaggtccctgggctgaggggggagggagggtggcctgcggaggtccctgggctgaggggggagggaaggtgctcttcccgggtccctggcgtgaggggggagggaagctggcctgcggaggttcctgggctgaggggggagggaaggtggcctgcggaggtccctgggctgaggcgggagggaaggtggcctgcggaggttcctgggctgaggggggagggaaggtggcctgcggaggttcctgggctgaggggggagggagggtggcctgcggaggttcctgggctgaggggggagggaaggtggcctgcggaggtccctgggctgaggggggagggaaggtggcctgcggaggttcctgggctgaggggggagggagggtggcctgcggaggttcctgggctgaggggggag

SEQ ID NO: 3419 - DNA, 4001 bp, Homo sapiens
gctgcacaggtcattccgcagccggggcatctaagcagcctcctctgtgctgctcactcaggctccaccccctacctcgggcagccccctgggacctggcagggcagcaaaaggtcccttagggcacagcctctcatctatgaagactcttggtctgtctgcatggtcatgtcagctattcactgtgcaccaccaaggctgagtggggccgaaacccacccccgacccaccagcctggcaagggcccacaggaccgtgtccaccgacttcatacagggctctgtgcctgggtctggagcagggtcggggtggcctgacgggtgtgatcaccacctccactccacctgcctcctcccacgaggcctgcaggggtcctcccacactttgacccaggcagcccgggacaccccactcccagggtggggagtggcagaggtgggcataggccacatgtggctctccaagcagacctgtccccagtggctgggctggcacagggttcagatcatcctggtgcccaagcaccctcacacctagaggcagccgctctttctatgggtcctgtttgcaggcaggaccctgagctcagagaagctgagtgccctgcccatgggcgatcgctccaattactccacctgccccggggtccccactgctgagggggtggactgcctgcgggctaagcagggcctctggggtgtctctactccaggacaggtagagtcagattccagattctctaagatcttggaatctgagtggggcaggggcggccccttgctcagcaagagcctctagggatctccatcctcaccactcctccaggtgtcaagcctttcagggtgtcaggcacccataagcactttgcagcctctttttctcctcatcccgcctcggggaagccctcagagcttgagaaggctgtgctagtcatctgtgtttttgcagccagaaagtgggggatcccagcgctgctcctggctgcttcactctcatgccacctcctttaaggcccatcatttccctgccaaacaccattactgtgacagcagcagtggctcttggcacagccaactactagtctgtgagcccatggtgcccaccaggggacagaggaccctgagcccaggctcccagctctttacctgggagggtaggtccagagatgcacaaccccaatagctggtgctgaaagaccaggtcctcaaggccgggtgcggtggctcacgcctgtaatcccagcactttgggaggccgaggcgggtggatcacgaggtcaggagatcgcgaccaacctggctaacatggtgaaaccccttctgtactaaaaatacaaaacaaaattagccgggtgtggtggcgggcgcctgtagtcccagctactcgggaggctgaggcaggagaatggcgtgaacccaggaggcagagcttgcagtgagctgagatcacgccactgcactccagcctgggcaacagagcgagactccgtctcaaaaaaaaaaaaaaaaaaaaaaagaccaggtcctctatctcccccacatatggctcttccactacgggacacctgtggcctcaggtgaggcttgcagagaacctttgtgcctatcactcttttgatttgtgcgtttgattttataaagatccctgtaagccagcaggcatcgtccctggcctggagatgtagaaactgaggcccagggacaaagtgacttacccaaggtcccatagctcaacttggcagaactgggaccccaccagccccctaaactttacactgaccacatctctactccagcaatgacacagagcaccctctgctacctgtacccccagtccagagaccaagctccaggcttgcaggaggtctacttactggcctcgaagcagagctgggcacccatcagtctaaggtcctcgggcacaggtccccaggtctagaaggaactgcctggagaaggccagtggacaggttaccaaagattcagcaggtctgctttttatgggccagagatcacgttacaaagttgatgattaattcaatggtgctgtcatgtgttactatatccaggggatttcccagtgatttctcctgactcgcagactgacctgctggagctggccggcctaagagaaggaaacaggaatgggggtctggcctgggtaggtcttacggtagccttctttctcacttctgaccaatctcaagctggctgtgcattgtaatggtccaagcatgttaataaatacctatgtccagccccgcccccaaagactccggttccactggcctagggtggaacccaggcatcaggagtttacagagcaacgcagatgattctaatgtacagccaggatggagattcactgcagcagaccctggcacacagaaggaactcaatctgtgttgctgaagcagattgaattgcatttgctgtatcccaggacctgggaaattgtgcacctccaacagaaaggaggggtaaagcagacagaagaggagaggagctgatggtccctccagcctttctcactggaatttctgggaattccactttcccagaactgccacaaaatgcaaatagccctacagacagtcactgcaaaggtctagctcccaatgtgttagcactggaaaagaagccaaaggtattctagcccgtcaatatttatttcggttaggaaaactgaggatcatggagggaaggtggcttactctaacctagtgctcctcactcacattgcaacatactctcaaatctcctggggatcttgttaaaatgcagattgactcagaaagcctgaggccctacctgagataagtggacccgacttttttttttgagacagggtctcactgtcattcaggctagagtgcagtggtgtgatcatggctcactacaacctcaaactcccaagctcaattgatcctcccacctcagcctcctgagtagctgggaccacaggtgcattccaccatgctcagctaatatttctgatattgtgaagacaggtctagctatgtggcccaggctggtctcaaacttctggcctcaagcagtccccccatcttggcatccccaggtgctgagattacaggcatgagccaccgcacctggccaagtggaccccactttcgggggcaagggcctggtgggtttggagccttgtgagtgccctgaccctcaacctgtgggctaagcccctcccaagaccccagatcaaggccacaatcagtgactgctcggctaagggatggctagtgccaggtacgtctccaccttagtgcaggctgccttgggtggttccccagagcgctgcagccatgcatcttgttaataaatcacactctcatgagaggtatgtatggcatcttattagggaagtcaactctgagcctcagactgtctggaaaattacctggcaagctatggccctcaggccacccaaagccagcaggctggggtggtatagttgcatcagtgggaccttgggccatgaggcagctggggggcagaggaggtcattctgaggagctaaaaaacctgcctaaagcctcccgtccagggtacaggcatacccgccacacactctgtgtttgtttattgaacaaactgccagggttcaggacatgccaccccaaaatatggcactttggcatttaagaaaacagcagaagcaggaaggcctcgctcaccttccctttgcccgaatcccctgaagtagggccatgaggccataagacccatccttacctctgaagacacagggacagagagaagaatctgaacaggctggccgactctccccggtttattaccccttccccctttagccaatcacttctccacgatgcccactcttcatgaaaccaacgcataaaaatacatgtccccatttctttgggtcttcatttccaaaggcccctgtgtcatgtaaaatttacatgaaataaatttgtgtgcttttctcttgttgacctgtcttttgttataggtgtccta

SEQ ID NO: 3420 - DNA, 4001 bp, Homo sapiens
gtcctcatcttcgtcctcctcctctcccccgttcctcagtgagtcctcctctgcgttcatggtttcgaggtcgtcctccttcttgtctgcctcgtgctcctcgtcctgagaactgagacactcgtctgtccagcttggaggaccttggggctgaggctcgcccatcagcccactctcgctgtacgatttggtcatgtttcgatttcctacattcaacaagggagaggcaaacagaaagaaaagcagaaaaacgctatattcaaaagccagatacgccttcagcttccactccctaaacctgtacaaatgcttgcgaaaagtacctgcccattacaaaatgaatgcctctgagaaaaagttaaatgcagtgttttataatggcgcgtgcgtgtgccccgctagtacgtaggagtgaggacaggactgggggagggtagtgaatatgtatatgtgtacaccactcacgcatatgtgtttgtatcctagtgattaacttaaatgtgtttatggtggttgcccgacaggataatgtgtgtggaaatgactgtacatttcagcgacttcatgtttatccaaatgtgttcaaagttactcacaactccataaaaaaaaaaaaaagctgtaaaatcacacattctacttccatttctgtcctggcttccagatacttagcgatttaagttgaacagccattgcgtaatttactaatactggcagcgatttttaagaagattacatcgacgggatactgaaaagcaaatgcagaaaggaggaaaaatagtttccaccaaattgtttcaccatcaatgtaacatttggcaacaaaagtggacagggtcttccacccctccctcgcctttcttttcttgccttccatctctggcccaccgctaaatttccaccttgtacaaaagcgctagctgcagggcgagggctgggggcgcggcgcagagcgctctcccacgcgccggggatcaggtgcggaaggctcctctctaataaacagcccattgaaagggccgcccgctctttattggggcttttcaaagttcgcctcaaacctccctttaaaagattgagtaattataatggtcagcgattggcaaccgcgaagttgccgcttctagtaaggaaaataaaaagcctttagtaaaacaactgaatttctggctccagtagtggctgctggggacttggccgcctctggagcggtaacaggtagcaggagtgagtccctctccctttctccactttcccccctctcaactaaactatctctgaacctgatttattttccatggtgtgaatactcaaggtatccatgtccctttcattcactgaaaacacagcttgacactcccaatgtgcgtaaaatacatgcacacaaaatatatattgataacatagatttttttttcttactgtaagaagtgagaaagtgaagtcattattgcttttgggactttaaaatcagcactagcagataatcatagttaccgtgcattcttttaaaaaatccaagaagctcctatgctatccacaaaagaaacccaaatttttaaaatttaaattagaaagcctgcagggggtacttgagtgacacgactcattatgtgtgagtacttatgggcaattatggagggggatgctggtctcaatacacatacacactctcgcaaacgcacacatacagaatatgtaggttcatcagtcttcagttattgcttctattctggggcaaaaaaatgaaagaactgtaattacctttgttgttagtaggtcctgagcagtgatagtctcataaccctggggcctccggacgccgcgcctcctgcgtgggcgaattcctcgtgtcgtggccgcgcgggcgctcaggttatatagcccagttagtgatgctaagcgcgggcggggccgctagctgaggggctagcaggtctatgcgcctgacgcctgcgcacgcgtccaggctgtgcgctccccgttctcccctcctccccacttctccccacgccttgctcgtctcccgccctcctccgacaaccgctcccctcaccctccacccctacccccgcccctcctccttcctccccggcatgcgccatatggtcttcccggtccagccaagagcctggaaccacgtgacctgcccatttgtatgccgcggagcgctccattccggcccctttgtggccagaagaaagtggcccatctgtcgccagttagagactccgcggacctgtttttacccgcaggagagattaaccctttcaggcggcagaagggacggggatagaggggggaggggatttgagggaaggaagggaaaagctaatgttaactaggtctagatcagagcgagtggcctgctttcgcgccggaagtaggacagaggtgaaagaggcagaagcggggagactgaggcacgcagtgaagagtcctcgctcctttcgatttcttgtcctgacactggcatccagagcagcatgactccttgccctctctgaaaggcccatcccttggcttcttctccttggcagacgctttgatcattggcgccaaaggatggcttctcctaatctccgtcggcccctctaagcaaacatatacgccatataaaagcggcttcatctgtaaacgcagcgttgagattagttccccaacctccctaaccggatcgtcctctcccagttccttcagtacagaaaagttgtacctgccattctatccctaccatacgtgcaattcttcatgtcctgaccttcagctacgactgttcctccagaccctctcactacgtcagtccccacctccatccccaggatcttgtcctcaaagcgagctagttctcgcgaggaggccttggttccattggcctttgcgctctcttatgtgggagctggggacttctttgacggttgtattctgccttttaaccatggccactgggttgctggaaagggcaccctcactcagccagtccagggacgcttctggttccctggccagcccgccctggacggcctcggctctctagtccaggcattgaccacaagtacggtggtggacacctcgccacagccggacctgcgctcttgctcccctcagtctcgggtctgtataagatacttgattcagacaagcgttttcaaagagaagatgcaatgggcctgtgctgaacgggtctttccgatctctttctagaaacgcctttagcacaaccccggaaggattaatggctgcgaactcctccagacttcaaagcctctgatttgaaactcccaacttgaaggtcaagcaaagaccacagaaattctcgaccagttctgaaggagccatattgttgcccaaatagcaattctttactcttttcgaacaagggttttccagaataatagattttaaaaagaaagaaagaaactggcctgtctactcgttctttcccagctttgcctctaatccttcattaactaactccttaccccctcccagacctgaaaccctctgcaataaatacctcttacgtgaattgcttatttaaaggcaattgcactaaacatccctcgagtttgcaaacagcgacagggttgagaggctggattggggtgcatctgggagagggtggggacgggaggagagagtaggggtagaggaagagggtcctagccagatccccggtgtctgaaggtagcaggtgcagccttccctgcacagtactaatctaaaaggggaagaaaagagttgtgccaccgaagcgtggcgtgaatcgttgtggggttctggagttttgcttgcttttctacattcacttggctgacaaagcgcataggggaggataaaataattcacccaggagcctgggcccaggatttacccctgtactgtctgtatcttcagtgttgggctaaaactcgagggcgtcggagtactagcccttagaagatagtacacagcccgacgtttgcggcagggccaggttaagtactgcccctcacccggca

SEQ ID NO: 3421 - DNA, 4001 bp, Homo sapiens
tgtacttgttgggttcctttttttcatgcagctttgttaaacatgatttatcctcaataaaaacaaatattaagaaaaatgatgcatttggctttcaacttttcctggtaatcctaaagacagagtcagttttccccccaacattgcttataagaacccagggcaagaaagaaagatttcaaaatggcccaagttatttttaatgcgtaaaagactgatgtgagttatgcatttatcctcctacatgctgcttccacaacctctcaagagatttttcacatatctaaaaagtcaagttgttctttgcttaacattcattcaggagatgagaggcctgtcctatttttcttttgtttgacttaaaaataatctcatcggtctatttcaatatcaacttcatccctcatctaggaaagtgctttatctctccaagacacccttgaaaagagtaatggatggttccttccacctaatggagatactgaatctaaggctctccttactgccctgtttatcaacacatcctctgcacagaaggtgaaaaactatatcctactaccacttcacacctggagagttttttttgacaaaaggtcaagaaaatgtttgactctgttcaaatctttatggatgacaacaatctaatatgaatcataaacaaaatcaattctaaattttcttgttctttttctgttttcaaatatgcaaatcgatgtctgattacaaaggtagaaaagcagttatttttatcaaacgtaattggaaaatacacacttaatgcggtacatatgtttcacgcatttttgtataaggaatgttatattacacagcaaagaaagaaaaattcaaaaataatagagggctgtagacaattccggaaatcagaaaaactaaagttcatttttatcatatatccttcagtcaaacaagcattcctatagataactcttgaacagcagctattaaataaatcggaaggtacaatttaattcttcactagttggaaccagaagaatacaatcccaatgaagactggggaaaagttcaagacaaacaactttaaagggggaaaaaagcacaattaatacattgtccataacttaaaactttacaatagatctttggaattaaccgaaaactttacatttaacagcataaacgtatttactgtacatcaagtacacatttccttgaattccaatttttttcctaaaattcatttacaaaagaagttagaaatataaatatctacttttaaagtttctacaaaggatgagcagaaacttcttttcacttttataacaattcacagaaattagcaagtgttttgaaacgcaagcgttccactctctgcccctgcagaagagggggaacatgttaagaaattgaggcaaattctcaactgaaaaggaaacatatataaagtactcaggggagaaataatagctgaaagcaaaaaattactaacagactaaaagcaacagaaattctaatctacactcgcaactcttacccttgacagcacagaagagaatatcccgtcttacacattttggaattgcaattctgaaacgctaaatccaaagacaaagccgctctggggaaaatagcaattgcgcaacagatcaacagctccaacctgtcccttggccctggcgcggcgaggtttgcacgctataaagcaggaaagggccaaccgagggctgctgtgacggccaaccgagcgctgtcacggaagccaaggccacgcgcgcggtgagcgccaccagggggcaccgcgtccgaactagaagccccgggtgccgccgactccggcctcagagtccactgccctcgcccgcactttcccgcggcgttacgaggggccaactccgggtgcccgagcccgaacccctccccggccgagaaagtgcgcggggcccggctcagccgccacacgtcggggcttctgagcccgctgggcacttaaggcgctcctccctcgtcccggggctgggctttcaagagagctcaaggctgccagagagtgatccgagagatggatgacttcgcaaagccgcgcccacagacggcccagcggggtgagcgcgtcgcagcccgcactcaaggaggtcttggggcgcggcgaaggggctccgggtcccagcccgaaggcgacctcagttcccccgagagcggccccgtgactaggcacatttttgccggcaccgaggcgggggagccgcgcagccccggaagggccgggccgcgccggctcagacggccagcgtccgccccctcttgccccgccgcccaccgggccgctcaaacttaggggctccggagtcccagctctcgggcccggggacgcggctggattctcccccaaggcccacgcgagcgggctcagtccccagaccttcccgcaacttcccacccgttcgccctcgggctcgtggtcggtcggatcacccggccgcgtccccgctgcccctccccgccctgccccggcgcaagcgcggcggctctacccagcgccgcggtcctggctctggccagacgtgggggaagccggttgcggctgtccctcccgggccgcggttccctagctcccccgcccccgtcccggcaccaccgcagggcccagagggccgaggcagcacctgctgggacgggagtcccggcggcggcagctccaagtccatcatgatgagctgtggaccgtgtgttggggctccccgacggcggccctgttccggctgccgaggcgcggcgcggacagggcggctctggtggcggcggcggcggcggtggcggctgcgtcggcggctcctccgggctccccggcactcggtaatcggctacacgccggcgggcccctgccccgctccgcctcccgccccacaagggcggggcaagagtccgggcccttccttcccccgccggccgcgcgggctgagcttccgaaaatcccccacccgcgccggggctgacgcaagaagctcgcggtccgggggcgggaagggactgccagctggggtcccagcaggcgggggacctagaggaggtctccgttagctccccggtgccggcgttcagtttgccctcccccgcaaataagggcagcgctctcgcccgcgagataaagagttgtttgcgaaggtcgctggagttcggacgctttgaaacagtttaaacagttggaacaaacacacccggagccccggaaaggcgttggtgtaggagctgcgcctccctgatttggagttgcagaaccttgccctgcttttatctcactttaccgcccgagaatggcgccagccggggtggggggggctaaagatttggacccagaccgtgccactgccaactgccctcccgcccttgctcccttcccgggctggggccagtgggccctgcctaggggagatgtggacagctccggcagctcgtgttcgcagtcaccctgaacgccctcctctgaactcccacgtgtctccattctcctaagctcaggtcgtcaaaggcaaacggagaagcccctttaggtcggagagtggtcagtattgcccacccagagctgggagaaaaacgggaaccccaagagaacctcttcccaccaaagcgcagccaccacgccacagatggcgcccttcaacagtgtgtaataccacaacatgctgtaatcgtttactctttacaaatttctttttcacgtactcacaaaatagtacaaattaaaaaaagttacaaaaacgtttgtatagtattggctcattttataaaaacgtgcctagaaaaaaattgaaggttaccaatatattaaatgctgtggaatcaacgatttttatgtttctccttgttacttccaagtatgctttaaatctgcagtgcgtatgttttatgtcttacattaaaaacaattatttaaaaattaatcattgcccagagaagacttcaagtatttgaaacgaggaatattgtgaactcttataagggttcaaagaggatagataaatggt

SEQ ID NO: 3422 - DNA, 4001 bp, Homo sapiens
aaatatctacttttaaagtttctacaaaggatgagcagaaacttcttttcacttttataacaattcacagaaattagcaagtgttttgaaacgcaagcgttccactctctgcccctgcagaagagggggaacatgttaagaaattgaggcaaattctcaactgaaaaggaaacatatataaagtactcaggggagaaataatagctgaaagcaaaaaattactaacagactaaaagcaacagaaattctaatctacactcgcaactcttacccttgacagcacagaagagaatatcccgtcttacacattttggaattgcaattctgaaacgctaaatccaaagacaaagccgctctggggaaaatagcaattgcgcaacagatcaacagctccaacctgtcccttggccctggcgcggcgaggtttgcacgctataaagcaggaaagggccaaccgagggctgctgtgacggccaaccgagcgctgtcacggaagccaaggccacgcgcgcggtgagcgccaccagggggcaccgcgtccgaactagaagccccgggtgccgccgactccggcctcagagtccactgccctcgcccgcactttcccgcggcgttacgaggggccaactccgggtgcccgagcccgaacccctccccggccgagaaagtgcgcggggcccggctcagccgccacacgtcggggcttctgagcccgctgggcacttaaggcgctcctccctcgtcccggggctgggctttcaagagagctcaaggctgccagagagtgatccgagagatggatgacttcgcaaagccgcgcccacagacggcccagcggggtgagcgcgtcgcagcccgcactcaaggaggtcttggggcgcggcgaaggggctccgggtcccagcccgaaggcgacctcagttcccccgagagcggccccgtgactaggcacatttttgccggcaccgaggcgggggagccgcgcagccccggaagggccgggccgcgccggctcagacggccagcgtccgccccctcttgccccgccgcccaccgggccgctcaaacttaggggctccggagtcccagctctcgggcccggggacgcggctggattctcccccaaggcccacgcgagcgggctcagtccccagaccttcccgcaacttcccacccgttcgccctcgggctcgtggtcggtcggatcacccggccgcgtccccgctgcccctccccgccctgccccggcgcaagcgcggcggctctacccagcgccgcggtcctggctctggccagacgtgggggaagccggttgcggctgtccctcccgggccgcggttccctagctcccccgcccccgtcccggcaccaccgcagggcccagagggccgaggcagcacctgctgggacgggagtcccggcggcggcagctccaagtccatcatgatgagctgtggaccgtgtgttggggctccccgacggcggccctgttccggctgccgaggcgcggcgcggacagggcggctctggtggcggcggcggcggcggtggcggctgcgtcggcggctcctccgggctccccggcactcggtaatcggctacacgccggcgggcccctgccccgctccgcctcccgccccacaagggcggggcaagagtccgggcccttccttcccccgccggccgcgcgggctgagcttccgaaaatcccccacccgcgccggggctgacgcaagaagctcgcggtccgggggcgggaagggactgccagctggggtcccagcaggcgggggacctagaggaggtctccgttagctccccggtgccggcgttcagtttgccctcccccgcaaataagggcagcgctctcgcccgcgagataaagagttgtttgcgaaggtcgctggagttcggacgctttgaaacagtttaaacagttggaacaaacacacccggagccccggaaaggcgttggtgtaggagctgcgcctccctgatttggagttgcagaaccttgccctgcttttatctcactttaccgcccgagaatggcgccagccggggtggggggggctaaagatttggacccagaccgtgccactgccaactgccctcccgcccttgctcccttcccgggctggggccagtgggccctgcctaggggagatgtggacagctccggcagctcgtgttcgcagtcaccctgaacgccctcctctgaactcccacgtgtctccattctcctaagctcaggtcgtcaaaggcaaacggagaagcccctttaggtcggagagtggtcagtattgcccacccagagctgggagaaaaacgggaaccccaagagaacctcttcccaccaaagcgcagccaccacgccacagatggcgcccttcaacagtgtgtaataccacaacatgctgtaatcgtttactctttacaaatttctttttcacgtactcacaaaatagtacaaattaaaaaaagttacaaaaacgtttgtatagtattggctcattttataaaaacgtgcctagaaaaaaattgaaggttaccaatatattaaatgctgtggaatcaacgatttttatgtttctccttgttacttccaagtatgctttaaatctgcagtgcgtatgttttatgtcttacattaaaaacaattatttaaaaattaatcattgcccagagaagacttcaagtatttgaaacgaggaatattgtgaactcttataagggttcaaagaggatagataaatggtttagttttgtttttttcttcctcttctgcatttacaatctttctaactctatacaagactggttttcagtttctagcttcctggaattattcaaaaccaggtgaagtagataatactggcagtggttttgctatttcattcaaaaaccacacacacacccctgactatagcaatcaacgcccaaaaagctgcagagcttactttctctaggttgcataatttgacactcccaggatttatgtgtaaatttgtatattcagatattccttgagataagtgaagcctaaattaattacttgtaattgaagcaagcttctttaactcctattaattcctttcagctgttatgtgaaaaccctgcaacatgatctgcacaatgaaaacaagttaggagaaaactgtttgcaaaggacctcacatgaaagatgcagagacataataataaaataacatttctgagtccaagaaaaagacaagagtaaattgttaacaattcaagttacttattaaaattacgacatcagagaaggtagacaatgagcctagtaggtaggagataccagagtcatatgacatggttactgctctaaaggagtttataaagtatttggtatttccttgttaagccacaaaatttccattgagtttagactgaatgaaataaccttcacttttccaatgctgcaatttgctgagagtgtgttatttcaggcatctgcagagtacatattttcaaagggaggggagcaatatgataagagtttgaacttgtttaagaaaaacaaacactaaggaaaagctgtttggcatttggtttagccaaataaagggaaccccattctcaagaccacccacgtcaaggaggtgcccaatcttggcagactctggaatgtgattgtcttcatatgagagcctgagcccttgctttgccctccaaacctgcctattgtgttaggagggcacagataatgcatgttgagaagctctggaggagcaagaaagaacaagaaagaggaggtgctggtttttctctcctgtcttgctgccatgggatccttttttgctgccaggctctcctcgctactatttgggaaaaataccctccaattggttttatgttctattgactcttgtaccttttcattgattcctgaatcatttgctgtctttgggaagacggccttccctacatgcttgagatgtgtcaattgtgataccttgctccagattgctcataaaaaa

SEQ ID NO: 3423 - DNA, 4001 bp, Homo sapiens
gcaccgaggattcaagagaacaatggaatcaacactgaatgggaatcaaataatctgtgaagtcctgactgccactccccacactagctccagtgttgatcacagtaagagctgtcaccactttattttgagatggaaataatctcgcttttctcactctgtcacccaggctgaagtgcagtggcgtgatcttggctcactgcaacctccacctccctggttcaagcaattcccctgcctcagcctcccaactcgctgggattacaggcacacaccaccacgcccagcttttttttttttttttttagtttcaccatgttggccagactggtctcgaactcctgacctcagccaatccgcccagcttgacctctcaaagtgctgggattacaggcgtgagccaccacgcccggcacaccactttaaattacatgaatctattacagcactcatgactgtcattatttgttaatatatttttcttgctagactgcatactcattaaggggagaaactatcttcatttctagctgctagcacaatggcctcagttcttcatctctacaatgagattagtttcacagctacctcataaataatccagagaatccatgtaaagtgcttaaaccagtgccaggccatgcagtaagtgctcaataaatggcagctgctaccattatttaattggtgcccaataattactaattgagtgcagttcaaggtttggggtaaaaatgcctttttctatagctcagtatctaaatctgtgaatactctggaatttggaaatgcactagaagaataatattctcgtcccttcagcccagggaaaaggcagcagaatgaataaagaggaagcacattccaacatacaggtttaaagtcttgtttttttaaagtaagagtggattacattattcaaggaagacatctactcaaacacaggaggtaactaacaaaaaattctaccaacttaaatctttttaggatatacatttaaacttcaagagcaccattaacactacaatgtctaatactctagagggcaaactctccgtaggccattttctccagacgtaaaattaaggtacacctacataaatgtcctcttagcaatgttcacagaagtctttgaaaggtgaaactcaaaggtagggctcagggaggcggaaaaaacaagggaacagagtgggcttaatggtggtgggtgcagggaatctaggggtcctggttctcgtcggaattccatcacttagaaactgtgtaaccttggacatgtcacctcctctttcagggccttactgggaaaatgaggaaacgagacaaggtattttcttcccttctgtgtgacattctgattctgcgtttagaagaggagggaatgcacccggtagagggcctgggggcgggagaggcacacgattttaaaacagctcctccgttctggctctacagccagtctctacaagcttccgtaccgcagagactcaagaactgggtctctgagcctgagaggaagctccagagagtccgcccggattaggccacagaagcgccgagctcccgcacagacagcctcagggctcacccccaactacggcgacagggcggacccgccggctccatcagatgcactacccacccgcctcgagagagggtctgcaaggcggcgaccgctccgctggctaagcccagcggcacacctattcggagctccaggctcgtcacctaccgcctgcgcagcccggcggcaacagccgcagctccccagccccgcctggccgtcgccgccatcttagtccggagtgcctaagggtctccctgacagaaccacgaaagatctgcgcagccgcaggctggccggtagctgggcgggcactgggaagagcccaccctaccggctgcgggcggtcctgctgcggataagtgcggtggcctacgcgccgaggtttgcaggctactgcgtcaccctgaccaagagaggccggggaacctttcccgtttgcgccaacgcttggttaattcacgcagcactgtgaacgcatgcgtgtttccgtactttgttttccctgttggctaggtttttagctggtgctggtgctgccttgcgaatgctgtttccagcccctaaacctgacccattccctcctctaggaccctactcagcctccaggcccagctcagtgactgcccccaaagactccctggagcattccttctaaaaggttctcgcatttctcctgcccttttcccatgggtctgatgtggaactgtgtctaacccttcctcatagctgtgcttgtcagctgccacttggtcatcttggaccaacccgcacagaggatgtatctggtacagtgctgcccttctccgattaacatgagacttgactagtttccagggcagagtgccaaagcccattacctattcttccagaaccttcctggagtattccgttttctctaggacaacggttctcaaagtgcggactaggggccaaaaaaaagcaggagaacacgttagaaatgcacgttagaacatgttagaaatcctgggccccactttatacttactgaggcacaatctctgtaggtggggactagaaatctttgttacttgctttttttttttttctttttccagagacagggtctatctctgttgcccaggctggagagcaggagtgcgatcatagctcaccaaaaccaactcctgggctcaagtgattcatcctccagcctcagcctcccaaagcactgggattacaggtgtgagccacggtgcctggcttttattagcagtagtagtagtagtatttttgtagagaagaggtctccctgtgttgcctgggctgctcttgaactctgctggcctcaagtgatccctctcacctgggcctccaaaagctcttaggttacctcaccctgcctagtagtgttttaacaaacccttcccaggattctgatgccagctaaaatttgagaatcactgttctggaagacagaggactggtttccagaatggaaacagcacacctgttgttgaacaggttgaggccacacccaagacaaccctagtaatttctatggcccacagacacatctaagagggtgggtgggtttcaggcctgcagctcgcccgggcccgcacactgagtgggctgtgcctcctacgagtttggttcattcccaatgctgcgtacttgcttttaactactagtgatcttcccccatccaaccccccacccagtgatcttcccccatccaaccccccacccacccccccacacacacccattctagaccgcaaggcagtccaaggctctgtttttgaccctcaatcaaaaataaaatgtggctcttccaccttggaacaatcgttcttctcagacttcaatttttccctctctgatggattccttatcataagaaaaatcctgccttgccccaaatcctcttccacactcttttcttcccttcagaaccaagtggcttaaaaaaatggtctgcactcttagtctctagtttttcacttcccactcctcaaacccctgaaacgaggcttctatgtcccaccattcttagggcctgctctagtcaaaccacccacagcctctgtgctactgtgtccggaattggtgggttcttggtctcgctaacttcaagaatgaagccatggacccttgtggtgagtgttacagttcttaaagatggtgtgtccagagtctgttccttcagatggtcagatgtgtccggagtttgtttcttctggtgggttcgtggtctcactgacttcaggagtgaagctgcagacctttgcgatgggtgttacagttcataaagacagcacgggcccaaagagtgagccacatcaagatttactacaaagagcaaaagaacaaagctttcataacatggaaggggacccaagcaggttgccactgctgcctcaggcaccctgcttttattcccttatctgaccccacccacatcctgctgatt

SEQ ID NO: 3424 - DNA, 4001 bp, Homo sapiens
attatatatctagggaagaaattttccaaacctagaatttttatttaacagatagactgtcggctgctctgacaacaatgaagaacgaaaagacttctggaaccattttcagagtaagggaacctatatcattcattcacgggtgcctctcctgacgacatgagaactagcttgatgtcactagcgattttttttttttttaatgcaagtactgaagttcttgggtcactatttgaatccattttccctattcacagtgcttcaggtgcagctgtgtagcagttggaccacacaggctgagcctcggcttcccttccaggccatattcctggagaggcttcccttcctaagccaagggcctctggggctcttgcttcctccctacttcgcctttcctttccctgtgcaaagttggccaccgcctcctcttcttgaatcgcaccaggcttttcccagaaccccccttcacacgcctcctcctctagcccaactctgctcccaacagccggtttggcttccaggtcttccttgatgggggatagtggagtcctccccgctgcacagctcagccgcgctgcttcatcccttctttctggcagaagtgataaggggtcagagagccctcccaccagacaagagctgggcaaatagacctctccgcagagagcaggacagaaatgtttgctaaagcccacttgtgcagcgctattaaaatgcagcagttttgcctgcggaaccatttagagccaaacatgtcaaaagctttccttacccatgtcagacgcagtccttcgtatgaaacacaacggcatcccatgagcaggaggaccctcagagtcctccagggacccgcgtttcccaaataaaacccggttactgcggagacacccacctatttgttcaatgaggtttctccaggagtcggcgggaatggggtggatcatccgcagggcctcggtgagcgtggtggggctgtcggccagggccggccactcctcgggcgtggccccatttcccggggtggaggacgactcactgccagagagggaggaggacaggggctggttatttttaagcaaggattcacctcggctggctagcgaggggcgtgcgcacaggcggctgctagccagccggaccttacccgggaccgtccaggggcagcggccgcagccagcgccgcccctcccggccgggcgggccccaaaagccctttctgtcaccgcaccagggcgcgaccgggtgatgcatttccacaccagcccgcccaaacctccatggttttggagctcccgggcaggcggtggaaacttggcgcaccgtgcccactctccggcgccgctccgacagcccgacgggtcccgcggccaggaagccactcggcgcccctcgccgtcactcgacccccggcccctttcggactccgatcctcccgtccccaggccacacggcgcggaaaggggatgccgagcgggacgcgcacgaccagggcgcccaggacgagggcgctggaggagactccgggcagggaccggggtcccaggggcccgggccggggctcaacacccacccgatggggtgcgggcccgacggggcccgggggtgggagtaggggcggcgggggcccgcggaggaggagtggggataggccgcgcagggggtgcccgggaccccgggcgcaagctgggaaagaggcacgcgggggcggcgcgccggggccgggacaggcgcccgtcctcacctgccgggcaggtgtcccgccgccgagtcgcgcgcgtcgctttccgaggtggaactgtcgtggtccacggcgcaggcggcgctgaaggcagcggccagcagctccatagggtcggcggcggggcgggtgcgggggccgggtcgggggccacgccggggccctgggctgggtcgggggcgactagcgggctgcggagcggggtcgcagcgcgcgcggctcgaccggagctgcagccgccgccgccaccgctgccgagcactcccgcgggcgggcgcgcgcctggaggctcccggggttgccacggcaacgagggaggcgggaggggcgcgcgcggcgggggcgaggccgggcggcggcggggcgggggcgcccgggctgggcgcgacccgggccccgcgagcgccgactgcgggctggggcctgccgcgggctcgcgccttcctcccccgcgccgccgtgccccgacccggagaggggcagagctgcggaggccctggagctgcgcctttgcctgccccgcccactcctcacggcgggggaagcctggaaggggcgggcgaggccaccctcggctccccagtgcccgcagacctccgccttgcccacgctgggcaccccctgcggtctcccgcagggtcgcagctcggcgacccgctctgaagctccgagcccggcctcggggaatgtgtccccgctggagggggtctccgtcttgtctctgctccaggcggagactggggtctcaggggctccttgcaagcccgctcctgagcctcgcggtggggagggggccggcgcggaggtctttcccgggcgagtctggtcgcaggacgagccacgctcagctacgcacgaccctggcgggtctgggatgggttcgggggcaccagaggaggagaaaccaagtgcccgaaacctctcctgggttgccctgcccggtgacatcgactcctggactctgcgccttcgcgttagctgggtcagtccgctcgcggatcagaaagagcagaaaggacagtcggaagagcgaggcctggaggtgcctacgggccgagccaagccgccctctgctcagggatcatgctgtctgctcaggtgtggcgaggatatctagcaagatgccccccgcctaccctcgcgaaggcccctggcgcgctgcccggtgtccttttccggaggccagccggctcacctgggtgggcccttgggtgaccgcggcctgcgcctgcagccgggcctgtcctttttacggccctgaggaaaccccaggggcaggggtggagtgcggagcatagtcccccgcacgctccaacccacccggcatttgtttaaattagcaaattcttcgttgggggggatgcaaacattcctggtggcagcggtgcagttactcgttaattgtttggctttaatggatccttaaccagtcttgaataaggcaggtgtgatcaagggagggttggggaggaagctgagaagcattaagctttttgcctggaagggagctctcctccccacgtggtctgacttccccagctttgactctagaaaagggtgttcaggtagactcaaagccagtctctaaagctgccacttagccctggtgccagaacgggcaggtctgatctcttcatgccctttggggccagaacgggcaggtctggtctcttcatgcccttaaggcctgagaatattcgagacaaccatctggtcttttcccaagccaagcaccgcccttccttgactcactcccatggacccaggtatctccaggcagccacctcctgcccttagtgtgttgctctgctcactggccatctccatctggccatcccacatcttaggctgtcctggctgctataacaaaataccatagactgggtgtgatgtggttcggctgtgtccccacccaaatctcatcttgaattgtagctcctataattctcacgtgttgtgggagggacccagtgggaggcaattgaatcatgggggtggtttcccccatattgttctcctggtagtgaataagtctcacaagatctgatggttttataaaggggaaaccccttttgcttggatctcattctctctcttgcctgctgccatctaagacgtgcctttcgccttctgccatgattgtgaggccatgtggaattgtgagtccattaaatctctttttctttataaattacccagtctcaggtatgtctttatcagccgcgtgagagcggagtaatacagggtgtcatcagaacccagt

SEQ ID NO: 3425 - DNA, 4001 bp, Homo sapiens
gcacagcaattatctatgaaggagtaaaggaatttttgccattggggttgtgctggggggtgacttcagagcatcagagctgactccttactcgggaagcaatgggcccatgtagatggggaagggacgtcatcttgggagacgggatgtccgacttggtgctggtggctcaccagcttcttgggacaaacagcagctcctgcgcccctggtagagccagcaggcttgggtggttaggtttggtctcctctgagaggctctgggtggccccacaacatctgggctattttgttactggtacaagcttccggtctcccacaggccaagggaagttcttaaagcaatgaaaaaaaaaaaaaaaaaggaacagagacagagtcttgccaggttgcccaggttggaatgcagtgatatgatcatagcccaccgcatgacttctgggctcaagcagccctcctgcctctgcctcctgagtggctgagactacaggcatgcatcagctcttcttaaagcaattcatcttcccccatgtctagcctcatctgtgtccccagccccactggggcagaaagctgtggaatgttactcacactgtcattggatcaacccctggctttcctgtggggatcccctccctgggaggggttcccatgacaatttgggctccagaaagggatgtgggaggagagtgcggtggagggaggtggtctgtggtctcccttcatggaccagaaagcttgacccccaaggggaccctggcttctacttcctcagagctaagcagtgccaaggggcagcctgagacatgggcaaaggggaagcctaaatggaaaaagagagagagagagagagaaagagagaaggggcagggaggacaaagacacatggcaagtgtccaagctggaacattcccaccagtggccttattgcattaaggattttcccaaaaagcagaaatacactgatagtcaatggaacatagcagagctgtcacgagcccaggaaacacaagtcccacctctacacagccagagactgtgtgactgtcccaaattttaaatcaagatagacaataagaacctaccactttcacatccaagaaaactgtgtccctacacatttcagtcacaccgtgctgtggcttgaggccagccagatgcaaaaatcaggaaggttctgaggggtagggccttctgtctttctgaaaggggcccctgagcggagggggcagtgctgggggagctaaagcgcagtgggctgtcacttcacgactatgacttctgtttcccaagtgcacttcctgaccctgagatttgtgccatggcacacaggaatcagggcacttccgtttacatatacgctcattatcaggactggcgtcgtgggtgtggggcctgggcagtcacagggccctgttcttagaaggtgccccggcttgctttaatgctgtgttgttgtccttttgaaagccttactattttaacaaggggccctgcatttttatattgcacagggccctgcaattatgcagccattcctgcttttgatctcacttaccccacagccataatggaagagcgcctggaaggagtccttatcctgattcccagatggtgaaactgagtgccaggaggggcagtgctgaagccgagaccagacaggatccctcgggtggaatccagggctgctgtttctcttgggggctcctcctcagtgaatggatgggtggtaatctcctttcctacctgtcctagcggtagcctctgttccttctcttgttttatctcattttatttttttaaaaaataccaaaaccattctctcacctgccagagaggagctcataggagttgggcttcctcagagagtgttcctccctcgtcccctgtcctgtccaggcacctgcgagcaggatggtgtgtccccggctaaatccacaggcgctccactctgtcccagagagcccacagccaaaaacttcgtcctgtcctggaaaagcttcactggtaagcattcccgacctttagacctgccttggcccatagctggccacgagcccataacgatcacttcccggctgggtgtttaccttcctgggccccatgggttgagccagggtggcagccacatacctgacacaaaagtggtgcaggagggaagggctatctgaggggaaggctgggcatggctggaatacccgccgcccgcccagtgcaagataatgctgatggtcacaccaagaggggcccgtggctcagctggcccaccaaccccaagcattggccaagccagctgcacggccctcaaatctgagatttgggagaggctttggggtcctccagggttctagtcacttcctgccatggccatctggccttaactcaatcacttccaggcatggaacactcactgctttgtaaggcatcttgctccattattattattattattattattattattattattattattccctctaatagcttcctttaatccagtgcttactacatgacaggcactgggctaagtacattacataatctatgtaatccttgtgttgtcactatgaccagagaatcatgcccattttaaagatgcagaaacagaggctcaagaaattgatcatcttgctcaaagccccacagctagtaagttggggatccaggattcaaacccaagccaactagtatcaaaaccactaccatcatttgccaagtttaattgctacatcatccatctttatataaaactcaaatcagcgtttgttttagctatctgttctggaaacaaattaactcaaagtgtgtggcttgaaataacactcatttgtcatctcagtttctgtggctagaagtctgggcactgcttggctgggttctctgctcagggtttctcataagttgccatccaagtgttggaggggctgaggtctcatctcatggctccactaggggggatccacttccaagctgctggtgttggcaggattcagtttcttagggctgtaggatgaaggcctcagcccctctcagctgtcagctgtggccactatcagtcctttgccatgtgggcctctccgccctggcagctcgttgcatcagagagggctatggagagagtctgggaagaggtaggtcagtcttttgtaatatactcaaggatgtgatattccatcacttctggcatattctactcgttagaaggaagtcatcaggcacagcctacactcaaaggtaggggattacacagggcacaataccaggggtgggggtccctgagggccatctttgaaagttcccacagccatctgattgccacaaaacatgggtttcagttttgtccctgaaagccagattgaagtagtctctcatctattctctcacccatccatccacccatccacccatccatccacccatccacccatccatccgtccatccatccatccaccatccatccacccatccatccatcatccacccatccacccatccatccacccatccatccatccattatccacccatccacccatccatccacccatccacacttccatccacccacccatccatccacccacccttccatccatccatccacccaccatctatccatccaaccatccatccatccatccatccatccatccatccatccatccatccacccaaccatctactcatccattcatccacccactcatccacccattcatctacccaaccatctactcatccattcatccacccactcatccacccattcatctacccatccatctactcaactacccatccacccacccattcatccatccacccatccatctatccacccatccacccatccatctatccacccatccacccatccatctatccacccatccatccaccatccatccatccaccatccatcccttcacccatccatccatccacccaccatctatccatccatccacccacccatccacccaccaatccacccaccc

SEQ ID NO: 3426 - DNA, 4001 bp, Homo sapiens
ctctcaggatttttttaaaaatccctaaaacaggttcttaatctagagtcaatgcatgtgaatcctctagaattatatgaaaatgttatgtgtacacgcatatatgcatggggagggggaagaggtctacagctatcatcaaactctcagggatcgatgacacaaaaaagagctaagaacctgtgtccaggagcaacagaaaagacctaaatttcatttcaacaaaaaccagaatgactaggaaatcatgaatacaaggcagagcacatcacagaggtaaagactgaattaacttccacttaactcatcctccacattcccactccagtgcactgccaccaatgacaacatgcccagcctggaacccctgcaaaacaacttttctatctcagcagctaaagtagtaggcttaacctagtagacaatcagaactacggctgcttgacagagaatgtgattgtttttcctgtgggggagaaaaaaatatgtcaatttccttcattattccagtctacaaatataaaatgaacagaagtaccaggaaggaaaaatttagaatgtaaataatgaaattccttattaagtctgattaacacagtcatttcccctagcttttgaagtgtgcccttgtgacttgtgacataactttatatatatatgcatatatatatgcatatatatatatgcatatatatatgcatatatatatgcatatatatatgcatatatatatatgcatatatatacatatacgtggtgatctttctttatggcatcctcaaagccttgtgtttggaggatggtgtttccgtcacatttcccacatgctgctcttatggggacagaagtggtcatgggatgattaagctagtcctagccggacaagagctccacaatgccaaaggtcacaaacgcgaataaagtcgccactttcatctcccttataggcactccccagtgtactcttaacagttgccaaaattgggtttactattctagcccattccttcggaaagcccggaagctcagaaccctcaaattgatgggttttgtttgtctgttgggtaaagggggaggagtttaaaatgtggccaggagtaacgggccctataaaaaggcctgacacattgggcaccagaccccggctgcctgctcccaccacacgcgtcccgttctgcgtccgaagcttctacacttcatccttttcttttttccttcaaggctgcctctaacattcacattaacgagattcacgggtttatttctcttgagtggaggggcgctgagcggcatcccggcggaggggtcccttgagaacctttatctgcaccgagtccgctcctcagcagtgacccctctgggcagttcctccgacgccctgcagagggcagtagaggcccagagagcatcccggctgggccccgcccggtccccctgggacagcgcgaaccctaggtcccaccacaaccatagccccaccccaggagccgccaggcgtcccgcttccacccgccccagctataacagccttcgctgtccgccttcccatttctacagcactggctgcactggggcgcggcttcaaggggcaacaaagccggccaccagcggcttcgtcgcaccaaacaggcgaccaacgagtaccttcactcgagccctaccatccacgccgggcagcagccagcggactgcgcacgcgcggccccgcccacccctcccccggaggcctgccctggaccccggcagcgcgcgctccctccagggagaaaaggccagcgccagggccaacccgcagcgtctgagcagcccctcgctggcttgctcctgcccggactcgaacgcgattccacctaccgtcagcggccgcgagagcgcccactctcttagccgcacgcacgctttcctgcccgctcgcgcaaaccgaaaggcctagagtaagaggccgctttccccccaccgcaagaggaggcagggtcttgggatacaggggcggggcctatgcctggcgtgggcggggcttctgggcctgggacactgatgagaggagcgccccagtggccagggtaagtggaggagaggccgggcagccggctagtagaagggtagtggcgcgtcttggagtcacgctggccgagtggaaagaatagcgggcgaggcgcaggagaggggagcccaggtttggatttgtcaaacttgagtcacttctcttccctcccctacctatccggtctctttttaacaaaataagggattgaacttctgtagatgatctctcaggtcctccaccagcactagagttgttgaaggaaggagtctcccaggcataagtcccatagtccgacctcatcctttacctctcctgcttcatttctccatcatccccgtacttatactccctcactactgagaaatttgaaacccctcacctatcttggactttgtacaacccatggctttgctcaagctggaccccgaacctgaaaacttctctgcatccattttccaaaaccaaaaatcctcatttgtcaaggccatcctcattgcttcttgcataaagcctttcccactgtccccaatcagaattcattatcccttcctctttgctcccacggcattattttaatctttattacagactgctttctgctttgcattttcgttagtaattacaaaggtctttttaaaccgtaaatgccttgagacggcatggaccctgtcttatccctgtagttccaggaccttgcacatgggagatgctcagtaagtattaaagtgaatgctggggttcaagtggcattgatagtacacaggcaaaatctcaatcattcatggtccactaaatcatggcctctgctctggaacagttaggcctaattaagacaaggaaaggcaacccaccctattgggaaatggaacctctagacagtcccatgtaatacacacacacatatcctctgcctacaagaaagaacagtttgggagctgactctccagcagatgagagttagggctaaattaaccagggcagaagtaggcgttctggtcatttctgggacctaaacccttctctgctagattcagggcatggctcccctgagccaggcagcaagtctgccatctcttctggctcagaggagcctccttcctcatccccagggtcttcaggcagtgggcagaggcagtggagaggctgggggatgcagggacagaggttttggatggggaaaggaagtctgtacacttgagcagccttctccctgggcttctgaggcattcgagcctcttgggcagtgaaaggagatggtagcccttgacctaggcctcgctcaagctgtgtgcctgcaaaagagaggtttgtcaggctattgcccatcccagggagggatggcttcctggccactccccagtctgctagggcctagcctcaacttaccaggaatcgtgttctctagtaggaagcctgagagtccagccaggaagatgggctgtgtcagcagtgagtgcagtaatacatccaaggggctccagcctatgaagagttggggccaggcaggaagggaactctgatcctatatccaagcccaggagtcttaccctcccagacctaaacctaagccttggactaaggacagatctttctgaattgtcatttcatccctctcaccctttgtctttctactctccactttccaaatccaggcctttcccacaggattcctgctcaacaccctgtgttctgatcatccacacaccctccatatatgctttgactattccaggttccctttctctagaaagcgtaatatttaagtcccaacctcatctcccattttttaccctctatgctctatcctgggtttttcaacctcagtcctactgacatcttggaccagataattctttgttgggggtggtggtgcaggggggatgtcctgtacagtgtaggatgtttagcagcatctttctatccactaaaccctagtaacaactccctcttcctc

SEQ ID NO: 3427 - DNA, 4001 bp, Homo sapiens
cgcctcccctgattgcaacagaatttggagttggggtggtatatactggcattacaatgtgctttaccaaaaaacagaataatgtggcggggcgcctgtaatcccagcactttgggaggccgaggcgggaggatcacaaagtcaagagataaagactatcctggccaacgtggtgaaaccgtctctactaaaaatacaaaaattagctgggcatggtggtgtgcacctgtagtcccagctactcgggaggctgacgcaggagaatcacttgaacctgggaggcggaggttgcagtgagccaagatcatgccacagcactccagcctggcgagagagcaacactccgtctcaaaaagaaaaaaaaaaaaaaaaagaatgtttaaaatgtcaagtgctttatcagaatcaaaaatcaaggaatacataggcaggtcactctataaatgggcagggtcaaggcagaagaagggagaagccactgccccttaagcaacatttgctacacaaaggccaggctcaagaggtgggaggggataaggtatagggtacttttcccagacagcctgtaagccttctaagtatctacatccaacaaggaactgaaaaggttggcaacagagggaaggtgggagggcaatggaaaggtagaaaaaaactgctggctccaaaatatgcacaattagtaaatgtttaatcaaataaccacaaaagataatgctgtcaaccccattcttaaacttaccacttataaacactttttgaagaaaaacatttcatagtatgcacaataagaaagcatagccaactgtaaatttgatgaaatatccataagtcaattattccaaaagcaatttttcaacatttctatttaatgagatgaagatgcttgtttaacacattatttgaagtgatacagggtctccaaaaaccactcgaggtcttggaagtttgtttttgtttttttctttttgacacagggtttcactaggcgcctaggctggagtgcagtggcgtgatctcagctcactgcagcctcgacttcctgagctcaagcagatcctcccacctcagcctcctgagcagctgggactacaggcgctaaacaccacacctggctaatttttgtatttttagtagagatggggattcgccatgttgcccaggctggtctcaaactcctgcgctcaagtgatccacctgcctcggcctccaagagtaccgggattacaggggtgagccactgcgtccggccttgaaagatcttctaatggtcctcatagtactccattctccagcattttctacatctggcaagctcgaaagtgaaaccctagtgggccatcatgcaggttttgagttatttactgttacagatgaggaaactgcgaagctacatggccacagtcaacaacgacaacagaaggcaacatagtatggcggttaagagcaccgactctgaagccagcctgaatcctagagccagagctgtgcaacagcaggtaaatgacttatcctgtgcagtttcctccttaatggaaatagtgcccaggccacaatatcgcgagatttacacgtaaagctggaaacaactcccgtcctagagtaagcactgtttactattaagcagcatcagtagggcccctttgcaacctgcaaaccgctccctcgacgttacctcatctatgcctcatttcagtgccacttcaggccttttccaggacagtgaaaaaccacgagacacagccagttaagtctgagtcaggacccctgtcccactagtgcgctgtgctctggtgcggcagggcagttttctgacccaatctcctcttctgctgtcctctgcagcaccaagataacaatcacagccggccccaaccggcacctaccgcgaaggtcacaactacactcgcgggtttttaaatcgcccactactcaccagtcccggaaacttctctgcgtcacttccggtcccgcgtcggcgctccggatgctgtggcacttggctccccgtagcgggagagctgggcggaagtggtcctttccgtttggcagccgagtgtaaagcattgcttgaggttgcccaggtagtttcgccttacacttcttgtcccagtgcaattattagtagagctccctttcactgtcaaatttccggttggggataaattgcattgtcgttttggtttgagataggaagatgaggggaggaaggaggtgaggcggtaaggggcgttctctctcttgggtcccgcgcccaacttccgctggcccaaagaaactataattttgaaccaacagacctctgctggcatctgcgattgcatttttcctgttttaacaacggctgtgctagacgaagtggtgaagcccaagtatggagtaacgtcattaattctttcattcacttattcgaatgcttgctgagttctgtgttgctactggtttagttcttgggatactgcgagtgaacagtgggcggcgaggctgttgttgcaacgtcagagtaaaagaaggaccctgcacggcggcctcccagcacttcgggaggccgaggcgggcggatcacctgaagtcaggagttcgagaccagcctggccaacacggcgaaaccccgtctctactaaaaatacaaaaattagtcgtgcatggtagcgcgcgcctgtagtcccacctactcgggaggctgagacacgacaatcacttgaacccgggaggcggaggcggaggttgcagtgagccgagatcctgccgcactgcactccagcctggcgacatagcgagactccgtctcaaaatgaaaaaaaaagagaagttcatagtatattagtgataagtgctgtggtggaaaaaaaaaagttcatagtatattagtataagtgctgtggtgaaaaaaaaaaaaagcgaatttcatagtatattagtgataagtgctgtgggagaaggaaataggaatgtcctagggctgaagggctaaagcagttctgtgtaggattgtcaggtcagttaaacttgacatttaagcagaaatttggaggtgaggaaattagccgtagagatgtctgagtataagaattccaggcaaaagggacacccaatgcctggaccctaagggaaggtatctgggttattgggggacttgcaaggaggctcttgaagaagagcaagccgggcaagtaggagattgggaggcttgaatcgggtaggatatcttctatagccgggtttttattacctaggggatgccattagaggattttttttttttttttttttgacggagtctcgcgctgtcacccaggctggagtgcagtggcgcgatctcagctcactgcagcctccgcctcctgggttcaagtgattctcctgccgcagcctgctgagtagctaggactacaggcgcctgccaccacacccggctaatttttgtgtttttagtagagacggggtttcgccatgttggccaggctggtctcgaactcctgacctcaagtgatccacccgcctcggcctcccaaagtgttaggattataggcgtgagccaccacgcccggcgaggtttttatttaaaatgttcagtaaagatgagcgtgtgtgagttaagacaggaaaatgagcctaattctttttttcttttgggactagagacttatttttgagctcgctgtaagactgagaaatcacgtagtccttcctgaaaccactaagaggaaaaatggtaagttttgagcaatttttatctaatgtctttcattataagtaatttttagaaattcagtcaagggcaataaaagttcatggaaattgcagtggcaagatggagaaattgtataatatagaagcacttaatatggaataattcttttaaaaaatacacaaaattgctttaaaattctttaatgttgtcacttaaaatgcacagaatttacctttttttttttttttttttttgagtttcactcttgtctcccaggctggagtgcagtggtgtaatctcggctcac

SEQ ID NO: 3428 - DNA, 4001 bp, Homo sapiens
acaggtgtgagccaccgtgcccagcctgggagtctcttaaaacaaacaaaaaaagactattcagaaaaatatttcccatgatgttaaataaaaagactgatttatgaaaatatatatttaaaatgtaaagataaatataaaaaagcacttgggaatcactgatttgctgggaaccaataaaagccttatcaccacatcactaggatctatctgtattctctaaagtaaaaacaactatctttgaacattaccaggattagaaatactgtaggtaaaatgcatagtatagtcccctgacatagaaaatacttagtgttacttaccgtttttattgttttgaaaaaattccatagttctccaggacccacaaacaaatgaggagtatgctactttgtaaatcaactccagagaaaactatttgtttcaagcctaaataccagggttatagactttgtaaggaagatgcttaccaataaatacacacaaaaaaaagagaaaaataaattgtacctagcagaaaaagaagtgacagaaacaccgtcaattcctttcactgcagacatgactttgtccaggtcttgggtgtagttaacgttgaattctactcggtggtttccctctgtagggtagttgggagctttggaaggatgtatgggcctggaggtacaagctcctagagaaaatattgtgggaaaatgggagttttggggggtgagagattaagatttaaaagtaaactattataggcaaaatttctaagaaatgactttttaaaaagattcattctcatgcttacataacatacacacatcccttagatatacatcaccagtccccataatctagggctttggcatggacatacaaaatcaaattattttcagaattattttccaaaagattcttaaatctctgaaaaacttggacaagaaagactgattcatacattttcagataatacacagaatggtctactgcttggtaaatctagccatgtaaaccatcattcaggttgcaaatgctcatactttatttgaccacattaatccagatatcatcataaaagctttagcccaaaatgagtaaactaaagacttactaaaataaagctaaaatccatccatcattccctcattgtgctaggcataagtaaacattcactaaaaacattcattaaaaccctgatgtctatttacttgacttatcaatcaagtgtattctggagaggcctgagctttcaattcaacaagcattttccaagtgcctgggtgacaggcattgtgccacaaaagtgaggaatcatgaagctcagtccagtaaggaagacttctgctctccttactccataagaataaaaaatgtttcctttttcaaatgcaatttaactgccaaatttcagcaacattattttaaaattattatataaaaatggaatcatgccctccccaaccctaaagcagttaaaactttactggaaagacatcctaaagtttcaaagtatttgcagggaaaatatcaaatatgaaagaggcttctcaccaagccctttagccaaccagttgttgacgccctggggcgcagcatcataggctgtatgaggagagtagataccgactctgttctccagagcccggatcaccaggcgctccttccatgtgttccaggttatgcgcttcatgggtcggaagataggcggatggtaggagagaatgaggtctgccttcttttgcagcacctcctccatcacttcctcagtcaggtcattggtcaggaagagtgtatttacagtatgtggtgggcttggttccaccagtaatccaacattgtcccaactctcagcaaacgagagggatgcaaagtcattcaaggaagaaaggagagccttcaaatccatgaaggaacgggaagaattgcagatcagggaatctacaaaccggactgtcgtggggactgggcgtacgcaagatgacaacatacagaaatcaggtaaagttcaagtttctgatgtcaaaacaaagaaaatggtacacaggtatactttaggcctggatctttgaggcatcaaaacatatgggcaaaagagctgtcgtcatagagatctgggttcaaatagtggctctgccacttaccagcacactgtaacttaggtaagccatttaacctctccaatcttgttttctcacctacgaaacagagatactataacccacttcacaggccatccagaggagctaatgaattatgtaacctagcaaagcctggtacataatacacaaacgtccatcccatctcctgccttgcacacccttgttcttattctccctacccttgcttcaaccaacctcctccctaatccatttctctaaatattacctttccttttcccaagccccctccaacttcttaaataaaacttttcttgacctcccttttcagcatccttcccaaggctccccacccctcagtattctcataattctgtgtgtgcccattatgctaaagctactatgtaataggaactaacttcaataaatctcagtatcactaatataagccagcactaaatgcttactgcatagaatgacactgcccgcctcccctgattgcaacagaatttggagttggggtggtatatactggcattacaatgtgctttaccaaaaaacagaataatgtggcggggcgcctgtaatcccagcactttgggaggccgaggcgggaggatcacaaagtcaagagataaagactatcctggccaacgtggtgaaaccgtctctactaaaaatacaaaaattagctgggcatggtggtgtgcacctgtagtcccagctactcgggaggctgacgcaggagaatcacttgaacctgggaggcggaggttgcagtgagccaagatcatgccacagcactccagcctggcgagagagcaacactccgtctcaaaaagaaaaaaaaaaaaaaaaagaatgtttaaaatgtcaagtgctttatcagaatcaaaaatcaaggaatacataggcaggtcactctataaatgggcagggtcaaggcagaagaagggagaagccactgccccttaagcaacatttgctacacaaaggccaggctcaagaggtgggaggggataaggtatagggtacttttcccagacagcctgtaagccttctaagtatctacatccaacaaggaactgaaaaggttggcaacagagggaaggtgggagggcaatggaaaggtagaaaaaaactgctggctccaaaatatgcacaattagtaaatgtttaatcaaataaccacaaaagataatgctgtcaaccccattcttaaacttaccacttataaacactttttgaagaaaaacatttcatagtatgcacaataagaaagcatagccaactgtaaatttgatgaaatatccataagtcaattattccaaaagcaatttttcaacatttctatttaatgagatgaagatgcttgtttaacacattatttgaagtgatacagggtctccaaaaaccactcgaggtcttggaagtttgtttttgtttttttctttttgacacagggtttcactaggcgcctaggctggagtgcagtggcgtgatctcagctcactgcagcctcgacttcctgagctcaagcagatcctcccacctcagcctcctgagcagctgggactacaggcgctaaacaccacacctggctaatttttgtatttttagtagagatggggattcgccatgttgcccaggctggtctcaaactcctgcgctcaagtgatccacctgcctcggcctccaagagtaccgggattacaggggtgagccactgcgtccggccttgaaagatcttctaatggtcctcatagtactccattctccagcattttctacatctggcaagctcgaaagtgaaaccctagtgggccatcatgcaggttttgagttatttactgttacagatgaggaaactgcgaagctacatggccacagtcaaca

SEQ ID NO: 3429 - DNA, 4001 bp, Homo sapiens
tctcagtatcactaatataagccagcactaaatgcttactgcatagaatgacactgcccgcctcccctgattgcaacagaatttggagttggggtggtatatactggcattacaatgtgctttaccaaaaaacagaataatgtggcggggcgcctgtaatcccagcactttgggaggccgaggcgggaggatcacaaagtcaagagataaagactatcctggccaacgtggtgaaaccgtctctactaaaaatacaaaaattagctgggcatggtggtgtgcacctgtagtcccagctactcgggaggctgacgcaggagaatcacttgaacctgggaggcggaggttgcagtgagccaagatcatgccacagcactccagcctggcgagagagcaacactccgtctcaaaaagaaaaaaaaaaaaaaaaagaatgtttaaaatgtcaagtgctttatcagaatcaaaaatcaaggaatacataggcaggtcactctataaatgggcagggtcaaggcagaagaagggagaagccactgccccttaagcaacatttgctacacaaaggccaggctcaagaggtgggaggggataaggtatagggtacttttcccagacagcctgtaagccttctaagtatctacatccaacaaggaactgaaaaggttggcaacagagggaaggtgggagggcaatggaaaggtagaaaaaaactgctggctccaaaatatgcacaattagtaaatgtttaatcaaataaccacaaaagataatgctgtcaaccccattcttaaacttaccacttataaacactttttgaagaaaaacatttcatagtatgcacaataagaaagcatagccaactgtaaatttgatgaaatatccataagtcaattattccaaaagcaatttttcaacatttctatttaatgagatgaagatgcttgtttaacacattatttgaagtgatacagggtctccaaaaaccactcgaggtcttggaagtttgtttttgtttttttctttttgacacagggtttcactaggcgcctaggctggagtgcagtggcgtgatctcagctcactgcagcctcgacttcctgagctcaagcagatcctcccacctcagcctcctgagcagctgggactacaggcgctaaacaccacacctggctaatttttgtatttttagtagagatggggattcgccatgttgcccaggctggtctcaaactcctgcgctcaagtgatccacctgcctcggcctccaagagtaccgggattacaggggtgagccactgcgtccggccttgaaagatcttctaatggtcctcatagtactccattctccagcattttctacatctggcaagctcgaaagtgaaaccctagtgggccatcatgcaggttttgagttatttactgttacagatgaggaaactgcgaagctacatggccacagtcaacaacgacaacagaaggcaacatagtatggcggttaagagcaccgactctgaagccagcctgaatcctagagccagagctgtgcaacagcaggtaaatgacttatcctgtgcagtttcctccttaatggaaatagtgcccaggccacaatatcgcgagatttacacgtaaagctggaaacaactcccgtcctagagtaagcactgtttactattaagcagcatcagtagggcccctttgcaacctgcaaaccgctccctcgacgttacctcatctatgcctcatttcagtgccacttcaggccttttccaggacagtgaaaaaccacgagacacagccagttaagtctgagtcaggacccctgtcccactagtgcgctgtgctctggtgcggcagggcagttttctgacccaatctcctcttctgctgtcctctgcagcaccaagataacaatcacagccggccccaaccggcacctaccgcgaaggtcacaactacactcgcgggtttttaaatcgcccactactcaccagtcccggaaacttctctgcgtcacttccggtcccgcgtcggcgctccggatgctgtggcacttggctccccgtagcgggagagctgggcggaagtggtcctttccgtttggcagccgagtgtaaagcattgcttgaggttgcccaggtagtttcgccttacacttcttgtcccagtgcaattattagtagagctccctttcactgtcaaatttccggttggggataaattgcattgtcgttttggtttgagataggaagatgaggggaggaaggaggtgaggcggtaaggggcgttctctctcttgggtcccgcgcccaacttccgctggcccaaagaaactataattttgaaccaacagacctctgctggcatctgcgattgcatttttcctgttttaacaacggctgtgctagacgaagtggtgaagcccaagtatggagtaacgtcattaattctttcattcacttattcgaatgcttgctgagttctgtgttgctactggtttagttcttgggatactgcgagtgaacagtgggcggcgaggctgttgttgcaacgtcagagtaaaagaaggaccctgcacggcggcctcccagcacttcgggaggccgaggcgggcggatcacctgaagtcaggagttcgagaccagcctggccaacacggcgaaaccccgtctctactaaaaatacaaaaattagtcgtgcatggtagcgcgcgcctgtagtcccacctactcgggaggctgagacacgacaatcacttgaacccgggaggcggaggcggaggttgcagtgagccgagatcctgccgcactgcactccagcctggcgacatagcgagactccgtctcaaaatgaaaaaaaaagagaagttcatagtatattagtgataagtgctgtggtggaaaaaaaaaagttcatagtatattagtataagtgctgtggtgaaaaaaaaaaaaagcgaatttcatagtatattagtgataagtgctgtgggagaaggaaataggaatgtcctagggctgaagggctaaagcagttctgtgtaggattgtcaggtcagttaaacttgacatttaagcagaaatttggaggtgaggaaattagccgtagagatgtctgagtataagaattccaggcaaaagggacacccaatgcctggaccctaagggaaggtatctgggttattgggggacttgcaaggaggctcttgaagaagagcaagccgggcaagtaggagattgggaggcttgaatcgggtaggatatcttctatagccgggtttttattacctaggggatgccattagaggattttttttttttttttttttgacggagtctcgcgctgtcacccaggctggagtgcagtggcgcgatctcagctcactgcagcctccgcctcctgggttcaagtgattctcctgccgcagcctgctgagtagctaggactacaggcgcctgccaccacacccggctaatttttgtgtttttagtagagacggggtttcgccatgttggccaggctggtctcgaactcctgacctcaagtgatccacccgcctcggcctcccaaagtgttaggattataggcgtgagccaccacgcccggcgaggtttttatttaaaatgttcagtaaagatgagcgtgtgtgagttaagacaggaaaatgagcctaattctttttttcttttgggactagagacttatttttgagctcgctgtaagactgagaaatcacgtagtccttcctgaaaccactaagaggaaaaatggtaagttttgagcaatttttatctaatgtctttcattataagtaatttttagaaattcagtcaagggcaataaaagttcatggaaattgcagtggcaagatggagaaattgtataatatagaagcacttaatatggaataattcttttaaaaaatacacaaaattgctttaaaattctttaatgttgtcacttaaaatgcacagaatttacctttttttttttttttt

SEQ ID NO: 3430 - DNA, 4001 bp, Homo sapiens
ccctatcccccacatgctaaatcaaataggtgtctatggctacaaccaattaaagtttatgtgcggggaaagaaaagaaagtgggtcactcctccactattgaaacaagctatgtaaagcgttttctcattagaaggcaggtatgacacaaatagtaattatacttatatagtgtttattgtgtaccaagcaatcctctaaagactttatatttaacctttgactaaatactcccaggaagttttacttatatttaacagatcacaacactgaaacatggtaaggtcatatcactctaactagtaaggtgtagagcctgaccccaaacctcagcagtccaactccagagtcctcacctttaactattcactatataaacctttgctattataaggatgcttgtaccaaaggctaacacaagaaaatgtataaacctgggcctcatactaaagctcatttaccaggactgtcaatttaatgtaaggatttggagaaatgtaaaaaacaaacttttacaataatactgattttgctcctgtagctgtttcagattctaaacctcctccactctcctttttggaatgaaatctgataagcaataatgtatgcgtgaacgtgctctttaatgtcaaggataatacacatttgaaaaacaaaacattaaatccaactgcaaaaatcttacccttttacttctggacagcctgaaccgtgtcacagtgccaaactgggagaaatatgaaaagatctgggtttcgtcaagtaggttaggtaggtggcgcacatagactactccaggagtaagttgttcttgtttttttcgctaaagacgtaaagaccaggtaaattaaatatataaataagaaaatcacattgtaacaaaacccctagccctcggcccaagaacctattctgcatttccacttaccacagtagtaattaaagaactggctgtttagtgtttctctccccacaaaggccatggtcaagcagtagtcaactatctttccagcctggcatcccagcacccagtataatattagagctcaataactatgtcaatcaacggataagcaaggacatctttgaacaagccattttagatcttctgcccagagaactctacataaacgtaggcttcaatttggtatgcatattactgtttactcgcacttcatcgaaaaattttcgatacgcttgttaactctcacggtacagattagcctttcaacgtctcagtcatcatagccttacctctgtaacaggaacttctaagttttcctgtgtattttatgctaaaaaccacagaaagtataagcgatgtcaggggccctagtcagcaagtggaacctggcaaatactctattttaataactcccagatcaccaacccggcatacaaacttcccgaatgtgttaagtctggggctcccatttttgggggaaacgcggaagcgtgacagctctaacccggagataacctgtggtataggagcctattccctccagctggttctttctactgcttctgtcaccccaatacttccccgttaccctccacatgaaggctccagggcctcagcggccaaacccctccatcatttaccgaacagcgtaaaccctttcgtctcggaaaccgtggcctgcaagcttaagaggtcggtccctgattcggtcgaatccacttgggagaccctggaggtaatgaaggcgagcacgaaggcaaggggcgcccgggccggaaaccgtgcaaccccagataccctctagacccggtccatcgcccccgctcgcagcctgggccagggtgcctgctcacctgggttatgcgcttgcgaacctgcgccacctccttttgaaactcgacatcttcctgcggattaagcgacaggattggcccagccgggccagaaaaagtcgccatgccaaaagccgccgacgctaaccacgcggcgctcccggaaacgtcgggctcccagctcccccgaggcggaagtagaggcaggacaggggcggggcgaagcgctaaggcgaggcgaggcgtggcgaggggcggggagggccatgagtcgggcgcggggttggagcaggagttgcccggagaagcgggggcggggcacggggtgtggcgaggcgcggggcggggcataaattgcgccaggggcgagggcggggcacgaggtcgtgccgagagactgggagaggcgtgagtcgcgcggaggcgcgacatggggcgtgacgaggagcggagggcggggcgtgagtagcgccgaggcgcggaggcggggcgcaggggcgtgccgaggcgcggcagcggggtctggggctggggctgggccgtggggagctcccgcaccctcggctgtcggggcgccggctggcttcgcttaagagtgcctgaaacaattacgttcacgcctactttcaaaaaaggtctaaaataaattccaaaacagtacctgtgtccttgagatgctgctctcattcctcaatttgcttattattattattatttttttttgagacagagtttcgctttggttgcccaggctggagtgcaatggcgcaatctcggctcactgcaacttccaacttccgcctcccgggttcaagcgattctcctgcctcagtcttccgagtagctgattacaggcgcccgccaccactcccagcttaatttgtacgttaccactcccagcttaatttgtatgtttagtagaaacggggtttcaccatgttggccaggctggtctcgaactcctgacctcaggtgatccacccgcctcagcctcccaaagtactgggataacaggcgtgagccaccgcgcccggccctaatttggttattctttcactcacttgtgtgtgagctctcctgtgtggccccgtccgtccgcggcccttggagaacttacagcctgagggcagcatggctgctttaagagaccaaagaggcttgtgggggagaggcacactgggtggcgccggagggtcccccttaggaggtggcgttagcaccgaggcctgaaggctaaagagcggggtgtggagaaccgagcgcctgccgtccgctggaccggacaggcctgcacagtgttcctaggtctagaaagaaggacgcggcagtggggttggagcccagcacaggagggaagagctgcgaggcggcaggctggagccccatgactgtgtgtcaaagtatgaaactggggttttgtaaatgcgaggggatgggcgggtttaaagcgaggctgtggctgtttgcatctttcttttctttttttttttttgagacggagtctcgttctgtcgtccaggctggagtgcagtggcgcgattttggctcactcactgcaacctccgcctcctgggttcaagcaattctccttcctcagcctcccgactagctgggactacaggtgcacaccactactcccggctaatttttgtatttttagtagaaacgaggtttcgccattttggccaggctggtcgagaacccctgaccttaagtgatctacccgcctcggcctcccaaagtgctgggattacaggcgtgagccaccgcacccggcctgtttgtacctttcaaatactattatactagtgagtaactgagtggagaggaagggtggggagtggattgccgaggaagcagggaggtgaggcgagagcgacagatcaagcacagctggtgtcaggggatagctgcggccgtgttctggaagccgtgaaggcggcccagggtgtgtgtgcccgaagagtggcctgtgggcctgaggtggaggccctgggagggagtgccaagcgaggccagcccacttcctctgacagacgtgcctcccacgctcacagtcttcgcctccttcacccctgcaccctccggctcagcgccaccgtcacccccaagggggcatccctgaccctgtagcaaagtcagttcttccagttaagcgctgtcttcccattgtgttttcatgggtaggctggattttcgggagt

SEQ ID NO: 3431 - DNA, 4001 bp, Homo sapiens
ggtggaagaagtccttcccccacatttgtacattggaaaataatataataatatatattatatatatataggcaatctgcctgcctcggcctcccaaagtgctgggattacaggcataagccaccatgcccagctggaaaataatatttagtactaattctaaaattggcattttcttaaaaaaggttacatgagctcctcagagaactgaagtttctctggacccatataacccacgtctatggggtcattcccacacctcacagataaaataagggaaagagtacatataattaggagcagacaggaagcacacagaaatggaaaatgtgtgtgggctttggcattgcagatctgaattcaaatcctcactctgcaccttatgaggtaagtatccctagacatgttacttagcctttccgaatcttgctttccaaatcatgcataatattcacctccctggactattgtgaagattaaacatgaaagtagttgtgacaaagatggtcagtgggtattatctgtcttcctttctagtaaaaaggctctagactagaatgttcttaggtctttaataggcttcagcaatctcacatgttaatattagtgttatgtgctgaactgggcttcccccaaatccatatgttgaagccctgaacctcagaatgtgactgtatttgcagacagagcctttaaagaggtcattaagctcaaatgaggctgttatgagaagaggaaatcgggacacacaaagggagataccaggaatgtgcatacagagagaaaaggccaaggagggaggcgtggggagaagccaaccctgctgacaccttggtcttggacttgcagcctccagaactgtgggaatataaatttctgttgtttaagccacccagtctatggtattttaaacacattaatacgactaatattataaaagtgtgtgaacagttaagaagtgtgctgaccaggttctatcctagttttgtagacaattagcagtgtgatgtagggcaggacatttaactcctctctaccacattttccacctctcaaagccaggctgcaaggatctactgagataatgtacataaagaccctatcacgaaataggtgtcccgtaaagggtgatttccttcacttctgtctccaaatatcaggtttctcatcagtaacttgggagattggatggactaagtagtccacctcgttcctttcagctttgatcatctgtgattctaacaacagtcttagcaacaagagtgagtttcctggccgggcacgttggctcacacctgtaatcccagcactttgggaggctgaggtgggcagatcacgaggtcaggagttgagaccagtctggccaacatggtgaaaccctgtctctactaaaaatacaaaaattagctggggcgcggtgccgggtgcctgtaatcccagctacttgggaggctgaggcaggagaattgcttgaacccaggaggcagaggttgcagtgagccgagatcacgccactgcagtccagcctgggtgacagagcaagactctgtctcaaaaaaaaaaaaaaaaaaagagtgagtttcctttctgtaatgccaaaaagtgtttccaaagtcctttccatctcacagtagtccaaggggtacatgtaccccttgaacctgatgaagccccagcagacccgattaaccacccctaaaggtttctcggcaggcaaatccagccaggcatgcaaatcacactcgtcaatgttaaggcttttgtacatcccagacacaagctttaaatgaatgtaaacccagattttaatatttgggccccagaccttaaaaatcccattctctctacccacagtacctggctgagcaatccaattgccctcttcttgggagaccaagacatgtttttaaaataaagtttctttgtatttgctttccgtttcagtgaggcctcgagttcttgtagaccagataccttcttgttctgtgagaggacagtgtacagagaggggaactgctgagcagttccttttttttttttcaaagcacagtaagagtggtttggacacaagtactaccagttcagaaagggaagatgggtgtaggcaggagtagccggggaagaagtagaacttcagagtaaaagatgcaagagctagaaattccgtcaagaaaggaattactcatttgtttcctgtttgttcacaacatatgaattcattgctgttgagttacttattctataccttaaaatgaaacaaagtcttctgaacatccaacatatattttttttctttttctttcttttttcttttttttgagacagagtcttgttctgtcacccaagctggagggcagtggcacaatctcagctcactgcaacctctgcctcccgggttcaagcgttcctcccgcctcagtcctcccagtagctaagactacaggcgtgcaccaccatgcccggctaatttttgtatttttagtagagacagaatttcaccatgttggccaggctggtctcgaactcctgacctcaggcaatctgccagcctcagcctcccaaagtgctgggattacaggcgtgagccaccatgcccagccacaacatgtatttttaatgcttaaccatgggagatagagcggtaaatgaaatgagccagcttagttggctaaagcacattgctactgcattcaaggtcatgcttacccctgtaccttgaatcccagaggacttccagcagatgtgttctctcagtcagcagggttctgggcaaggtcacacagggcaaacagatcaccagttttggtccactccaccgatgacgcacggggacaccctccggagtataaacagccaggggcttgcacaggcacactcacattggacgtttgtgttcacagactccaggaggccagcttatactcagctgaggactgaagaaatctctctgcacttcccttgaggatgacattcttgcatactctttcctctgtctttgcataaactaccaggaacatgtctttgtgttacataacttcttatttcaaaaagagcattctgacagtagcctatctgccatagagggataccaaagtttcccggcaaataaatgtctacatcctgggttttctaagggggcatcagtgtcagtgtttcccaacttgtgaggtgggtttctctgaagtgagattgagggctacactatcagctagatttttaaattgtaatgaaacctatatataaacatatgttcaagagaaaaaactgcaaagacagccaccaaaatagtaatgatgcttattgctggggaatacaattataagcaattttaaatttctgtctttggcttatctgtatattctaattttatttatcaacttatttattttttattttatttgtttatttatttatttatttatttatttgagacagagtctcgttctgttgcccaggctggagtggagtgcagtggctcaatcttggctcactgcaacctctgcctcccaggctcaagcaattcttgtgcctcagcctctcaagtagctgggatttcaggtgtgggccaccaccatggctaattttttgtatttttagtagagacagggttttgctatgttggccaagctggtcttgagctcttggtctccagtgatccacctgtgttgtcctcctaaagtaatgggattacaggcgggagccaccatgcccaacctgtatattctaattcttcatagcaaacacctattacttttgtactaataaatgatgtaatatagaataaaaagggaaaatgtagaaatatggttgtagtaggctgaatagtggctacccaaatatcccaaatcctaatccctgggaactgtaaatattgtgtctttccagatatgttccatttaaggctctgaagatggggagagaattctggatgatccaggtgggcccttaataatggtcccttattacagagagccagagggagatttgaaactgacaggaga

SEQ ID NO: 3432 - DNA, 4001 bp, Homo sapiens
cgggacacacaaagggagataccaggaatgtgcatacagagagaaaaggccaaggagggaggcgtggggagaagccaaccctgctgacaccttggtcttggacttgcagcctccagaactgtgggaatataaatttctgttgtttaagccacccagtctatggtattttaaacacattaatacgactaatattataaaagtgtgtgaacagttaagaagtgtgctgaccaggttctatcctagttttgtagacaattagcagtgtgatgtagggcaggacatttaactcctctctaccacattttccacctctcaaagccaggctgcaaggatctactgagataatgtacataaagaccctatcacgaaataggtgtcccgtaaagggtgatttccttcacttctgtctccaaatatcaggtttctcatcagtaacttgggagattggatggactaagtagtccacctcgttcctttcagctttgatcatctgtgattctaacaacagtcttagcaacaagagtgagtttcctggccgggcacgttggctcacacctgtaatcccagcactttgggaggctgaggtgggcagatcacgaggtcaggagttgagaccagtctggccaacatggtgaaaccctgtctctactaaaaatacaaaaattagctggggcgcggtgccgggtgcctgtaatcccagctacttgggaggctgaggcaggagaattgcttgaacccaggaggcagaggttgcagtgagccgagatcacgccactgcagtccagcctgggtgacagagcaagactctgtctcaaaaaaaaaaaaaaaaaaagagtgagtttcctttctgtaatgccaaaaagtgtttccaaagtcctttccatctcacagtagtccaaggggtacatgtaccccttgaacctgatgaagccccagcagacccgattaaccacccctaaaggtttctcggcaggcaaatccagccaggcatgcaaatcacactcgtcaatgttaaggcttttgtacatcccagacacaagctttaaatgaatgtaaacccagattttaatatttgggccccagaccttaaaaatcccattctctctacccacagtacctggctgagcaatccaattgccctcttcttgggagaccaagacatgtttttaaaataaagtttctttgtatttgctttccgtttcagtgaggcctcgagttcttgtagaccagataccttcttgttctgtgagaggacagtgtacagagaggggaactgctgagcagttccttttttttttttcaaagcacagtaagagtggtttggacacaagtactaccagttcagaaagggaagatgggtgtaggcaggagtagccggggaagaagtagaacttcagagtaaaagatgcaagagctagaaattccgtcaagaaaggaattactcatttgtttcctgtttgttcacaacatatgaattcattgctgttgagttacttattctataccttaaaatgaaacaaagtcttctgaacatccaacatatattttttttctttttctttcttttttcttttttttgagacagagtcttgttctgtcacccaagctggagggcagtggcacaatctcagctcactgcaacctctgcctcccgggttcaagcgttcctcccgcctcagtcctcccagtagctaagactacaggcgtgcaccaccatgcccggctaatttttgtatttttagtagagacagaatttcaccatgttggccaggctggtctcgaactcctgacctcaggcaatctgccagcctcagcctcccaaagtgctgggattacaggcgtgagccaccatgcccagccacaacatgtatttttaatgcttaaccatgggagatagagcggtaaatgaaatgagccagcttagttggctaaagcacattgctactgcattcaaggtcatgcttacccctgtaccttgaatcccagaggacttccagcagatgtgttctctcagtcagcagggttctgggcaaggtcacacagggcaaacagatcaccagttttggtccactccaccgatgacgcacggggacaccctccggagtataaacagccaggggcttgcacaggcacactcacattggacgtttgtgttcacagactccaggaggccagcttatactcagctgaggactgaagaaatctctctgcacttcccttgaggatgacattcttgcatactctttcctctgtctttgcataaactaccaggaacatgtctttgtgttacataacttcttatttcaaaaagagcattctgacagtagcctatctgccatagagggataccaaagtttcccggcaaataaatgtctacatcctgggttttctaagggggcatcagtgtcagtgtttcccaacttgtgaggtgggtttctctgaagtgagattgagggctacactatcagctagatttttaaattgtaatgaaacctatatataaacatatgttcaagagaaaaaactgcaaagacagccaccaaaatagtaatgatgcttattgctggggaatacaattataagcaattttaaatttctgtctttggcttatctgtatattctaattttatttatcaacttatttattttttattttatttgtttatttatttatttatttatttatttgagacagagtctcgttctgttgcccaggctggagtggagtgcagtggctcaatcttggctcactgcaacctctgcctcccaggctcaagcaattcttgtgcctcagcctctcaagtagctgggatttcaggtgtgggccaccaccatggctaattttttgtatttttagtagagacagggttttgctatgttggccaagctggtcttgagctcttggtctccagtgatccacctgtgttgtcctcctaaagtaatgggattacaggcgggagccaccatgcccaacctgtatattctaattcttcatagcaaacacctattacttttgtactaataaatgatgtaatatagaataaaaagggaaaatgtagaaatatggttgtagtaggctgaatagtggctacccaaatatcccaaatcctaatccctgggaactgtaaatattgtgtctttccagatatgttccatttaaggctctgaagatggggagagaattctggatgatccaggtgggcccttaataatggtcccttattacagagagccagagggagatttgaaactgacaggagaagtcagtaagaccatgaatgcagagattcgagtaatacggctacgagccaaaagatgccagcagccacctgcagctggaagaggcataaatggattctcccctaaagctcccaggagtgtggccctgctgacaccctgatttcagccccatgatactgatgttggactggtcctcagaactgtgaaagaataaatttctgttgttttaaaccacccagtttatgatattttgttacagcaaccacagtagactaatacagtagtatttcatagtaaaataagcaaaattatatccatattcattcaagtacatcttctgggctgcctcaccagtttcctttgtgagtggatttgcagtcaggtgttttcagggcatttcaaataggtaattaactagtaacttcggcatcctacgttccaacagttacgtcccctgcccttatgttcttcctcccagtctctcccaacgcttattatcctaggagtgtggtaaagtggaaatgcccagagctctggagccaagtagacctgagttcaagtctgggttccttcctgtgactaatacaagtcaccttagcttcttagcagtgcaatgatggttccccaagttgccccagggttgttgtgaatatcagctgagatgccatctgtgaagtaccacatggcactaactattctgtgactttaagcatatgtagctactcatgcttttaactcccagtttaatgcggagggaagga

SEQ ID NO: 3433 - DNA, 4001 bp, Homo sapiens
ggaatataaatttctgttgtttaagccacccagtctatggtattttaaacacattaatacgactaatattataaaagtgtgtgaacagttaagaagtgtgctgaccaggttctatcctagttttgtagacaattagcagtgtgatgtagggcaggacatttaactcctctctaccacattttccacctctcaaagccaggctgcaaggatctactgagataatgtacataaagaccctatcacgaaataggtgtcccgtaaagggtgatttccttcacttctgtctccaaatatcaggtttctcatcagtaacttgggagattggatggactaagtagtccacctcgttcctttcagctttgatcatctgtgattctaacaacagtcttagcaacaagagtgagtttcctggccgggcacgttggctcacacctgtaatcccagcactttgggaggctgaggtgggcagatcacgaggtcaggagttgagaccagtctggccaacatggtgaaaccctgtctctactaaaaatacaaaaattagctggggcgcggtgccgggtgcctgtaatcccagctacttgggaggctgaggcaggagaattgcttgaacccaggaggcagaggttgcagtgagccgagatcacgccactgcagtccagcctgggtgacagagcaagactctgtctcaaaaaaaaaaaaaaaaaaagagtgagtttcctttctgtaatgccaaaaagtgtttccaaagtcctttccatctcacagtagtccaaggggtacatgtaccccttgaacctgatgaagccccagcagacccgattaaccacccctaaaggtttctcggcaggcaaatccagccaggcatgcaaatcacactcgtcaatgttaaggcttttgtacatcccagacacaagctttaaatgaatgtaaacccagattttaatatttgggccccagaccttaaaaatcccattctctctacccacagtacctggctgagcaatccaattgccctcttcttgggagaccaagacatgtttttaaaataaagtttctttgtatttgctttccgtttcagtgaggcctcgagttcttgtagaccagataccttcttgttctgtgagaggacagtgtacagagaggggaactgctgagcagttccttttttttttttcaaagcacagtaagagtggtttggacacaagtactaccagttcagaaagggaagatgggtgtaggcaggagtagccggggaagaagtagaacttcagagtaaaagatgcaagagctagaaattccgtcaagaaaggaattactcatttgtttcctgtttgttcacaacatatgaattcattgctgttgagttacttattctataccttaaaatgaaacaaagtcttctgaacatccaacatatattttttttctttttctttcttttttcttttttttgagacagagtcttgttctgtcacccaagctggagggcagtggcacaatctcagctcactgcaacctctgcctcccgggttcaagcgttcctcccgcctcagtcctcccagtagctaagactacaggcgtgcaccaccatgcccggctaatttttgtatttttagtagagacagaatttcaccatgttggccaggctggtctcgaactcctgacctcaggcaatctgccagcctcagcctcccaaagtgctgggattacaggcgtgagccaccatgcccagccacaacatgtatttttaatgcttaaccatgggagatagagcggtaaatgaaatgagccagcttagttggctaaagcacattgctactgcattcaaggtcatgcttacccctgtaccttgaatcccagaggacttccagcagatgtgttctctcagtcagcagggttctgggcaaggtcacacagggcaaacagatcaccagttttggtccactccaccgatgacgcacggggacaccctccggagtataaacagccaggggcttgcacaggcacactcacattggacgtttgtgttcacagactccaggaggccagcttatactcagctgaggactgaagaaatctctctgcacttcccttgaggatgacattcttgcatactctttcctctgtctttgcataaactaccaggaacatgtctttgtgttacataacttcttatttcaaaaagagcattctgacagtagcctatctgccatagagggataccaaagtttcccggcaaataaatgtctacatcctgggttttctaagggggcatcagtgtcagtgtttcccaacttgtgaggtgggtttctctgaagtgagattgagggctacactatcagctagatttttaaattgtaatgaaacctatatataaacatatgttcaagagaaaaaactgcaaagacagccaccaaaatagtaatgatgcttattgctggggaatacaattataagcaattttaaatttctgtctttggcttatctgtatattctaattttatttatcaacttatttattttttattttatttgtttatttatttatttatttatttatttgagacagagtctcgttctgttgcccaggctggagtggagtgcagtggctcaatcttggctcactgcaacctctgcctcccaggctcaagcaattcttgtgcctcagcctctcaagtagctgggatttcaggtgtgggccaccaccatggctaattttttgtatttttagtagagacagggttttgctatgttggccaagctggtcttgagctcttggtctccagtgatccacctgtgttgtcctcctaaagtaatgggattacaggcgggagccaccatgcccaacctgtatattctaattcttcatagcaaacacctattacttttgtactaataaatgatgtaatatagaataaaaagggaaaatgtagaaatatggttgtagtaggctgaatagtggctacccaaatatcccaaatcctaatccctgggaactgtaaatattgtgtctttccagatatgttccatttaaggctctgaagatggggagagaattctggatgatccaggtgggcccttaataatggtcccttattacagagagccagagggagatttgaaactgacaggagaagtcagtaagaccatgaatgcagagattcgagtaatacggctacgagccaaaagatgccagcagccacctgcagctggaagaggcataaatggattctcccctaaagctcccaggagtgtggccctgctgacaccctgatttcagccccatgatactgatgttggactggtcctcagaactgtgaaagaataaatttctgttgttttaaaccacccagtttatgatattttgttacagcaaccacagtagactaatacagtagtatttcatagtaaaataagcaaaattatatccatattcattcaagtacatcttctgggctgcctcaccagtttcctttgtgagtggatttgcagtcaggtgttttcagggcatttcaaataggtaattaactagtaacttcggcatcctacgttccaacagttacgtcccctgcccttatgttcttcctcccagtctctcccaacgcttattatcctaggagtgtggtaaagtggaaatgcccagagctctggagccaagtagacctgagttcaagtctgggttccttcctgtgactaatacaagtcaccttagcttcttagcagtgcaatgatggttccccaagttgccccagggttgttgtgaatatcagctgagatgccatctgtgaagtaccacatggcactaactattctgtgactttaagcatatgtagctactcatgcttttaactcccagtttaatgcggagggaaggaaaaagtcacgatacttttcttcctagaggcctgtaactcataactccaaaaataattattctggaattctgttagtcttctgcttacatatttagtggcagggaagtcactgggccaaatcag

SEQ ID NO: 3434 - DNA, 4001 bp, Homo sapiens
aactgcaatgttatttaattgctttttatttttattattgtgacaatgccaatattccaagagcctgtaataaaggctctcagcataaatggtctactatctaacaccaccagaacccttttggcatcttttgcatctggatacttttgctctatgcatgagtgggatgtatggtcattccttttatgcaatcatgtagtaggcaaaacaatggctccctcaaagatgtccacatcttaatcccaagaatctgtgattatgttagtttatattgcaaaggagaattaaggctgcagattgaattaaggttgctaatcagcttgcttttaaatatggagagcatcctggattatctgtgggagcccagtgtaatcatgaggctacttaaaagtgaaagcggaagacagaagaagagtcaagagtgaaatgtgaccccggaagaactttcagaggcgcaatgttgctggccctgaagatggaggaagggctgctgagccaaataaggtaggtggcctccggaagatggaaagaggattcaccccaagagcttccagaaaggaaggcaaccctgccaacactttgattttaacccagtgagacctcagtaggactgctacagaatcctaagatagtaaattgtgtatgtgagtgtgtgtgtgtgtgtgtgtgtgcgcgcgcgcgcgcgttcctatgtgtttaagccactaaagccatgtaatttgttatggcagcgaattaaaaaaactgatacaaatcaacatcaccgtatttccgtaatacaatcatataactgcggtgccaggccgtgtagaatcgaatcttcctatatgcatgcgtggcagcaaaaagaaaggcaatagaacgtctgcctgttgtacagactggaaacacagtattctccttcggatgtctccttcaagaaaaaccttgcctattctgacacgccagccatgactgcacaacactgcccctaccaagaatcgttttcttaagaaatccgttttcctaaggactatctccagagacactcggagaaaacagcgagggccgggcgcggtggctcacgcctgtaatcccagcactttgggaggccgaggcgtgcggatcacgaggtcaggagatcgtatccatcctggttaacacggtgaaaccccgtctctactaaaaatacaaaaaaaaaaattagccaggcgtggtggcgggcgcctgtagtcccagctactctactcgggaggctgaggctggagaatggcgtgaacccgggaggcggagcttgcagtgagccgagatcgcgccactgcactccagcctgagcgacagagcgagactccgtctcaaaaaaaaaaaaaaaaaaaaaaaagagagaaaacagcgaggaaacacaaataactttatgtttcaatttcctcaatgaagcaaagcaaacaagtgacaaggctcgaagccctgacggcccagagactgcacagcgggcccaggagcaggtgcgccccctcgaaggcggcgtggcctccgcgactcggctgcgggcagctcccggggagcagggtctcaactccggcgctgtcccacttccgtcggcgctgagggctcccacctccctttccacccccggctctccagcccgggactgccagcggcgggagtggcagccggggaagggactccccactcacccgcgtccgcccgccgagcgcagctccccaaggcccagcgcgcctgcccttcccggaaaacagcagcgcctgaaacgccggaaccccgggaggcactgggaggggaaggcccgggttctcgaaactgtcgctgcctcctgcagaagcgccgcgggagagctgcggggtcttcctgaggaggtggccctcgcaggaacagctgggttccccgcgaaaagaaaaagacagtgaaaaagaaaactgctttaacggcgatttttctttagcatttaaccaatgctcaaatactaaacatggttgtctccaatgattagtcactaacagaaaaaaaaactaatttcactttcgatttttaaaaaggggtggttttgcggaggaaagcagaagtatacctgaagtttccgtacacactaattttagggaacgctttctaaaaccagttttttgcatgtattttataaggtatgttggaaaagtggatagaaaccaaataaagtcaaagcaggaatcgctcttcatcagattgtaactcttttgtaatttcttagtcattgtaacactagttgacaaatgtttacagtcagcacaagatcggcgtttctgtgtcttttgtaacatcccccggggccatgaagttgggaaagctgtggtgttcctgttggtttctgtgacccatgtcccttgaaagttttcttataatctcttgttttgttgtggagcttgtaaataaatacttcactaggtgtgaacttttcctttgaaaattcaaacatctggtttatttcaagaactgcagtgtctcttaatcccacacaaagaaccaccccacagctgccccggctcataaatacagatgtgggaagaaaatgagtcaaaattatttcaaggcataaattataggttatcatgctacctagtcacatataataactgatacagtggtctaaaatagtttaacaaaagtaaaatttctttgtatcaaaaaggttgatgggaaccagtttaaagtggtgacatttctcttttttttttttttttttgagatgagtcttgctctgttgcccagtctccaactcctgagctcaagcagtccttccacctccactcccaagtagctgggattacaggaattcacgaccgcacccagattttttgtacttttaatttgggtgctgggggcaggtatctaactgtttcccaggctgatcttgagctctggcccaagtgatcccaccacctcagcctcctgtaaaatggcatttctaagtaaaaaaaacgacttctttgtgcttatcagaccagttagaaaatacaaaaactccttctgctgcaacttgagaaagaattactttagttttaccttgaaattttagagggaatatgaactctcgaggttatttagttgaacctcatttcttcttatttttattttttacaagaagatactaaaggacaggaccatggccagaacaggactaacttaatatattgactcagattctgtttaaaaggcaaatgatacaggtggaggggaagtctttttggacacctacattctaaagctgagacatgtactaacagtctgaatttaactcagcttcaaatctggtattctgcaaagtgttagagatctgaagatgaagagttggctcctggacatactattaataattgtaattgctaacatctactaagaactcctggacattttataaacctttttgttttgccaacaacaatattagatataggtattattcccatttcttttcacctgtctgaagcaggcaggaaggtattatccccattttgcagttgaggaaactaaggcataaagaggtgacccaaaatcaagcagttaatatatggtgacaatgatatcatactctactctcaacaatatctccaaactgtgtcctagggtacatggagaacatggaattttatggcccaatacaattaggaaatgctgcattctgaatccacttttggaaattcacaatgcacattggcacattaagagttccaagaagtattgcagggaaaaattaaaaatttgtgcatattaaaaattttaactttattcaaccttgaacttatcaaatcaatttgagcgatatattctttttttcaaggaacagttattaaaatcttggggagtttctgatgggacctttcgaggaatgctctagtaaattacgccctctcctaatataaaagttatttattgatgttatcatgcactcaataaatatgttgcacatgagctgcagcactctgtgccttggatatctcatgtaaatctacacagatgtgaggtgaata

SEQ ID NO: 3435 - DNA, 4001 bp, Homo sapiens
ggtaacaacttagtttgtattttgatagaattcatgaggatggcatctcagaaaatggtgtcaacaaaggatggacatcagaatcacctttgaactttgaagacacatggatacccgtctctctgctgctacagactctctagggatgggctctggggaaggctgctggcatgcagctggaccctgtcaaccttttgtctaacttcaatgaactcctcttctcacttgcctgtgatacaacacttggtgggatagctatagtgcagtcgaaagaatcaattggataggtcaaaactaacaagatgaaattagatggataaatataaaacctggcacttagatttttaatgtgtggaacagggaatgtatggctcaagagcagtttatgtttaaaaacaagacaaaagaaaattgtatggtattttgttccctgcgttctctctgagccaagataaagcaaaggcaatgttatgttatattcaaataacagtgcctaaaccttaaaagataatagcctgacttgaaatgataagatatgaggtaaaggcactgagcatagttttctctggaaacaggaaaattaggaagtatatgttaactgctttcaactattttgagaacttcaataagtaagagatattagtcttatcctgtgtttcccccaaataacagaataaagactgacggttagaaagttacatgtgatcacacttaagcttagcctaaagaagtttttggtgattggaatcattcaataatgcaaagtaatgcaaaccaatcctataaggatttatggagaggttctttgctaataaaacgtaaagacttaccctcagggaacataaagtcaaacaggaaaaaatagggaggtgagtataaacatatagaaagatacataaaaggtaataacatatttacaaaaatgtaatataaacaggactctactggagcaaagaggcagaacctggctgtcatagctggcagtgagttggggtcattgaagtagttaaatagaatcgggaagctacagaagggatccctgcaccctgtgagaggttaaaccagatgaccttcatggtcctttgcaaggcccagttttgtgattacattgtaggacatgacaaacaaacatattgtttgaaatatgttttctctgtcaatatattaccaaagattttctactcccctaagtcaaaattctaatggaaaaatgtaaaatggtatgtgtttccaaccgtagttgttctgccaccgcccacttccctgcatcctatgaagatggtggtaacagattccaaccacagaccctcactccacccctgttccctagaagctagttctcagagtcggtgaggcgatgcccgcacccggtcagcacctcggacagctcactggccccgggaggtagcggcttccggtacactctggaaccctgcttctctaaaacccaatggaaaggcttgggaaagattcctttttccagtgtgcgctcctcccgcgcccttctcgaactgcccatcaatttccactctctggggctgtaagctcagttttaccaactctgtcctcgtctcttcagaatccagggagcagaaatggctacaagtgggatcttcccctaactcacaccaggaagtgcctttcccttcagttttagcgacacatgttcaggacatccctagggcaggagcagcttaaagacagtcccacagggaaaagtctcctttagtaaaaggctgcagcatctcgctctcttgatcctctcctaaaggttccaacaaattgcagccagaaatcaagaaggtctggcgggggagaataaagcttgactccctccagagctgccctgggggatcaaggtctgtctcagacatcctcagagtttaggccagatggagtctgaggaagctccccttacctgaggagggaatctgtagcatgcagaagcagtagatggccaagatgagagggaactggggacgaagatgtttcattgtgagagtctggtttctccttgctggccacagacaggtgctgctaggacaggagccgcgcatttccccaaggtccacaggcagaggcaaccctctgtcctgcatctgatcagcccagcgaagaaagtgcctttatttgcagcgccccggaacccactggctgatcaccaatcagctttgcacaggaggaccccggctttctcataaatgtcatgctgagcccttatttgtagaataatatctttctggagtaggcattgtagagagccatgttttacaacccagcaatgaaaataaaaggtggagagtcctgattgttattctataatgatctgagaaatatttctgaatcaagaatggctttttctctttttaataaaagagataaaataaaaaaaggacacaaatctctaaattattgcttgataaagtcttgtttcctacgaagctgtttattttccacctctaacaaaggatgttgtgttatcttggtgcatttaagaaggacaaaatttggagtcttctgtataatatttgtaaaaatctaaagttcaattggggctctgtttgttttttagatcatggctggaaattagcctctttaaggtctttccagattcattttaaggaacaagttaaatatttcaaattgtcagtattcaggaaaacatgacaatgtttaataataataaataacttcatctactgagcttctacatgttgggatctgttttaggcatttcacataggttatttcatgtaattctcacagaaaatctattaggaatgtgttattaccctaattttatgaatgaggaaacagaggctaggaaagatgaagaaacttgtccaaggtcatccagctatcaaggatcagagaagaaatttggactcaaaggtacctgagcccagtcatttctgtaagaatatggaattttaattgataagtaattttttaaacatgcttccttgggattagacatcagatagaaagaagaagaaagactgaagtcttctatttcttgcaaaaagggcaacatacatagtatacgtgaaacaaatatcttttgtttttttcattatgcatatctttattttttttttctttttgagacagagtctcactctgtcactcagactagattgcagtggcgcgatcttggctcactgcaacctctgcctcctgagttcaagcgattctcctgcctcagcctcctgagtagcggggattacaggcgcccaccaccacgcccagctaatttttgtatttttagtagagaccagttttcaccatgctggtcaggctggtctcaaactcctgacctcgtgatctgcccacctcagcctcccaaagtgctgggattacaggcgtgagccactgcgcctggccgcatgtctttaatttttgctcttttagagattaggtggttactaataactgctggatgtttacacatggctcaaacatgttaatactttacctaagtcataatatataattgttttaatgaatgagcttttaaagaataattttaagtgggagttgctcagaaggagctgtttattttttacttaaaatgtggcattttgccaaaacattttcaattcataacagagcaataattatacactactttatagccataatattttgcctacttctttgagccagtaagaaatagagatttctatttattacagtatttaccactttggttctaggagactaacccaaggtctttaaataccaggcagggattatgccatttacattaaaatccacccactgcctaacagcaagtctttactgaatgaaaggaaaaaacatgaataaatgatttttcaactgaaaccatttatctacatggtattaaaaacagttacttatggtcattgtagatacacgacacacatataatagcaaatggttgtggtatttttaataagtgtcaaccaacaagtacttttccaacatccgctctgtctaccagtgaactggtgtttatg

SEQ ID NO: 3436 - DNA, 4001 bp, Homo sapiens
cccaagcactcggcgcacatgggcccgcgtcaccatggacctggcctggagtgggtgcaccacggccacatagcgttccacgctcagggcagtgacgttgagcactgaggccaggcagaccatctcaaacagtagcgtgcggaaatagcagccaccaacgcccagcaggaaggggtagttgtgccacatctcatagagctccaggggcaggcccaccagcagcaccagcaggtccgacacggccaggctgaagaggtagtagttggtaggcgtgcgcatggccttgtggcgcaggatgaccagacaggtcagcccattgcccacagcgcccaccacgaagatcagcaggtatgtggcacagatgggcatgaacagctctgtctgctggggccccaggtacttgagtctcagtgcctcgtcagtcaggttcaagtcctcagggtcaaagtgccccctggccgcactgccattgcaagccatggggttccttgcaccccctgggtacaggtctccagggaggacagagcaattgaggcagagaggagtctgtggaacagaggggagagatgcccagaaagatcattcagggaatgctggctctgtcctcactcatcaagccaaaggtgacattagcgctatgatgaccattattttaggcaccactgagaaagaaaaaactcttccatccacaagtcagagatgtaaaaataagcttggtgcagtggctcacacctgtaatcccaacactttggtcgaggcaggcggatcacttgagatcaggagttcaagaccagcctggccaatatggtgaaaccccgtctctactaacaatacaaaaagtagccgggcgtggtagcacacgcctgtaattccagctacttgggaggctgaggcgggagaattgtttgaacccaggagacagaggttgcagtgagcggagattgtgccaccggactccagcctgggcaacagagaaagaccttgtctcaaaaaaacaaaaagcaaacaacgaaaaagtaaaaatctacatttaaaaaaaaaaaaacacgtggggttttgattttaaatttcatgatctattggaacctttgagtaaatgacagatcttgggtgtctcctctttcaagcaatgatgctagatgaggcactcgtttgggcatctgtaaaatgggcacaatgcctggtattgcagggtcttcaagagcaagcgctcaggaagcaactgcctggattcgaatccagcctccccagttccaggctgtgtgacctttagcgaggtaacctctctgaggctgtttccctattaggaggatccagggagtttaatccattaaagacattaacacagggcctgcctggcatacggaagggcacggggatcacccccttgctctggggacccagtcactatgagagtcaagtgagggagtgtcaaggctacacactacaaatgcttcatccacaagttgattcttttttctgttttctgtcacctgaactgttcagtctccatatttgacgcccttggcactgccagttctggggttccctctcctctattgagccccacacccttcctcccgcccgccctcacccccgctgcacagcagcgcgggagcctcgggaaccagttgggaacgcgcaggcgccagcccgggttcaagggaggcgccctggtcctcgaggaagggtcgcaagcccgcagccccccggcgcccctggccggaagacacaaatgacccgagaagttgcgaggctccccggtggcggggacggggggcaccccgacggagccctcggacccttcccgccctaggacgaccctgcccgcaccgagccccggcccagctgccgcgccctagcccacgccggcgcctgcgcacctaccatgcggcccgcggcccgcgagaccccggcttccaccctccgagcgacggacacagacgcggcgcgggagccagtggactgactgacagcggccccagcccgcgccccgacgccccgcctgtccggccgggaacgccgccagggggcagtgcagtccccgcagcccgggcggcgccccctcccgcactggcggaggacgcggccgttggaggcgacacctccacaagcagcgtggaggcgacacctccacaagcagcgttatctgacggaaccctcacaacaacccgttttacagatgagaaaactgagcctcagagagccgcagaggaggagcccgagagacctggggctcacatgtgattcccgccctccagcgtgctgagtttagcttaacgccgtcacggtgtccctgcggcctccagctcctcctgccccccattcagacccacctccaaggacagggacggcccaccagccccttgaagtcgacatgccccggtgcggttcatcctcccaggctccaggcctcttcttctgtcccaaggcccatgattgcagcctccgcagcccctctcacccgctgctcccttcggggcctccagtccctgagtccaggcgctcggccctgcaggactgggcaagagccccctattctccctccagtccatcctcccacagccaccaacgaccatcaccccctcgaaacccttccttggggcccccccactgccttctgaaaaagagcacaccaaagtctagcctgggggtggacctccccactcctcacctgcctccctgggccaccctctcctcaccattgtcctcagccccaaatactgtcccccttatccgttcaaatgttcttctgcccccatcactgtaccaagggtgggggtatagacaaggatggagggaatttagggaagggttaagaatgcccagccacagcctcctgctcccccacactgcccacatgcaaatcccagtgcctcacctgctcccactccctagtcctgcaatcagctccttagctggaagctgtttcatcagaaacttctagggaccctagaaatgacggatcacacagagtaaaatgctggttccggggcctttgcccagagttttgtctccttagcctgggcaaggcccagaaatcctcatgtttgacaaacgccctctggagagccccatgccccagaatcacactgaggagcaccaggagaggttacaaagccacaggaccccgagaggccaccgtgagctcagaagctctgtgtgcctcagttccccttcctgtagaatgggctaaccaccatcgccactattgtgaaggtgacatgagacactgagcgtcaagattcagcacaggggctggcacatggccaacactcaagaaatgtggggtgggattgtcaccatttagtggcaactggaggctcctccttccccccgctttcctgcaccctcctcctccccactgccccccaattccataagtcactgtctgggcttggggatgggagttaggccctcaaggagcctgcaccaggccggccttcccaggaactccacatgtaaacagagtcccaggcaggggacggttgtgggaagtgcaggggcacgtggtcctcagggccttgggagaaaggattctgtggtgccctgggaattaactactcagcccctgatgagctagtccaggagaaatcctcagtaacagggctgccagcacaacagacgggcaaggagggatgacatcactcagcatcagagaccactgtggcatcacaggctgctcttagcaagtgaggagcatttggaccccagcccttcactggaacacacacacacacgcacatgcatgtacacacacatacacacacatgcatgcacacatcactctgcacataccacaccacacacacgcgcacacacataccactctgcacagactctgagcagtccgaaagtccccgtggaccctttggttcacacagccctggaggggatggggaaggacccacctagccttgcagaggcagaatgactcttgccagtcaggaattcctacagcgggttgcatcattcacataacattagcagccatcaaaggc

SEQ ID NO: 3437 - DNA, 4001 bp, Homo sapiens
tgattcttctccatgtcagttagcagcaccaccgtgcacccacttgttcagactcaaaactgaagagttctctgattccttcctttttgtcacctcaacttccctctaccaacagtccaatccattagcaagttccattaccctatctacaaagtatgtcctgaatctcactgtgttttagcatcttctttgttaccaggcaagcccaagccaccgaagtcgctcacctggactacctaattcatcccgacttgaaccctccccagctagacatttgtcgcacagcagcccacacaacagtgacttccagcagcactaagaataaaacttgaacttcctacctttcctaccaggcctacctctccagcctcatccaccctgctctcgccccctcactcagcatagtgcaatcacacctgtgcctcttccgtcctcctacatgtccagtgcattcccatgtggggcttttgcactttctgttctcagcactgaaaactcttccccacatcttcacacgactggctcctcttcatcatccaagtttctgctcatatgtcacctcttgtagagaggccttccccgaaggttttatccaaaacactttctctcaatattttatccaaaacagctctcttctaatcattcaccacgaaaagtactttttgactaccttaaattgccttatttgctcacttgtttatttcccttttccccaacagggaaccttatctgaaatgtccactatagatcccaatacttaaaacagagttgcttgcacacagtaacttctcaatacatgtggagaatgaatgaacaaaatgagaaagctcatggggtgtgaagaacaactggaagacagggaattattcaaaccagaattttaggaagaaaggaaaaacctaagcactggctccaaatttttgtagaagcagacgcatggaaggagagctatatttattctgttttccaagggcaggactcaggccaacagtggcatgctataaggtgacatatttgaaaaccactttctaacaagtgcagagtctcaaaatggaaatgagcttccacaaaaggtagtgctcagtggtagtgcttggacagaggctggatcatcacgtataagaaacaaaagacaagtttcagagcctaagtgtgtcatgctggacaagtcacccttccccttgctggatctcagctgcatattaaacgcattattaaatctcagctgcattactaaacacgagaagattggaagagaattaccgacttgtccaagccctctccaactttaagactaggaatcaggttaagttcaacaagtctcgaaaatactgtcctctacaccataaattctgcagatgcgaagtctgtatctcccttgttcactgttgtatccctaagacctggcaaatgatagggactccacaaacagctgatggccatatgggggagagatgtgtcaacgaatctgccacgttttcctcctcgatgtacggcagggactgtgaacacccaaagaggcccaaatggttgcgttctctggaacagagaactttacaaaagttccagcaaagctcactgaccctgattatcccttggtccagtttctggcgcggtgacggcagtgtccttgtctcccaatgccgacacctcccccggaaattgtcagccgcctctgggcctccccgagtcggggggtgaccagcgtccagctaaaacagaggctagggccgaggagaggggcggctgccccacgaggaggacgacccccaagagctcgagagtgagggggccgggaagtgactcacctcaggaagggacttgccgcagctgaggctgtaaatcttcacctcattgaggctggagacctgcatggcgccgcacaacactgttcaagtcccgggtcctttcccaccagcgtgctcgagcaccgtaatcccgggacctccgagcccctgctccgcggcgtgcggccgctggcgccgactgatgacgcacttcctggagccggaacacgcgggcaagttcccggaagagggaaggtggctgaatccgggaagagcggcggccgggagaaaaactagtgaggctctgacaacccggcgtggctgtcggcgacgctgctacgggcaagactagacacaagccgggcgcggtggctcacgcctgtaatcccagcactttgggaggctgaggcgggcggatcacctgaggtcgggagttcgagaccagcctgaccaatatggtgaaaccccgtctctactaaaaatacaaaaaaattagccttgcgtggtggccggcatctgtagtcccagctacacgggaggttgaggcaggagaattgcttgaacctgggaggcggaggttgcagtgagctgagatcgcgccgctgcactccagcctgggggacagagcgagattccctctcaaaaaaaaaaaaaaaaaaaaaaaaactagacacagctctccctgctgttagcatcccgagcggcaggaggaggctttcgagtctctgcccaggccgagatgtcatcctcccgggcgggggcgaggcagttcagcgagtgaacccagcgaatgaaggcgaccagggtgcgaattccgagtggaagtgtattctcttctctcctccagtgtttctgcgatgttacgttagaagtactgtaggccgggtgcggtggctcacgcctgtaatcctaacactttgggaggccgaggcgggcggatcacctgaggtcaggagttcaagaccagcctagccaagatggtgaaaccccgtctctactaaaaatacaaaaatcagtcgggcctggtggcgcgcgcctgtaatctcagctactctgaaggctgaggtgggggaatcgcctgaacccgggaggcagaggttgccgtcagctgagatcgtgccactgcagtccagcctgggcaacagagtgagactccgtctcaaaaaaaaaaaaaaaaaaaaaagaagactgtggcgtcatcttcaacccattcctatctctggccctcactttcagtatctaaacctggatatttctaattatgaaatatttccttaaagtaatctgttttcattcctcctgctgaaactcaaatacttaactatttttggattataactttcccaagtgatcttcttacttcctttgatttaatgaacaaattattttatgccttactttctaaaacccaaatattattgttttgctctcctacccacaacattttggaaactctcaaataccaacaccacattgcatcagaattaggttgagagttcttcgtggaccctatatcatttgtccttatattccctatccaccccatccacccctacccagagtaccagaacagtgcctggcctctattaggcattgctacatatttacatttagccatgtacgtagggatatattccttaactctgtcctcaaatttaagatcctccacaaatttttaattttctacactggttacagttaagaaaaactgtaaacatctttgggaaaggtggcataatagaatggttagatcacagactctggcttggcttggtggtgcaggcctattgtcctagctactagtgaagccgaagcaggagaatcacttgagcccaggagttcttggctgtagcacgcaacgagcgttgggtgtcctcagtttggcatcaatatggtgaccccacaagagccagggaccaccatgttacctaaggaggtgtgaagcggctcaggtcagaaatggagcaagtcaaaactcccatgctcaccagtaatgggatcatgcctgtgactaacactgtactccagcttgggcaacacagcaagaccctatctcttgaaaaataaataaagatcacagactctgaagccagactggcaagattcaaatcccgactgccatttttaactgaaagaccttaggtaagttacctaacctctctgtacctgtgtaaaatggagataacagtagtatccacttcacagagttatgag

SEQ ID NO: 3438 - DNA, 4001 bp, Homo sapiens
gagtattttaggacccaggtctagaaatccgaccattgataagccaattccttcctaccatgggagacaaccagtgcactgtgcagagttgctcctcttcacatccggtacaggacagtatactacggcaattaacggtgaaattcatcgatagacacttacagaccacattggctaagagaatttgaagctatgcagaactctacatggtaatttagataagattccaaaaagctggagaaaagtaaaattgacatgtttcgtagctctaaaggggactaaggagcttacttacaagttccttaaaacactaatacggcaattgcagataactccaactaaggtaaaaacaagcaaaactgccttttcggttttaatgattttattggttttcttaaaaataacatttgacgtatcaaatgcaaactgcgtattttcaaatgtcagaagtgaaacatggagaactctgcacccatccagactttcttgcatccacaccacaaatggttttttggttcatagctaaaattgtattacatttatttttacctagcgtttttgctttctaccaacatatatatatgtagaatatacataaaaactttatttttcattgctatattcacagacctcagaagagttgcaccgcacaagaaaaggcactcaatctcactcattcttcctaacatctcaacagcatcttgcgatacgaatgtcttaccattcaaccatttcagtgctgacgaacttgtcaaactttccccacgaaaacaaccaaacctcaaactgacatcaccagcccagatgttttcccctaagcttcaaatctgaaatactgaactgcccgatctacacaactgcattatcaggtctaatagacaacgcaagcttcgcacagcccaaaccggaaatctttagtccttccccaagaaactttcttaacatcttatttaaaccaaaaccccacattcaatctattagccagtccttcctgttctaccttcacaatttctatcgatatttgtttctctccataccaggcaatttcatcttgtccaaatgaatgcaaaagtattcttgctgccgttcttatctcctcgagtctaatctccacacagcagagtaaccgtattaagacaaattagcaggtcattcctctgcttaaatcctttcgattggccgagcacggtggctcacgcctgtaatcccagcactttgggaggccgaggcaggtggatcgcttgaggtcaggagttcaagaccagcctggccaacatggtgaaaccccgtctctactaaaagcaaacaaacaaacaaaaacaactagccaggcgtggtggtggatggaggcctgtaatcccagctactcgggaggccaaggcaggagaatcgcttgaacccgggagacggaggttgcagtgagccaagattgcgccactgcactccagcatgggcaacaagagcgaaactccatctcaaaaaaaaaaaaaatctttcgatcattcctcaaaacatctagaataaagtccgaattccctataatctgttaaattctaacacgcctcctgcccaccccttcaacgggaggaaataaaatcctctaatgcagaacgggtctccccaaacggcggggccacgtgttacacgtaacatggctctcaggtgtaaaggccttctccctcctcccagagcccgggctataacaggcacccacgctactctgagtagttccgtgcttaagtctttccctctcctcgtctgtccagcatccgccttccccctttaacggctcgctctcccacctaccttaaagatggcgtaacccacagacgtttcaaacagcaccaacatggtgaggccgggtcagggcgccgcacggcctgccagaagctgtagagtcagttcaaaaacaccgactacgcggcctcaaaaggcctcctaggccgcggcgggcaaagcacaaatgcgctcgccgtcccgcaaagaatcagaacacgctgcctaaaccctccacgctgtactggaactaggacgcacgaacgcgctactccttctctgaggattctgggatagcaacgtcacttccgacagaagactgccgcagagattgccgtcacttccagaatgttcccgccacagcgggctggggcgggccgagaaagtttgtatcgcgggatctagggcctgaacggagcctttgcgcctttttttcttttttctttttttcttttttggagacggagtctcgctctgtaacccaggctggagtgcagtggtgtgatctcggcttactgcaacctccgcctcccgggttcaagaaattctcctagccgggcgcagtggctcacgcctgtaatcccagcactttgggaggccgaggcgggcggatcacaaggtcaggagatcgatcgagaccatcctggctaacacggtgaaactccgtctctactaaaaatacaaaaaattagccgggtgtggttgcaggcgcctgtagtcccagctactcgggaggctgaggcaggagaatggcctgaacccagggggcggagcttgcagtgaaccaagatcctgccactgcactccagcctgggcgacagagcgagactccgtctcaaaaaaaaaaaaaaaaaaagaaattctcctgcctcagcctccccagtagctgggactagaggcacacaccaccacgcccagctaatttttgtatttttagtagagatggggtttcagcatgttggccaggatagtctcgatctcttgacctcgtgatacgcccgcctcggcctcccaaagtgctgggattacaggcgtgacccactaggcccggccttttttttttttttttttttttttttttttttttttgagacagtctggctgttgcccaagctggagtgcagtggcactatcacggctcactgcaacctccaactcccaggctcaagcgatcctcccacttcaccctccggagcagctgggactacaggcctgtgccaccacacccagctaattttttgtagagacagggtttcacgatgttgcccaggctggtctcggactcttgacctcaagggatcctcccacctcggcctcccaaagtgctgggattacaggcgtgagccaccgcgccccgccaccgctagagatttaaaggggaaaaacttcacgatattattttgttaaccctctatgaattatatgttcactttgagagaaacgaggagctgtttcggtgccagtctgcctcaggcatctagaatttgaaatgccagctagtgccattagactttatcccctttcaagccctgccttgaggcgaaggcctcagaatgacaccattactgtcactatatttgtgagcattcctggccgttcccttctgtctggccaaatgaattattagcacagttttctttcaataagcctctcctatttttgctgcatttgttaaaatgaccccagggtatgaatttagaatgtctttttttttttctttttcttctttgttttttttgagacggagtttcactcttgttgcctaggctggagtgcagtggtatgatctctgcttactgcaacctctgcctcccgggttcaagcaattctcctgcctcagcctcccgagtagctgggattacaggcatgtaccaccacgcctggctaattttgtatttttagtagagatggggttcctccatgatggtcaggcttgtctcgaactcctgacctcaggtgatccacccacctcggcttcccaaagtgctgggattacaggcatgagccactgtgcggggctgaatttagactgtcttcttgatttagtgttacttgcttttctggaagcctttcagtctcagggactgggattaaataccccagttgtttcacaagtctgtcttccaacaggggtaaaatttccttactcacttcccaggccctatatgcagattgttcctaatcattaaattgcaacctgctgggagaattgcttgaacccagga

SEQ ID NO: 3439 - DNA, 4001 bp, Homo sapiens
cctaaatgtttcatgaggcactcatttgcaatccatttccttgtcttattttgttcccaaaccgcagattcatcttcacatagcattgttccccaagtacaagctaagaatgtgccaggaaatcaacttgaacacttgattaagatgaaacaattgcaaataaataaatgttctgtgagtttagagggtttggaaacccaggctgaagggatatccgccctccccatgactcccggatacttttggtggcaatgagcccatacagatgaccttcaaagttttagacaaggacaggagtccttggcccagcatagcacaaggaactattcagcatgccagggagtggagctttaagcagacacagaagtgtggttatgggttgccttgggggctgctgaaagaaaacatttctccacgtctgaagacttgactttgctgtctacaaaaaggatgttagaccttcagtttcttttttatggatttatttcttcttctctttttaaacttaattaaagctgcccaccatttccctgtcttctgtccattgcacccttccctggtgttaattttcttctttggttactattagtgccaagattttgctgccacttaccccatccctgtcctggcctgccgcccctatacaaaaacattgaggtaggagtgttgagacaggagaggatttaacagtttagtcagggagcaacctcaaggagagaaaaataaatgataaaagacttcttaaaaattattcacaattaacaatggagagaacactgagattgaagtaattaaagggggaagtttcactcttaaaaatctatatataaccatatcattggaatttgtttctacattaagcacaaattatttctgtatttaaaaaaaggaaaattaggcagaattggctactatgttgtcattattaaaattactagtcatttatgagttcatctcatttagctcatctgattttctgcaatagtaactatagttccattttttccaaccatgtgcttttcttatccattgaataaacaaaaaggaaatcaataatcctctgctgatctttttctttatgactttatctcagcgcccatttatctgccgccccacagtttgtgttatcaatacatgaaggatgactgcaacctcctgcttatgatgtcaccaatcttagcttttcagccccatgtgttgggataaaacactgaccctccttaattactttattttcaaagtaaacatatccccccctttattttagttgcttcttatctcctaaattacatctctgctattgccgccggagacctcacaatgtctttggacttctgaccaaacttatatttttggtagtgctccaaacattaccaaaacgaacaaacatggaacaaacatgctgctaaaccagtctgagagccactgcaggccaggcagagtggggagtctatccttcctcctgcaggacttgtgatccttgactccaaaaaatgagggtgaaaaggcacaaaaactctcctccctcactttattctcagagccaaaaattggctgcagacattctgtgtgtttttgtatccacaccacacatgatgttggcaccatgggtgtatgtcttaagaatgttttccaaacagccaccatctggatccaaatatgaggctttactctctcaaaactttttccaagaatatgagaaggaaagatgacaattacctgccctgtcatttcctagaaaaagctctgtttttaaactgaaccaaagaaaaaccacaaacttttgcaccacagccaatatctaaatgtgtttggtttctgagtgtctcaaatttcttaagttaaaatccattaatatacaaatccaccctccaccctcctcacacgcaggcacacaaaccacactgagctactcaccggacaatctgtcagtgggtccctcatgttgaaatgtgtctggcttttgtcctttcacctacgctccagcattctggacactgtaatcaaggttgggtgtgtcctggacttccgggattcaaagggcctagagtacgtcagtccttgtcaaacattccaaggaggaagtcccagccctggactttcatcccgtttgtgtcccgagaaagtaaagaactgctctgggtcaagacggccagtgtgagatagtgagaatgacttctgtaaaccctcagagggcaggatcctgagtcctgaacagcgtaacattgagagaaggcagagaagctgtaacatgtctccaacaattcttgcgcttggtctgacagtgcaggaacacatatcctctcagcctgcagtattaatcatgctttttattttctgtattgtatgatgctttgacctttggggacctcatggacttggagacagactgcctctctgagggttagctaattcctagagagagcaaacaactggcctgtgagcactcctttaatatgcaaaccaacaaatccagagcccaaacctccccaccatctctgttacccagttctcaaataccaagcccatattcccccaccccctaaatcccacagggccagacaccaaacaactaggaacctacacctatagaactataactatagaatgttcagaaacagctatcaggagcaaagcgtacattaaccacttctctgagcctaactccacactcgctccagccccaacaggatcaagaggctaagctttcaatgtaaagaaaaaattgcctagatctggcctcatttttcatcactcaaaaggatagacagaacaagaactcaaccacagcttgagttctattgcattccctgtacctgtggtcccagttgccaatcattagatttccaatgaatggcctattgatgtacgacagccatttgctagactgtggacagttctgtttgactggcaggcaagggcaggccccagtttgaaaggagctccatcaacacagtccagtggaacacttcagagtttaaaagcattcagttttcacctgactggctgactcagcctccattcacctgcccctggtgtgcaggctccattcaaagtccctagaaataagccagttgcagtggctcatgcatgtaatccaagcactttgggaggccgagcctagagggtcacttgaggccaggagtttgagagcagcctgggcaatatagcaggagattcctatctctataattttttttttttaattaggatgtggtggtatgtgcctgtagtcccagctactcaagaggttgaggcagaaggatttcttgggtctaggggttcaaagctgggcaatagagtgagactctacttctaaaaaaaaaaaaaaaaagcttccagaaacaacgtagaagagtcaggggacaattaaggaaaagaacttgccttgcaacaagagtggagaggaggggtcttttccacacacttaatgccctccctctttgcttatccaaagaacttgatcactggaggttacaacaatcttgggtagctaccacagggctagaattagacaaagcaactctgtataataaaagaaatttaggtaaggcacagtggcacacacctgtaatcttagcactttgggaggctgagatgggaagactgcttgaggccaggagttcgagaccagcctggtcaacatagcaacaccccatctctttttttgttttttttttaaaagaaatttagagacaggatatagactgaggttaataacatgtaactcaaattcccacttgagggggcttctctgccctcagagattttagataaacttgtccggagccaccattccaggacttgggacagctcaatgttttctctgtgattcctgccccatttttcttgctgttctgtgtttcatttcagtcccaactgagtccaaactgaggaaattggcctcccttgccagtttccataagaagtgctgtcacacaaagcctactgtgatctttgtatacgaattatagattggtagggcactcctatccccaaac

SEQ ID NO: 3440 - DNA, 4001 bp, Homo sapiens
catgcttcctcctccaactcctcactcccaccttgtgtggattcctcttcacccccaccttgggctacgattctgccagctgcactgtcctcctgggcagacatctccatgcccaatttggctcccatcattccactccgggccacagtgattccctcacctagcagagatatctgctctgctctgtcctatttgaggtttagggactgaacagttcaggaagagaagggaaaggaatggaaaaagaaaaaggaagaagaaaaagtcatcaatatcatcatctttttttttttttttttgaggtaggatcttactctgtcactctggctggagtgcaagtggcaccatcatagctcactgcagccttgaactcctgggctcaagcatttctcctgccttggcctcccaatgtgcttgaattacaggtataaaccaccaagcctggctgtcatcgttactatttacatcattttttttttcttatcacttacctttcttatcactattttctttgctgatttatcttcttcttctcatcccccaaacatgggtatttctcaaggttctgctttggcaggcagtgcagaacagatcaaagcttggactaagttctttgcatcaccactttctggctgtaagaccaaggacaaagtttttaccctcttgtgcttcagtttatctgaaaaaaattaaaaaaaatgaaaatcacaacagcctccagtttcagtcttctacttccaatttttgttagacatgtccacatgaaaggactctcatcagcttaaattcaaaatgtaaaaatcaacccatttttcctttccaaaaactgaggcatcttctcacagctcctctttctgtaaatgcatattcattctacaggaatttattgggcacctgctgtgtagtggacactgtggctgataaggatcagctataaaaggtaaggcctttgccctcaagatgcttccattgagtccagtggggaaggccgtgtgataagtgttctgatggagttaaatggttgtaccttttcttctcaaggaagagcaccaaattcccaaaggctaaggctttctgggaagactaacttctaacacaaattagtcttcaaggccaagtaagagttagcgacatgaagaagaagaggaaagaggtctctgtggcagtgtaagcagtatggccagagtcctggagctgtcacaggcatggcacattctgagacagtgcccatggggagggatgaggatggagtggaaggtcaaggtcaggccactaagggggagaacaggtggtaggaagtggggtggaggctgcctcactgcttcacgctatgccctttgtctcaaatgcctttcctctttccacttgactcattcaaatactattcattcttcctagctttctgcttgaaaccttttcttacctgatcccagaagcagctgttacgagcagcgaatccttatgggtccgcagcgaactcaattcttagctccttagaagaaagaatttggggccgggtgtggtggctcacgcctgtaatcccagaactttggaaggttgaggcaggtggatcacttgaggtcaggcattcgagaccagcctgaacaacatggtgaaaccccgtctctactaaaaatacaaaaaattagccaggtgtgatggcgggcgcctgtagtcccagctactctggaggaggggggaggcagggaagaatttgaccgaggaaaaataaggcagactgagagactgaggcaagttttagagcaagagtgaaagtttactaaaaggttttagggcaggaacgaaaggaagtaaagtacacttcgaggagggccaagctggccacttgagggatcaagtggctggcttgacctttgccttagggttttatatattggcatacctctgggatcttgcatcccttttctcctgattcttcccttctggtgggctgtctgcatgcccagtgccctaccagtgcttgggaagggctgcatgcgcagtgtgtttacgggagttatacgcatgctcacttgagacgttcttctattaccaatctaacgttcctagaggaaggtcatataccagttaaactcccccattttgcctcatagtgcgcatgcttgagcccacttacctaacacctgagatcttattgggacgctgctgataaccagtttcaggttttttctgtctgtcgggagattgcctttccctcgtgctggctgtgactaattattgttttagagaaataatgattgtaacagtgtaacaaccacctgaccatcacttgatggtcgtctgacattcctggttgggcgtgcagccctctcctggcctgctgatgtctgcctgactactataacacaacctctctctcctctgaacttttctggcaattactattctcacaacatatttgatataacgatgataccaatgtcttatatctatagattttatttttatttttaaaagccttttgctggccgtgtgcagtggcttatgcctgtaatcctagcactttgggaggccgaggcaggtggatcacttgaggccaggagttcaagaccagcctggccaatatggtgaaaccccatctctactaaaaatacaaaaaaattagctgggtgtggtggcatgcacctgtaattccagctactcaggaggctgaggcacgagaatcacttgaacctgggaggcagaggttgcagtgagctgagatcccgtgccactgcactccagcctgggcaacagagtgagactctgtcttaaaaaaaaaaaaaaatctttagagctaataacttctgcctgtggcctacctccctaactgtattgagacccccttcaatgcagcagctttgcccctgacttcctcatactcctcacaaagcctaacataatgtctcgaacgattggtgctcaatacatttattgacttaatgttgatgtgcattttactgctttcattagtgttctggctctgtgggtaaacaatttggtacatgtagcatagtgtaaactactggttagcatagtgcaaactattttataactcctcagaaatgacttctaagtgatacaactaagaaatggcagcactagaagtgtagtacatcagggctcagttctatgtaccatctagtaccctcagctgagagaaaaacaatactctttgctcttaaaaactctagggacccttttgaactcatctttggtgacatagctccaattagtctgaaatctaacataggattgcttgatggcttgccagacagtaactagcactctgggtcaggaactttggccagagccaagagttcagtcctgatgaatcaaattaacagctatgactcaaaaagaggagggctgggaactgctcttttatttcctataactcaagttacagaaaataaactcgctttgtagcatttcatccctcacctactacccacccctgggactttttccctatgagtctttcagcccattcttaaaacccagatccctaaaaaactagcgttactacctagatcgcttccattcttcagtctgcaatgtattgaatgactgaattgcttgtactggttctttttgaacctgtgttctgggttatgtttgcccttgcaagttcccagggttagactgaggaaggagatgtgccctttgtgaattagactgatacagtgaacttgaaaaattgagttcagttattgatgtatttgatttattgggggtcttccccaagaaaagcttccaatatagttgaaaggactatacaatatgacgccaaaaagagggaagatagagatgaaaactacaggaggaaaaactagatctgtaagaaaaattaacggaggtagattaaaaaaaaaagccaatggagaatttgaaatgcagtagaaatcttggcagcccacatcttcagaaacaaatgcaaacactggaatctgtgtaatgaaccagaatgagtacgtgtaagttttggaatcactccggtc

SEQ ID NO: 3441 - DNA, 4001 bp, Homo sapiens
aaaactacctaaatgtttcatgaggcactcatttgcaatccatttccttgtcttattttgttcccaaaccgcagattcatcttcacatagcattgttccccaagtacaagctaagaatgtgccaggaaatcaacttgaacacttgattaagatgaaacaattgcaaataaataaatgttctgtgagtttagagggtttggaaacccaggctgaagggatatccgccctccccatgactcccggatacttttggtggcaatgagcccatacagatgaccttcaaagttttagacaaggacaggagtccttggcccagcatagcacaaggaactattcagcatgccagggagtggagctttaagcagacacagaagtgtggttatgggttgccttgggggctgctgaaagaaaacatttctccacgtctgaagacttgactttgctgtctacaaaaaggatgttagaccttcagtttcttttttatggatttatttcttcttctctttttaaacttaattaaagctgcccaccatttccctgtcttctgtccattgcacccttccctggtgttaattttcttctttggttactattagtgccaagattttgctgccacttaccccatccctgtcctggcctgccgcccctatacaaaaacattgaggtaggagtgttgagacaggagaggatttaacagtttagtcagggagcaacctcaaggagagaaaaataaatgataaaagacttcttaaaaattattcacaattaacaatggagagaacactgagattgaagtaattaaagggggaagtttcactcttaaaaatctatatataaccatatcattggaatttgtttctacattaagcacaaattatttctgtatttaaaaaaaggaaaattaggcagaattggctactatgttgtcattattaaaattactagtcatttatgagttcatctcatttagctcatctgattttctgcaatagtaactatagttccattttttccaaccatgtgcttttcttatccattgaataaacaaaaaggaaatcaataatcctctgctgatctttttctttatgactttatctcagcgcccatttatctgccgccccacagtttgtgttatcaatacatgaaggatgactgcaacctcctgcttatgatgtcaccaatcttagcttttcagccccatgtgttgggataaaacactgaccctccttaattactttattttcaaagtaaacatatccccccctttattttagttgcttcttatctcctaaattacatctctgctattgccgccggagacctcacaatgtctttggacttctgaccaaacttatatttttggtagtgctccaaacattaccaaaacgaacaaacatggaacaaacatgctgctaaaccagtctgagagccactgcaggccaggcagagtggggagtctatccttcctcctgcaggacttgtgatccttgactccaaaaaatgagggtgaaaaggcacaaaaactctcctccctcactttattctcagagccaaaaattggctgcagacattctgtgtgtttttgtatccacaccacacatgatgttggcaccatgggtgtatgtcttaagaatgttttccaaacagccaccatctggatccaaatatgaggctttactctctcaaaactttttccaagaatatgagaaggaaagatgacaattacctgccctgtcatttcctagaaaaagctctgtttttaaactgaaccaaagaaaaaccacaaacttttgcaccacagccaatatctaaatgtgtttggtttctgagtgtctcaaatttcttaagttaaaatccattaatatacaaatccaccctccaccctcctcacacgcaggcacacaaaccacactgagctactcaccggacaatctgtcagtgggtccctcatgttgaaatgtgtctggcttttgtcctttcacctacgctccagcattctggacactgtaatcaaggttgggtgtgtcctggacttccgggattcaaagggcctagagtacgtcagtccttgtcaaacattccaaggaggaagtcccagccctggactttcatcccgtttgtgtcccgagaaagtaaagaactgctctgggtcaagacggccagtgtgagatagtgagaatgacttctgtaaaccctcagagggcaggatcctgagtcctgaacagcgtaacattgagagaaggcagagaagctgtaacatgtctccaacaattcttgcgcttggtctgacagtgcaggaacacatatcctctcagcctgcagtattaatcatgctttttattttctgtattgtatgatgctttgacctttggggacctcatggacttggagacagactgcctctctgagggttagctaattcctagagagagcaaacaactggcctgtgagcactcctttaatatgcaaaccaacaaatccagagcccaaacctccccaccatctctgttacccagttctcaaataccaagcccatattcccccaccccctaaatcccacagggccagacaccaaacaactaggaacctacacctatagaactataactatagaatgttcagaaacagctatcaggagcaaagcgtacattaaccacttctctgagcctaactccacactcgctccagccccaacaggatcaagaggctaagctttcaatgtaaagaaaaaattgcctagatctggcctcatttttcatcactcaaaaggatagacagaacaagaactcaaccacagcttgagttctattgcattccctgtacctgtggtcccagttgccaatcattagatttccaatgaatggcctattgatgtacgacagccatttgctagactgtggacagttctgtttgactggcaggcaagggcaggccccagtttgaaaggagctccatcaacacagtccagtggaacacttcagagtttaaaagcattcagttttcacctgactggctgactcagcctccattcacctgcccctggtgtgcaggctccattcaaagtccctagaaataagccagttgcagtggctcatgcatgtaatccaagcactttgggaggccgagcctagagggtcacttgaggccaggagtttgagagcagcctgggcaatatagcaggagattcctatctctataattttttttttttaattaggatgtggtggtatgtgcctgtagtcccagctactcaagaggttgaggcagaaggatttcttgggtctaggggttcaaagctgggcaatagagtgagactctacttctaaaaaaaaaaaaaaaaagcttccagaaacaacgtagaagagtcaggggacaattaaggaaaagaacttgccttgcaacaagagtggagaggaggggtcttttccacacacttaatgccctccctctttgcttatccaaagaacttgatcactggaggttacaacaatcttgggtagctaccacagggctagaattagacaaagcaactctgtataataaaagaaatttaggtaaggcacagtggcacacacctgtaatcttagcactttgggaggctgagatgggaagactgcttgaggccaggagttcgagaccagcctggtcaacatagcaacaccccatctctttttttgttttttttttaaaagaaatttagagacaggatatagactgaggttaataacatgtaactcaaattcccacttgagggggcttctctgccctcagagattttagataaacttgtccggagccaccattccaggacttgggacagctcaatgttttctctgtgattcctgccccatttttcttgctgttctgtgtttcatttcagtcccaactgagtccaaactgaggaaattggcctcccttgccagtttccataagaagtgctgtcacacaaagcctactgtgatctttgtatacgaattatagattggtagggcactcctatc

SEQ ID NO: 3442 - DNA, 4001 bp, Homo sapiens
ttgcccaggctagagtgcagtggcgcaatctcggcttaatgcaacctcaacctcccgggttcaagtgattctcctgctttagcctcctgagtagctgggattacaagcgcgcgccaccacgccctcctaattttttgtctttttttttttttttttttttgagacggagtttcgctctgtcgcccaggctggagtgcagtggcgcgatctcgactcactgcaagctccgcctcccgggttcacgccattctcctgcctcagcctcctgtgtagctgggactacaggcacgcgccaccatgcccggctaatttttgtatttttagtagagacggggtttcaccgtgttagccaggatggtctcgatctcctgacctcgtgatccgcccgtctcggcctcccaaagtgctgggattacaggcgtgagccaccgcgcccggccaattttttgtcttttaagtaaagatgtggtttcaccatgttggccaggctggccttgaactcctgacttcaggtgatccacccgcctcggtcttccaaagtgctgaaattacaggcgtgagccaccgcgcccaaccttacaattactttctcatgagatttaagtgcctggcccttaagcactacttaagagcattgcatgcacgcaggctcagagcgaagtgtgtagctcaagttcacagacgtgagcagtggaggcggtagtggggtgtgagccttgaccagctcctaacagctcctcgctcaacagcaccgcccggagcgtccacttccccctaccccgtaaaaaaaaaaaacagggccattggttcgggtcgagagccgctttgggaagcgtctctgtcactaagcgctaccccggggtgtgcgagggagtcaagggacgcggagaccgggagcagggctgggtccccttgcagccccagcgctggcctcctgcccaccgcattcaggcgctgcgccgccctcacacccaccctctcccacctcagcagcgtgcgggggaagcctcgcgccggggtctttttcagcaagactgtcgcggtcctcggcttcaactgcaaggtaaacggtggcagagccccttcccactccagccgtgtgtgattctcacactcagtgccctctcctgcactggggcgccggcagtggcgacctaggctctccagcccccgcccagtcccccgcgtgcgggcgccgggaccgcagtacctgtgacgccgaagcccagcaggccgcagacgggagccacgcgcggccctggcacagggtaaaaacctacgctcaggtaggcgggcagccacgatgtcgggcaagcccagggcagacccccggtggcgcacagggaagcagcggtccagaaggccgggtggacgcaggcggagcccgacggctgggaggccgccggcgcgcaggggtcgggcctcgccaggatggcctcgaccgagaaaggggactcgaagcgtccgggagcgcggggcgtgttcgggccagtaggggacctgggcgccggagagcggccagagcgcggaggtcggacccgagagcccgagggagcgggtggcgggctgcctcgcggcctggggctaggcatgacgcggccgttgcccggacggacgcaaggaagggagctcgggagaagtgagaagattctgcaaaaggcagcgagcaagaccggttgtctgggaacctcctggcgctcggcgaaggctcttaaatttggcggggcggggcatggggcggcctctccccactgcggtccgggcggggcccccaaagcctgtgagcgcccgctctgtgcgaggcaaggtgggcacagcaccaaagagtgtgttccctcccttcctccgcttttaaaaatgcccaccctggggcggtcgtggggaggactctgagctcgctggtgatcctgggcgaaacacccagccaccgggctccgtctttctcctttgctcactgaagaagggatgcccgtttccccggggccttgcagaggcggagctgtgatctggagagcggtagggcagtgcctgcggtcttggcctcagctgacccgcgccgtccttgacgcagaagcctcggccagattcacctaggaccgcgcggactttttgtttgtttgttttaaaatgtaaatattttatttataagcacagtgataagtacattttccatctggcctcagccctttagtttccctgccttgagatgcgctgtgattaccaatttcgttctttctttaatattttttttggccaggtgcagtggctcatgcctggcatcccagtacttgtgtgggaggccgaggcgggaggatcgcttgagctcaggatttgatttgatttgatttgagttgatttaggggtaaaagatatggccactatgtctctaaccttggacttttagtatataattctgtgtttccatacataattatcagttttctgttgtgtcatttattccttcttcagactgtaaattcctgagcataagcattaatatctccaatttacatattagtaaatacagcaagagaggttaacagaactgccttgtttcaaatcccctaggtatgtggttttaatttgcatttatttccctgaagaccgttcattgtgagcatctttttacatgcttatcagccacttggatatcctcttttgtgtgaagtgcctgttcaactggtttgcttatttttgtattgggtcactatgtttttcttattgtaagagttttatgtatagataatttggaatcaagtccttcgttgtaatatacatagaagcagataacctctgtcactctgtggcctgccttttcattcttttagtagtcctttttttttttttttctgagatggagttgcccaggctagagtgcagtggcacaatcttggctcactgcaacctttgcctcccaggttccagcgattttcctgcttcagtagctgggattacaggcatgtgccaccacacccagctaatttttgttaagtataccaaaaataaagccaaacgaataacagactttatttttattcatttatttatttatttagagatggagtttcactcttgttgcccaggctggagtgcaatggcactcggctcactgcaacctctgcctcctgggttcaagcgattctcctgccccagcctcctgagtagctgggattacaggcacccgccaccatgcccagctaattttttgtatttttagtagagatggggtttcaccatgttgtccaggctggtcttgaactcctgacctcaggtgatccacccgccttggcctcccaaagtgctgggattacaggcgtaagccaccgcacccagccctacaacagactttaaaaagaccactgagatgggttagtacatgaactaggcactttataaaaggaaatatctgaatagcttaaaaccatatgtggctgggcgcggtggcccatgcctgtaatcccagcactttgggaggccaaggcgggcagatcacttgaggtcaggagtttgagaccagcctggctaacatggtgaaaccccatctctactaaaaatacaaaaactagctgggtgttgtggtgggtgcctgtaatctcagctactcggaggctgaggcaggagaattgcttgaacctgggaggcggaggttgcagtgagccaagactgcaccactgcactccagcctgggcgaaagagcgagactctgtctcaaaaaaaaaaaaagtatgaaacatactgaactctgtgagtcatcagggaaatgcaaattcaaatcacatcgtgatccactatacacgcaccagaagatggaaaataccaagggctggctgggcacggtggctcacacctgtaaatcccagcactttaggaggccaaggcaggtgtgaggctgaggcgggtggatcacttgaggtcaggagttcgagaccagcctgaccaacatcgtgaaaccccatctctactaaaaatacaaaattagccaggtgtggtggtgcacacct

SEQ ID NO: 3443 - DNA, 4001 bp, Homo sapiens
tgggaagcagtgagaataaaaccgattctacatttacgcacagtgggacagatcagcaaataaatagaggcatcgatttccaagaagaaaacggctaaaagcagcgcatttacaattcttctaagccatactccacatctctctgtgagatggaagataattactgaacgtctttactttgcacactttatttttaactaaatatttaagtagactgctgagagataccaatacttctactggtcctggtttagcgctgtaatgaaacactgaatttttgcttttataaaatagtggcgcaggtcaggataactcttttaaacattacactatttatttgggggttatttttggctaactttttcctttaaggacatcttagtggcaggaagatggagctagtgtgtgcgcttgaatgtgaacagtgcctcccaaggagggcagctctgtgtttaatgcaagccataattagttggtcaattcactgatggggaccaagctacagtgagagagagatgctggcagagatgtcttgctgggaactactttagaactaattacctgggaagttcaaacaggaaaaacctttctattaaggaaaataaggtttgggttctaaatgatcaagacggtttagctcgtctctgctgattaagttaatttaataagtgatcaatgttttacctgtaggaaaacaggctaaccactttaatgaagttggggtggatgccaaagcaacgcgtaaagacgaaactcctctccgggaccctcctgaacacctgttgaactccagggcttctaactttccgtactaaagcctcccggacacaagctcgggagtgtttagactttgtggaagtgcgtgcgtatattcaaggtttccatcttgcttaatcaacaaaactagttactaattatttatgaatcacagggctgaaacaaactttcttaccttgagcaattaaggagtggcaagcagaggagcgggactggttctgaatttagccgggtggtgcctgtcccttccctggttaccgacctgcccagctcttcagaaaggtcaaaggtgcgtccctcctcggctgggaaaggggcacatctcccaacaaaaccatacgcatacatccaacctggggagctccggagttggggtgggggggcggcagcgacgtgaggagccaggctgcacgctgtctgcgcacacgggggttgggggcaccgattccgcacccaatccggcccggaaccaattccgacccagggactccgagagaccgcgggcccagggcgcgcacgccgcactctccgggggtccaggacgcccgacgtttcggagggtagcgcgatgggtctcgaagacaaccacgggcaatccccaaagctgttgccctggggcacgatccttctccaccctgtcggacaccccgaggacccccaaattccgaggctcggatgcccagtcctctgtcttctgcgtcgagacgcgcccggagcccaccggcccagcgattgctacctcctgcaggacgcgaagcccccagcggcctgactgtggaggggaacccacctctccgcgcccccgcgtccggggtccccggtgccgcgcagcctcgcgcctgagcgcccctccgcccccgcgcgtcctccacgctggcgagcaggtgaccgagtcctgcgaccccgcgcgcacgtactacccaccctgggtcccccgcgcccctaggcgcggccccttacctcggagcgggccggagcggccccgcggggccgggcgcggactgggccggggagacgcgcctcccgccgccgctgggagacgaggcggcgagcgggcgcggcgagctcctcccgggcggcggcgggaggcgctgctctagctgctgccgccgccgccgccgccgccgcggctgcgggtctccgggctccgcggccgccgctcctgggccgcagccgcgcgggtccctcggctcctgcgagaggccggctgctcgcgcggcaaactcttccgcacgcagagccggcggggagagccgcctccgcctctgcctcctcccctgcctcctccctccaccctcctccctctccacctccccctcctacccccaccctcctcctcctcccctcgcctgcctccgcctgcggggtctctcctggccccgacccagcctgggacaagcaccccgcgcgcgccgcaggcagacggacccccggccccctagacccccggcttccctgggcggcgcagacacccgcgagtccccaggccgccgcagcctctgctgggctgccagggacgcgcggcggggtcgggcctggggcgcagggtcggggttgggcgccggggctgggggaggggggggttgtgcttccaggtgagccggcccagaggagaggcaagtggactagaggctgccagccgaggtcccattaaagttgtcactcggggggaacaaggaatctgccgcccccgcctagtgtagaccctcgcagtgcgggccgccaccctgctgtcccgcgcaggggatgaagggggacgagcacgcgactgtcaccccctccacactgtcctccaggggcagggttgcgcgcaggtctcgacccagggcacaaagcgcgtctctgcggggaccactgcgatttctcaatgagcggcgggggtgcggcccgggggcaggtgggaggcgggggtcggggaagatgcgggcgagcggtggtcggcggaggacagcagcgactgctggggaggaataaccagtgcctgtcctaaggcgaacgtagctggtccggaaaatgggtcaaggatggaaaggaaccggctaattgcccccctccccggcaggggcacgtggggtgtggggctgcggccaggagcgggcacttggagctccactctgcctctccctcccctcctccgctgccctcctctccttttgcaccagtgcaggaaatgttccactgacctacatatttttccaaacatacgtgacctttttttttttttcctctgtgggaggagacaggcgagaatccaagaaaaagaagctggagagagaggcgcgcgcgagaaacagggaggattttaccaaggttcccgcaaacgccaagcggagggaggcagaggtacaggaataatccccgggtgccggggctgctgtctgatgcccttcggggctccaagacagagccggtgaaaaccggagaccgtgtgccccgccgaggtccggaaacgtggccggtttccccttcacctgggcggcggcgttcacagcggggaggcgcctgggtggaagcccgggagaggggaaaggtccccctgcccgctcccacgaggtctccgctcccctggcctaggtgcctggcctggcgcagcgctccgagcgtggcagccttttccggacgtctctccgtccctcttacattccggcaagtggccctggaaggaaagcgcccccgctggcccttttctgtcatactcgattttgtggccagaaggggtctcctagggcctttgccccaagcgcgccaggcccccgcggtggactgggggtcgccccggacgctgttcctctcgctgtctcgtcctctccctcgagtttgagacgtgccctctccctcgcagatccgaccagcagcgccttatttgggcatgcaaccccacaccgtcaattagatcaaaacgctcacacagagctcctttttaccccccctgtaaagtaggtcattctctttatttcccacttgtattatttgtgtctaattctcctcctgaaaaataatcagctgcaaggagctttgagcatcctaagagcagctgttattctcaggcttgcttctgacttggagggcttttcaagaaagaggaggaggcatttggcctgtcatgattttgaagtccctccctttccaaaagaagaaacttttgtttgatggattttattttgctttgtttttctaccccgtccttttcctccaggcaagtaggtttcaccccgcctttagag

SEQ ID NO: 3444 - DNA, 4001 bp, Homo sapiens
catatacaccatgaaaaaatatgcaaccataaaaaagaatgaaatcatgtcctttgcagcaacatggatggagctggaggccattgtcctaagtgaattagcataggaacagaaaaccaaataccatatgttctcactcgttgagtacacatggacataaagatgggagcaatggacactggtgactgctggagtggggtgggggagggaagaggaatgaagactgaaagactgcctattgggtactgtgctcactgcttgtgtgataggctcatctgtaccccaaacctcagcataacacagtgttcccatgtgacagacctgcacatgtaccccctgaatctaaaataaaagttgaaattttaaaataagacacagaaccatattaagatccaccgaagttcagcataagtcaatgccccatcaagttttattttttatttctaccagaagagtatttagcttttgttgcaccactgtgattccaatacacagtcacctaaatatttaccttccaaatcctttttactttaaacaagagaacaaaaatggataaaatatgagcatcagtgaatctcttaccggcctcagattataaaataattttactcagtggaaaaatacttggtaatagatcacatgaaaaaaattaaagtgaaattaaaatgtcagaaaataaacccactggttgctatttacttttttcttatttttaataagaactcagtgtatttttaaaaagtttttttttttttgagaccaagtcttgttatgttgcccaggctagtctcgaactcctgggctcaggtgatcctcctgtctcagcctcccaagtagctggtactactagcatgagccaccacacctggcctaaaaatttttataaatatgaaaaagaataaagaaaatcataataatcatcagcatcctgtcacacagaaataccatattagcctgttcccttctatgctgttctgtgtatattatataagtaacaatgtgatgaatacttttatacatcaatctctgtcctactttctaattattacacatagcagatccctggaaatgtaatttttgagcctaggtgcatacacatatgttacaccttgtcaagctgctttcctgaaatgctgtacaagcaccttatacacgggagcagtgaatgtgcctgcttcatcacaccttcctcaagacagagtgttgtgatttttaacatttttgtgataccttatgtgctttgcaattacttgagtatctttgaagttaacattcctcgtatgtttatgagttacttgtatttcctctctcgttcacctcctttgctcatttatcagatcttaatgttcttgcatattaagactatttcttgacacctatttcgcttgagttcacggaggcaataataatctccacttgaggaaggctgaaaggaaatgggcttggaaagtggaggagaggagctaggctcagagttgggttggaaatggttacaccactaagtttagattgggagataaggtgggttagtgagttgttagggtaggaggttgagacgttaggtgggagtgagggtcggaggagggggcgcttagttgatggtcacgaattttgggaggtttcgcctttggctgggggttgagttgggatcaggaggggtttgaatcggggttgggtgctggaatgttatggggtaagggggcgttacaacctgggaaggtaagtaggttgggggcaagctcccaggattaggtggggtcacggtgggaaggcgcagtgcgcgcagctgcgtccgcctgtcgcccgccccagggccctctgcacagcctgaccatacctgttgcttcagctcctgattgcggcgccgcagggcctggagaggatctcgctgtcgtctcgccagcatctccctggctgcggtgctctgattgctccagttgccagggaaaccaaccggcggcgccagaaggtgacgccatcgatgtgcgcccgcctcccagccccgccccgcccgggccggtcccgggaagggtcaaatgttctcttgcggtggtcatcccacgccaccaggcaggtcacagccgggggagtcacttttcctcggcaattcctaaggataggggaacgtcccccggcgtctgaaactacattccccacaatacatcaataataacaccaccttcttgctgggatacctgttttatggcatttgctttctgataccaattttgtaagctaatgttaagatacaattttagtatcttaaactctttcattaactccaaggatagctttcctatggaatatatggttctgttccatactgtcacttcaaaaggcagtttttaattctttgccatttaggctactgaagtttcatttcattctaatattgcacgttgtcaattctgaattctgtaaggatggtaattgttctacagcaaatctatgagcaaattattagttctcattatgattcccagtttacatcaactctcaggaaggttgtcatgtttcccccatatgggactgcatcccatgaatccaattccaaaactccactacaccaaaattgaacttgaataagaatgatgatgcttggggctcaccttccaaatgatggaccccattaatacaaatgaatgttcttcagaacagccacaggccaggatgaaccattatttatgtacttttttcttcaagtataatacatacagagaaaagtctacagactttgtgtgcagctctgaaaaccctccaccccataacagcacccagattatgaaacagaacattatctgcccactcacactcttcctgtctttctagtccttgcctacccccaacctctcaaccctctcacttctctaccacacaccaaaggtgaacaatatcctaacttataagagcacaaacttgtgttgcctttttttgtactatacaatgaaattatgcactgtgtggtggcttctcctgtcctttaaatatcacatttgtgagatgcatctatactgtgtgtgtctgtagtctgttcattctcattgctgatatttcacatatgatataccctaacatactgattctactgttgctgggtaagtgggcagtttccagcttagggctagtataaatagcgctgctaagaacgtcctggtgcaagtcttctggcaaacacataacactgctgagtcacaggcatgttatacgtcagctttagtagatactactacctggtttcccaaaatggtactaatttataccctatcagcagtgtatgagtttttgttctttatgtccttggcaagatttggtattgtctgttttgttgtaattcatgtcttattttgaattaatttctctattatggcttatgataattagttcacttaaatagtcaaacataggatttccattaaaaatctttacaacaaatgagaaaatgctataaaatatttctaagtggattattaaatcaataattacaggtgatgagatgagcaaaacgaaaaaaattgctctaaaatacagctattacttatgaaattctcagtctacaaataaattagaaaaaattattctgcatctacttatttatagggatttccacattttaaatggaaaagttaatagcatcatggatacagtttaattctgttggtaaaaataaactaataaccccccctaaatatgtgtgaatatatgaacaataaggaaaggtgcaaaaaaagtgtattactcattcacctcaggtgtgaagatgtttgactttatacatttttgcatcatattgtttcggttacaagtattcattacttgcgattcctagatcagcatcatcaccacctgggaccttgttagaaatgcacattttcacattttcagccccaccacagtcctaggagaatcagaatctgtattttaacaataccccagtgtttcatgtgcacattcaagtttgagaagtaccactgaggtattcagtgtgctataaatgatatgat

SEQ ID NO: 3445 - DNA, 4001 bp, Homo sapiens
tgtgctggacaggcgctcttgtttccctccgggagaagatccgacactgacaagggtttctggggaggagacagcagcttgcccgtagcctgggatgggacagtcaaggtgtgggacaggcagtggcagctgctgagctggaggcaagaaagcgagaaagccaggtaagcctgatcctaacgcacatgactgtcaatgtcagaggctgggatgttattcagtgggcacgggcaggcggcaggaatagagaggagggaaagaggagaggtgaggctctctgcagcagtaaattaccaccacgcggcacccggcagggggtggcggtagggcagaggtttccagccctagtgcggggtgagaccccacaccagaaacggagcccagagcaccggttgggtcgggacagggttggtgagggactctgggacgtgttgagttcgaggctggggcaaataatatttactttagtgtctttcctattccctgaaatagtgccacaagcactgagattcacccccgaagccaccaggctgcagctgcctcaggaccctggacagaccagtttgcccactgcctgggtttagagaagggacaggaatcggagtgtcccaggcagaagggcgctctgacagtgccagcagagggctactctcactacagggggcatggtggccagcagatgatcgatgtcccctggacttgtgggtgtaaccttccttctctgctcccacaaacccatgatctcctctcaatccccccaccagctggccaataggggccagtgctgctagttcagctacggttcaggggtgggtgagacaccaccaagcctgtttctgcttctccagaagaagccaggtgggttcaaccaggctgagccgtttctgaccttgccaaagttccccgatcacgttatccttcgctttctttgtctgtaaagtgggataataaagggggcggctggcaaacgcctagcacaacttgagcaaaggcggctcgcgcgcctccgaaggccggctgggcggcgggcggtcccgggccgggctggggctgggcgtcgggtgggccgtactcaccgccgccagggggcgccgcactaacatcccaggccgctcatggagccgattcggtccagcttgaggccgaagcagcccttggacaagcccttcttgttggctcctttgtatttgcgcgcgttggggtgctcttgcagaaggcgagcccacgctgcccgcgacttggtgtccacgcgcaggtcccggagcagtcgcgaccggtcgcccttgagattggcgcccccgcccccgggagccttgtcgcccttcttctgaccgccgcccgcagcctgcggctcggccagctcctctgccggcggggttcgcgggacctgtccgaggaaagagcgggcaggtgaagggacacgcggctgcagcacgggggactctgatgctccagccccacgcgcccgccggcgcggggtgtccctcccaagcccagagccgcccccaccgatgccggccagcttggccccgcatccacctgccacgcggccgccttcgccgctccctccggaagccccctgccctccctttgctgctcgccgggcaggccacactggggtagggggctgcgcatgggccgatgttctccggaggctggagaagtggacccccgaatccgcgcttcgagggctccccggctctcgcccacgcgcatctcggaggagacagccgcctgccttccctctctcctgggtcctgcgcgccgcattctccaagcccccagcctcccacgcctctcccaggctcggcgtccccacgacagcacccaccttcggcggcgccccgggcttggcttcggagggccggagggagagcagcgtgagcagcagggcgcaggccagcagctgggagagatgcatggtgccgctggggtcgaggggcgcacacgggcggcagcgagggcgcgcaggtcggcgggcagaccagcagggggatgcggagcaggctggctgggctgcagggcgagcagggtcccagtgctgcgcggcgccggctgggtgcgctctgagcccgtgactctgctcgcgcctttataatccaacctgccgctgatgtcatcctcccgcccaccgggccgcccgggccaatgacaccacgcacgcggccgcgccgagggccgggagggggccgcgggggctcccctcccttatcccaccccggagggatcccgcggctcggcgggctcgctccaggctgcacttggagctgcagagctgagcgcacaggggaactccatttgcagcgagcgcgcgccctggcctgccgagcatcggtgcgcctggtgccctgtgcacccactaggtcctcatcgcactcactctacctggaagggatacgtagccctctttgcaggtgcaaagacaggctcagaggaatgaagtcacttgcccaaagtcatacaggcataaagttggcgctgcccgaaatccacgcagccctgcttgtcgccaaactcttccctgggcacctgacagccgcgggatggcattgcagctccgcctttcacctgccggtcagggcgggagcgcagaccacagcgacgtcgttaggttggggaggcagaggatggggttggaggactggggtgggaggcgcagggagagcggggttcgcctgggccgcaggggggagcgcaagtcttccacactggagagtgcaggggtgtcgccagcctgagtgtttgagcgcaaggcgggaacgaggggactgcgagcgcggaaccaagatattcatgctcatgcgtgtgctccgcggcatcgtatgctcgccagttactgctctaggttcacgttcagccggtttcggccacacagaacgtcccggggtctgactccgctggtgaactccctctgtgggaacaatgcgcacctgaccttgcctgcacccacgcgaggatccgctgctgggggaagcccgctccagtatcctgtgcactttcacaggctggggagagagcttcctagccagcggcccagtccagcctctgccagccgtgacaggtggtcaacttcccgtttttgactgtagagaggtccccgtggctctcgggacatggccacatatccctaccactcacgaacttgctctccttgcactgggcttctcggtcccttggacactaaggagtgtggtgggcatttgggcactgcggtgtgggccgcagaggcggagagcccagatcccccgaattgattgaagagcaggaatctatgactggctgctgctgagcaggacgcaggctggagagagaacaaatgttgccgcaggagtgcagtggctgtccccaggcgtgaaggcgattctggggagacagtagcccagacgagattttccagggagaggaagctgtgcctgaggcaggaaggcaactggagtgaagaggggcttggagaaccaggttccctccaagcctccctcttccctccgtggtagtgagcctggtcccagagctgctaaggcggccgcatcatggtctgctctgtcggcacctttctcaggctaccccttcccactctcataccctgactcacaacattggagcaaccactacacaggtcactttgcttaggaaacagctaacacctgaggtctgagtttggggcagcaaagtttcctgatctccaggaagatccagacatcaacagggcaccttctgtggattctggtgaattgagtcaccacctccacgcagccccccaattcctctccgtgctaacacccatagagtggcaccactctttcatttgaggagaaaggaagaggaactagaaagcagtatagggaggggtatccaggtgggctgtgaaagttccctctgctttttgcctgctgtgcaaagaaggatgttaccatctggaacttctctgacacttgctttctttatacctgtttaaagagtcaggcagagccacacagactgactctagagtcaagcactgg

SEQ ID NO: 3446 - DNA, 4001 bp, Homo sapiens
ctgtccaatctcctccctgaaatacagacacaggaagcttcagggtttcttcccgacagagattcagctgggcatatgtagactcaccaggcaggcccttccatgccttccctgtttgtctcattggaaatgagtgggaagcctttaccaaacatagcacttaaaatgaatgtataaaagaaatgacttgaaacaacagaaaataccacccattgcactgtgtaaatccttgcagagagaagatcctgcaagaggaaagctagtccatgaactcatttaacatttatgatgtaatgaactggcccctttgctacagtgtaggtggagaggtcatttccatcttaggttaattcaggacctgagtatgaagactagagtatgaaaatacagcattggaaccttctcttgcatttttttttcttgtggtgaaattgccttttcttttggtagaggggaagaaagtagaagtcaagaatataaaatgagaaaacaatcttcccccttacaaaatgttagaaaggccttgactgagaaggcaagttgagtggaagcatccgcacttctaaagtgcttttgacagagcactgggattggagctacagataaattgatgttcacttttccagaaaacttgtctttcagcatctttaatggtcacaaggcttaatggtcacaaggtgggaagaggggatctacttttccaggagcttcttaggtcaattgcagaggggggacatactgcttatatggtattggcaccaatattagaagtgtttcccagcacagcaagatgaacaccttccccataatgccttccacaatctgcctttctggaacaaggcattcttgtgtcctagcaattttcagatgttcccacttggaagacattctagagcacagacaatcttattactaatgaaaaaagaaagccagtatcctctctttttattctttcccctcccccacaatcttgcttcatagtggtggtgggggtggggggaagattacccagaaaaagcagaaaggagactcgaaccccacagcccttagagatattcctgtgttggatattaaccccctggtagctccacagtttcataactgtactctttacatattcatattctcgctctgatacattcgcaaacccaaggacagcatatgtcaaaaccagaaatttcaggcaacttagtaacaggacacgctaccaacaccacccttactcaacaatacccgggaaacatcgcgcgctggccagccgcggagacacagttcccaagcaacgcataaactgaagaacttcctctccctgtcagtttgtgggcagcttccctcgtatacataggacttggagtctccgtgttcacaggccacaatcaattcctcactaacagcaaactttgcgcacatttccgcgggctagtcctcagctcccaaactgtggagtctcccttccacgtccaccaatgaggagcctggaaacctctgtcgagagccaactccccactagtgccaaagccggagttcgaacaaatgccccccggtaactgcgcgcacgcactccccatccttcggtcccactctcactagaagcctctggctcccacttccagagaacctgtcccacacaagtggaaagaagagacgtgcaaaagaaggaaaaagcataaaagaaggcgaactgcatgggctgcatctactcacttaggagttctccgcgtctgtcttcattcattcaactctgccgaagtgcagttccctctgggagcccgggcgccggggtcgggtaggggtgggagagctgggcgaagggaacccggacacctcacggagggagggagcagggacaggcggccggctggacaggcaaaagggaccgcggagccgtgcgcgagccgccgggcggactggccctggccgccaatgtgcctttgtttatgtggcttgcgctgccgctgccaacatgcacctaaagtctccgcgcgtcagcgcgcgtcagcggcccgccgcccaatcgccgcgctgccgcgctccctggactcctggcccgcgctcgctttggtatatttccgacctgacgtcacgagcagggccgattttaaggtgggaaccgctctgcgttcaccttggtagccagcttgggtggtttttggtgttttttttcttttctttttttttttccgaaagaggtgtgacctctcccaggtctgcgcagcccgcagcgtcgcgacacttcactttccccgaagcccctgcgcccgcgcagcggctcggccgctcacatgtggggagggtgcaacaaaagcaccggcggaaggcaaggccggcgtggccaggtagtacgcacctggagccgcacggaatgggatgtgccttgcagcgccctaacctctcccacccaccttcgtcacccccttagcggaagagcgtacagatgtcccatgacacgagacgctcagagggctcacgcagttcgggtgggatttccctacccggttcatccccttttactcccttttcctgtcccaggcctcctcctcttctggcatatattcattctaattatctctctctctcactctctctaccccacccccaccccccacactcccatctgaaagggaatgggagtgggggtagggcttatttttctatgtttccttatttccatgcagtgcccacgttcgatggaggacgtggtgcttgcgggggggggggagaggaaggggagagggtagacagtgaccgtgacccagctctttagaaaccccaaaagtcagagtgaagcgtcgccccttttcctttcgcagacaatgcagccgagcagcaggcaacaggtgcgccttctgcagaaaggtactctgattcccaccttctgcaaactctaatactttcgatactcctctgtgcccaccaactcgtaccccttccacgagttttaagggaataaatcgatcttcgtttgaaacacaaggtctatcacagcctcaatcttagagcccagaaagactggacaagaaaagcgaagcgggtggggattgggggcagcgtctccgcaaagcgtaaggtgtgagcctacagcccagccaggagaggggcccgagctggctctgggagcgtgtcccacccccgcggccgtccaagtcgccgccgcttctgctttgcaagtcatttcccctagccacgccgagagcgcagggagctttctagcaaaggaaacgccgcagctccggagggcaagccccctccccgtctcccggccggagctgggagggcttcctagggcttctcccgcggggcttccagcggctgggccttgggagggagagttcggagccgcccccgcttttctactcgcgcagagcgtcccagccgcccctcctttctcggtgtggctcgtttccaggcagccgggacccttttgcaacttgcccccctactcgtgttctcagtaccggccgatggctccgtggaactattcgggatcccgggctgctcaaccctaatctgcagccccgcctttgcctactccctgctgcccccagctcgccggcggctggggaggcgttgccatcagatgccctgcggctgccccaggaagccgcgggctcttttgcgccgcagcctcggggaaacctacgtgaccaccttaagtttcccccagatgttgcggctgccgctgctgctgccgccgccgccgctgctcggcgatgccctagcgggcgcgagaaaaaaaataaaaccaggaagtgggtggggggggcgggttgtggtggcgggtgagggtgtgtgagtagggggatgaggaggggagggcgaagaatagcatattagcatgagctcggtagcgtcagcgccccgtgggcagaagcgattccatgcgaacgaaagggaaaaagtgagagtttggagagctggggagaaggaagggggtgggggtggcggtgacgcaggggcgcaggcattgacgcaccggccaggctgggcccaaaatagcagca

SEQ ID NO: 3447 - DNA, 4001 bp, Homo sapiens
ttccagcttattcaagaggctgaagcacgagaatcacttgaactcaggaggcggaggttgcagtgagcccagatggcgccactgcactccagcctgggtgacagagtgagactatgactcaaaaaaaaaaaaaaaaagaaaaaaagaaagaaaagaaaaagaaactgataccctggaaactaaatgtgctcctctaagttcagaagtctccagtcaacacaccaatcttttgaaaagcccacatttatttttagaactctctgatgcccatttgtgcccatctctgcccccaatctacactacgtttaactcaactcaggagatttttattagaagacagtctagtaaataccaaagagcaataggcagtacagaggaaatctggcaagatattctttccctatgttattttctagatcctgacttattctagagagatttgccaggcgcgctggctcatgcctgtaatcccagctacttaggaggctgaagtgggaggatcgctggagagggatttaactcagccagccaggaaagctactatctgcctgttttagtaatctaccagaaaacttctgttagagatcatgttccttcttctgaaaagtagctaagaaaatggtaagacactattagttacttccttgagcagctgcattcactgaatgcatctaaaatctgaacaactaaataaaattcccagccagactacagtaggaaataacagtagaattctaatacaggaaagctgtagccaatgggctccagagaaacttctggaccgaggacacaaataactaatccacagtagggcaccacaggagacaccaacccttcatcagagatagatgcccttggaatttgcttatcccccccaccttcctaatttttgtgactttttatcccttcctaatttttccttcgcaggcaaaatgagggcagtgcccaagattctccagcactactcctattgatgaagaaacctctgcgacactgggagttttgtctcggagccgctgagaggttttaaagagataacacatggaaaagctcatatactcccataaggggattctcgccgcctccagccaccctgagacatgcagtgtgttcactttggagtaatgcagatcgccctgcaaagtttttccccgacactttcgtttattggacagcagcccctctgcgtgtcaactcctctgcaagagctcacgggcccaggcctctcagctgtcctcaccctgaacggaccagagggcctctgagacccgcagcacagtccagtcggaaataaaaccgctctggggaggaacccggcccctagaatttcacactccaacaggtcgcatgccctgcgtctggaaggcagccgcggcccgcgcgggaaccaggctggggcccagggagccagcggcggccacctcatcaaaggccggaccgacagcgcagtcaggggcgcaggccacgcccccgcgcagtctgcgcacctccccgcgagcaggccaggccaggccgccgagcttccgcaggccgccgggccgcgaccgccgcccccgcccccgcccccacccgccgggccccgcctctcgcagccggagttccaagcgaacgccagggcctcccgacccgcgcccgcagaatcccggggcgccgccgccaagccagagacgccagggagggctaagcagcgactgcggggccgaagcggcccctcggctccagcaggcagggcccgatcgggcctgggctactgagtgagcagggccgccttcagcacccgactggcgggtcccaccgtcccgggcctcggaggccgatccttccgtcctctcgcgaacccctccctcccgggccctcttttccctgggcgctcacctcccgactccgcgccccgcagcctgcgcttcagctccagctcgggttccggggccccggatcacagcgactccctcacagctgcgctccgcagcgcaaccgaactgcgggccccgccctcgcggcgcccggaccaacgatgggcggtgccgcaccgccggcaggtttccattgggtgacgttctgggtgggcggggcccggccctcgggcgttcgctggggtgggcttccacccgctctcctccccttgcgccggtccggccgagacctctcggaggggtcgatgttttcggtcccagctggggctcgtctctctgtccaccccaccgcccggtccaggtgccccagatggttctgctggacgcagagagggcctcctacctcttcttgaaggcgccatgacagttctaatgcctggaaaagacaaaaggagcgaaagacatagcctcagtccgagaggagcgcccccaccccagcccccgcctgcattattttggaacgagactggtgtgcaggacgccaattctccggaaagcttttaaaatttacctaacactgaaaattagtagttaacgcttggtgattgcttagcactatttgcttaaactttgtaagaggttttcacagatgttatttcatttgatcctcataagaacgaactcattgaaattatcattcaatggtagttgacaaatgcaaaaacctgaatcagaggtattaagctattaaccgaaagttaagttggtaagagccaagtctagaatccgaaacagtaaatttcatcaaaggagactacgttgagaagatgtttggaaagaatttagattggtttcgagttagtggaaagaaaagatgataaattcttggtgagctattaatctgcgaaaactaagcgcggagccttcaggatggaagttcactctgcccttagacgtgtatgatggagggaagatgatgaatcaatcaacagaacttggaaatgtcacaatcaccaaattttactgtcattaaagagaatctctaatcctgtttcactgggagaaaggacaactggcagaaaccctctcgttttctcatcatctcaaaatactcgtttttaaaaccaatctttcggccgggcgcggtggctcacgcccagcactttgggaggccgaggtgggcggatcacttgaggtcaggagttcgagaccagcctgctcaatgtagtaaaactccgtctctactaaaaatacaaaaattagccgggcgaggtagcacatgtctgttctctcaagctgcttgggaggctgaggcgggaagatcacttgagcccaggaggcagaggttgcagtaggccaagactgcacgactacgctccagcctgggcaacagagtgtgagaatccgtctcaaaaaaaaaaaaaaaaaaaaaaaaaaaaaaatatatatatatatatatatatatatatatatatatatatatatgtatgtatgttttaccctttcttccttgattcttctatctttggaagaggggggctcaaacaccctttttaaaatctgatgtaacttatgggccttctcttgtactttaaaaaatgcacttacccaacaaatttaggatataatttcaggaaactgaggttaagaatctttgctctgggctgggcgcgatggctcatgcctgtaataccagcactttgggagactgaggcgggcggatcatttgaggtcaggagttcaaaaccagcctggccagcatggtgaaacctcgtctctactaaaaatacaaaaattagtcaggcgtgcttgtgggcgcctgtaatcccagctactcaggaggctgaggcaggagaatcacttgaacccgggaggcagaggttgctgttagctgagatcaggccactgtactccagcctgggcgacaagagcaagactccacctaaaaaataaataaataaataaataaaataatttcttggttctaatctcaaaggaaaagattaacctttccttcctgtgggctcaaaagcaattggaacacctggcccagggtaaacattcattaaatatcagttcatgttatcattagagtttcccattctcttctgcctggggctttatcattatcaaccttccgctttcaac

SEQ ID NO: 3448 - DNA, 4001 bp, Homo sapiens
ggggatgccaaggaggctgcagagttagctctaccactgccgccatcgccttgcaagtgccttgggtgagggcacttcaggaaggctttttcgcctttctttcacccatttcctccatagatggtttctccatctccaatcacctgtagcagctgctaagagttttgttgttagattccagacactgttctcagaggggtagggaggctcactctagagagtggtccgagaaggaagcacaaaccccactgcattccccatggattcccctttccagagcataccccttgccgctccccacaaatgcggtccccagactgttctgggcctcgaaatgcttatctccacagcagcctgtccacacaccctttttggcagtggttgagaacaaattccactcaaaagtttctaaccacttcacaagagtgagagaccttcgagggcctgcaatttgttttagctaataataatttctaaaagaacgtacgatttactttcccagacaacacatggatgaagagagaagagaccaaccgtcttggttgccagcagcacccaaccccaagcccctatctcagccacaagccaacttgctccaccagcctgagccttatgattctgaagcataaccagtcattctccaaagaatctacagcatctgaaaaccaaaactaaactcttgtctttcccaagcccttcagttaacattgctcaatgtagctaagtggagggaatgcaaatgatttatatttcactggctagttggagaaactcaagggagatgtgttctgcttcaagacagggaaaaaaaattcccaaaaactgtaatgcaaaggctttgtagtatttttaaacctttgattcagtccatatgtgacatatgaacaccgccaaattctgtttcaaaacacactcacacacacacacacacacacacacacacactcctagcaggagaggaaagttgggttttagcagccgtggtggtgtaggaagggccggctgggatctctctttaaattattgagtactgagggagccttcttctgtgccgttctgcgtggccttcctgctttagcggtcacttttaaaggggaaaccatgttgcaataaatagaaaaactttcagtggcttacctggttggcctctcacttggtgtcttgaaaagtagagggctaagaaaacccaggtgagaggaaacatatccattttggagaaggtggctctttccagagctgggttcgtaggtttcttgtttaaatctttgtgtttttctctcttttattttcctccttacaacgtcttatgcagaggtttctaatggtcagcgtttccctcctgagtcctggtggcttgtcttcacctctattcttgctggaatttccacctcaccaggaggagagtagctcctgaaatcagcaaagagggaacaagccgggaagagaacacggttttcctcttaaaaacaaaacgcatatatgttctctccagttcctcaaagtgtcatttcctttatcctacaaatatcacgagtatttcccgaaagccaagcgtaacaataatgataataataataattaaaaccaagacttgccttgggcatcacacggcccccaggcagctgtgtgatctcagaggcgtaaactgacacacatcccgcggcacccttgacggacacacgggcggaggcagccgccgccggacagcccgagtggaaggcggccgccctgctcttgtcctcgccgggttcccccggcgggagcctcccccaacggctacacccgcttggccagcctctcgaggggagtctgaggaaggaagctgctgctgctgttgctgctgctggtgcggcggcggtggcggctgggatcgcctgggagtgagcgagcccctctccgagttcgctggcgcccgccctcacctccacctcgccgagtgtctgtgcggctgaggatgtgctgggggccggctgcaggctggtgcctcgctcgcgatctctgcctcccctccggctccccactgccttttcaggccgagcagcatgtggatgtcagagccgcggcagagctatccgattacgcgccggctcagggcccgccccttctgtgttcctgattaaagaggcagccgcggagacgcgcggcgcagagcagagtgccgcggcacccagctcgggcggggcggcgacggcttctctcgggccgccgcaggatcgaagttaaggcggcgcccatcccaccacccctcgcccgccccgcatctcccgatcgcccccgcgcacctccgcgccgggccgccggtgcgtaacgccctggggaagaagcgcccccgggcacccccagggcgcgccgccttggccgtgtcgcccccacccaagggagaccccggggggacggggggaaaagccttgttccccctaaattccacgactccgatgccacacacgcagaacccaacacaatgccacgcgcgatggcgttacaagaggagttgggtggcgtacggtgtttggggtagcgagccggtcggcagctcagccatgcgttcgaacaggcagcggtgcgtggcggcgacacacaccgtcagcccggtctgaataaaaccccaaacactcgctgcgtttactactcagatcctttgttatgtcccaaacatgctctgctcctctctgggttaggatttcgttacccctgcgcctttaactgtaactaccctaaaaagaggaaagactttcttcagcaaataatttcttcaggtaattaaattggattccatcaagttcccccgaaaaagtataggtgcttgaaggcgtctcatccaaatgctactgtaactacgtctattcacattttcccccatggaaacgtggtcacaaagcctagagaaagaaaacatcattatgccaactatttttaaatggaggcgtgaaaactgtttagagggaactgcaagctaacagttggggaaacacttgtatctttgtttctgaggatggctttgtggattccaaactgtcttgcttcaccagacacctattactacattatcataaagactgcaacagaaacagcctaaattacaccctgcacatgtacaccttttctgccacaaaagaggtatatgaaaaataagaaaattcagaaaaatatttacagattaagattttttttaaattaagaaagtaaaattttctgtagattaagaaaaatacagtttcggtgacgagaaacacacacctgactacccattttcttcttggcttgtacttgtggattcttctgggtggtttccctccttatctggacttgcccattagctttatcacttttagtgtttgaaaaatctgtaactcccacttaactgttatttacactgagataaccaaaacaaaattgaatcagaagtgatttgcaaatagttgagccaagctgtgttggggggtggcgcgggattttagagtggaaatccacaggctgagtatcacactgttaatctcagatgcctggttgggaaaggcacagcacagaggcctctgagttcttccagggagcatgtctcttggctagcctaaatgctacctttcattccctctttgcctccctccttcctcttcctccctcctttccttccttcttccttcctttctaggcttgagagcacatccacattattaaaaactccagatttacatttctcctctttaaagctcaattgtaaagaatgactccaagccttaaatatttaacaaagtaaaagagcagtttggattattaaccttaagcagagatcccggtttatgtcattgccaagatgctaatctaaggacaaagaacgctatctgtagtgacagtccctgaatagagagggccatttaatatcacctctccccaccactcaccaggcatgccaaaccatttttgccagtgcccaatgtgggagactcctgtttgtgagaataatgtagccagggtttaggtgaagggcactgtgaaagggggaa

SEQ ID NO: 3449 - DNA, 4001 bp, Homo sapiens
cacacacacacacacacacacacacacacacacacagtgtgggtgtgcgcacatacacactgcccactagcaaaaggaaataaaaatctcagttgcttatttattatggctgatacattccacaccatcagcaatcaccagtcatatcttgtcttctcctatatcaaacccgaggaaagaggctcgtcaaatcatctgaaatagcatattattcagtatactttcatattttaagtggactcaggaatctgctaaattttcagtcatttgcaaaataaatctggaatatcatgatcaagagtagtgctttgaaccctttctcaagctcatgtgttagaaaacctttttttttttcttgtgtgtgtaactctgttggagccaattattgtattaattaatgttacattgatcacataaccttttttctcccgtccctcctgccctcctccactaatgcacaccttgacaattttaagggatggtggaagagagaaaaaccgtagagcaatatatatgtacatatagatatatatacattcttatcacagggaggttaactggttttcccagttcttggaggaagctcattgtatgtgagcgagtatctgtatttatatggagaaaagaggattctctctaggtgccagaaagacctggccagttcacaaattagaggatgaaataaagggatctgaaaaacatccttactgcagccaaaagaagaagcgctctaattcaaaagcagactaacagcatcattaatcttttctttcatttctagaatcaaattcatcccaagtcactaggaggatcaatacagtacgctcatcggctgcagttgcatattttaatgtttctgatatcacacacacatacacacctacacctttccatgcacccttcaatatatatatatatcttcataaagaacatgaaatctctgagagaaattttagaagtgcttattatttcacccctggcttttgcaaagtctctcaataccaatgcacagccaaaattctctctggctttcccgcccagtctctaagctccatctctaataccagtgcagtttcttggagctcggggtctactgcacaaattaacgatgggcacagtgtggggctgatgaggtagggaaggaaatatatggagagatattttattgctttgatatctagcctgtctcttattttctttcttttgctaatacatcactgcattcagcctttaagttactaccccagttccaccatctcttcttgccatctatttaaaaggcttcatgcaaaacaaccaagatctacactcctccaccctcccaccacccatctttccctgtgtatttgtggcagatcctggctcagttacaatggggaaagatatccttcttcagcttgcctcgccccatcccctccccccaacccaaattgagcttctttacctgcccggttattcccctcagctcgagccagagcctgaagcatgcatcggtcaaagcgaatttcctgaggtctatggataaggcgactgctgctgccttttcagaggcgtcaggcttgagcgtctatctccaggagtgcgggaggggagaacaggcaacggaggggagcaggaggaggaggaggaggagaaggaggaggagggggaggagagggaaagagctgggaaggaaaaggcggtggtggagcctgagaaggctgggttacgtgacgccgggtgctgtccttctgaaagagaagggcggagctgagctctccgcagtaccatggagagcggcgggcccgtcctttggctggggaatgggtgggctcggcccgtggtcgcagcccctccaggtctggatgctgcggagcgaggtgcttttacctttgcatcgtccccttgcagggggagcctgatcctgggggcggggaccttccgcaagcgcttctaacttgtcaccaccctctcttccccatcggaaagaaagaaagagagagagagagagagagagagagagagagagagagagagaacgaacgaacacgaaccagagaaccacgtagcctactgagcatgcccaggcccctgctagacccatggaaagctgtatggagattccacttctccggggtttggtagtgattgggcggggatacctgagagggtgccaggaaagggtccagcagtcaaagagaaggggccaaggagtcgataattatgatgagctctggctttacttgtgcaccttggtctcctgctcggaacccttgaaaagaagctgcagcttttcgaggaatgcaggggcaagcaagactcacacaggcactggcattcttctagatccgatgtcccttgccccaccccttactgtggctctgccttgggtaatcacaacaaatcttcatgacttgcctaggctgtgccaaaaagatgtaaaaggaacccaccagggtaagatgccaacttgcagacgacgatcaactgtgtctgacaaggtgctttttactgcagcctgtcgtcattctccagccttctgtgctctgtcttgaaccaagttttctacctgtttaactcttccctccgtctcctcctcccttttgcagctggtaaaacctggtgaaagtaaaactgggtgtgaggctctaaccatgcaactgggcatgcccaataggcattgctgggtttggtgagaaaggggttaaatctaagggagcttacagattaggtggtagaggagttcggggtctgtggctttaaattatggtttgcaccctatggacatttaaattcctattcctgtatattcctagcctgggttagttttggagcagatacagacatttttattgcaacgccacagacctaatagtctgaacctcaaatactgtaaggcaagactatttttggcctccaggccctatagagcaagaatttaagaactagataaatttgggaacatcaaaataatatatattacaattacaatatgtatattcttccaaaaaactagaactcattcctatgataagccgatttatactttcactacttttgtaaaagggtctaaataacctgaaggcgggtatcacaggttttaatatgtttatcgcccttagagaggcagttttgtcaagtggttacatgtttgggaaatagattgtctgagcttcaattcaatctctgccatttattagttgtaacctcagcaagatacttaatcttatgctgcctcagtcacctcatctgtaaaatggatataataatagctccctcttcatgtgtttgatgttgtgaagatgaaatgaataaataaacataacatatttggaattgtggattccaaattgtggaattttggctatatttatcaactacaacccactctgtgttctgtttgactcaatggaaggaatttctctgaaactcgaattctttgactataaaatagaggtattagtcattgtcagcttattccataagattgctttgggaatgtaatgaaataatagctgttaacatgattcttaaaacaaaaatttaattttaaatgatgtaaaactaagactcagaaaattacttatctaaattattcattcagtgaacttgaaacaaaaaaacagtctagttaattcagggcctttttcaatttttcctaccattaggttataggacaaatagtacagaaggtacaccgcgatgtgtttagtatagagctaaagcttattgcaaaagtaagtggaatggacagcccactttcaaaaatcaagtctaacttggttccatgatgctcttaagatctggtgtgaacatgcatcagtgaacattatggtagtgctagaggcactcttaagagtcaaagcactgccttttacctggattcataaaaactcattatttaccaccagtgcatgtgatctgaacaatttcctactttatttcatttcgtctttgtgaatttttattttatctttaattgggctacacagtgtttccactgaatcaaggttttccttgag

SEQ ID NO: 3450 - DNA, 4001 bp, Homo sapiens
ttaggagaatagtttcccttagctctaacttcttctccaggcagacctccgggcttagcccagccagcattgactgacttgcccttcctggaaagcattaatcactgaaggaggaagtaagacctccctggttccaatagccttcacacgtgatcctccgggagatgggtatgtgtagtcaagcctctctctgttccatttagaaaagaactcagcctaattaccaagaaaaagacatatatttatgtgcagagtggatggaaggggaatggtgtccagaggtcccctccatgcctgcgaagggctggcccgcattaaaggggatgactcggttgccctcctagcttttctaattaagggaaggcgtgggggcaaaagtaattggcctcctgttgagtgagtcccaggactgcttcgctgtcactgcagtctgggcgcactttggaggaatgtgcgggctggaatctctccctccccgccccccggggccagggaagatgggcaggaggtggggcagcatatacagcacagacaaaaggttctgcagagccctcttctctctggtgctcaggtcccttagctgagcgcggcgccccatccggccactgagtgaccttctggcaactgacgcccccttcccgcggggcccagccgcgcgaccagggctggtcctttagtaggtgtccacatctctctcccagtacctcgacaaggaacgcccctcccacccctcaccaccaacacccgcgacgccttcccccatcccctttctattgtcttcaaagagataagtggctcgcaccaagcacacccaaatgcacctcccttttgtcgagctcccatttctctgagccttaggagcccaggagcgagtgcagggtagaaagaggggagcgaggggataacccgcgagaacttggcatcgcagacccaccgtgtccgcctcgcaaggatgccggtgacctgtagattgcaataggcactgaatgatgcttgctgctgccatggaaatggtggatgtggtgcgctcccaaactggatgccccccacgccactcctaggaggccgctgagggtgagcgggactatccaaagcagggccaggcgcccccctgcgccgccgccgccgccgccgccgccgccgcccccgggcgagcccagctcggcgccgcaccggagcatcctctggtacatggcggggcgcccgccgaggggcagccgccgcgggaggcaaagtttggggcgcggggagaggagagggcgcaggggagcgggcggcgcggagtgggctgaggggccggccgcctcaccgcgccagggcacccatcctctccctccttcggacagtcttctcggggtcctggagtccgccgtgcctagcaccccaaacaatccgaaacatagccgaggcgaatgcagctggagaggggcttgtccggaaaggcagccccgggaacagcaagcgcggagcgggtggctgctcccagatttccagggctccaggttctcgagagatactcccaaagagtttcgggcgagagtgcgtgccggcgggtggggggccgagaaattgtttaaagctcctcctggaaggtcctcacttctacatgacagacatccaccgcgaatccactaggtaaatccatttagctttgtgtgcggggactagggaggccacttcgccggcccaacctcctttcaagacagaagcagaccccatggaatccaggcgccccttccctccattcagccccggccggctcgcccgctagcgccagcctcccccgggcagcgcgcggagcagcggcgcgcatcgcctgctcccgaggcaatctccgcgtccgccgcctcctgacacttacgcccggcgaggggttcagagggaagagtgcgcccttctgaaggaagtgggaatcgaacggcggaaaggcagctgagaagaagatgcagacgaaggagtaagggagagaaacagaaaaagaaaaagaaaaagaaaaaaagaaaagaaaaaccacacacgctggtgaagcaaggggctctatgcaaatctgcagtctccaaacagcaaatcactgaagctcggatgcaatgcagaggacgagcctatgtaacgagggaggctggtctagcttcccacgaaaatcgccctgctttgcctctcccttgcattctccacgcatcaaagggacacgtgtaaggcgaaacgggaacacctaaaaagcaactctccctccaccaggtgatccctccatctgaactacaatggcaaatggcacccttcccctacccaatggtttagatgtaaccagtgtctttagagatcttaaaagggagagaattcgggtctttttattggaccaaacttgttctaccaggtgtttaaactcaatctgctaaatatggcttgataccttgtactcaagcatcagtcgcgatgatctgttaatcacatatgttactcataacaaggattcttcttcccattaccatattatatctcatataaggcagtggaagttcaggggaccaaaactcacaaggagggaaaaggatgcattaatttggcagctgcagaagaggcagaaagtggaagaatgggaagagaggaagagaagggtcaggagagaaacaggaagaaagcagaaaagaaagaaatggcatgaataaaattgcttgtatttcagtcaatattttaggaatatttaagatcttccaagatctctatagaagccccgctgtgatgatctttgctaacagtggaactcctcctttctctcatcctgtcttataaagaaaatagcatcaggaaatgaaaattcctaaatctagtgcccccaagggaaataggacatttatatgcttttgatgaaatacagcatctttaactgaaagctgtgtgtcctagatgaaagaccagcaaagccagcataaatttaagagtagaaatctagcaatgcaagtgaacttggctaggaggaccacaggcactggatgctggtgattaagacttgggactatgatttaaacatttccctgatttccaaaagatgataaaaaactatgacatgtccagtggctggacttttttttttttgtctttatttctatttaaagccaaaagaaagcaacattgaacaggaatgatttctcactagcttctcaccatctacataattgttatcaacaaatataaagtccagtattttttaaaaaatgtaattctgggaagatttgattcaaatcagctactaacccaagtggccatttagacttgtatattgcttcctagtccaaagattcaaccatgggactctgatgcccactatataaatagtgtccagtggcccccaaatcacacctgtagcaatcacacatgtcacattcctgtcaaaagtttattttatgatactaaaagataattcttcagtagtatattgattgaaacagttcagccttgctaaacatgatgcttttatctatttaaatatgccgtgtctcccaaccttccacagctgctcgaaggccagcagacgcaaaatctatcattttccactgtgaactgtttctgcccttgcccccagtcatttcttactcattttgttattttgcaacatatgtattttaattcactaacaagagtcgtgattattcgttttaaaaatatcaagtagagcttcaaaaagaaaaggaaaatcatccacacagtatgttttcaggactgcaggtccatattctgaatttgacatttcatagtgttagcatggaaagagcactggattaggagttaggaaatccgtactgcatttttgatgccaccatttactggttacatcacattagttactgagtctttccctgaggcactgtggcttcctttataaaatactcatgtttctatctttcctaacaatcccacagggtagaaaggatatcatgcaatatttaatgttggtgttctttaaaatatgtcaactgctccctgacatgaaggcgttatgtctc

SEQ ID NO: 3451 - DNA, 4001 bp, Homo sapiens
tccaggctcattcttgacaaggaaacaaagaatgtttattaatttttaatctcagggcattaggaactttggctttcagaataaaaggataaagaaaacacaaaatttatttatttgccaatataaaaaggtataaactctagaccttagtttcccctgttctaacaagcatgagtaaaaggtaacacatattttattaaaaagaattatataaacaagttttaatatagaaatttgttggttcatagatttgagatataaagcatttattgtttaaagactgataacatgggaaatattagagaattgtgaagttgtttatgtagaataagtttgtttttttttctattactctgaagattgctacttatggaacttacttttccttgccatttagaattcaattttttcttgttttcatcatcactacagctcaaactttttgtggctctagcctcaccaatattagtttgatttctaaatataaggaccttaatctcatacaaatttattgaaagtcatgtcttctgttcctatcatttaattactcatagatctagagtggaaagggatttcttaccaacaaattaacaacagatagggaaaaccaagtaaaagagcacaagaagatgactcactttatggaactctactcaaatatttatgttttcattttcatttggaggagatacttattggaatattatttgaactgtttcatgctaagtaagtagctgcaatgtgatcaagattagtgttatttatatgtttaaggagcacaacttctaagttagaccaagatccactagagcagtctatattcatccgtttatgctctgtgtcttgcatgcaggaaaaatctcatcaatgttagttgcatgagaatgttagttgcatgagagaatggcatagctgtatgactcctgaactaattttaaaatcttttcatcaaccctcactcaccttatacacatacatagcagtcaccataatacctcttacttctaattccaaatgatattttgaatccagttccttttttctatctctattatcattgccttgttccaggtctctgaccatcctgggactacattttcagaatatagcctttcaaacaggtttcatggccttaaatcctctccacttctagatctgtccaccgtatttatttagagtaatatttacaagatgtaaatctagtaatgcttcattcctggataaacactttcttcacttggtttgaccaggagcctcatgatgttttcctgtgtacctgctacttgcatgcccttcactctatactttatcactatgttctactaataccaagtgacttgtatttgcctgcatacaccagccttatttccttatggtctcctcttctctcctgtgttcttcgaaacccagctcagtgtgacctgggggaagttcccagagtgaaatattgccctgtgttccttgtgtcttttgtacatacttttatggagcaatgagttgtcctttgtctattgtctttcctactaggccatgcattcttcaaagacagccactgtttttaccttttactactaacatatgagtatatgctaaatgaatactgacttattggaatcatttatatactacacgttttttaatctctttctttgctgtcttaatttcttttaaatttctccttcttcccttttctgtactctttccattgcctttattctctcccttctcttttcctctacctgaagccattatctgaaattatttgatcattgcagagcctttgcagaggcaaatgatggactgatatccacatttcttcagccccatggcaagattctaagacactcggttcactcacctttttctgtttgagagatgtttgactcatttttttacctgttgaaattcttttgttgttatccacatttttgtctccccagctccatttcctgtcacttcccttgctcagtctagctttgcatttagaatgtcaaatttatgacatcatatgtgattccatagtaacaaactgactctatgaatatgtgattaaccttttcttaaaaaacaaaaaataaatgtttcttcattttgagtgtatctgctcatagccattgtctttgttttcagaaattgatgtctaaacattgttcaaatgttcaatatgtagcaatatcaatattaccacttcctttttaaatctttttaagcatttctctgccattcattatattaatcccatttgtgactgtctgtttcctggtactgccaaaatgaatggcaaagtcatttgtggatccaatcatttatccatgttcattctgccagacagactttggagggcttttctcagatctagagactatttttgacagctgggattttgttccagacatggagtttagacttgagtttgagtttagctttaatgtctcatgtttctttcaatggcaaaacctgttgaggaagacactgtcaaagccccttccccatggctagactcagtgtagaatgttacctttgctgccccatccttaacccttaaccctgggctgccccatccttaaccctttaaacactaaagctaaactcaaactcaagtctaaactccatgtctagaacaaaatctcagctgtcaaaaatagtttccagatctgaggaaagccccccaaagtctgggagagtgaacatggataaatgattgggtccacaaatgagtttgtgattcattttggcaagtaacaggaaacatacagttacaaatagaattgatatttgtaaaaagtagcccctaactctggtttacagaatctaaacatgttctccattttagttttctccttttatcttcacccaagctttagataggagacatgtgccatgccaacctgagctggtgaaatcatcaaggactgaggcaggtttccagcctgttttcatgggacaagttgatagctaaggttgaatatcggaagttgttgatggttttaatttaagttatccaaggagtcttttagttagtaaaacattcaggctgtaggtaagagtgcctgggtttaagttatttcatctctcccctactccccactgtacacccaacccccagcattctacccaaaatttgtacaggggtcatttgtttttgcatggttatgatgttattgtgtaatatttgtataagttatgtagacaatcaaagttgtaagtgctatacgtttcagagtaacttcagagaaccttaccttttctattaaaatcacacccctaagtaccaagagcatctttattttcttagtatgctgtgtttggggccagagcagctaatgtgaatttcatctcattgtaattaggtgttttatttctactattcaggattataaactcattatggcttcttagcactccttcgagggagagagcagaggcttctgttataggtttcatgggtaggacttcacttagggaagcctgacatcccaaatctagggctgtgggctggagtcccttcctccacagtctggaagcctaggcaaaagcatgaactgacctgagtcagaggtttatgtgactcacagttctgcagactatacaggaagcatagtgctggcatgtgcttctggcgaggcctcaggaagcttcccaatcatgacagaaggcaaagaaggagcaaatgtgtaacacgacaagagcaggagcaagagagaagggaggaggtcccagattcttttgaacagtcagatatcctcgtaactcattaccatgggaaggcacaaagccatccattagggattgaccttcatgacccaaacacctcacactaggcctcacctccaacattgggagtcatcttttaacataagatttggaagggacaaatatccaagccatgtaatgggttaagcatgttcttgtcgcaagacttttaaatttgctgctccatctgctgcagcggcccatatatacacgtgccttaattccttatttttttaactctgctctca

SEQ ID NO: 3452 - DNA, 4001 bp, Homo sapiens
tgaatgaaaagcaggttggtgagtgaacaccttccctgaggcccttcagtcctctacccctgcccaggggatggatgagcagacacgaacaaaggtgggatcttcaggaacgaggagagggtataggaagagagaggggactttagcgagggcccttcgactgtgtaggcaggctgggcttccatctgcaggaagcagcttaacatgagagggagcctcacctggggacgtgccactaagaagccgcttaggagactgcttaggacgagtcccctaagcagcctctgcaccctccatgtgccctgatgaattcacacagtaaacgctcccacataccctcgtgtgccagtgtgcagagaaggggtcctggctccactctgctttgttcctttaggtttcctggaggcccagcagggcctggaggggcctgtgctttctcagcctttcccacttccccaatgtgctggatacatgagatcatggtctaatgtgactagagcaagcgaccagaggacactggcttgtagaacgatgcggaaatggagacagacacttcgaaaggtgagcatcactttcagaaaatgcattgtgaagtgctgcaaatacatcacatgctgagagaattcagaagacgggagagtccctggagttggggaggaggtgagatcagagctgcactttggggaataagaagggttggaaccaaaagcagaagaatgagcttttgacttaaaagccagaggctgggcatggtgtggggttcggggaaagcgggagcaagaggtgtggggggacaagtggcctggaggaggcaaggctgccagggagacggtaacaggaaatgaggttagaagcctgatcaggcctctggaagagaggccgggagtgccttccccgtccccaccctacctccagggaggccctctccagagccgtctggggagctcgttggaacacagacttcgggctactgaggcaggaacctgggtgggtcatggactccggattttcacaggctctgcaggcaactttacgcccaaatgtctgagcaccactctcgcaagagtgggaacactgactttggagttaattttgaattgaaatcgggacttctctcaatgcttcactttggccacgcctccctccttctagtaaaatgggacagagcaacaagacccaacttgctgggtggtggcgagcattagagtcgaaaatgtctgttccccggggagagggggttccctcctcccagcaccgcccccccaccccccctcccccgactcccgctctccacgcccttacctggataaagacttggagcgcggtgcggctcaccagcaccgtgcacactcgcgaggcgggctccggctccccgtccgccgtctcgagttcgtgcttctgccccatgatgacggccatgggcagggcgaggccgagcgaggcggcccacgagagcgccaccagccaccgggtccggcgtggcgtcagcaggctgcgggcacgcaggggctggcacacggctaggcagcgctcggcgctcaggcctgccacgctcagcaccgtggcgtaggcgcacagctcgtgcacgaagtagtagccgcggcagcccaggtcgccgaagacccaggggtagtggaaccacacgaagctgtagagctccaccggcacgccgaccagcagcagcagcaggcccgcgagcgccaggctgagcacgtggtggcgcaggcgccccgcgcgcccggcccgcgccttcagcaccacgtgcgcggacagcgcattgcccgccgcgcccagcgcccagatgagtgcgtagagcgcggtgaacagcaccttggcccagaggcgagtgtccacgcccagccgggcgtccaggctcagccccgggttggagctgggccgcgggggccgcgggctgctggtttccatcccgctcccgcggccggcgctccctccctctcactgcccggagtctgggcgagctgcctggttagtgagcacctcctcttctctgggaacctctagaactgggaggacacgcccccgaaagggtgtccctgagccaacgtgggaccgcgagtgccagcccgttagcgtcggtcacacgtctgggttcagttcaacccagggaagcgcgtgctggtggaaagggggttgggttccttcaggggctgatagtcccgagttgggccgaactccaccactttcgaactttgtgaacttgggcaagttttttaacctctctgaatctggttttgcaactttattatcgacactgcagaatttctgggaagatgaaatgagcgaacgtgtgtgtggaagtttctacctgcagcataaatagacatggtgctttcgtcttgcgccttggcccttgtgttgatttgtgtgtgtgtgcagctcgggagagatcttgggaaagactttcccagcacttcagcattttgttattgttcttgctaaagggctgtttcaatgccatcctaagagccccaggaagctcctttgtcactgagaatacatcctcatggtgccacactttcccagtcctttgagagtgtcattctcatggagctaggggatgaagtgagaagtgtttttagcatgttttaaaacctttcacttttctaaattcatgcagaacacccgaactttagagctgaaaagcccagaggccttctcatttcatccaagaacccctggtatttactgaggggcagaattgaaattggaacccagggatcctgacttttttgtcttcagcaaagttattatggcccggtgataatcagtttaatcttccatgtgggcatataaccatatctacattgaaattgagattatgtaaatatacttttactctgcacaataaatttattgaaattataagcatttattgaacgacaagaatcattaacaaccagggctggattcttaggcatgtgactgtgtttttgcatggggtcccatgcttgaaaaggccttgtcctgagtcaaatgctgttgtcatctgggaattctgcatcatttttgaacaaggaaccctgcaatttcattttgtatagagtcttgcaaattatgtagccagttgtaactacaaatgagaacatcccacaaagaaagtaaattgagcagaagtggttagacatatattcagtctgatgtgttttgcaattgagggacaaagaaaggaagagggctttctttgtcagaatatgtgatttttttaatggtttatagctccttcctaaatggtattttgaagttttaattgtatttatttattatttattttgagacagagtcttgctgtgctgcccaggctggagtgcagtggcacaatttctgttcacggcaacctctgccttgagggttcaagcgattctcgtgtctcagccattcaagtagctgggattacaggtgtacaccatcatgactggctatttttttgttatttttagtagagacagggtttcaccatgttggccaggctggtctcaagctcctggcctcaagcaatccacccacctcagcctcccaaagtgctgggattacaagtgtgagccactgtgcctggccctgaagttttaattttaaaagaaaggtcgtgtccacttaatttcttgtgatcttaaggaaattaagggatgaatcaacgccctaaaaccgtaggagagatgatgaaattgctgggcagtggagaggctgtggtgacgcacagtgctcgcttctctgaaatcattgtttagaataattttatatgggccgggcgcggtggctcacgcctgtaatcccagcactttgggaggctgaggcgggtggatcatgaggtcaggagtttgagaccagcctggccaacatggtgaacctctgtctctactaaaaatacaaaaattagccaagtgtggtggtgcgtgcctgtaatcccagcctctcgggagactgaggcaggagaattgcttgaacccaggaggcggaggttgcagtgagctgaggtcgtgcca

SEQ ID NO: 3453 - DNA, 4001 bp, Homo sapiens
ctcaagcctctttctgtcatgtaaacctgccccagccatgccaactctgattcgtcttatctcttcacctcactttgctgtaagatacttgttttgtaagttttcttttcagccccactagatggattttcttgaggccagggaccataacttttcctattttgtatttccattatttttcaattaaatgtatgttgaaaaataaatggttacagtaggtagctattcaggcataaacagagcaagagaaggtgccccctaccccaaccaggaatgtcaggcggttgttaaactctctctctaaaataattgattgcagccagtgccaggaaaaggcagtttcccagtagatagaaacacctaaaactggtgatcggcagcttcccgataagatccaaggagttgggaaagtgggctcaagcatgcatattaagaggcaaaatggaggagtttaactggtatctgacctcctaaggacattcagctggtaagggaagaacacttccagtgagcatgcgtacaactccagtaaacacattgcgcatgcttacctccaaagtgctaacaggcctctcactccaagggaggaatcaagggaaaagggatgcaagatgccagaagtatgccaacatgtaaaaccctacgtccaaggtcaaatggggcacttgtcctccaagatgcccgcttggccctcttccaagtgtactttactttcttttcattcctcctctcaagtttttcaacaaaccttcactcctgctctaaaacttgtcttggtctcttctgccttatgccccttagtcagattctctcctgaggacacaagaattgttgttgcagacccgtatggatttgccgctgacaacatattttggtgctgtgtaatttggattcccaccactgacaacaaaatgattaaacattaattacaagctgtaaataaacattaaacaaaggataattatctgacataacttatttaatgcaattttgcatgtttgccaattttaaaaatcataactgcacattagttatattaagtgcttattataaaatgaagacctgtttatagttctaattacccttttttgtgtaaaatgagatcttcaaaatgtggattatcttgaatgagaaacatttgtactttttttatttcttgttaaactgcaattttagaaatactgcatgttcactatattcctctgtagatgaatattatcttgattacaatacttttttctctaccttctattctgaacgcactaaataaactgtcaaatggaacctgtttcctatttctgttctgaattccttcctcccaggacatcagatttcatcatagtgctatttttgtagaccattgattatcaaacttaggtggggagccctttcttcaacaaaggatggtgcagatgcttaataaatacaactgcccagttgggaggggaggaacagaaagagtacaagggttcttgccccctaaactgccaagtatcgcaactccaggtgactcttgaaatacttggtttggagtacctagggctacagagagctcaacctgaaaattagctctgagctatatttcaactttcttctaaactcaaattttgaaaaagtcagaaatatgtaaaatctcacattttaaaaatttttcaataagtttaatatatccacaccaaactgcttgtatatctatcatatatactgaatattcatcaacctatttataagtgtccaacaatatgcagtgtttgtatataaatacaaaatcaacttgttactcttaaaagcccactctcagtctattctataaaacaaaaacaaataattttttaaaattgaagtgaagaaaaaagatttccacctttagtaagactttagaaaaaagatggagtttgtcatcttcagaaagagagcaaggggagagagcatcttatcactcatgctctcaccgtctcagccttcagcacctggtgtagcatgggctacccctcacttaatgatgtcacataaagcacacagaggaaccatgacttcctggataccaaggacaagtgatctccaaagaccctttgtgatgtttacaatgtagagatctggctgggcatggtgactcacgcctgtgatcccagcactttgggaggctgaagcaggaggattgcttgagctcaggagtttaacatcagcctgggccacacagtgagacctcgtctttaaaaaaatcagacatcatctttaaaaaaatacaaatttggctgggcacagtggctcatgcctgtaatcccagaaatttgggaggccgaagcgggtggatcaccggaggtcaggagttcgagaccagcctggccaacatgttgaaaccccgtctctactaaaaaagtacaaaaattagctgggtgtggtggcaggcacctgtaatgccagctactcgggaggctgaggcaagagaatcgcttgaacccagcaggtggaggttgcagtgagtcaagatcatgcaattgcactccagcctgggcaacaggagtgaaactctgtctcaaaaaaaaaaaatacaaatttactcttgttatttgcattatctgacctctataaacaatcatgaccaaagccatgtctttatacatttaaaaataaaatattacatgtgaaaatgcatgaagtttttctgatcattttactatagtaaacaactggcagaaaggaagtagctaaacttcaaaagaaacatcagtttacttcattcacctgttgtcgttaaatcaattaaatgattcctttcacctgcaggaagtgaaaaaactaactttaaaacttacataactttcaggtgtaattttatttcctgctcttctatttgaactatcaggtagtttgatcagatgtttaaaagaggaagttcatagcaggcaaaattgacaactttgaataaaaaatgctatggattttaggaagagctatatcaaggatttgccttgaaataatttgctagggtagggagggcagaaagagaggagggatgatgtctaggggtatacattaaaccagaaaagccatgagtcaataaatgttgatggtaacaaattatgctattctttgtttttctttttcttttttcagagtgctagaactcaatgctattgtctataattttgtgtatgtttgttattttccctaattaaattcttttttaaaaaaaacatcaataagcctaaattctagagtgttcaaaagtcatacattctgtctcagcttatgtgaaaaatgagagaaaaaaaatcaatgaaaaacgctgggcatggtggcctcagcctataatcctagccactcagaagggtgaggcaagaggatcacttgaggccaggagtttgagaccagcctgggcaacttctggggacccaagaaataaaaataaaaaattttgccaggcatagtgatgcacgcatgtagtcccagctacttgggaggctaaggtaggaggataacttgagcccaggaagtttgaggctgcagtgagctatgatcacactactgcactccaatctgggtgatagaatgagaccctgtctcttcaaaaaacaaaaaacgaaaaaaggaaaacatgaatctttccttgcttgataatgcctttgtttagagaatcagcgtgttgttgactacaggtgcaaatcttgacttcaaatacttaatagacatgtgacattaacatctctaagactctgttttaaaaatctgaatagtgtgaataattttacctacctcatgtaatacattgacttatttacccagcaatagatatatattaaatataatatattcaacaattgaattttagcctaatggtcttatctgtcattcagcatacgatgtagcctttgataaactaatttggcttcttcccccattaatctgccaaacaagtctttccaaagtcaccaaagacctctgatatgttttggatctgtgtccccacccaaatcttatattgaaatataatccacagt

SEQ ID NO: 3454 - DNA, 4001 bp, Homo sapiens
aaagttctgatgtatctggatacatacagacacagtagaaggcgcaagcctctaatcccaggattttgggaggccgaggcaggtggatcgctcgagctcagttcgagaccagtctggacaaaatggcgaaaccttgtctctaccaaaaatacaataagtagctgggagtggcggcacactgtggtcccagcccctgggaggctgaggtgggaggattgcttgagcccggagggggaggttgcagtgagctgagactgcacgactgcactccagcccaggtgacacggctgtgtcaaaaaagaggaagggagggagggagagagggaagaaggaaggaaaagaaaaaagaaagcaccagacaggaaggagggcacaatgggctcttaatcaggactgtcaccaaccacccctcaggctaaatttcacttaaagcaaacttaaggaaaagatgctgcatgtcctcaattccatttcatattctgtgctcccaaaagatacgtactcagctagcagtttgttgaagtcaacccttagttttactacaccagtgggcacctggaatatctgcaaaatgtggacttaaacattaatactggctaatgtcagatttctggcaaggcaatatacagggattggtttactcacatttgtaaccccaataaatatgcactccaaaatgtttttgttgaatagaaaaatttggaactggaaatgaagagtttttgatctctaaaatacattaaaaataaataccaagacgacatctatatataaattttaatgcagagtatctgcattattgacattatgcatttagtttttttatgacagactaaagtagttcaagttactctattctcaaaaagaacttattttacaccaaacatggcaagcattacatacccttcaaatctaaagactctttccacaccatatatattacatttgctctcttttccaagctcagaaagttataacctaacttttcaggtaagtctctatgacagtaagacggtttattttccgttctaaaattttcgacgattctcacaagtcgcaaaactcagcaggaaaaaaagaaatccgcgtgctgttaaagtggtagatttttttcaaagacgacatatttcaacgaggctccgcaatgaataatgggaatgaatctttaaaaaaattcagatcgtgacttactagagaaaaatacctcctacaatacttaagagtcactttccccaaataaaggcgggaaatatcgtgcgaactcctagcttgctgttaaggtcaatatctcaatgattaccaaccacacggttgattaaatgttgcacgattcaagcttccattaataacaagattcctttggcaaagcccgggagagaggagtcaaaacaggaactggaagcaccggtgatcaagaagcagtggactgcacccacacacttcagggcaccgcccacccacgtgtaccgcggtcagttcctcccagggatgcttctggggaccagcaaccagctgggaatccagcaaccagcatcgcgtctcgggtatcagaaggaggttaaggtatgggccagtctaacgtggctggcgtgtgggggcacaaacacagctcagtcaccgccagacggccttttcttcaccctcccagggccctcagcttcccggcgccacctttgtagcagtatggaggcgacgcgtcgagtaggggaccgactatgaacttgggggcacccaaggattccctctccgcgactgaaaccagcagacgagagcctgacgactgcctttcagtcttgcccgcctccaggcccagagcatggatggcagtgccagcaaggaaaagcaatatttcactcacctaacgcgggcccctgaggttccactgcaaaggctgccattgcgtcggcaactacacttaaaaccagtaccttcccaattaattttcaaaaatggcggaaacgctccccacgggtaacggcgtgctaccttatggggttgcgtaacttccggacctgcgctatgcttaagttgtaggcgccggagccattttggaatagggcaaagtctttgcgctgagaatttccgaggaaagggtttttgcaccgggaaggtggcgaaccagcgtatggttctgtgaatgcttttcatccgggaatgcttcctgatttgtgggtacttaagttacatagaagcacagattattttactcacggtttcataattagcgtgagttgacccagtgctctatcatcggtcagcttttctgagtagcacctggaaaagtcagcttgatgaaaacagttggtgcctctttgcaatgtcgatttctggacttagtacatgacgctttttcctcaaagcatgttttctactatccgtatgccatttcttttaaattttgtgttatgtagacaattttacattaaagcgtaactcatacgccgttttgttgcatattaaaacatacaaaaatatagctaacgaacgcataaagtacacatgtaaataatggaagataattatacgcacccacgaaccctccacaccgcggaatcttgcgtgcttctgcatgtgccatccctgccgtccacgtcccctcactttgctgcttttctttagggcatagtcatacgtaaatcacatacacatattctgcatatgtgtgtgtaaaaatatattgtttagttttgctcaaatactaactttataaaataatgtgctacatatgtataactggggacgttctctgctccataccatgaggattatttccaaaatatccacccatgctcagctatttcttctaggacttcctaaaatctcaaatggaggaagaattttgtctttggaatgaggcagtaacaattccagaattaaatggtaggttcacagaaatcaaattttaaaaccactcacagatcgaattgactttttgaaaatgggtgtgtgaattgaattgtgtccctcaaaaatttatgttcaagtcctaaccctcatacttatgaatatgaccttatttggaaatcgggtctttgcagatgtaataaagttcagataaagtcacattggagtaccacaagctcggttaactaaaccagcacaaatgtatctcttacagttctggaggccaaaaatccaaaatgagtattgtagggctaaaatcaaagtaccagaaggactattttcttctggaggctccaggggagaatctattaccttgctttttcaagcttctagaagccacttatatttcttagcttgtgccaccttcctgctttttcaaagccaacgatgtagcatctttggtctgtctgacactgctttgttcagcttctgccatcacatagccttgtgatgacatttaggacccacccaggtaatccaggataatcttactatttcaatattcagtagaggtgattaagttaataatcacatcttcaaaataccttttgccatataaggtaacattcacagattctaaagcttagtgtatggatatctttggggagtagtcagcccacaacacagggcaatccactttttagaattaagctaccaagaaaggtatatcaatgtataaatttctacacacattgaggctagatgtggtggctcacacctgcaatcccagcaccttgggaggctgaggggttgatcacttgagtccaggagtttgagatagtgagaccccacttctctacaaaataaaaaagaaatttctatacaaattatgatctagccaaacaaaagaacactatacaacaactaaaatgaattagatggatttgatatgagtgtaaatattaacctagaaagacctctgtgatagatataatgaaaaaaagtaatttgaaaacatgcatgcatatacggcaccatttttatttaataacgggtttatttaggaacagatgcagagaaagagaaaagagtgatacttctttaaataaaagaagatgttgaaaaagatttgcaccagccgggcatggtggctcatg

SEQ ID NO: 3455 - DNA, 4001 bp, Homo sapiens
gctgcagctccctacctcacttaccatgataaagtgctccaggagaaaaacattacaacccaagcacaatcccaaaatggattagaatttgacataagcttttttaaaagcaaatccatcagtccatgctgtaatattagaatctagctcttaaggagagcatataatcccttcaagatgtatttcctattccttactgactatggcggtgtggaaaaaaaaaatatctaacatttccaatatagtagctgggagaagaacttttccccgacacgtgcccaaatatattttctcatctttaagagcctatcacactgcttacggagcagatacacagttcatatttattaaatgcaaaattaatgaactaagattcgtgaagatattctgaagaccccacataaacacctgatttccccaggcttttccttacacacaccatacaaatgctgctttgttagatcaccttttattagaatccagactaaaaaattttaaagcaagggatactaaagattaatgtggcatatattttggattcataatgcctaagatgtaaaatgtattttaacatggagtattgtagatagccagtatgtgatggctcattcaaggatatttgggcatatcattgcattttcttcttgatgccattgaagagtttctgagttaacgctgtgcaggtgaagctaatctccaccgtaacaagcatggaccacgggcatctcagaggtctctccaccttttagagttccttccaccctcagaacttgcaaagtgcctctgccttaacaatatcatacatatcataaactttcaaagttacttgattttccccctaataggaaaagaaagagacaaagagaacgagagagagagcgagcgagagagaagagactgtcatcttctaagtgcttgggcaaagtcttaagtatgaggaccaaagaaactatggcatcaggagaaagccctcttaatagcaccctaacaaggcaagagctaagtgaccagaagaaatccatcacagatgctgacccagccaaagcactccccttctgtaattttactttaaaagtttcttcttgaagatcttactttggttttccctcaactataattagccatgcatatagaacataggcgtatatcaggaggaggagagcgtggcgcctcgcgggaagagagaagagagtgacaacgcgaaccccaaaccacattttaatacgtttcttattcctcagcgcctccgagccacccagaccaggcgggcggtctccctgaaaagacagcttcgagatgcccgagagggggctcctgcgcggagctgggcatgaaagttatatcttgtgtccccagctggcagaaagccccatcccagtccctagcgccagacggaaaacgaagagaaatccaagctgtcccccaaatccgtattttgcctaagttttctcccagcaaggcgccactacctggctctgagaacgaggatgcatgcactatgctgtgctttgggagaagtgtctgtgtgcatctgggcaaaacaccacgtgaaaaataaacaccaccaagcctctcaaactgtgaacaggaggaaggtctttctgccccttctcatcctatcaatttactttccttcctctccttgaccgcttatcaataaaccgcttccttctcccggacctacttcccggccaccttctgcctactttaccccagcgctcaagtcccaacccgtgctaagcccctgagtcgcctgtagatcccgtctattccgttcttcaattcttccctttcgacctctaaggcaacccaaaactccttgccctccgcgcgcccccaaccccacttcccaagcaggcccaggctgggctccaagtcagccgcctgcgcggttttcccgccgaaacgcgtccccggcgtgtgggacggcgcgcgggccgggcactcaccagctgcagcaagccagggaccaccacgaggggcagcggccgcaggcgcatggtgccggctggcgcggcttttcacgagctgcgcgccctcgcctgcctctcgcgcatctccacttcgcggggcaggactgaggacgccagggacacagcgcggcgcttccctcccggaatccgagcgctgcgccgtgccgcgcagctctggccgggtgggcgggcagggaagggggagggtgggcggaccggaggtgcctctcccggccccccgcgcgcccctcctcggagggggccggcaaagagcctgcggggcagctcgagctccggcacgcggcggggggcttcagtcgcgccttggactctcccgcttggccgggcttggggtgagcgcgtggggcgcctgcgggagggaggcggcggctcgggcgcttgggtgatgggttcagtgcgaggctgccctccagatccgatcccgccgggcggatgcctggccgagctgagcacgcctggccagccggtgccccagagccccgagaggccgggtgcctcctcccacccccgcccagcagaaggccggtccgagaggctccactgtgccaagcgccctgccaactgactggctctcgctttggctggggagattggggatgaggggaagaaaaggttctccctgggtggctgcaagaaagagtgcgcccgcctggagagcgcccagagagtttaggaggggaaggcgattgcagagtcctggggcggggcgtggggagctgcgaacggaaaaggctggggcggggaggtgaggctggagcccaggacgccctgggagagtgccctactctgccgcagcgccaagctcgcagagccgcgggtaaggggtacaaagtgcgcctggtgcggctggaaggatttctggggttggggagtaatggggacctcgagggaccaggagcagaactgtgagaaacggagctaggtgatgtctggtttactccggtttggggatggtatagacagctaggtgtcctgaagacagacaaagttgctcccagaccttctgcccgggctttggagaagcagaataaaggcaggataccccaccacagcctccgacttcagaaatattggagaggggtatctttgcggacgggcgaaggtgcaaacctgatgcctgtgagcctcgacctccgtgttaacaactcgccattggagagatccttaaccttttactatctttgtgctggacactcgagtggaaaaatcaaaggcaatggggctcacagacctgcactgtttttacggtagatcagagtttgggcgtcattcgtcactcctttattgaacaggtgggaaacctaaggtccagagagatacattcacttctccaaggatgagactttaggcagttgctccgacagaatacccaaggcgagaatgcttcttacatctagaaacgcaaagctcttagagaagaaaaccatgttgaagcaagggagtagaattgcaattgatttctaggctttaaaaaataaacccaacaaaaagcacagattaagttgtaatttttggacaaaaaaaaaaaagtttccttctcctctgcttaccacccccaccccaaaatagaaatgaaggagggttgttaaatcttagcggttgaagcagagcagccttggtcctaggtttcaaaggcaggaggattgctttgactagggcaaaatcctactattcctttcactgagtgtgccaagattgtgcagatggggagggaggttattccagagtgttctgggatcccagtgtgaatttgagagtgtgttgtccttgagcctgcaggtagggtatctttccagtacaactccatttcctgtagggggggagagtggcaagcaaggggcatgcatcctccctaaacccttgctaagcctgactgggggttccatggtaaaggatgcaccagctgcatcccatttctgcttgatctcagactctccttttgccttgcaacagactcaaaaacaaaaccactatttgcatatccaaatctatatctcacccattcca

SEQ ID NO: 3456 - DNA, 4001 bp, Homo sapiens
caaaatttttttctgataaaatcttataatttgtcaagcattactcctataatttcactttgattatgcttgaaatcctactccctaccccacaaatggtcacactcattttctcattctcagtgtcatcaaaatgcagctgttctgcccaaaatgggaaatgttgaagctacaaccaagaaagcttgctaaagtgactacaaagacactgattgcttttttctcagaaagcagattactttgcagtgagtttttctccactatctctcttcccaaaatgagtaagataggcataaatcgtgttaatgcagtagcatcatgaattggtatctccccctcatcttccaggttgtcatggtgctgtttgcccatggtgtaaagagattgtacatttccattaatattggagactcatgcaaaatgccagtggctgagatactttttggaggcttgggccaaatggttccagatgcttacaaggcattatttgcaaagtagatgtagtcagtctaataaattgctgactggagctacagtgggaaccatctaattgaattgggagtctataatttatttatttttttaaacaataaccaaccttcttgtgtctaggatttttacacttctctttctaaacttgacagatgcttcaagtcctcaggcttctccactgtcccttgtgcagttgtaatattttcctctggtctgtttccactaattctctaaactgtctatgtccttcacatagtccctttctttgctgagttggctcatgtatgttgcactttccataggaaaacaaaataatttctgcatttgtggaccacattttctcattaatttgtgtaattagtgcttgacaatatataaaataaatgagaacattgtctaaaatgtgaagaattaggaagagagttaattttcactctttctctatatttgttattccacactacttggttataaatgcttggatgttaaaatgactaaaactacatcatgtaagcttttcagaatttcattatttttcggctatatttagaaaaaaaaatccaattctatggtaccaaaagaactttagtatttcccaatgatagtgaaaaatattattttatgtaatagtttttccagatatgaaatactcacatgtcttgtatttaaaatattgctgagtagttggaaaaattaggatggagacaccccaacaaaataagaacatgtcccaagtaaaacaagtccacctaaagttttacagaaaatatttattgtgatgagactaataaaatctttctgacattgaatagtattaaaaaatgtttctcaaagaggtttatgtctaatcagtcaggaagaagcagtgtcggctttgctgtttgtctggtagttttgaattttgggggatactgtgtcttttctcctgagaatgtaaaattgggctctcactgctgacataaatgtgctaagagacagttgtaaaatatttatggtatggaatagcggataaatagctagcatgcacaacttgaatgccaattaataccctggaaaacattttcaaagctttaataattcaacatggcttattttactaatgaaaatctagtttaaccatttccatggtaatgtaactaagtgggtaagggagtaaaaatagcctcaggctcactaaagccctggatgccttcactgtggctttatttctgctccacctaataaggcatgcaaacttcagcattaagtatccctaactaaaatccattccattttatcaccagattgcttgatctattcagtgctggattcgattagcatgcttagagaatctgaaaaatgagatacataccaaaatttaagtccccagggagagctaagtgcaataaccagaaggtgacttgtgtctgtcagagccctctctcacggttgatctcagggcagttctgtaggagtaatccagcaccataagaaatagacttgtagttcagctcagtgtttcttcaattaaagtgcattgtgtctggatgggaaaagtgtcgactcccagattcttcatcactagatcagagcattctcgatgtccttcctatcagataaaatggcctttaaagtttgctaggaagatgcagtggcggaagacaggtgcttgcttccttaaatcgacattcggagaaaagagggcatagctaatgggtggggatgaacacacagcccctctccttccaggtccagcagggaagaaattgaatgattttacccactttgctacacagatgattacaggaccagaagcaatcaccaagctggctaatgtacctcatttgattatattctgcgaagacaaaaataaatgaaaacaaaaaatcagaaacatcctttctaaatgtctcctttcagccaaaaagatgctctttctcattgccacttacatacagaaggtttggagcagcccagcttgtggcatagtccctcccccgtgacaaccagctctctctctctcattctctctccctccactccctccctccctccctgcccctgactccctcccttcctgcttctctttctcctctccagctgccttagtctgttgaagctgctgctgattaatcagggattctgaaacaaagaacctaccttctgaaataagcagtaatctttcttctctgtttctgcaatccgtctgcattgaacggcaaggctgccagcgttctagcaccttggatagttcctgctcactaggcccattggaaaagggagaagcaactgaagaaattgcaagaaaccggaaagcggcatcgttctactttggatttcggctccctgggggctcccatcctcattaaaggcctcacatctaggcaacagaacctctctcttttatctaactgagctgaagtctgattagtaaataataaaaggaaaagagggtaaagaaacacccttcatttatattcactatagcactaattcagtctttatggagaggaaaaatataaatccattgaaaacaaatgttcttactacagagaatggttaagttataagcatttcacccctggcgtggctaatgaaaatgaacaacaacttaaatggaacatctagatctcagtttgatacccttatttgatatcaattttgcctccaccctccctgcacagccgagccatgcacacaattactgctgacgtacttcaggctgctgcttggggagagaggggaggagccttttaacctcatcaaaacagcttcatgccacctgctcccatggcatgagaacaaaactagtccacttagaaagaatatgcacagcacacacgtgtgtggaacaaaggtcttactcggactgcacatttttttaactaaaataagatgcaaaataattatgatatgtatgtcattaattcctatagactcattgttaaaattaaagtcattctatttctgatatttcccaaagactctcctcattctgttcttaatactctactgaatatatacatatatatcacattatataccacaacttatatatgtgtgtttgtgtgtatttgtatttattaagctcaaagtttttctcatactggctcctcctcagtaaaaactaaaatgtacatgttttaatctattaattttgcactatgataaaaggaataatatataatatgtttctgatggatatgagcttaaaaagcaattttgatgggaggggatgtgcttattacttgatagtgacctatagatttttcccctcacattctttttcagtaactcactgtaaatgaccttcacttgcaggttggttttcccaagagtgttttttaacgtctatattcataaccaaagtcttagaaaatagttttctgaatttagtttttaatgcattgacagaccacaaaaataaacaagttcacctgtctaattcttaaatgtcacctgagactgtgctgtaattttcttaaattatatttctttaacttgtaagtatctggggaaaaataaaatca

SEQ ID NO: 3457 - DNA, 4001 bp, Homo sapiens
cttctctccttcaccttcctcttcttgcaaacgtggggagcagtttaatcaaagaatagtaaaaacacgcaggacatttgtcctccctcaagtctagctttccactgaatcacttgtttctcaaggtgacagatgcagccaggccgtccccacagggttcagagcctggtctcatgaatgcagcctttaattcaaattcctgtattcaataaaatagcctccttattctcactgatggtttagaagtacctgttatatacgtagactcagcaatttacgcccataaactactcctttatctgtctcatatattggggctctggttgtgaattcagtgggggaaggaggagtaaaataacaaagacgttgaaaaccactagggaagaagagttctagggccctccggatttgtacatcaatcactccttagtggtgttccaccatctgcctcggaatcatttaaggagtttgctaagaagttcctgagtaccctggagacctactaaatccgaatccctggggagtgagaggcgggcgggtttggtattttaatattcccgcggaccacctctcctccagtcttgggggcagcgctgggcaccgaggagggctggagttcggagggcctcggaggacactcgaggcccctccctaggtcccgggctccgccgtacctttcacgtgcagctgcacggcactgagcgtctggcccgccgagttgcgcgcggcgcagacgtagagcccacgatccttggcctggcagtaaagcaccttgagcacgaagccgccgtcgcggtcgcggtacatgaggcggcggcggtccgggagcagcgggcggccctcccagtgccattcgatctcgggctcgggcttgcccatcacgtagcagcggaacttggcgtgcttgccctcgttcacccagaaggtcttaggcgcgcacttgagcggctccaccaccggcgcgggggcctcgtcggggtccgcgggcgggctctcggggggctggtgcacctggagcagcgcccccgcctgcgcgtggccgtgcgcgttgcgggcgtggcacacgtagacgccggaatccggcagccgagccgccaggatgcgcagtgccaggctcgcgccggggccgtcctcggcgcggcccggctggagcgcgaagtggctgctgtcccacacttcgtccagggccatcccgtccttctcccagtacagtgtgggctcggggaggccccccgcccggcacgtcagcaccacctccgccccccgcagcacccactgggatcgaggccccgtgaggaagaccggggcgccctccccggaccccggcgatggcagcgggcgctcggcgggctgcagctcggggtcggaggccggcggctccagcacggtgacggcggccgccgcgtaggcctcgccggccgcgttgcgggcgcggcacacgtagacccccgcgtcggtgggcagtgcggcggtcagcagcaggccgtgctccgcgccgtccgccgggaagctcaggcgttccgaggccgccagctgctgcccgcccttctcccacaccactacaggcggcggctcccccaggaccacgcacttgagctcggcctcggcgccacttaccacccgcacaggccgcgggaagcgcaggaagcacggggggctcccctgatcccccgagctcgccttcatcgcggcggccgaccgcctgcagcggcgaacggtgggggggcaggggggggtgcggagggcgagccgaggcccggggcggcggggtcggggcgcggctggggactgggcgcggggacccgcggagctctcccgggcctcccgctcccggctcgcctccttaccctcggccccgagctgcagctctgcggcggcggcggcggcgattcccgggcccgaagcctggcgctcagggggcagtccttcctgtttgcctctccagcgagtggccccgcagcctcccctgcccgctgcctggcttcctgctcttaggagcctctcttcccagccccctcccacagcttgggcctcttccccctcctccctcccacctccagccgccaggtccccagccgcccgccaggcttgggcctgagtggcagaggcgcctgcagctgccaatcccaaaaatattctctgatgacacagctggaggacaagagcccagactggctccactggtctaagtatagagcaggcaggaccacctgcccccggccctagccccggttctagccccggttccagccctgcccccaagggctggccggccagcagctgcttattgaaaggggccccagaaggtctgaggggtgatgcactttgtctccctgacaaataacactttctggggctggccggctacagctcccaggctcctgtcccacctgatgtcacctctggatgtgtctgtgtgtgtgtgtgtgagagagtgtgtgtgtgtgagaatttgtgtgtgtgtgagtgtgtgtgtgagtgtgtgtgtgagtgtgtgtgtgtgtagggagaaggtgttgtatgtttgcatgtgtgagtcaggtcgcttgaggcgaaatccttcccagcccctcccccacatccctggcgggagtgggagataaggctcatggccacagacatctgcgtcagagataggaggtctcaatgccacgggcaggggcaactcggactgtggggcgtggaaaggactggggaagactggatgagaagggtagaagagggtgggtgtgggatggggaggggagagtggaaaggccctgggcagaccctggcagaaggggcacggggcagggtgtgagttccccactagcagggccaggtgagctatggtgctgcacctactgctcttcttgctgctgaccccacagggtgggcacagctgccaggggctggagctggcccgggaacttgttctggccaaggtgagggccctgttcttggatgccttggggccccccgcggtgaccagggaaggtggggaccctggagtcaggcggctgccccgaagacatgccctggggggcttcacacacaggggctctgagcccgaggaagaggaggatgtctcccaagccatccttttcccagccacaggtaacgagggtgggggaaccggcaggatgactttgagaaaaagcaaggcacagcatgggtttgcaggccaggcggacctgggtttgaatcctagtcctgctactcagttgctttgcagcaataggccagttactaaacttccttatgcttctgtctccccatctgtaaaatgggctaatgcccacctctcaggattaagtgagaggctgtacctagagtgcatggcaggtgggaggcatttgggaagtatgcgctgggagaccgggggtctctaaagatggagatatttgggcttgagccccttcctgccacctttcctcctatctctgcctctgctcgctgctccaaaccctgtttctttactcccaggtagctgacactgagaagctatcagagatacaggcaaaagattagttgggaaacttttctggaaaactagtctatcttctcttgagttcctgtctcaacatatatgtgcccccttgttccactgactgaatggataagccctcctgtgggtgggctttcttgtcatctggtccacctttctcttagagaggacccctgcctccctcacttcagtccgttcgcagcacagtggggagaaggatggctttgggatcaggcaaaatccaagcctggccacttagtcgttgaacgtcatttcacctctctaagcctcagtttccttatctgcaaaatggaccaattgtgactagataatgagagaagccatgtaacagtatagttccaattgccagtccatgaacgagtgctgctccaggatgattagtatagtctatgagtgtgtcagtgtgaggatgctaactacacattcttgaaaggactgccctctgttctgagttacagccctcctccttctcttccccctcttccttgttctc

SEQ ID NO: 3458 - DNA, 4001 bp, Homo sapiens
cttcaccaaaaaagaaaaacaagcaagaacatcactctagtaacaataaaagccactgtattttgctttcatcaaatgtggcaccttgtgaaccagctttcttaaaattatttattttaacctttaaaaatttctgccaggtagagctttcttcttttccactgtgcaacccacttcagtgccagcagcctacgggcacagaggccaggcaatggttcggggacacagtttgctctggcatggggtactatgacaggcccagggtgacgggcctgtcataaatccaaacccatgcatagaatttgctttaaagctctatctattgtgactgcttggcattgtcaacctccgaagttgcctaaatcacccctcggagaagggaagagagtaacaacgctagcaaaaccatttttgttacagacatggttatatatttttgtttatatgaagaatatttacaatttaataataaataggctcatgcagtctcggactgggtcatttgaggccttattaaatatttttaaggcaatgttcaggcctaaacttggaaagttttgatttctttttaatacgccaatacttttttgcttttctgtatcttttaaggcgttacttaagtaacttacttgaatatattttactgaagaacacctttcggtctttctgtaacagctaagttatttaaaatggtcaatcaattagcacaagaggataatgttagaagagataggggctaattcaaacaaactttgaaaaaaatttcacaaatcaattaaagtctgcccaattttatgtttaaacaaagtcagccaacacattctttgtcctccccagacattcctgagaggttctgccttctacactttcaccaattatttcgacttcgcaaacagcacaatcagccttttctgcaaaccttagggctgtctcccctgtgtatgtccgttcatctaagccaagcttttccgaaatcaccgagtcattcacagtccttaaataaacacctctaagtcatggccgagcatctaatatcacagctactacagcaagactatcttagctctacccactctcgcgggtttccaaattggtgtcatctgctctgtagacacagcgaaaataaaaactggaaggaaactgaaggcgccaaggccggggcccgctcgtctgtaccaaggcgagcccgggctctgcgcccctgcacctgctgcgcggccgccagggcctccccaacggctccccggccagcgcgcggccgccgaagggttgggaaagaggccggcgcggggccgcagggtctccgggtgggtctcccctaggcccctccagccccgagctgtgaagacgggggcagaacgaggcgcccggatcacccttatccagccgcgggagaaccccgggccgggaggaagcggcgcctcaaggtcgtggcccgctcggcgaccacgtgtctccgcaggccggcgaggcgcgccgcacacgtgcccggggcccggggcccgcagcccgccccggctcccgccctcgctccctcccttcctccgcggccggggagtccctcacctcagagcgcccaggcgccgcaggccagccccatggggaagcgcagacgccggagcctgagtcgcagccgcaggagcgctcggccgcccccgccgcgcccgtcagcgcctggctcccgcccgccggagacgccggcccgaggtggcgccggagctgctggcagaggggcggcgggcggcggcggcggcggctacaggagggactgacaaagccccacggcacgccgctccctacttatagcaccggcgggtcgccatggagacgcaccagctcaaaccagccacgatcggttccggccgggacaccgccgggggaggggcgggggcccggcggtggccaacccgggcccgcgcggagctggtggggcgccggcgggccgacgtcagccgagccgagcaccgcctgccccacgcgtggcccccgcccccggcttcgcgccccgccctccccgccctgcggccgcctctccccgccctccccgccctgcggccgcctcgccccgccccgccctgcggcggtctcgcccgcctggaactggtccgcgcacgcgcacgacgccgcaggccccggccccggcccgcggcagctgaacggcagagcctgtagctgcacagctgtgcttccacctggcgttcagtacctcgtgcccgagagcggaaaagggaaatcgcgagcggaggaccgatgtgctggccacgtgggccccgccgggccgactccggaccctgctgccgcccattcctccggtgcaagggacctggaagtgatcccggtgccgctctgctcccaccagctagggagcagaggcgcgggagggaaggggcgtcccgggggtcgccagcacgctgcgggcagggctggcagccgcctccacgcccccgcgctggaagcctcgtctttgtaacatcgaggtatcctgtaactagatgggtcctggcctgcggaggtagtttcccctgtgaagccagggactcagccaggagcgtgaggggacccggatcctgagtctccaagccgcccactaccctctgctttaccggatggaactcatcagtaactaggtatctttaagggcggctccctggcgcgctctgagagttacggaagtcccaaaatgctttgaccgaaaacgtctaaacagtgaatacataaagcaaaaagccgcgtgggaaattcgagtccctaggagcgcccaggggacgcctctggaggtggactgccactcactccaggccacgctggaatgcccgcaccagggaggcactgcacttgaattggggacacttttttttttttttttcatttttacctttcattcccttttggacaatccagacaggatatgtctctccctagggtggggatttcgactccttagggtgggagtacagccgatgaagagttaaggagaggagtgggtagatctagatctagccttgggtgggtgggggcggggttggaggagctcagagcactggcccagcgctgcccccaacttgctgtgtgctcttggacaagttatctcccttctctgggcttcagataacccaaggatccttacatatctttatagctacaaagccctgtgaggttttgaaaaacttccttggtacccaaaaccaggtctgaggcacagtcagtgaatacctgtttaatgaatgcatgcataaatgaatgaatggatgatccagctcttcctggagcaggcacgacttccacagaaacagagcaaacgctagccgtaagcagaagtgagtcttcttcctatgtgaagggatgtgggggtggtacgcccctatcaactttatctttacatagtccttgagcgcccaccgggcaccgtgttccccggactagagggagggagaggggggttagctccacccttaacaagcttaattcttgatgagattaaccatcaaaacccatcagagaacgttatagctccagcgctgaatgagacatctttgattctgtggtgatgcggactttgtgcctctctgtgaggaatcactttgttccaatgacgcaattttcctcacactccggaagtgtcctgcactgccagaatcgcccagcttcccggcacacctatcaaccagtcgttcccagcactgcccagtatgcagcctccaggcagagggcctggatgtcttggcaggtagggttcccctagcagcctgggggtggtcagatagaaacattaactggaacgtagaggccagttcttggctcagggagccaggagggctctgactgttgcacatacaagccactcacactgctatcgcccacataccttcctctcccgccagcccaccccaaagcccaaactcctgcccgcatgctgggaaggtgagcccttgcctggagagcccagcaggggaaatagaaggagggaaggaggcctgctccttccccggagctctgctctg

SEQ ID NO: 3459 - DNA, 4001 bp, Homo sapiens
taatttttgtgtttttagtagagacaggatttcaccacgttgtccaggtgggtctcaaactcctgaccccaggtgatccacccgcctcggtcttccaaagtgctgggattacattatagcctttatacacagccatacaaacatttcctacttccactaagtcttagaatgatttttactgaccaacaggcatcatggaaatgtctggagcatttgagattttacgagttaattttcatgtattagctgggtatatacttcttaaaaactgtaatcttcaagtcaacttatcacattgtattacagttgctgttacctgatcagaattcagtattttttttttttttttttgagacagagttttactcttgttgcccaggctggagtgcaatggcatgatctcggctcacctcaacctccgcctcctgggttcaagcgattctcctgcctcagtctcccgagtagctgggattaccggcatgtgccaccacacccggggcctggctaattttatatttttagtggagatggcgtttctccatgttagtcaggctggtctccaactcccgacctcaggtgatccgcctgcctcagcctcccaaagtgttgggattacaggcgtgagccaccacgcccggctagaactcagtattcttaaaccagcgttgcctaccaagtttagcaattccgggaatgccaactgtccttacagtcactctcgtatttgcttagctatgagaataatttggggctaacttcaccaaaaaagaaaaacaagcaagaacatcactctagtaacaataaaagccactgtattttgctttcatcaaatgtggcaccttgtgaaccagctttcttaaaattatttattttaacctttaaaaatttctgccaggtagagctttcttcttttccactgtgcaacccacttcagtgccagcagcctacgggcacagaggccaggcaatggttcggggacacagtttgctctggcatggggtactatgacaggcccagggtgacgggcctgtcataaatccaaacccatgcatagaatttgctttaaagctctatctattgtgactgcttggcattgtcaacctccgaagttgcctaaatcacccctcggagaagggaagagagtaacaacgctagcaaaaccatttttgttacagacatggttatatatttttgtttatatgaagaatatttacaatttaataataaataggctcatgcagtctcggactgggtcatttgaggccttattaaatatttttaaggcaatgttcaggcctaaacttggaaagttttgatttctttttaatacgccaatacttttttgcttttctgtatcttttaaggcgttacttaagtaacttacttgaatatattttactgaagaacacctttcggtctttctgtaacagctaagttatttaaaatggtcaatcaattagcacaagaggataatgttagaagagataggggctaattcaaacaaactttgaaaaaaatttcacaaatcaattaaagtctgcccaattttatgtttaaacaaagtcagccaacacattctttgtcctccccagacattcctgagaggttctgccttctacactttcaccaattatttcgacttcgcaaacagcacaatcagccttttctgcaaaccttagggctgtctcccctgtgtatgtccgttcatctaagccaagcttttccgaaatcaccgagtcattcacagtccttaaataaacacctctaagtcatggccgagcatctaatatcacagctactacagcaagactatcttagctctacccactctcgcgggtttccaaattggtgtcatctgctctgtagacacagcgaaaataaaaactggaaggaaactgaaggcgccaaggccggggcccgctcgtctgtaccaaggcgagcccgggctctgcgcccctgcacctgctgcgcggccgccagggcctccccaacggctccccggccagcgcgcggccgccgaagggttgggaaagaggccggcgcggggccgcagggtctccgggtgggtctcccctaggcccctccagccccgagctgtgaagacgggggcagaacgaggcgcccggatcacccttatccagccgcgggagaaccccgggccgggaggaagcggcgcctcaaggtcgtggcccgctcggcgaccacgtgtctccgcaggccggcgaggcgcgccgcacacgtgcccggggcccggggcccgcagcccgccccggctcccgccctcgctccctcccttcctccgcggccggggagtccctcacctcagagcgcccaggcgccgcaggccagccccatggggaagcgcagacgccggagcctgagtcgcagccgcaggagcgctcggccgcccccgccgcgcccgtcagcgcctggctcccgcccgccggagacgccggcccgaggtggcgccggagctgctggcagaggggcggcgggcggcggcggcggcggctacaggagggactgacaaagccccacggcacgccgctccctacttatagcaccggcgggtcgccatggagacgcaccagctcaaaccagccacgatcggttccggccgggacaccgccgggggaggggcgggggcccggcggtggccaacccgggcccgcgcggagctggtggggcgccggcgggccgacgtcagccgagccgagcaccgcctgccccacgcgtggcccccgcccccggcttcgcgccccgccctccccgccctgcggccgcctctccccgccctccccgccctgcggccgcctcgccccgccccgccctgcggcggtctcgcccgcctggaactggtccgcgcacgcgcacgacgccgcaggccccggccccggcccgcggcagctgaacggcagagcctgtagctgcacagctgtgcttccacctggcgttcagtacctcgtgcccgagagcggaaaagggaaatcgcgagcggaggaccgatgtgctggccacgtgggccccgccgggccgactccggaccctgctgccgcccattcctccggtgcaagggacctggaagtgatcccggtgccgctctgctcccaccagctagggagcagaggcgcgggagggaaggggcgtcccgggggtcgccagcacgctgcgggcagggctggcagccgcctccacgcccccgcgctggaagcctcgtctttgtaacatcgaggtatcctgtaactagatgggtcctggcctgcggaggtagtttcccctgtgaagccagggactcagccaggagcgtgaggggacccggatcctgagtctccaagccgcccactaccctctgctttaccggatggaactcatcagtaactaggtatctttaagggcggctccctggcgcgctctgagagttacggaagtcccaaaatgctttgaccgaaaacgtctaaacagtgaatacataaagcaaaaagccgcgtgggaaattcgagtccctaggagcgcccaggggacgcctctggaggtggactgccactcactccaggccacgctggaatgcccgcaccagggaggcactgcacttgaattggggacacttttttttttttttttcatttttacctttcattcccttttggacaatccagacaggatatgtctctccctagggtggggatttcgactccttagggtgggagtacagccgatgaagagttaaggagaggagtgggtagatctagatctagccttgggtgggtgggggcggggttggaggagctcagagcactggcccagcgctgcccccaacttgctgtgtgctcttggacaagttatctcccttctctgggcttcagataacccaaggatccttacatatctttatagctacaaagccctgtgaggttttgaaaaacttccttggtacccaaaaccaggtctgaggcacagtcagtgaatacctgtttaatgaatgcatgcataaatgaatgaat

SEQ ID NO: 3460 - DNA, 4001 bp, Homo sapiens
ctcacggttcccatttctacaataggacccaaaatatttacaaaatgaaaatcacaaaagccccaacgttcacctacccaacatttggcaatccaacaataccaattttcagtgaggttccaaatcttccaatgattgggggtggtttaattccatcacctccctttttagggggcatctgaaataccaaagcaaacatatgaacaaaactttttactatccacatggacccaaaacacatttcatcacatacaatatattattgaattaagattaagaacaaaacatactgtatatagcgatccaaaactaacacagagctaaatccacttttttttcagcaaaaatgtttaaaaagttctgtaaacatatccgttgtcaaaagagtcattgctgagaagtcccagaaagactgatctaaaatcaatatttgttgggccgggcacggtggctcaggcctgtaatcccagcactttgggagggggaggccgaggtgggcagactgcttgagaccaggagtcgagaccagcctggccaacacggagaaaccccgtctctactaaaaagaaaaacaaatacaaaaaaattagccggccatcaggcgcgcagcctgtaattccagctactcgggaggctgaggctcgagaactgcttgaactcgggaggcgaaggttgcggtgcgccaagatcacgccactgggctctgcctgagcgacaaagctaggctctgtcttaaataaataaataaataaataaaatatttgtggcaccaggaatcaaagataaacttagagtttagctaccaatcttccatccagactgctcacaaaacactttatatcttaacctgatatatggttatatgaaagaaagcatttggaagcaagtacacagaagacagtcaaagaaaattccattgtggaaccaccagcagccaagtcacccttcacaccaaaccattcctctataatctggaatcttatctttcccattcgcccacaacccccatttttcacatagatgaacacccaccaggtactggggtccttccaccaagtccctcccacctttggcactgaaggtacggctcatcagtcctcataagcaacctccaaaatctacattatggttactatttctaatggtaaattaatcgacggaacctttttatttacaagtcgaaactttctctgtcccttactagttctgtctccaaatcatgcgtgcagaattactcccacccttggactgcaaagtgaaatcacaaagaccgctaagctcacgtctcagaagctgggaactaaaactgtcccagtcttctggctgagagttgtacctcctaggaccacgctggggccctgcccttgcagtagtattccagcctctgatccctgaccccgagggccaggaatttcccttctcagcgtcctgacacctgttcctggccaactcccaggcctccaaagaacagatacaggaacagcgcctgtcgggtcctctggcctacagagaggtggccggcagcccacccaaagtgggccccaccccccatcctcctctccggactgggccaccgggcgtcctggcgtcgggagaaggctttccccagggctttcccgcgtgaggcgtaggccgatctcccgacgcgcggcctagtccgacagcgcctcattcatccacacatccccaagccacccgctgccctggccccatcttggccactgggcccgggccccgcgccagcctcagggcaatgagcccaggcgccgaagacctggcggagatcgcgcccccgggctccctgagggcctcaccgtgctcggcctgggcgatgacacggggtcccagcggcagcgagagaaaggtcctgccggcagctggaggcggggaggaaggaggagagaacgcaggcccgtcccctccgccgagcggcacgcacgacggcggcgacagcggcggaacgggcgggccgggcgccgagcggcacctgcgcgcagaccatgggccccgcccctccccgccttgcccgcgcgtcccgcccattggcctaaccggccggggaggcgggagtagggcgggaggagcccagggtgggaggagccgcgcggcggcagggagctggagaggggaaggcgctggctaggccgttcccgggagctctagtcttccgcttcggcacgtgggcttctcggttctaggtctccgcttccgtctggctgcgcggcctgggttacctgctcacgttcactcgcgggcctacagccccaagctttcccagctggactgcggagtgccttgggccctgacttccctccgggagatccggggcgtctgaagtcaggcaaacagccacaccagccccgaggaccgcgtggccgctagcccatctcccttttctataactttattcgctcagtctgtgcggagagaagctgttaactaaaagttcttgaaggaaaaggggctaagggaaactttggtctagggatttcttcctcgccttatagttaaagcgtcgcacacaggtactggatcacagaatgcgtttaattgagccaatttccccccttttcctcttggtagttgagagcaggggcctttgaaatttgggaatttccaatctggatttcgccactcattgactgtatgaccctagacaaattaacttctctggacttcaatttcgttctggataaaatgaggctattaaaaccaccttatgaggttattcgtgtgagaataaaatgagacaatgcgtgttgagctcataacaacagtactcagcacatacagaaaaggcttgtgagtagtcgctgttgttaatattaggatttcatcccatctcacccacatcatatcaataccatgagcgccactggagaaggaattctttcatttaggtcctggccttcagatgtcattcaggtatttgttgtaatgaatatgatacctgtccaaaaattgtgacactagaagctccttttaaagggattagttgctattaatattaaaggatgtaaataggtcgccatccccattttacaagtgaggaaacaatatcagaaaggttgattaatttggatgaagtcacacaactagtaaatggcagcagcatatttcaaaccacaatctaactgaaaatctggccgtaatcccagcactttgggaggccaagatagggggatcagttgagcctaggagttggagaacagcctggacaacgtggtgagaccccatctctaccaaaaaacaaaaattagctgggtgtagtggcacatacctgtagtcccagctactcaggaggctgaggtgagaggatggcttgagcctgagagctcaaggttgcagtgagctatgatcactgccgcagcactctagcctgggtgtagagcaagaccttatctctaacaaaataaatacaaataaaaagtaaaactaaaactatctgaaaaatctgtttcctttcagcgagaattcatttttattttttgagatggagtctcactctgtcgcccaggctggagtgcagtggcgtgatctgggctcacggcaacctccgcctcccgagttcaagcaattctcctgccttagcctcctaagtagctggaattacaggtgcacaccaccacacccagctaatttttgtatttttagtagagacggggtttcaccatgttggtcaggctggtctcgaattcccgaccttgtgatccacccacctcggcctcccaaagtgctgtgattacaggcgtgagccaccgcacccagacgagaattcattcaaatagagactccctataagctctgagccagtattcataataaaattgcattaaggcttttccttagccctgtaacagtgctctagtgaggtgagttaaagagctttctctacaattttggaaattctcaaggacacaggcaacttgatttggttttgtattactttttcttaatattatatattaatgtgccctatttatattcttggtctagtaccc

SEQ ID NO: 3461 - DNA, 4001 bp, Homo sapiens
gaagtcagttcttcccaaattgatttttaggtttaatggaatttctagcaaaatctcagcgaggttctcttgtagacattgacaggcttactataaaatttatataaaaatataaaggctgtacaatagccacaataattttgaagcagaagaataaagtgggaggagtcactcttccagtgttaagatttactacataatcatataaatcaagactgtgttgtatggatggagggtgtgatattgatagatacgtagatcaatttaacagaacagaggatccagaaataagccagcacaaatattctcaactgacgcagtagtgcaccacacaatgacatttggtgaatgatgaactgaacggcacataagatggtggtcccataagattatgacattatattttgacttaccttatctgtgtttagatgcataaattatggatgagcacagtggctcacacctgctgggacaggtgggacagggtttcacccagcataatgtattatgtatatataatacacaatacagtatatgcattatcccagtatatgtattatcccagtatgaatgtattatgcattgtgtattatacagtataaatgtattatttattatgaatattggatagcaatgagaatgcatgaattattgttacatgcaaaaacatcaaggattcactcaagcaacacggtgaatgaaagaagctgaacataacagggcacatactttatgtgtaagcccctcagaaacaccaatgctagcatctggttttggaagtcaggacagtgctttttgtggagaagggttaatgactgggagagggcgtgaaggcagcttctagttcttgatctgggagctggttccatgagcacagtccttttgtgaaaacatatgcagacgaaggcttgttacttgtgcacagttgtgtaggtttgttaaatttcacttagttctgtaggtttgttaaatttaacttaaaaattaatttaaagagcacaaagtgccacatacaatgttgtttcatcactacagattttactctaggacatttagttgtcttagtgtgaagtttgacccaagcccaaggcctttttcaaggcgtccttaaattccttgttcctcaggcagtaaatcaaagggttaattattggcgtgacaacagtgtacacggcagagatgagcttgttggagctctgggaatcaatggcttggggccggacatacatgaaaagcaaggctgtatagaagacggtgaccacggtgaggtgagaggcgcaggtagagaaggctctccagcagccggtggccgaggggatgcgcaggacagccagggtgatgtgccaatatgacagtatggtggccaggagcggaaacaccaggatgatgaaggccaggatgaaatccaccagctctgcagtggagaagtccgtgcaggccagcttgaggatgggggaaatgtcacagaagaagtggttcaagacgttggagccacagaacgtgacgctggagataaaacagaccttgatcatggagatggtgaagccactcacaaaggagaagcccaccagctggaggcacagccccggggtcacaaggacgtggtagcgcagcgggtggcagatggccacgtagcggtcgtaggccatggaggccagaagcacacactcggtgcacaccagggagctgaagaagtagagctgcgtcatgcacccgacgaaagagatgcgtttctgctggaggaggaagccctccagcatcttgggggtgatgtcagacacgtaccagatctccaggaaagacatggagctcagaaagtagtacatgggcctgtggagggaggtgctgctccagacgatgaggatgatggccaggttctccaccaggacaaagaggtaggtgagcaggaagaggaggaagagcaggtactgcagccctggggccgtggggaggcccaccaggatgaaggtgctgaccttggtgacattctccccactcatgcctctgtgcttgggagctgcaggcctacaaaacatcaaagagcaagaggaaagggctgcagggcagctgaggcagagagagagtggagctggacttggatggggagttttggtgcaaagagaggccacgtggctccccagagcaccaggagagagcagtgatctgctgatcttctgagttttaaagtagaaaacttctgtgtgcttgcatttacatataaccatgaagtaggaatgaggaagagagtatatgctgaggaacagagccgggcagctccagggtgggcaaaacccaaagctctgagtccaggggcactaccagtccacacgtgcctggggcagctctcaagatccaagtgggcatggacacagagctggccctccttagggtccttcatctgagggttcctgcaagtcggggcagcagcctcggcatgaggtgaggggctatcagcctaccagggcagaaccccaaactgggctaaccagccggaggaatgcagggagggctcccaggaaagggctgcctggctctgggggacctggtccacaggtgggggagagagagggtagccacagccccttgccccacagggcatctggtggttcttttcattggcagtctaggtgggttgaatggcagacttccaccagctcacagctggggagggtgaccccaggtttctggcccaggatgctaaaaattgatgagaagactaggagagggccaggtgggtgccgaataatctggagtctgtgctggggaggcgtggtgcgcggcacttactggagagcctcatggtgacgtgtagggggttggctagacaagtcgagttcatggaagagttgcaggctgaaaaacaaacttctagaagggaattgcccagggacaggtttacacttggaaacgcacctgtactcctgccgtctagggtgagcattctgtgggaacccaagatcatccactggggcggcatggccattccctgccttaaaatgccagcgtgcagttcagagtttaggatcaatttcacaagcatttactactcactccagtcaccgcctactgtctccccaaaacaaaagcaataagaacccctgccattaaaggggtctcaagatgtgagtctgaatgtagcctctctagacaccatccagggtggtgactgtgtcctcttcccagctgagtggccacagggggctttaaagtccacaaggaggaaagttggggtccacaggagctccttggaaggccagcagcccccacctgttgactgggtttgctggggagagctggcggtgggggtagtgagctttggttcttgtgcttttaacccagaacagtagaggcacctatagatttctcttgattatttggatagtggtaactgatcattagtgagttggctagttaataccggattgattcattaaattgaaactgtgttactttacaaattcagggccctttacagcacactctatccatcccctgaacttgttagacaatggctgcattttcttttaaataaactttttattttggaataattttagatttacagaaaagttacaaagagagtgcagagagctctgggagatcctccattcagcttcctccaaggctaacttcctacatgaagagggtatatttgtcacagtaagggattgatattggtattactgtggactaaactccagactttggctttcatctttttttccctcgaatgcccgtttctgttccagggtaccccatcgctgcgggcatggctgcctttttaacttggctgtacctccctggtttctgtggacagactgaaagtccaagcggacgctgccgagggaggctggcatcctctcatcgtaaacaaggttctccaatatgttacaaagactgtttttgcccagtcacaaattcaaacctaggtctccaatctgagagaggaaagtgaagctttccgtaccacagaacggatgtattttggggtggtccgtgag

SEQ ID NO: 3462 - DNA, 4001 bp, Homo sapiens
ctgcttcctgcctctgaggctttgctatcattgaaattgcctggaacacccttccttttccaccctttaaattgaataacctctattcctgttttaaggtgtagatatcatgccatccaggtggccctcttccactcctccctgcagcccccacctgggtttgctttctctcttcttgcactgttgatcccctacacgtcccacccagcccatacccagcctctttctcctgcatgcccatcgggcaccagatgctctgctgggctgccaggtccaacagtgaataggacagaggtggccctgcctgcctgggcatctgtgtgtatttaggtgctgggctgccaggtccaacagtgaataggacagaggtggccctgcctgcctgggcatctgtgtgtatttaggtgctgggctgccaggtccaacagtgaataggacagaggtggccctgcctgcctgggcatctgcgtatatttaggttcaatcagaatcgactcatgcaataataaaacaatttttattttctcagcagctgactgggcatgcagtaggggtttatttaggaaaaaggcagagggggcatccacccaagacaatcagagaacattcgttgggtataaaacagaaggctacatgcccttacttttcccagacacattttgcttcagggacacctggagctcattttgccacatggttaaatatttagtactttaacacaccgcaatttattggggactttaaaatctcagatgatctggcatgttttgctgctttctgaaatgtgcatggtaattttaaaggcgaggaaaattcattaagctttactaactacagctttgctcatctacaaaaacaagaaagtactggtattacaacaccaacaacaatacctatgctattaacctcaacctcagtttttttcctgaaggagaaaaatagatttggaagtaatttttaaataaatgcggtactacaataatgcaaacagtcaaatggcctcctcagagaggctggctgtgtatttggagatgaagttccagaagactagaaagcctcccctctacggcgcagctcgtcaagccgaaggcttttttcaaggcattcttaaattccttattcctcaggcagtatatcaaggggttcaagatgggggtgataactgtgtacaaaacagagatgagcttgttggagctccgggaatcaatggcctggggccggacatacatgaaaagcaaggctgtatagaagacggtgaccacggtgaggtgagaggcgcaggtgaagaaggctctccagcagccggtggccgaggggatgcgcaggacagccagggtgatgtgcgcatatgacagcatggtggccaggagtggaaacaccaggatgatgaaggccagaatgaaatccaccagctctgcagtggagaagtccgtgcaggccagcttgaggatgggggaaatgtcacagaagaagtggttcaagacgttggagccacagaacgtgacgctggagataaaacagaccttgatcatggagatggtgaagccactcacaaaggagaagcccaccagctggaggcacagccccggggtcacaaggacgtggtagcgcagcgggtggcagatggccacgtagcggtcgtaggccatggaggccagaagcacacactcggtgcacaccagggagctgaagaagtagagctgcgtcatgcacccgacgaaagagatgcgtttctgctggaggaggaagccctccagcatcttgggggtgatgtcagacacgtaccagatctctaggaaagacatggagctcagaaagtagtacatgggcctgtggagggaggtgctgctccagacggtgaggatgatggccaggttctccaccaggacaaagaggtaggtgagcaggaagaggaggaagagcaggtactgcagccctggggccgtggggaagcccaccaggatgaaggtgccgaccctggtgacattctccccactcatgcctctgtgcttgggagctgcaggcctacaaaacatcaaagagcaagaggaaagggctgcagggaagctggggcagagggagagtggagctggacctggatagggagttttggtgtaaagagaggccacgtggctccccagagcaccagtggggagcaaaagcagctccccacccagatacatgttaagcactaacctctgatgatatagattctaggtctcagcctgtaacactgggtctggaatgccctcctgagcctgtcaccaccagtctccctcatctctcaaagctgtgtcctatttttcaccacctggacttctccaagggacccaataaccatgaagggcatccacagggtgtccggtgtcctccaggggatgagccctgactgccccaggcttctggatgtattgtttgagtctgacgcattctttctaaattggtagatatatgacctgttacctggttttagggttgattttacaggaggaagtgacaccatggcaggggtgaggcccaggtccaacttggccagatcccagactcaggcacatccacagcagcagccggagcctcccaggccaagaagggaaagtggtcacatccttatccctgtcaatctgaggggaatatcagcaagggagagattgcaatgcaatcccagaagagagaaaacagatggcagcagagaggaggaagtctagaacgttctcgaggggcctgtggctgagggaggagtcgtccacccacacctgagtgtgtatttttatataaaacacatccattaatcctcactacagtcctgggaaaaagaaggcttacatctctaagttgagatggaaagtctgagacccaaaaagaaaggttcatggacttacccagggccggggcagcaccaggacacagactggaatcttctaacaccaaggccgctgcccttccaatgcggtttccacaacagaagcagtgaacccatgtggacataggctagaacatttgaattataaagatgtgtagattcagttgttggttgccctgtgacactacactaacaggcaatgaaaacaaaaagtcacaaaataaatagtattattcagaaaaaaggcagagaagaccccttcagaaggaaatacagggatatagggcataggttggttgaacgaacctaaagcaaatatttaaattaataagcaaaagacttggaagccaccgtattgttcattaataagggatgggctaagtaagttttgtcacatccctattatgaacactatgtggtcactgaaaagaaggggcaggtccgtctgtagatatggaatggtttccaaggtctgtagccacagttttaaaggtttgaaacagcactgatcgtatgcctccgctcatacaagtaaaagtatgtaaatagggcagacgacccgtgaaggtacaaggtggtggggacactcactgtcctgaggggcagagcaggtcactggaacacagatggcagggaaatgtttttatggcaaccctttttctgtgttttgaattttgtttcacgtgagtatattatttattcaaaatagtgatccattacttatttttaaattactacattctcctttaaaaagaaaaagttatgcactggattaaaaattcaataagtcaacattttcccaggccataattccaaatctatactgaaaaacacacatagattaaatgactgaatgagaataaagtgtattgtgcagtgtatcgtgtgcctttaaaaatgacaaaagtttcaattatgatattgcacagatatcaaaattaatgaaaacagaggatggatcagaaacgacagaataatatcaacagcagtttgcttccccaaatagcagagaaattgaaatacagaaaagaaaaccgaaaataaagatgaaatagaaatatattgatggcatctgttagagcatgaataagtaggtaaatgattaagaatataaataagtaatatgaattcaacagatctt

SEQ ID NO: 3463 - DNA, 4001 bp, Homo sapiens
tgaagcagtgacaatgagcaaatgcaataaaacaaattataatttataaatgctaatagggagtctgcatcagaaaaaatataaaggaaagcagaaaataaaatcacacaatgaatttttggctctgagcttcctggcaatcaaagcaaaaagcaagtaaaggtcggttacgtaattcttattggcaaaagtttagttgttcttggggatgtggggacaagattttctaggaaaatttaaaaacaaatattctaggcaactgagtattgtcctaggcaatttccctatggtattctacacaagaattgcctggagagaggcagcctgagacttgtttgtagccaagtgcatttatacaaacatttccttttctaattttggagcatcttattaaatagtacaaaatcaccaaattaaagaaaatgtctacaaagacctcatgagaaacgtttccttctttgctttccaacagttcctgaaaaacaaacgaacaaaaaaacctaacaatcacacaataaaatgcaatatttagtgaccattatgacccctcaaggcactgccttggtgcttataggccaacccctttcaaggagttacttcaaggcaattctgcagcaccaagtgttagcattgcaccaagtggtagcaacacactctcctttgaaaacaaataaaagatttgctgtaatttttaaaaacataatcctttgaaaaagaaggttggatagattagtggttaaacaccaattttaatattggagaaacctgagttccaatctccactccatactttataactgtgtgactttgtccaaagtcctgacgattaaatgaaatgatgtgcctgatatataaaagagcatcactgaatgctcccaattatcggtatttttactttaacctttttcttttttagctccttactgcagtgcactgagatatttttactttaaacttcaacttaaccatgcagatctcttgtacatctctaactcattcaacatctaacagaaaaactgctcaataagtgatgatgtccgtttaacgtgcagtgcccttatataacggtgtagggccgtgctatttttcttcagattgcaatttaactgcgggaaagtgtaatgattctattaggatttcaattgtaaaatgaaaagtaacgtctcaacatctttttaattaaaaagctctaccaaaagagcctggcttatcaacattttacagccaagcatggctccaaggtgaccgatcagttagctggcaggacacattggtgcctccaggctgggatgacatcaaaggttctagctacagtggttctgggacgcgatctcttcctcttcatacctcacagggcactttaccactgtcgttacacatcttcacagttctccttttccaaccagagggcttcgtaagctgggaatcaggtaggttagtatcaggcgtcccttgcacaaaaggcctataactgcggggcagactaacgaaaggtcctcccagagtgagcctctcacctcaagtcttaaaggactttggcctgcgcctccagcctctggccagttggctgcgctccaccagtaagggttctcgagcccccgggcagcctgcggggggcagcgaggcgcaaagaccatgccccaagtgccgagggaaagtcctgagatgcgcgacttgggacgctaggggccaagctccgacgcggggctgggtgcacctggacgcacctcacacgccgcgagctaagcagaaaagggaggcaggctgccccgacaccccactactcaccgctaggtttccgtctggcgccgatccggctgcgtcacgccggccgaacgacaccccgctgagtcgccgccgcagggaaggtaccttcggccccaacgggaaaagccaatttccagtaattcgcgcccgaccaccggggaggtaaggagcaccggaggccagctgggggatgggaagcctgcgtgcggcacaccgaatctcccgccctgttcagggggcggtgcccgaggaagccaataggaagaggagtcggccaagagcgacggctctgccgtccagtcggcgccggccattcggccccgcccatcaggaaacctgaggaaaacggattcttgggccctgagttgtgggccttacctttcctttcttctttccgtttccggggaagggaaaaggaagtgttgtttggatctgaggaagtttgcacagtagctggctgagtggtagctgtttgtcttgtagcaatctttaaaaagtgttctttggggtcgggcgcagtgtctcacgcctctaatcccagcaccttgggaggccgaggcgggcgaatcacctgaggtcgggagctcgagaccagtctgaccgacatggagaaaccccgtctctcctaaaaatacaaaattagccgggcgtggtggcgcatgcctgtaatactagctactcgggaggctgaggcaggagaaacgcttgaacccgggaggcggacgttgcagtgagccgagatcgagccattgcattccagcctgggcaacaagagcgaaactccgtctcaaaaaaaaaaaaaaaaaaaaaaaaaagtgttcattggtttcccagctaccttttgaagaaaaaggtaatggaaattgattcgcatttcttttttaaagattttcttcatttggcgtgaaaggtaggatcttgtacatctccagggtttggggtagggagaagaagagacgttaggagaagcactgaatatggagatgggatcggacggctagtgggatgaagaggctggggaaatagaatgaatagacagagaaaatgattgacttcaactatccaaaatataaaaaagacaagacagagaaaatgaggaagaaaaggaatgaacctggatgggatccatacagtattaagaacagggtattgtttcatttggattcacttactcaaaacaaaactacagagtactctgcgaacagaagataagtattcattatcgagcgagacaactacgatctctgcattcactgtagttacctagcacgtgaagatattgaacggacaatattgagaaaaataccatgatatgggaagtgcattggagcacatggtaggagtagctaattaaaagcccagaaggagtcaggaacaattttctaggaggaagagatgtttaaactgaaacccctgtgttgaatagatttaaaacaggccaagaggggtaaaattttccaggtagaaggtccaaatccgtgtaacagctgtgtaaaatgccaagcattgggtctgttattatgaagggcttagttggcccttagggcactggtcagatttgtattgaaagatctttggataaaggaggtaggattgggagggaagatatagagtcacaagatttgggagctgtttaggaaatccagttgagaaagaaatgatcatagccttgatacctcattattccattttggctaggtggagttaagaaaatggaagagaaaggcaattttttgtgcattataaataagaatttggggagtgactagagacagaagataaagagaacatagctcaacagttaacaatgatgtgtttgaagagtgtttaaaaatgtgaagatgactagcccagcacacacacctgtaatcccagctacttgtgaggctgagaaaaggaagattgtttgcatcccagagttccaggatgcagtgagcagtgatctcacttgtgaatagccactgcactccagcctgggcaacacatcgagaccccatttcttaaaaaagaaaagaaatttgaaaaaaagatgaagatctaggaatgttgaatagatatgttcaacttatgtgtgttttttatatatataattttttttttttgagatgcagtctccctctgccgcccaggctggagtgcagtggcaacattactgttcactgcagcctcgactatctgctctcaaccaaacctcccacctcagcttcctgagtagctgtgactgcaggcgcaca

SEQ ID NO: 3464 - DNA, 4001 bp, Homo sapiens
ctgacataggtggttaagaaatactaagaaagaaagcagtaaatgattgccataaaaatcagtatagtgttaaccactgaaaagaattgaggaaagggatgatcaggaatagaatggagaggggagcttctcaggtgccacagacgttctagttcttgactgtggcagcgcttacatagagttcacactttatagtttttcattatactatgtatcgatgtttgtatgcttaaatactaaatgtatggaaaaagacacaaaatatttaaaattgtagctaaggcacattaactgccttgctggtatttttttttttcattacaaagtggcagacaattggttacactataaagacagacaattggttacactacaaagaaaattttaaagcacaggagtctagttttgattccatcggacatgattaccgtacacaatacagaagatactaagggctaagcaatgatgcataaacggggtccactgcccaaacttacagaaagcaaaacgtggaaaattagtaactttaactgatagtgtacacctaaagaacctacaccggccgggcgcggtggctcacgcctgtaatcccagcactttgggaggccgaggcgggaggatcatttgaggtcaagagatcgagaccagcctgaccaacatggtgaaaccccgtccctactgaaaacacaaaaaaattagccaggcgtggtggcacatgcctgtagtttcagctactcgggagggtgaggcaggagaactgcttgaacccaggagacagaggttgcagtgagccgagatcgcgccactgcactcgtctgggagacagagcgagactccgtctcaaaacaaaaaacaaacaaaaagaacccacccaacagaattaagtaccaacataataaatacgaagaattttagattcttggtttttaaaaaacatacaaagatgatattccttcaaaatatctttacaaaacatattgagactgtgatgctttatattgattgtatgaaaacaatgaaaaagaaccagcactgtttcactataaaagctttactaatgtaaatttataaatcctttcttaaatattttgagttaattctaattttatgatagaaattcattattttcagcaaaaacagctggcatttgggaaaccaaaggctcaaaaactaagaatagtaaccaaagaaacttgacaaaacagtccttttaaaactctcatctacactataaggggaaactttgatcacgtcccttctccttcatcaatcgtagaactcaacattaaggactacacaatcccacatccctctccgagaaaaagcaaaggctttgtgttgtagcaacaacgcaagacatggagggaagctccactcaagacttccctgcctgctccttccccaaagccactccagaataccagggagggttgagaggtaaggcatgaagggcgcaatatccaatatgagcaacgcgtgtgatgcatctggtcaaaatgcatacagaggacttgtctctgtccctagatagaagtcctccgtcctgcagtcatgagggtcaattgctgaggcttcacagttcccttctctcttacactcggaccgtcacgctcctcacctactaccccgatgcagaggtagactcaggatccctgcacttgtcaaggattcctcggcaagctcacggggcgggagtggccacaagacggagctcgcctggtcctggccttcccggcctatacaagcctgcccccttcccaattcccaatctccacagccttccatcctcccactttcgattcaccttgcgccaccgacgcccctggccttcgtttgcagcaagtttacccccaccattacctctcgcataaaagcctgcatttaccaggtcaaagaggggaaccaacgcctgcaggaatcgcttcaccgaatcgcctggccgcgtcctctgctagacttcacctgccgctgcggaccgtacacaaccactcccggcatgccccgcgcacgcactacctctcccaccccgcccctctcccgcccaaacacgtgacctcctttcgtctccgtccacgcccacttccgttcctccactttcccttaggaaggaggagggagctgggggtgttaaaagcgtagcgacttcctcctcctccccgcccccgctcctgtacctcccgctacaatgtcttccgggtcgctagcgcctcgacgccttctgggaaaatagctcatttcctcccctccccctcctcctgccttcaaccaaccagccacccgtcagagagggacatgcgcagtgagtgcctcccgtctcttctacccgaaccccccctcccccccaagcagagagaccccagcagcagcagcagctgatgatgaagagagaggcagtggcagagggggggcaccttttatttctatttttaaagggacaggacactaattctaccccacttcaaccttgaattcaggggggtggggggaaggcggctgagttccttcccccaccctccagccctgagccctgagagggggattgagcctgagagaggagaaggagtttcttcttcttcgaaaacccccatccacgactcctaccccctcacccctccaactcgcctccctccctccaccctcctcctctttggccgtgagaggaggagagaaagaaaccaaaagcctcttagcaacacagaccctttgctgctgctgttgctgctgctgctgctgttgctgctgctgctgctactgctgctgctgctactgctgctgcttggccctggctggagacatctcactacacccaggagcagccacttccccagctctcctcctcctccttcgcctcctcctcctccactccccccctttattaccctttgtgtcatcctccacagctccagggaaggcactcaaaagtggggggcaggaaaggtaagtgtgtctgtgggggcttcattgccttcctctggctctgactttcactccggggcaacagtagcaccaaaccacatacgcagtggagctccggggtgaggagggggtggtgctggggggggtgaaggaggggttggagtagggaggggtgtgtgaggtggggtgcccatcctgtcaggggaggaagggcacttttatttttatttgctgttgtcaaaagtggtttctctcctccatctaacatctgattgtgtcttgctccagtgggggagaatacaaaaacaaccccctccttcctccaatgaggcgccagggaaagagacagaaagaggcacactttctagatgtcacttaaaaaaaattcattggagagctctttttctccaggaaaagctccactgcatttgtttctgagtgggaaaatgtcgggatctggattgtattggaactgcttatccatttgtagacctgagtgttttcccctttttggtcctgtatgagatttggatattgacttcagtgttggaagacttgattggtttttgctttaagggtttcattttccattttttcgttttgtctgacttccatggaaaatttcaaatttttagttggtagaggcctttggttaggttttgacttgcattattgctttttttttggttaaatgtctgtttcatatatcagtatataaagtccaaagctctaaaatgcttaaagtttaaatgccactgctattgtctgttcccacatacgttcctgatacttattttccatatgatgagaatattagctattttataattaatctgggtatatttgtaatctttgtaacttgtctgaacaagtaatccccattgaaaactttatgttgttctggctgcatggaaggccaaacctctccatcaatagtttgctggattggtaccactttcagttttagctgaattatttatttactgttgtaaattgagatgagtttttcatctcaatttctcttggggttctgaaccaaattgcccactgtatgtaaaagtacacaaatttctaaaatatgtttt

SEQ ID NO: 3465 - DNA, 4001 bp, Homo sapiens
taagaaatactaagaaagaaagcagtaaatgattgccataaaaatcagtatagtgttaaccactgaaaagaattgaggaaagggatgatcaggaatagaatggagaggggagcttctcaggtgccacagacgttctagttcttgactgtggcagcgcttacatagagttcacactttatagtttttcattatactatgtatcgatgtttgtatgcttaaatactaaatgtatggaaaaagacacaaaatatttaaaattgtagctaaggcacattaactgccttgctggtatttttttttttcattacaaagtggcagacaattggttacactataaagacagacaattggttacactacaaagaaaattttaaagcacaggagtctagttttgattccatcggacatgattaccgtacacaatacagaagatactaagggctaagcaatgatgcataaacggggtccactgcccaaacttacagaaagcaaaacgtggaaaattagtaactttaactgatagtgtacacctaaagaacctacaccggccgggcgcggtggctcacgcctgtaatcccagcactttgggaggccgaggcgggaggatcatttgaggtcaagagatcgagaccagcctgaccaacatggtgaaaccccgtccctactgaaaacacaaaaaaattagccaggcgtggtggcacatgcctgtagtttcagctactcgggagggtgaggcaggagaactgcttgaacccaggagacagaggttgcagtgagccgagatcgcgccactgcactcgtctgggagacagagcgagactccgtctcaaaacaaaaaacaaacaaaaagaacccacccaacagaattaagtaccaacataataaatacgaagaattttagattcttggtttttaaaaaacatacaaagatgatattccttcaaaatatctttacaaaacatattgagactgtgatgctttatattgattgtatgaaaacaatgaaaaagaaccagcactgtttcactataaaagctttactaatgtaaatttataaatcctttcttaaatattttgagttaattctaattttatgatagaaattcattattttcagcaaaaacagctggcatttgggaaaccaaaggctcaaaaactaagaatagtaaccaaagaaacttgacaaaacagtccttttaaaactctcatctacactataaggggaaactttgatcacgtcccttctccttcatcaatcgtagaactcaacattaaggactacacaatcccacatccctctccgagaaaaagcaaaggctttgtgttgtagcaacaacgcaagacatggagggaagctccactcaagacttccctgcctgctccttccccaaagccactccagaataccagggagggttgagaggtaaggcatgaagggcgcaatatccaatatgagcaacgcgtgtgatgcatctggtcaaaatgcatacagaggacttgtctctgtccctagatagaagtcctccgtcctgcagtcatgagggtcaattgctgaggcttcacagttcccttctctcttacactcggaccgtcacgctcctcacctactaccccgatgcagaggtagactcaggatccctgcacttgtcaaggattcctcggcaagctcacggggcgggagtggccacaagacggagctcgcctggtcctggccttcccggcctatacaagcctgcccccttcccaattcccaatctccacagccttccatcctcccactttcgattcaccttgcgccaccgacgcccctggccttcgtttgcagcaagtttacccccaccattacctctcgcataaaagcctgcatttaccaggtcaaagaggggaaccaacgcctgcaggaatcgcttcaccgaatcgcctggccgcgtcctctgctagacttcacctgccgctgcggaccgtacacaaccactcccggcatgccccgcgcacgcactacctctcccaccccgcccctctcccgcccaaacacgtgacctcctttcgtctccgtccacgcccacttccgttcctccactttcccttaggaaggaggagggagctgggggtgttaaaagcgtagcgacttcctcctcctccccgcccccgctcctgtacctcccgctacaatgtcttccgggtcgctagcgcctcgacgccttctgggaaaatagctcatttcctcccctccccctcctcctgccttcaaccaaccagccacccgtcagagagggacatgcgcagtgagtgcctcccgtctcttctacccgaaccccccctcccccccaagcagagagaccccagcagcagcagcagctgatgatgaagagagaggcagtggcagagggggggcaccttttatttctatttttaaagggacaggacactaattctaccccacttcaaccttgaattcaggggggtggggggaaggcggctgagttccttcccccaccctccagccctgagccctgagagggggattgagcctgagagaggagaaggagtttcttcttcttcgaaaacccccatccacgactcctaccccctcacccctccaactcgcctccctccctccaccctcctcctctttggccgtgagaggaggagagaaagaaaccaaaagcctcttagcaacacagaccctttgctgctgctgttgctgctgctgctgctgttgctgctgctgctgctactgctgctgctgctactgctgctgcttggccctggctggagacatctcactacacccaggagcagccacttccccagctctcctcctcctccttcgcctcctcctcctccactccccccctttattaccctttgtgtcatcctccacagctccagggaaggcactcaaaagtggggggcaggaaaggtaagtgtgtctgtgggggcttcattgccttcctctggctctgactttcactccggggcaacagtagcaccaaaccacatacgcagtggagctccggggtgaggagggggtggtgctggggggggtgaaggaggggttggagtagggaggggtgtgtgaggtggggtgcccatcctgtcaggggaggaagggcacttttatttttatttgctgttgtcaaaagtggtttctctcctccatctaacatctgattgtgtcttgctccagtgggggagaatacaaaaacaaccccctccttcctccaatgaggcgccagggaaagagacagaaagaggcacactttctagatgtcacttaaaaaaaattcattggagagctctttttctccaggaaaagctccactgcatttgtttctgagtgggaaaatgtcgggatctggattgtattggaactgcttatccatttgtagacctgagtgttttcccctttttggtcctgtatgagatttggatattgacttcagtgttggaagacttgattggtttttgctttaagggtttcattttccattttttcgttttgtctgacttccatggaaaatttcaaatttttagttggtagaggcctttggttaggttttgacttgcattattgctttttttttggttaaatgtctgtttcatatatcagtatataaagtccaaagctctaaaatgcttaaagtttaaatgccactgctattgtctgttcccacatacgttcctgatacttattttccatatgatgagaatattagctattttataattaatctgggtatatttgtaatctttgtaacttgtctgaacaagtaatccccattgaaaactttatgttgttctggctgcatggaaggccaaacctctccatcaatagtttgctggattggtaccactttcagttttagctgaattatttatttactgttgtaaattgagatgagtttttcatctcaatttctcttggggttctgaaccaaattgcccactgtatgtaaaagtacacaaatttctaaaatatgttttcatgagtcaaagaa

SEQ ID NO: 3466 - DNA, 4001 bp, Homo sapiens
cttaggaatgctgacataggtggttaagaaatactaagaaagaaagcagtaaatgattgccataaaaatcagtatagtgttaaccactgaaaagaattgaggaaagggatgatcaggaatagaatggagaggggagcttctcaggtgccacagacgttctagttcttgactgtggcagcgcttacatagagttcacactttatagtttttcattatactatgtatcgatgtttgtatgcttaaatactaaatgtatggaaaaagacacaaaatatttaaaattgtagctaaggcacattaactgccttgctggtatttttttttttcattacaaagtggcagacaattggttacactataaagacagacaattggttacactacaaagaaaattttaaagcacaggagtctagttttgattccatcggacatgattaccgtacacaatacagaagatactaagggctaagcaatgatgcataaacggggtccactgcccaaacttacagaaagcaaaacgtggaaaattagtaactttaactgatagtgtacacctaaagaacctacaccggccgggcgcggtggctcacgcctgtaatcccagcactttgggaggccgaggcgggaggatcatttgaggtcaagagatcgagaccagcctgaccaacatggtgaaaccccgtccctactgaaaacacaaaaaaattagccaggcgtggtggcacatgcctgtagtttcagctactcgggagggtgaggcaggagaactgcttgaacccaggagacagaggttgcagtgagccgagatcgcgccactgcactcgtctgggagacagagcgagactccgtctcaaaacaaaaaacaaacaaaaagaacccacccaacagaattaagtaccaacataataaatacgaagaattttagattcttggtttttaaaaaacatacaaagatgatattccttcaaaatatctttacaaaacatattgagactgtgatgctttatattgattgtatgaaaacaatgaaaaagaaccagcactgtttcactataaaagctttactaatgtaaatttataaatcctttcttaaatattttgagttaattctaattttatgatagaaattcattattttcagcaaaaacagctggcatttgggaaaccaaaggctcaaaaactaagaatagtaaccaaagaaacttgacaaaacagtccttttaaaactctcatctacactataaggggaaactttgatcacgtcccttctccttcatcaatcgtagaactcaacattaaggactacacaatcccacatccctctccgagaaaaagcaaaggctttgtgttgtagcaacaacgcaagacatggagggaagctccactcaagacttccctgcctgctccttccccaaagccactccagaataccagggagggttgagaggtaaggcatgaagggcgcaatatccaatatgagcaacgcgtgtgatgcatctggtcaaaatgcatacagaggacttgtctctgtccctagatagaagtcctccgtcctgcagtcatgagggtcaattgctgaggcttcacagttcccttctctcttacactcggaccgtcacgctcctcacctactaccccgatgcagaggtagactcaggatccctgcacttgtcaaggattcctcggcaagctcacggggcgggagtggccacaagacggagctcgcctggtcctggccttcccggcctatacaagcctgcccccttcccaattcccaatctccacagccttccatcctcccactttcgattcaccttgcgccaccgacgcccctggccttcgtttgcagcaagtttacccccaccattacctctcgcataaaagcctgcatttaccaggtcaaagaggggaaccaacgcctgcaggaatcgcttcaccgaatcgcctggccgcgtcctctgctagacttcacctgccgctgcggaccgtacacaaccactcccggcatgccccgcgcacgcactacctctcccaccccgcccctctcccgcccaaacacgtgacctcctttcgtctccgtccacgcccacttccgttcctccactttcccttaggaaggaggagggagctgggggtgttaaaagcgtagcgacttcctcctcctccccgcccccgctcctgtacctcccgctacaatgtcttccgggtcgctagcgcctcgacgccttctgggaaaatagctcatttcctcccctccccctcctcctgccttcaaccaaccagccacccgtcagagagggacatgcgcagtgagtgcctcccgtctcttctacccgaaccccccctcccccccaagcagagagaccccagcagcagcagcagctgatgatgaagagagaggcagtggcagagggggggcaccttttatttctatttttaaagggacaggacactaattctaccccacttcaaccttgaattcaggggggtggggggaaggcggctgagttccttcccccaccctccagccctgagccctgagagggggattgagcctgagagaggagaaggagtttcttcttcttcgaaaacccccatccacgactcctaccccctcacccctccaactcgcctccctccctccaccctcctcctctttggccgtgagaggaggagagaaagaaaccaaaagcctcttagcaacacagaccctttgctgctgctgttgctgctgctgctgctgttgctgctgctgctgctactgctgctgctgctactgctgctgcttggccctggctggagacatctcactacacccaggagcagccacttccccagctctcctcctcctccttcgcctcctcctcctccactccccccctttattaccctttgtgtcatcctccacagctccagggaaggcactcaaaagtggggggcaggaaaggtaagtgtgtctgtgggggcttcattgccttcctctggctctgactttcactccggggcaacagtagcaccaaaccacatacgcagtggagctccggggtgaggagggggtggtgctggggggggtgaaggaggggttggagtagggaggggtgtgtgaggtggggtgcccatcctgtcaggggaggaagggcacttttatttttatttgctgttgtcaaaagtggtttctctcctccatctaacatctgattgtgtcttgctccagtgggggagaatacaaaaacaaccccctccttcctccaatgaggcgccagggaaagagacagaaagaggcacactttctagatgtcacttaaaaaaaattcattggagagctctttttctccaggaaaagctccactgcatttgtttctgagtgggaaaatgtcgggatctggattgtattggaactgcttatccatttgtagacctgagtgttttcccctttttggtcctgtatgagatttggatattgacttcagtgttggaagacttgattggtttttgctttaagggtttcattttccattttttcgttttgtctgacttccatggaaaatttcaaatttttagttggtagaggcctttggttaggttttgacttgcattattgctttttttttggttaaatgtctgtttcatatatcagtatataaagtccaaagctctaaaatgcttaaagtttaaatgccactgctattgtctgttcccacatacgttcctgatacttattttccatatgatgagaatattagctattttataattaatctgggtatatttgtaatctttgtaacttgtctgaacaagtaatccccattgaaaactttatgttgttctggctgcatggaaggccaaacctctccatcaatagtttgctggattggtaccactttcagttttagctgaattatttatttactgttgtaaattgagatgagtttttcatctcaatttctcttggggttctgaaccaaattgcccactgtatgtaaaagtacacaaatttctaa

SEQ ID NO: 3467 - DNA, 4001 bp, Homo sapiens
ttaagaaatactaagaaagaaagcagtaaatgattgccataaaaatcagtatagtgttaaccactgaaaagaattgaggaaagggatgatcaggaatagaatggagaggggagcttctcaggtgccacagacgttctagttcttgactgtggcagcgcttacatagagttcacactttatagtttttcattatactatgtatcgatgtttgtatgcttaaatactaaatgtatggaaaaagacacaaaatatttaaaattgtagctaaggcacattaactgccttgctggtatttttttttttcattacaaagtggcagacaattggttacactataaagacagacaattggttacactacaaagaaaattttaaagcacaggagtctagttttgattccatcggacatgattaccgtacacaatacagaagatactaagggctaagcaatgatgcataaacggggtccactgcccaaacttacagaaagcaaaacgtggaaaattagtaactttaactgatagtgtacacctaaagaacctacaccggccgggcgcggtggctcacgcctgtaatcccagcactttgggaggccgaggcgggaggatcatttgaggtcaagagatcgagaccagcctgaccaacatggtgaaaccccgtccctactgaaaacacaaaaaaattagccaggcgtggtggcacatgcctgtagtttcagctactcgggagggtgaggcaggagaactgcttgaacccaggagacagaggttgcagtgagccgagatcgcgccactgcactcgtctgggagacagagcgagactccgtctcaaaacaaaaaacaaacaaaaagaacccacccaacagaattaagtaccaacataataaatacgaagaattttagattcttggtttttaaaaaacatacaaagatgatattccttcaaaatatctttacaaaacatattgagactgtgatgctttatattgattgtatgaaaacaatgaaaaagaaccagcactgtttcactataaaagctttactaatgtaaatttataaatcctttcttaaatattttgagttaattctaattttatgatagaaattcattattttcagcaaaaacagctggcatttgggaaaccaaaggctcaaaaactaagaatagtaaccaaagaaacttgacaaaacagtccttttaaaactctcatctacactataaggggaaactttgatcacgtcccttctccttcatcaatcgtagaactcaacattaaggactacacaatcccacatccctctccgagaaaaagcaaaggctttgtgttgtagcaacaacgcaagacatggagggaagctccactcaagacttccctgcctgctccttccccaaagccactccagaataccagggagggttgagaggtaaggcatgaagggcgcaatatccaatatgagcaacgcgtgtgatgcatctggtcaaaatgcatacagaggacttgtctctgtccctagatagaagtcctccgtcctgcagtcatgagggtcaattgctgaggcttcacagttcccttctctcttacactcggaccgtcacgctcctcacctactaccccgatgcagaggtagactcaggatccctgcacttgtcaaggattcctcggcaagctcacggggcgggagtggccacaagacggagctcgcctggtcctggccttcccggcctatacaagcctgcccccttcccaattcccaatctccacagccttccatcctcccactttcgattcaccttgcgccaccgacgcccctggccttcgtttgcagcaagtttacccccaccattacctctcgcataaaagcctgcatttaccaggtcaaagaggggaaccaacgcctgcaggaatcgcttcaccgaatcgcctggccgcgtcctctgctagacttcacctgccgctgcggaccgtacacaaccactcccggcatgccccgcgcacgcactacctctcccaccccgcccctctcccgcccaaacacgtgacctcctttcgtctccgtccacgcccacttccgttcctccactttcccttaggaaggaggagggagctgggggtgttaaaagcgtagcgacttcctcctcctccccgcccccgctcctgtacctcccgctacaatgtcttccgggtcgctagcgcctcgacgccttctgggaaaatagctcatttcctcccctccccctcctcctgccttcaaccaaccagccacccgtcagagagggacatgcgcagtgagtgcctcccgtctcttctacccgaaccccccctcccccccaagcagagagaccccagcagcagcagcagctgatgatgaagagagaggcagtggcagagggggggcaccttttatttctatttttaaagggacaggacactaattctaccccacttcaaccttgaattcaggggggtggggggaaggcggctgagttccttcccccaccctccagccctgagccctgagagggggattgagcctgagagaggagaaggagtttcttcttcttcgaaaacccccatccacgactcctaccccctcacccctccaactcgcctccctccctccaccctcctcctctttggccgtgagaggaggagagaaagaaaccaaaagcctcttagcaacacagaccctttgctgctgctgttgctgctgctgctgctgttgctgctgctgctgctactgctgctgctgctactgctgctgcttggccctggctggagacatctcactacacccaggagcagccacttccccagctctcctcctcctccttcgcctcctcctcctccactccccccctttattaccctttgtgtcatcctccacagctccagggaaggcactcaaaagtggggggcaggaaaggtaagtgtgtctgtgggggcttcattgccttcctctggctctgactttcactccggggcaacagtagcaccaaaccacatacgcagtggagctccggggtgaggagggggtggtgctggggggggtgaaggaggggttggagtagggaggggtgtgtgaggtggggtgcccatcctgtcaggggaggaagggcacttttatttttatttgctgttgtcaaaagtggtttctctcctccatctaacatctgattgtgtcttgctccagtgggggagaatacaaaaacaaccccctccttcctccaatgaggcgccagggaaagagacagaaagaggcacactttctagatgtcacttaaaaaaaattcattggagagctctttttctccaggaaaagctccactgcatttgtttctgagtgggaaaatgtcgggatctggattgtattggaactgcttatccatttgtagacctgagtgttttcccctttttggtcctgtatgagatttggatattgacttcagtgttggaagacttgattggtttttgctttaagggtttcattttccattttttcgttttgtctgacttccatggaaaatttcaaatttttagttggtagaggcctttggttaggttttgacttgcattattgctttttttttggttaaatgtctgtttcatatatcagtatataaagtccaaagctctaaaatgcttaaagtttaaatgccactgctattgtctgttcccacatacgttcctgatacttattttccatatgatgagaatattagctattttataattaatctgggtatatttgtaatctttgtaacttgtctgaacaagtaatccccattgaaaactttatgttgttctggctgcatggaaggccaaacctctccatcaatagtttgctggattggtaccactttcagttttagctgaattatttatttactgttgtaaattgagatgagtttttcatctcaatttctcttggggttctgaaccaaattgcccactgtatgtaaaagtacacaaatttctaaaatatgttttcatgagtcaaaga

SEQ ID NO: 3468 - DNA, 4001 bp, Homo sapiens
tctagttcttgactgtggcagcgcttacatagagttcacactttatagtttttcattatactatgtatcgatgtttgtatgcttaaatactaaatgtatggaaaaagacacaaaatatttaaaattgtagctaaggcacattaactgccttgctggtatttttttttttcattacaaagtggcagacaattggttacactataaagacagacaattggttacactacaaagaaaattttaaagcacaggagtctagttttgattccatcggacatgattaccgtacacaatacagaagatactaagggctaagcaatgatgcataaacggggtccactgcccaaacttacagaaagcaaaacgtggaaaattagtaactttaactgatagtgtacacctaaagaacctacaccggccgggcgcggtggctcacgcctgtaatcccagcactttgggaggccgaggcgggaggatcatttgaggtcaagagatcgagaccagcctgaccaacatggtgaaaccccgtccctactgaaaacacaaaaaaattagccaggcgtggtggcacatgcctgtagtttcagctactcgggagggtgaggcaggagaactgcttgaacccaggagacagaggttgcagtgagccgagatcgcgccactgcactcgtctgggagacagagcgagactccgtctcaaaacaaaaaacaaacaaaaagaacccacccaacagaattaagtaccaacataataaatacgaagaattttagattcttggtttttaaaaaacatacaaagatgatattccttcaaaatatctttacaaaacatattgagactgtgatgctttatattgattgtatgaaaacaatgaaaaagaaccagcactgtttcactataaaagctttactaatgtaaatttataaatcctttcttaaatattttgagttaattctaattttatgatagaaattcattattttcagcaaaaacagctggcatttgggaaaccaaaggctcaaaaactaagaatagtaaccaaagaaacttgacaaaacagtccttttaaaactctcatctacactataaggggaaactttgatcacgtcccttctccttcatcaatcgtagaactcaacattaaggactacacaatcccacatccctctccgagaaaaagcaaaggctttgtgttgtagcaacaacgcaagacatggagggaagctccactcaagacttccctgcctgctccttccccaaagccactccagaataccagggagggttgagaggtaaggcatgaagggcgcaatatccaatatgagcaacgcgtgtgatgcatctggtcaaaatgcatacagaggacttgtctctgtccctagatagaagtcctccgtcctgcagtcatgagggtcaattgctgaggcttcacagttcccttctctcttacactcggaccgtcacgctcctcacctactaccccgatgcagaggtagactcaggatccctgcacttgtcaaggattcctcggcaagctcacggggcgggagtggccacaagacggagctcgcctggtcctggccttcccggcctatacaagcctgcccccttcccaattcccaatctccacagccttccatcctcccactttcgattcaccttgcgccaccgacgcccctggccttcgtttgcagcaagtttacccccaccattacctctcgcataaaagcctgcatttaccaggtcaaagaggggaaccaacgcctgcaggaatcgcttcaccgaatcgcctggccgcgtcctctgctagacttcacctgccgctgcggaccgtacacaaccactcccggcatgccccgcgcacgcactacctctcccaccccgcccctctcccgcccaaacacgtgacctcctttcgtctccgtccacgcccacttccgttcctccactttcccttaggaaggaggagggagctgggggtgttaaaagcgtagcgacttcctcctcctccccgcccccgctcctgtacctcccgctacaatgtcttccgggtcgctagcgcctcgacgccttctgggaaaatagctcatttcctcccctccccctcctcctgccttcaaccaaccagccacccgtcagagagggacatgcgcagtgagtgcctcccgtctcttctacccgaaccccccctcccccccaagcagagagaccccagcagcagcagcagctgatgatgaagagagaggcagtggcagagggggggcaccttttatttctatttttaaagggacaggacactaattctaccccacttcaaccttgaattcaggggggtggggggaaggcggctgagttccttcccccaccctccagccctgagccctgagagggggattgagcctgagagaggagaaggagtttcttcttcttcgaaaacccccatccacgactcctaccccctcacccctccaactcgcctccctccctccaccctcctcctctttggccgtgagaggaggagagaaagaaaccaaaagcctcttagcaacacagaccctttgctgctgctgttgctgctgctgctgctgttgctgctgctgctgctactgctgctgctgctactgctgctgcttggccctggctggagacatctcactacacccaggagcagccacttccccagctctcctcctcctccttcgcctcctcctcctccactccccccctttattaccctttgtgtcatcctccacagctccagggaaggcactcaaaagtggggggcaggaaaggtaagtgtgtctgtgggggcttcattgccttcctctggctctgactttcactccggggcaacagtagcaccaaaccacatacgcagtggagctccggggtgaggagggggtggtgctggggggggtgaaggaggggttggagtagggaggggtgtgtgaggtggggtgcccatcctgtcaggggaggaagggcacttttatttttatttgctgttgtcaaaagtggtttctctcctccatctaacatctgattgtgtcttgctccagtgggggagaatacaaaaacaaccccctccttcctccaatgaggcgccagggaaagagacagaaagaggcacactttctagatgtcacttaaaaaaaattcattggagagctctttttctccaggaaaagctccactgcatttgtttctgagtgggaaaatgtcgggatctggattgtattggaactgcttatccatttgtagacctgagtgttttcccctttttggtcctgtatgagatttggatattgacttcagtgttggaagacttgattggtttttgctttaagggtttcattttccattttttcgttttgtctgacttccatggaaaatttcaaatttttagttggtagaggcctttggttaggttttgacttgcattattgctttttttttggttaaatgtctgtttcatatatcagtatataaagtccaaagctctaaaatgcttaaagtttaaatgccactgctattgtctgttcccacatacgttcctgatacttattttccatatgatgagaatattagctattttataattaatctgggtatatttgtaatctttgtaacttgtctgaacaagtaatccccattgaaaactttatgttgttctggctgcatggaaggccaaacctctccatcaatagtttgctggattggtaccactttcagttttagctgaattatttatttactgttgtaaattgagatgagtttttcatctcaatttctcttggggttctgaaccaaattgcccactgtatgtaaaagtacacaaatttctaaaatatgttttcatgagtcaaagaaatcatgaacttatagttagtatattaatttcagttagctataaattgaaaggtaaatccagatttaagtttatggaataacaatattgataaaaatcacttcatttttgtataatgtgttcttagtgcatagc

SEQ ID NO: 3469 - DNA, 4001 bp, Homo sapiens
caaaaagaacccacccaacagaattaagtaccaacataataaatacgaagaattttagattcttggtttttaaaaaacatacaaagatgatattccttcaaaatatctttacaaaacatattgagactgtgatgctttatattgattgtatgaaaacaatgaaaaagaaccagcactgtttcactataaaagctttactaatgtaaatttataaatcctttcttaaatattttgagttaattctaattttatgatagaaattcattattttcagcaaaaacagctggcatttgggaaaccaaaggctcaaaaactaagaatagtaaccaaagaaacttgacaaaacagtccttttaaaactctcatctacactataaggggaaactttgatcacgtcccttctccttcatcaatcgtagaactcaacattaaggactacacaatcccacatccctctccgagaaaaagcaaaggctttgtgttgtagcaacaacgcaagacatggagggaagctccactcaagacttccctgcctgctccttccccaaagccactccagaataccagggagggttgagaggtaaggcatgaagggcgcaatatccaatatgagcaacgcgtgtgatgcatctggtcaaaatgcatacagaggacttgtctctgtccctagatagaagtcctccgtcctgcagtcatgagggtcaattgctgaggcttcacagttcccttctctcttacactcggaccgtcacgctcctcacctactaccccgatgcagaggtagactcaggatccctgcacttgtcaaggattcctcggcaagctcacggggcgggagtggccacaagacggagctcgcctggtcctggccttcccggcctatacaagcctgcccccttcccaattcccaatctccacagccttccatcctcccactttcgattcaccttgcgccaccgacgcccctggccttcgtttgcagcaagtttacccccaccattacctctcgcataaaagcctgcatttaccaggtcaaagaggggaaccaacgcctgcaggaatcgcttcaccgaatcgcctggccgcgtcctctgctagacttcacctgccgctgcggaccgtacacaaccactcccggcatgccccgcgcacgcactacctctcccaccccgcccctctcccgcccaaacacgtgacctcctttcgtctccgtccacgcccacttccgttcctccactttcccttaggaaggaggagggagctgggggtgttaaaagcgtagcgacttcctcctcctccccgcccccgctcctgtacctcccgctacaatgtcttccgggtcgctagcgcctcgacgccttctgggaaaatagctcatttcctcccctccccctcctcctgccttcaaccaaccagccacccgtcagagagggacatgcgcagtgagtgcctcccgtctcttctacccgaaccccccctcccccccaagcagagagaccccagcagcagcagcagctgatgatgaagagagaggcagtggcagagggggggcaccttttatttctatttttaaagggacaggacactaattctaccccacttcaaccttgaattcaggggggtggggggaaggcggctgagttccttcccccaccctccagccctgagccctgagagggggattgagcctgagagaggagaaggagtttcttcttcttcgaaaacccccatccacgactcctaccccctcacccctccaactcgcctccctccctccaccctcctcctctttggccgtgagaggaggagagaaagaaaccaaaagcctcttagcaacacagaccctttgctgctgctgttgctgctgctgctgctgttgctgctgctgctgctactgctgctgctgctactgctgctgcttggccctggctggagacatctcactacacccaggagcagccacttccccagctctcctcctcctccttcgcctcctcctcctccactccccccctttattaccctttgtgtcatcctccacagctccagggaaggcactcaaaagtggggggcaggaaaggtaagtgtgtctgtgggggcttcattgccttcctctggctctgactttcactccggggcaacagtagcaccaaaccacatacgcagtggagctccggggtgaggagggggtggtgctggggggggtgaaggaggggttggagtagggaggggtgtgtgaggtggggtgcccatcctgtcaggggaggaagggcacttttatttttatttgctgttgtcaaaagtggtttctctcctccatctaacatctgattgtgtcttgctccagtgggggagaatacaaaaacaaccccctccttcctccaatgaggcgccagggaaagagacagaaagaggcacactttctagatgtcacttaaaaaaaattcattggagagctctttttctccaggaaaagctccactgcatttgtttctgagtgggaaaatgtcgggatctggattgtattggaactgcttatccatttgtagacctgagtgttttcccctttttggtcctgtatgagatttggatattgacttcagtgttggaagacttgattggtttttgctttaagggtttcattttccattttttcgttttgtctgacttccatggaaaatttcaaatttttagttggtagaggcctttggttaggttttgacttgcattattgctttttttttggttaaatgtctgtttcatatatcagtatataaagtccaaagctctaaaatgcttaaagtttaaatgccactgctattgtctgttcccacatacgttcctgatacttattttccatatgatgagaatattagctattttataattaatctgggtatatttgtaatctttgtaacttgtctgaacaagtaatccccattgaaaactttatgttgttctggctgcatggaaggccaaacctctccatcaatagtttgctggattggtaccactttcagttttagctgaattatttatttactgttgtaaattgagatgagtttttcatctcaatttctcttggggttctgaaccaaattgcccactgtatgtaaaagtacacaaatttctaaaatatgttttcatgagtcaaagaaatcatgaacttatagttagtatattaatttcagttagctataaattgaaaggtaaatccagatttaagtttatggaataacaatattgataaaaatcacttcatttttgtataatgtgttcttagtgcatagctttaaaattcagtgctgtattttatttcacaaatgttagaaagtatgtttctgatgtaggccttttactagggcttatattggaaagtgttattttgtttcatatatacatttctttattctttccttgaagatggatgcacacatgcatatacacacactctctttcgctcgctctctctccctcacacccttttttttttttttgtaactgcattggtatctctgatcccataatttatgtcagcaaaaaatattcttctgtaaagcagcaattttgtgatcagactggcaatatgaaaacagcaatttgatcaactagaaaggattgaagaaatataaatctagaaggatatttggcaaaaatattataaagacatgataatacttctaattttttattttcttgatggttaaagctaaaacatatattttagtgacagtgaagcattgcatatgtagaaacttgttctgtaaaattttaattatcaactgtgtgcaaaagtagacatttacataccgaaataaaaaagctttatagcagtaaacaatatgatcttatttcccttctgttataaatttgaacaattttttacctttctctgagatgtaattagtgcacttaagcagaaatctgtgccaagttcaagtttttctcccaacatcaatactgccattccaagtccttgtaaggtttcttgttctcacctt

SEQ ID NO: 3470 - DNA, 4001 bp, Homo sapiens
accactaaacttaaaacttttaagtgtttagtataatgtgaaattcttaccagattatgtataatatttgttaaagtccaagcaacaggaacactgaagaagggaatgctgagtaagacaatatgaagcaagccaactcccaatgcatatgtcagccacataccccggctgttcatgacacgggtatttggattcacttcactgtgggcaactccaacgttcatgtttgctctgtaggaagtaatgaaatgaatcaacactgatacaactggcaacctaacacccccaattctgacatgacaaggtacctgtgttgcgaggattattttttcctagttactttgaagtagcacacaaacaccatccaaaatatgctacttgtagatgctgatgacagcagtaaagaatcttcagcatttgactttagggtaagacaagacttgttattatggttctatttgaaaaaatagttacaatgcctttccaaaagtttgttttctagcatgttgttttactgaataggaaaattcaaactgaaagagaaaacctacattttcttatatcatgagagcaaagtgaaaagccaaaagctaaatttaccaacataataaatttatattaaaaagaaaaagcagaactcaccgagccagtgtgtcaagtagtcagactcttatatttgacttaatgtatccataaagaatggtcagagttcagatcacttctttctgaatactcaatgtggaaggtacatgctgttgacataatgtggtgtaaaatttacatggtcaagggataatgtttgtttctcaattttgtgattaaactaggtgaaaataaggagtcttctgaatatttctctagtcaaatcaaaaacttcagttttctttcttctttttaaaaaaggttttcccttctcctttccattgaagatggactccaaaggaagaattgataatagttctcagttcttttaatgatggtgtttacttgagactaagaattgcttaaaataaaactgtcctgaagaacacctatcatccgacggagggggaaaacgaggctagattatatttggaacagctgtgattttaaaatacacaaacgcttgtattacggagttagcatacagagaggaatttctcataaccccttccagcaaatgtttccggagtataatgctccttccgctctagagacccatagaacaggcatcaagggttaaggggacgaaaagttagttacactaagaccgctaaagcctccaatttatatgtgtaaatctttcgtctaaacacccatgatttatcatacattaaactattatgtcatacttagaacatgccaacactcaagatagttttcccacgttccacaggatggaggcctgaaatttacatctcagctggaaggcaaagctggtgcggtactcatcctattccaaccagaaaaccttttcccagcaggtttgccgcgctgcccacgactggcaaacaatgaccttacagaccgtgaagaggctgttggctctgccctcgccggtgcctccgaagacggcgacccgcagcggcccctcaggggagtcccccctgctagaccgacagcccgagcgctctgggccagagaaaactcagcaaaagccgccgctgctaccacctcagcgcctcccccaacccgccccttccttctcgcggccgcacgtcacgtcaggaccctggcaagacaacgaggatttgcgtagggggcgagcctctgaggccacttggctcttacggccacgcagggcgccgcagatgcagccggagcccgcttttccctctcaggacgacccctaggccgccagcagttccctaccgacgaaggcgactgtacagcgtccaccgcgttcgtgcccacttacccgccgccccactccgggccgccggctcgcagcaggaccagcccggctgctacggccgcggatacacgccctcaggcccggcgctgcgcagcttgcggaagctttcccggacagactcgctgccagcggattggctgcgagcagcgccaatctcacgttgcccccgggcgaggcgggactcagtgccgcgctctctgcacccgctctgccgcgcgcgtgcgtgctgggtgcgggtgcgggtgcggggttgggcctgcgcatcgggtgagacgctggctgcttgcggctagtggatggtaattgcctgcctcgcgctagcaggaaggtagtgtggtgtgactaacgggtatttattatatcctcgatggctcgagggccccgtcccctctactcgtcctggtccgggcgcgaacgctatagggcagctaagggcgctccccgcggggcgggaagcgaagccgggcttgcgggcgcgcacacgtggaacgcgttttctgagcaggtctgggctccggggtgttctggcttggtctttgttgcgtcccattccccagacccttctgggtggaggacttaaaatttgttttccaggcagcagatttaacccatggcaactgtaactcatcttgtgtgagtggcggtttatagtattgtatcctgtggcatcatacaaggggtgcaagttaaactctttaaagttaatcacgatttttgctcttggccttctgggtttatccgtacgccgaagacaggcacctgtattacatgctaaggaaatgtgaataccaaaaattgatcctgaggaaagtcttgattaggtttttttggaatcgcctttgaaatgtaatttccctcaccttggcagtgcagaaagtttgtgatttttattgccgaaatagctttcaacattttgaaattgacttaagagaatgttggctgtgtatgtctgtatcttgcatttctgttggctttgtgaacctaattgttttggatttagtctgatctttaaataaatgatttctttgtgttctctctaatggaagtctgtgagttctctgatctttacttcttttttaggcacacctgttgtccttaactgactttccgggtcatcagcacttcttcagaagtgttccttttccctcccagcaaatatggaagactgactatcctgatattcccagacattctttgctgtgatttgtaagcccgatataaacccttccatttggtacacatatggtatagagtgctatattccaggggctatgctagcgatgtgtgattgatataaaacccctgtcctcaaagaactctgagtcaggagcaacagacagaaacacatattaatagagtaacttgtgatgaggttaattagaaatgaggtaaagggggactgcaggggaaggaatacctaatctgttggcaggtgaaggaaaggaggctgcagcagggaagaaaggcttgaagagttgatactgaactaaatctggaaggatgattagaagtcagctgagagagaaccatgtgagctgaggaaggagtgagtgtcaccatgttaagagagacaagttggctgggcacggtggctcacacctgtaatcccagcactttgggaggccaaggcgggcggatcacctgaggtcaggagttcgagaccagcctggccaacatggtgaaaccctgtctctactaaaaatacgaaaattagccgggcgtggtagtgcgctcctgtaatcccagctacttgcagggctgggacaggagaattgcttgaacctgggaggcagaggttgcagtgagccaaaatcgctgcactctggcctgggcaacaaagtgagaccctgtcacaaaaaataaaaaataaaaaaagacgagctgtgcagtatgatcgccctagagcacatttgggcaacgatgggatgactgggagaggaggcaaaaatccagttgttaagaagtttgtacttaacctggttggcaattggaaacctttataaaaattttaagtggggcagcaacatgatgaaatttaaatacagaaagaaccctataggtggttgagattcgagtcaaaatatcaattaggtggttattgcagtag

SEQ ID NO: 3471 - DNA, 4001 bp, Homo sapiens
catagtaatctgaaactgaggtaccgccaaaggtaatccatccactgaatgtataatggcgttatcaacattgcatccaaaaatatgagcaaaaccagaatttttaggctttctaaaagcctgaaattttaatttcaaaatatttcatttttaccttaagaaaaattattttttagggaaaaaatatatgaactcctactgcaaaagaataataataataaaatccaccaatcagggcctttcccaatgagggctatgcatattctctgtaggtgattattgctgaattacactgcagcttcccttcgaccttgggaaccctgctaactctcagagttactgcgaggtcttctgtttcatttattattagtctttgtctccgcaatgctgtagcatgtgatagaaatatcaacgttgtgagcttgcagtacccaaaactgtagaaatgtttccaaaaaataaagcgggggttgggggcggggggaaggatgaaagaaggaaaagaaacaaaaacaaaacaagaggaaaacaaagttaatgtattaagatgggaaatttcttatttttaccttgtgaagactacatttcctaatcagcttagtgatatgtaaccattagtatgcaatttttaaatttaagaaaagatgtccaagaaaattatttagaaaaaaaaaatcacaactgaatataatagacaattggctaaacttagcccagcaatttaaaaatgaaagttcctatagaaaaaaccttacaggattttgtgtccagaagagagaaataatctggcaacccagtgggttcacttagtttcgtgtcatttgcttcatgtccattatgtaatgcttcccctagctttaggtctctatgtttaagcaaccgttcaggtatatcatagaattgtcacaaaatcagtatctggttataactttcaaaaacagcttaaaaggtgccttgcagatgtgtctatacgcagcagaagctttggggagaaaatccgcttgtgtcattacttctccaggctttctcctcaggtctcccattccctcctcccccagcatccccggcgacacgatctgcgggcagctcccggcttgatgcaggggaagcacgtcttgactgcaatgcaaacgctgtcccggtctgaaccagggaaggcagacttggccctggccgggggagtggacggaggctgccgggagggctgcaggggcgccagcagcgggtgggcaggggtgccccgcgagggcagtccgcagtgcacgcgcacaataaaacccaatgcacaacttccccagccgctcctctcggcttccccgattccctgaaaggtgcggcgtaggcgttagctctcgcgggcgcgggcgctctcacccgcgccggttcggttttccgctgacaattacatcagtccttctccctgcccctgcttcaatccccaggcagcctgcggggagcaggggcgccggcccgcgcgagggaatgcgagcgctagtggcaggcggccggaattccctggcaacgagggggagggagggcggcaaaccgggaccgcgatacagacgccccctcccatcccggccgcgagaatgggctgacaccgccgcccccacttccctgtagcccgggctatcggccgggggcgcctccagggggacggcgatgtcctggggacccgaagctgcggctgcccacccacgcgtccctcggggtcctcggcccgccggaggcgcacaatgcccccgggccgcgatgcgggcaccttggcgcccgccccaagcaatccctttgcagctaggacacctacctggagggcgagcggtggcgccgcggactctgcggcggctgcgcggctgcgacgggaggcaggaggcggagagccggccccggcaggcggactggcgcgcgggctagtggaggagaggaggcatgggcgccgcctgcaccgagccgcgatctccagcaccgacagcggcggcggcgaccgtgctgcgcctccagtggtccgctgcgctgcagcccctcctctcccacgggcggggcgcgctggcggggcggcgctccgggttccccgcccccggctcccgcccgtccgcccggctggagtggagcggcaagcggctggggctcatgctgcgcacccgccctaccgggcgcccctccctgcgccgccagatgggctaaggacccggcgccctgcgccctggtcacgcggggtcccacagccagggctctcccctggcccggcctccgtgggaacccgtggtgtcccgagatcacccgcagtggaaaccccgagttgccatccgcgggcctgcgcgcagtagcggagccctcgccccgcgcagtccggcggaggtgagccggccgcgctcgggagggttgcccagaacggctccagcgctcggcccaggagcgccgcagccgggagcactgcgggagaccgaattccgaaaggaacggctgcctggcggcctccgctcggggctgccaaacccatgtccctgggcgcccttctgaggtcgtcatttcatacacttacgcgactgtgcgtgcctgctcccgtccctgactcgctcgggagcaaaaacttcccgggcccagagaaacacctgggttctgcgaaaggaagagccggttccttcaagcccctggcaaagccgatcaaagtcagtcagtcccgcctcactacaacccttccacacccttaaacccttccacactccaagccactcccggcctgcgttcggtgtgcagattaatctaaaggcaaatttgctgggagggacggggtaatgtaaatatttgtacagacattctgtaaacgagtgactgcggacatgtcaatatttcaagacatttgtgtcatcatcatctgggggtgggaggcggagggggagtccagaggacatcgactggacttaatgggagctattacagaacatgctggggtgccttcaaaaatggaagatattgcttactaatgaggcaactgtgatggcatttcattgtgccctgtgctgacaaaatgatttgctatgaaacatagtcgactttatgcactccttcccacatgcagtttctcttgaatctccaatctcacctgttggattagctttttccatctagactagcaatgttctcatgtcctctggtcacaaaataatagatgcgggaccctgcgacaatggcagtttgtccttcattcctttgctgtgaagacaggctcctcaagggagcagctgggatgctgacctctgcttcatcacagccaccctttctacttactccttctgagttccattaacagaaactctactgaaatggctttctcccttaaaagaaaaaaagctaaaacccatgtatttaaaaagaaatacaaaagtgtgaacggaaatgagagtacacacagcacacagaatctttacctaaagaagttctctaggcccggcgcggtggctcacgcctttaattcccgcactttgggaggccaaggcgggcggatcacttgaggtcaggagttggagaccagcctgaccaacatggtgaaaccccgtctctactaaaaatacaaaaactagcagggtgtggtggcaggcacctgaaatctcaacttcccgggaggctgaggcacaagaatcgcttgaacttcctgaaatctcaacttcctgggaggcaaaggatgcagtgagctgagatcgtgccactgcactccagcctgggctacaaagtgagactctcaaaaaaaaaaaaaaagaaagaaaaagaagaggttatctaattttttctctgaacccctaatagcagagaaccataaactatggggaaagagaggggactaccacaacctaaatctcacgttttagtgtaagaatgttctcacgcttttcactctattccatagtatctatgtgtgttttaatagttttaaaaaatggctttaaacatcaggggaaaaaagtctccccccatctcattgattaatggtcaaataagaggta

SEQ ID NO: 3472 - DNA, 4001 bp, Homo sapiens
caaaaaaacgtggtaagaaaaacaaaacctggaaagaaacttgaccttagtaactatgtaggcaggaaataaagtaactaagctagggaaaggaaattaaatcccctaacttccaagtcaagccatagatatagaaatcaatgtggtatatttgaagtgtgatggaaataaatttttcctgtatagatacgaggggatacttaagatgttgccagaattatgtgggtcagaagggttagttagcaaccacacaaaccaggacccacaactgtaaaatacctaccacagtacctagcacaaagaaaacaatattagtctcttctccatttgatgttacaaaacagtttatattatggaagaaaaataagaagttcaatcacttcaaatatagcacaatatatctaaaccctaaattctgttgatttgtcaaagcccagagaatcataaaaaacatttagtgagacatagcaagtaaatgaatatttttattatcactaatgtatgtatttgttactgaaaaagttaaaggacaatttagaaaactaccagctgctacccattattgtaattgtaactagcttcaaaaaataagctattccatgtaacctccaggatgacaatgaagaagccaacagctcttgtagaaactcacgagtctagaacctatcattgtctattcaataataaaaaattaatccactaccttgaattttctccaaactcatggttttaaaaaaagcataaccctaaagttatgtaattatataccaagcaatttgttattttaaatgaaatatctaagtaattgaatgttgtatttttttacaccagcagctataaagaagacagtttaaactgaccatacccagtcctggcctctagctagattgagtgctccttgaaggtggggacaagctcatcttcatcctggaattccatcttctctacccgtaatccaccccatcctagcacaacaatctgcacactgaagccagtcaaaaatgtgtggaattttttagtgctaatttgcagagaacagtccttcagcaatcaattaccttccagctttatcttggaattattattattatttttgagacagagtcttgctccatcgccaggctggagtgcagtgacacaatctcagctcactacaacctccgcctcccgggttcaagagattctcctgcctcagcctccagagtagttgggattacaggtgcgtgccaccacgcccggttgtatttttagtagagacggggtttcacaatgttggccaggatggtctcgatctcttgactttgtgatccacccgcctcggcctcccaaagtgctgagattacaggcgtgagccactgcacccagcctatcttggaattataaaaatcatgctccaataggatagaacttttgaaaacagttaaaaagcctaagttttaaaacaggaaaatctagcggattaatcacagaactcttacttattcaatttaaagctatgagtagtcattagggaacacatcaaatttaatttcatgacatcttcagttataaaaatcagttcttttcataaggcttcctttaagatcataatttgtggtataatttttgtacttttcttcacaagatagctgttttcatattctttcagagtgaattggaaacacatgccactactttcaaggtgttacacacattatgtaagcaagttaaataaagggttatgtaaaccagttaattattcttctaaaatcaagtttcctctcaaatgctaaaattataagttaatttccaggtcagttttttaaggaacttagaacacacagagaaggtggaagtacttacccgccctctgtttcccctgatcagagataactgatgcatatttagcttaaaaccaggaacctggaacacatatttcactgtagctctttaatttggtaaaaatatgctcctcaggttagtgttcattgatctcaatacctcctgagcagcaagtggaaatgtgccaacatgactgtagtctagtttacttggtatcaaagacataggtaaacagacagacaatgagacacttaataatagctgaatggtttggtgcaactcacgcggagagaaacgtgattctcaaaatgagagtccaggagatctgttgaatagggatcttgtcatttacttacttaaatttcattacaaagatataaagacattgctggaaatgttttagactgaggctacaaatttctttacagactcactttttctataaatttaggacagtagtaaagagaattggtccactgctctctgaatgttaactccattgaaattgttcacctaactatcttagctaagctatttttatattcacagattacccaaaatattttcaaagaaaaatatccaaaataatttaggaatttctaaagtacgttcttcaagctttcagctatctcgcatgtatctcttctagttatagctgctactttgaacgtagcaacactatttcagtggtactagtaacttctgtaggatagtgttgatgataatgatgacaatggcagttaatagttactggtttttacattcctatctctatgctttacatgaattattgcattccatcttcacaagcctttgaataatgactatttaatgatctgcctgactgaccagataaagggatatagagattaagagaggcacacagtcactaagggttggagttggaaggtgacaagattttactcgagtcaagcttgtatatatggccttctgaattaacatgaaagctaatgtcaaatgacaaaaataacagaaatttcaaattgataaatgaacatatcacaaagcattctttaccacaatcttctgtggatatagagaagtagaaatgagtgaaataaaaaagaaaaaattatagcactcttaaatatggtacaatcttagggataatttctttgttacccttacagcacactcaagttaatttccaatttctaattttattttattttcaaaaacacactcaaaccagacaatttgtaattttccagaactgagagcaagtcagctagcttttactttgggggtatggtgtatggtgcagacaaaagaacataaattttgcagctctacagaccagcataccaaccctcatctgctatttactatgacacgtagacaaaccattaacctctttcaacctcagtgtcctctatctgtaaaatgaggataataatatctaccttacaagacactgcaagtcacagggtaggcatccagtgtatgcacagtgctgcccaaaggctggcacacagtaggcacccaataaatagcagctatcatctcagttataaacattacaggaataaatatctaggaatcttacgcattcccatgccacagaaagatgactttcaaacactttgctggtgtctgacacctgggagcccttttggaagtgaggaagccgtgccttccatgaccatcacgttacccagcaaacccagtaaccatggtcagcatcacctcatgatcaggacatcaaaatttggtgagagagctgtcaacgtgagttgagagagatggcctagatattctctaatgggaaggcaacagcagtgatggcggcatagattgcatccttctgaatgcctgcagcagaagatgcatgtggattttccttcaaaacagttttttctttgcactagcataaaatattaaaatcaccaaagccaaaaggccatggctgaagaagtagcaattatactactttctccattatctggccttcactgaaagatgcagaagtgcattaacagtaggtctctatataagcacccttaaaatgaatgaaagtagaaaattttagaaacagtggctgaaaaaagtctacacagcacacctgggaaattctgaagggagaaaagcaaagtgagcacagtcccatcccttcctgcacagaattatgaatcaaccactatagcctcaccattgaactg

SEQ ID NO: 3473 - DNA, 4001 bp, Homo sapiens
tcagtttcttttggcaacaggattagttaaggttgggaccttattgtgaagacccttaaaagccaggatgaagtgtttgaggttttctatagcagttattaaaagtgtttgcaaaaaggaataagacagtagctcctgaaaacttttatatatgacaaatacaaaagaatgattttactttttccaaaaaagtggaaatgactaagataatgtctacttactttaaatgaacttcagtttgggaatgtattgcttctcccaacacatttccagtttcatccaccacagcagctgctgtatcatcacaactagtttcaattcccaatactattttatgaagaaatagtgttccaggatgaaaattaaaacttcttaaaaattcataaactttcctttttgatggtttaaaaaaaactcctgcagtcttagtcaagattagcatacttactctatagataattcctgaaaaagaattacagaaacaacttattatttgcaactgacattagccagcttatttttcaatatatagttttacagaattacaggaaagtttgtaaaagtcaccaaaagtttgtaaaggctatagcaacatgggaatataaataatattatgaatgaatataatgttctccaagggggaaaacaggggtcagatataaaattttttagtattattattacttgcatgctgttcctaccaaaagacttactattaagacagctaatataaagtacaataattgatagagtcctctgaaaagtgctatttattttttgacagctaaaattaagacaaaatgtggattttctaaaaagaatcaaacaacaaaggcagatggaacagataaaaatactgttaatgtattccatctcctaaaaacatctttcaaaataaaactggatcatttggttcaaaaacaagagttaacataaacacacacacgccaactgcaacctaacacctattttatccttaattgcaatctttggaattaaatctccactttttgctacaggttttgtcataacaaggatcttcccaaatccttttcccccaaaataatagcagcccatcactaaagcacactagtattttcacactgcgaagcacctaattttatgcccccagatcatccgttctaaaactttctgggtgttaaagcagggcctttctccaccacactaaagggacacggcatcccagggattagagatgagcgacctatttgcagaaggcagttgcgggcagtgcagcccagacagacacaacctagaggaattagatttgcattaacaaaatctggacaaggaggattgtacgaagcactaccctttcgggccaagaaagctgcaggctgaacccacgtgacttgggtagcgctggtctcctgtcggctgtaaggcggcgacgggcgcaaactggaaccgcttttccaggtgcgcaaaagcgtcagtggggtgaagagtgagcaatttcacccaccttccacttgggcggcagtagctagcacttgtctcctttccctactaaagactgtcgactgcccttatcgctgcaggagaaagcccgaacctggcgcccggaagtgatgtcatcggaactgtgcaaggtcccgtccagagctggctgctgttccgctagcgagcggcatgcttagtgaagaaaagcttaaaggccgtctttgcccaaaacgctctctgtgcgcacctgcatttcccccagatttgcaggtgatgagagttctgtaaaattacacagctagtgactgatccagcggaggccgaatacaggtttgtctgactacacaacatcaagttccaaacactaagctacattaaaaagaaattttttttttgcccttggctggaatttggttgctactgtgagaaaaggatggggtagattattcgtcattcatttttaagggaactatcatcaaatctaaacttaggggtgaggtacctgatactttcatcggagaaataggatggaatctagcggcgccccctagcagggttaccaaagaacggaagtgtttctcatcggacagtgtaaaccgtttctcccacttcactaggaagaaaggggctggcttatttttacaattaaaaaaaaaaaaaatcgggagactgaggcaggagaactgcttgaactgggacccgggaggcggaggtagcagtgagccgagatcgcgccactgcactccagcctgagctacagagcgagactctgtctcaaaaaaaaaaaaaaaaaaaaaaaaaaggctgtggtaaatattcagttgccttaaaccatcctattttcataatgcattatgttgtccttccttactatgtacatgaaattcagcatggtatgttttcaaagtcttgcacctgcttttttttttttttttcttttattggtttgtgaactttgttttgaacattggacagatttattccaagagtcaggcttttcccctgctggtatttaagattttagtaagcaaggaccttagaatccactgttgtacagggctggcatatatacctgcactttgcacgttgtgaagctctgggtataaaagatgagtaaatcccataacaacatgttgggaagccacagagtacagtctagaggtggatacagataaataagtaaataattaccagaatatggttgaggttttttatttggaacttatgtttttcaaaaatttcatttatgtgtaacaataatgataaagtggcactatgtaccaggcacctgctgtagattaatttctttcaaaatcccatgaaatagtttctgtcctcattttacaggcaactgggccacagagtttgggtgctttggaggtcacacaactaggaaaagcaaagctaggattagaagtcaggacatctggcactggagtctgttttcttaactgctagaagagaaaataactcacattttctctagggtgcactgttggcctaaacaagggaaaaaagaaaaattaaaacctaaaagttaagaaaaattagtcatacggttagagaggtcagagcttatttctgttatacactggaatccagtttgaacataaaacctttcacatcaggtattatttttcttacaattccaattatgttcagcaagtatatcccaatgctcttctgtgctgtcaagacaagcaagatcctattgtgtgtgctatcattggtagattcctcgtctaggcactcttggccagtgttgagtccgaatgctgttattatgtgaaacaggagaactctagggcacattagtatggaattttatctttcccttgaccgaatatatgtaaagtggcacttatacaagtcccatgtatttagcaaagatatacattttttatgttctctattgtaacataggagagggttattgggggaaaggcatgtatgctctctgaggcctgtctgtacttttatgcagatagttagaatgccactcatgggcattctcaaaaaatatggcctatgtaagttcaacataaatcgagagttccagctgaatctagatatgcttatttggtctcagatattgtgtgtctagctttccatttgtagccttcagaggaaaattttattattaatacatattatatattaaaacatataagaatctttctttttttttttagatggagtctcactctgttgccaggctggagtgcagtggtgccatctcagctcactacaacctccacctccggggttcaagcgattctcctgcctcagccttccgagtagctgggactacaggtgcctgccaccattcccagttaatttttgtatttttagtagagatgacatttcactatgttggccaggctggttttgaactcctgacctcgtgatccacctgcctcagcttcccaaagtgctgggattacaggcatgagccaccacgcctggcccaaatcctatttttcaatatttatttcctaattatgtcctactaggttaggttttattttcatttgtta

SEQ ID NO: 3474 - DNA, 4001 bp, Homo sapiens
agggcgaatactttcgatctttaaacacaggatggaaaacccttccccaggctaggcacccattcctcaaacagcttgggcctcaggacctgcgggaaagaataaggggacccgaccacgcacagcagacgcaattcgcgctcgggatcccgagtccctgcgcagtgcgggcactcgcgtccctcgcgcggtggagcgccaatcccaggtctgcggccagtcctatgctgggcattaatgaagtgtgcagagtctattaaagtggtttattcggggctaattgagcgtgagcaagttaactgcttgcattaatgagaacgggagcgaactccacgagtttgcgcctgggggagcccagcagcaacccaagaaaatcagccttgacatcgaatctccaacgagtggtgacaggcgtccggacccccgtgaagaggactgaccggcaccggatacttctatagcattctcccaacaaacgagatctaacgaacccattggcaaggcggtcatccggctgcacttaaatgtccgctgcgtcctcggtgatccattccccaatcttaataaaacagcaattacctcgaggagcctgggatggaacatctacacgccgccggtcgctgctagtcccctccagcgcttctcttccctagggggttgtgaacctgggacacctagccttgcacgtggttttgttccgcagagccaatgcgcagctcttagcctgggtgaaatttaccaaattgtggcaacaaagaaacccttgcggctactttacacattgagaacccaacccgctactgcctgagctgctgaaaaaggactaaacgtggtttttcattcttctccgagacatttccgaggagaaattagttcagcaggcagcccttcacccctttcccccttctttctctcctgacggctggattagcggacagtcaggggagtaacagaacttttcctgtccccagcccggagaccctagggctccacagagtttccactagtgctgtgtgtgggtctcgaattggaaagcagtgcttgcgcccactgcattgcctccctgcaccaggacaatcaagggttccgctccaggccttgacgacacagagcaatcatcctatggagaatatccctaagttagagcgcgagtgcaaggcggggttcagactcgcagccctgcgctctcgggtctaggcggcctcatactagagcgcaactcctcaaaagacaaacttgaacgaaagcgctaccgagctggggcatgcacctgtccctggcgcggtcggctgcggctgtggccattcactccctctcccttccttcttcgtcaacctgggcgtcagccagagctaggagcgcgtctcaggaaagtttgtgcccgctgaagttgctctggtttcttaaagggggcccacagattgactttcaaagtccgtgggcacctcgcccgtgattccgcagagccgggcgggctggccgcagtagcggaggcccgccccccttaatccccagcggtcagaggccgaggaccccgcgcaggaagtcctgaggcagcacccccaaccaccctgctctcactttcacaaaagtcctacagcattcgtttggcaagagcttccttcaggggcattgagagagaggaggcacccgccgagcagtgacaaggaacctgggagtcctgcccgcattcgctttgctgagcccaggcgcccaggactgcaattaccttgttccgcagaggtcctggggctgagcacgtctctggggctttagctgaaggggactggggaagccggaggccctggagcccacaggcgcccctggagctctagtgtcccgactcctctcctgccgcggggactccaagcgccggacacgcgggagcgagcgctcagcagccccggatcctgcacgccggggacggtgagcctcgctcgcggctccctcgctgggtctgaaccaggagcagctgagaacgtgccggggagaggccgagctccgactcactcatcccttagcaccgagccgcctacttattttaatccaccaccctccctcctccaccacccccacccccgccccttgcctcaggattcctcccctccctcccctgccccccaaccctgccctgcgcctgcgcaatgaaagacaaagtttttgctgacccgggcagcagactttggcagctgctctcgcttggacccggcctctcccaacctgcgtcccctcctcttcagtcccgcgcgacccctgctgcctttttaggtccagagcggcacgcctggcgcactggaggaaacggtccctagcagatgagagcgggctggcaccgcacgtttcgaggtcctatacttgggctcctaggacacagcccgtgctctttgggaggagggagggaggggcagtagctctgtgcaccgggatccccacaccgcggcttgggtttcaacgcactttggcgcctgacagagtcgcatctcctcccagaatctctttccagaggcggcagaccccgagtgtggagcagctcctggctatccaagcgtgctcggggccagggtgttaacccaggcagcgctggttaattcctggtgcgggagggccagggtcaccgaagcaagcgagctgtaacatctgagtgcttatggttgaccccagaccctaagttctggagtccagtagaaagaacaaagagtagggaaaggaggtcaggaaagttattttcctggggcccagaactctctgagatttcaccccaatgcacagtggcactctctacttacatatttgttttaggatggatcagagtttagagagccgcactggcaagctagacgagctgcaaagttgtcagttccagggcctctgagtcaaggagctggttcaggtggagtttttaatcggaaaggaatcagagttctggacattaaaaattctatcttcattgcctaggcattatggagggtaccatcacccccttgactacccatctctgaaagctgacctccggctgaccccagcccaatccctccctaatgcctttctggaatacccttccaggccttgggtttggcaaggaggagtcactggtttcctgggacttgtgtgggtccagatcacacaactgcactctctgcctttgccccagagttgctgctgagtgactcttggagctggatcctagattccgtgggtccctaagtactgtactgcttctctcccgaggagcttctgctatctccagctttggtttgcaaagctaatctgattttcttgggaggtgaagaaggttgtaatacctgacctagggagatggtaatgaagactcccctccctcaaaggcatagttgaaagaggatttccttatatccccaggcctttagaacagaatctagcctctaacccctgggtaacttcgtcttgtttgaggaggagtaagagggggtgcaatctttgctccaacgaacagcttttacccagtgcctcaggttagtgcagaagtaagagattcacataagtttgtccatgctcctggaatcttagcagttgctaggatgtagtgacattcttgctagagtaagaacccttggaagagaagagagctgagatcacacctccttcctagagattccagaacagaaagcttcaagggcaaggaaaggcctggagggaaagtctacacagggcaatgctgaactttgctggcttccaccttgggcacagggagtgtgcttgttccagcctcaggctctccaaataagcaaagcttgggtaacctccattaccagcagcaaaagttaagaagtaaaaaaaatgcccacacgatagggcctctggctgtccagatcacttaggaatagtggctggtcattcaggtgggatggaacctcctggggtgtaaatacccaaactcctgctatgcacccctcataactcagctgggcttcttttatgtttctccttgtctttcttttctaaaacagggcccttggccaata

SEQ ID NO: 3475 - DNA, 4001 bp, Homo sapiens
caccagggtgagcacttgggtccagtccctcacaccacccctcacttctgtcccctcattcccatttctgtcattcagaataattttctgcttccctactccttttgagcacaaagactaaatgtacttccattaagaatctagtccctgatttttttttcccccaccatggccaagtcttcaatccaaagcaaaagaaaacaacttttagtcagggcctaaggtctaggagctggctggttccagcgtcaaaccactgtgcagtaaccaacttgcccatccttacccatcttcatctcgctccacttctttcacttcccagcccctggttagcagaacagaagaggaggagagttttcacagccctgattcctctctcttttctgttgcaggctgcctcaggccaggcccccacggccccgctctgcccctgccttttctcctatatcctgtagtctatctgactccccatcctggaattgttacagcaggggtcccttgggccaacctgaggtttgttttgtccctaaatctcccccactgactgtttctccccgggtctgataatgcctttatgttcaagcccaggatatagccccaagatggggtaacagtgggaaatatgctagttcccctccaggccgctgattccatgtgacagccgttaagtccttggaatgccagccacgctgtccaaggcattacagagtatcaccttgagacagaacaaaacagggacctgccaccccttccctccctccgcagcacaagattttgggaccacaaaaaaaagtctatatttttatattggggggagggagtagaaaagcaagcccctatactgggccctattcagtggcagcttcttgttccataggattaaggaagactctgaggaaataaaagttgtttggaaaaatccaggtgtagttgctttgtatgttgtgatgggtagaagggatgaagtgaagtgtgaaggcccctcataccctccatcttgcctcagactatgtcctggaaccctagaaaagagggggaaagacctgaggtaaggaaaatgctgcagctttcctctggggaatccttcaggaagtaacgcccatccatgttccctttatacttgtgacccacacttaaggctggctccaaagcccccccttccttctctatagtttgggtcagcagccaacccctggcctcagaacatggaaacagaattctacatctgtcacccccctcaccaaaaaaaatctgcccaaataaggcctaaacaacctggggaaaatgagggctatttaagagcccaaatcctcatacttggatggttccctcggtaccttcgttcctaccggtgtcagtgcctccttacaactatactcccaacttgggcatctacctactggagactgtgagggttaggcaacccactcccattctagcagggaacaggttacggggagaggacagcgcgctctctctctactctgtgcagacaaaggggcccagttctggactgtatcatgcttggcccgacactttctgattgtaagtttcgaaccctgctagccctggcgcggcctcgccactcagctctggggactgggcgctacagccccgggccgttacctggggcggagaaagcgccactttcattcctgcttcttgggattgttgacggccacgtagtgatagagaacgacaagcaagaagagcgacacgcccagcatgttggcgaagatggcgagctgcacgtccgtgatcatcctgcggagaagagaggggctgagctgcgggctggcgcactcctcgccctcgcaagaacccgtcctcgccccacgggccagccacggccacggccacggcggggctggcccgtgggacggcccctgcgtgcctctgacctgaccagtccggctcggctccgacgccaccagcgaacaagcccgaagtcagagacctggaccggaacttcgtagcgccagctcaggcccgaacaagccgcttccggcggggggcgcggtcgggacggcctctctagccccgccgtctcgtcggctccgcgcggcgcgttacggccgcggctggggcggggcctcgggcgcggctgcggtgggaggtccagccgtagggggtggggcggggctgcggacgcgcgcctgggcccggcaccgcacagctggctgcagctggcgtggctcgggacgcggctagcgaagccgtggtggccgcctccccggagccgaggagtgggctggggcgagggtgcagcggcggggccggcgggatactccaacccccttccggccccggccctcagtactgctgcccacccttcgcttcccggcccggcccaaccaggtgcttcctttgggtcctgccctcagtgccctctccctggcccggacggcggggacaggggtaggaggcgttgtagaatggggacagggctggtgctgccgggtgctcctttctccggcgccatcctttgtgacccacatgcaaccaagtagaaccatcctgccttttgtgatctgaccaggttctgtcttagccgggctccctccctccaccctaccccccggaggtgggcgtcggaaatagggcggaccctcccggaatcaaaacccaaaccgtgggacttcggccaagtgggaaatcaccccccggatgtgggggagggagaaggggaggaatggagaagaggaggaagggctgggacaagcaagaggggtcctgggttcaggacagattaggtcgccgaagagaacgaagagcggtggctgcgggtagccgagggtctctggcgaggggagaggcaccctggaactctccaagcctctgcccaagccagagctttctcccccctcactccatgctttctctcagcttcaccataaaagggaacggcactgagccaggccggggccgggggctgggctgttgctctggagctgtcaggggtaatggaagccagttgctttgcggtagaggggggccagggctcaggggaggcctctgcttctcggagccaaagaaaactctacaggagatgctatgggcttgggacaggggaccagtttcccgcctgtgtgcactgagctggggatgcactatcccaaagtagccttcccgggcctgggaccatcaacagcttgtcacccaagggcttcagccccgtggcttctaaacataatccctgcctttagtagtctgtagttcccgtggcctccccgcacctcaccaccagcccccactcaatatttcccagaagcttgatatttagaaagccgagtcccctccacacaacactggtgaaaccccagacaggtactcccttatgcatccctcagtaagcggtctgtttccagctcctctctgggagagtaagggtctaggtcttaaggattacacgtcattatgcttcatgtctcctggaaatttgaagcagatccaagtccaaccaaacacttaggtctactgttgaatcagaactagccctcccttttaaaaataagctctacctttaggccagccctggaagttaaactttctagactgaaaatgacaggaaagcaagccttgaaagtgcttaaaaccaattgacccaggtgcatagtatcctagactatcagagccgaaaggggccttcaaaatcatcttatgaagaaagaaactggccaggcatggtggctcatacctgtaatcctgacattttgggaagccaaggcgggaggatcacctgaggtcaggagttcgagaccagcctggccaatatagtgaaaccccatctctactaaaaatacaaaacttagctggtggtgcatgcctgtaatcccagctactcaggaggctgaggcaggagacttgcatgaacccaggaggcggaggttgcagtgagccaagattgtaccattgcactccagcctgggcaacagagagagaccctgtctcagggaaaaaaaaaaaaaaaaaaaaaaggaaggaaactgaggcccagaagg

SEQ ID NO: 3476 - DNA, 4001 bp, Homo sapiens
ggtcctgagagctgggaccaccgtgcctcagctcctccgtgaatgccacgcgcagtgttctacccctgaaccttggtttctcggcctgcaagtgggcctgtccggtgcagcctggaccgttccagcacagctgcagcaggatggcaacctgtagcttaaccgccccacactatgctgcccgtggagctcagggccacatttcacagatgaaaggacacatttgctttttctaaagccagcatgagcctgcaggtggcacacagagggagatccagggtgctgcagagaaagcagtcagtgggttggggtgggaggcaaaaggcagcccagcccacacctccctctccctcctgcctaacctccgcctgccggcagggccactgccatcacctccacccctgcctgtccctatgaacacaagctgcaatgtgggcatcccagggcctctgggtaggtgatgtgggtgccccagggctcttgctggaatgttctgccaatggtctctcccatcccttccaacagaggtgcagacactgtgtccagcctgggccccaaggctcactttgctctttagtataggggggtcctctctgcccccttctcaccacctcgtccccatcccactctcagacccctctctcgggagaaggggccatgtctagtgagaagtacccccaaccctcagggctgggcagcaaccacatggagaggcagaggtgggtggtgaaggacagagtcagcctggccctgcctttccccacttaaaatgctcaggggctccgctgtccccggggtcaggtccagcctcgcctccttgccctgcttggctctctggcctccgctcctgcaccctctctgagctgtagacacatggaacctctttcagttccagagtttcagctcctctctcagctctgggcacactgtttcctctgcctcctcagtccttacctcctctcctagctcccacccgctggtccttcgggtattagctgagtgttacttcctccgggaagccttccctgaccaccggtcaccagcctgggtgagggtgctgcttctgtagcttgcatgctgcacccccaccttctgtctcacatacctgtcctgcttgttccacgcctgcccaacagatgcaggctccttggggctggggctgggttgtgctcagctctgtgtttctacccctatccttgggacacagtagatcataataaatggtcgctgaatacaggagtgaaaaggatgagaaaagaccagacagaagagaggcgaggggctcccggggttcccgcccatgaatagatctaaaagaagccaacagtgtcccccatcactctggggcccagggagctactggctgcctggtttctcccagtcaccctgggtgccccaggctccatacccggcccccaccctgtgctcaaggaaatcaacctgcaggagagggagagagagagaaggagggggtcctgggtctccctgagctcagggatgtggtcctcacttctgcctccccaggcagagggctctgtgccctgcccggggaactggcatgttggcaagcacaaggagacacaggcatggaagaacaggggaccctgattttccagaaatcacaatggccagtcagtcccaggcagatgactacctgtgaaaaggctcgtcgccccagcccctgctagaacttttcccacccatcctcccagccctgtcctatccccggccacctccagagcatgggctggtccagctctcagagctggcgtccctctgagacagcggcttccctacctcggaaagtcactttggcgatccggtcgcccctgccccgcagctccgagactgtcttgaggtggatgagcaaggccatgctggtgtgggctgcctggcactgccaggcaggagcagcgggaaggagctagccggtggagcacggctcacacgcctctctcttctctgccgctgcctcctcctcctcctcccgacccccctccgatgctgcccacagagaccaaggcaaccaagccgagctaagctgctcctgcagcgactcacagagcctcacagcccccgcccctccaagttgtcagcccagcgtgtgtgtatcggtgtgtgcgtgtgtgtgtgtgtgtgtgtgcacccaatgtgcagcctgggagtgcggcagagttggaattcattattcagcagccgccggctcccagataaagctctgtccagcttcaggtgtcttctcccagctcctggaagggaggctctgcccacccctctgcagggctctgctgcttccctgctaagcaagccctgccaccagtagtgggcacagaggagtgggcatgagcataggtagggtggatgtggggcggggggcactcccacccacaggggcacactacaagaagaagggaatgtatttgtccacctacgcccacctcttccctgctggagactgtgcccccaagaggctgggccctgagccctgccctgggatccctgtttctgaatctcaggaagcagagaggctggggctgctgcctgaggggaggctcaggaccaggccatgcatgatggagatggctggttgtggaggcagcagaggcttatgtgctaccaggggccatgtttaaggatccagggcactaacctagccccaccccaaggctgggggtcaggcaggctagcgaaggtaagccaggctgatgtttgctttccagccagaggagcagaattgaatggccttctgctgttataagctgctaggggcaggagaagggatgtctatagggaaatttctaaggaccaaaagagaactgccccctcctgtcttccagcagcatacaccaaggaaagggacgctgggggccagaatccctgatgctggaatctgtgcagggtcatctgcagccttgttcttgctattcattcttggtggaatgccctccaccccaccctggactcagcttgagtgcctgctcctggaggtgcctctgtacccgcaccccagctgggttggggtcctcctctgtgctgctcctgcctcctctcatcttactgagtcctggggctgcttcccttgccttttcccctcctgacctcaggagggccctggagcacagcatccctctaccccagagccccacatggtatcctgtgcaccgtaggatgcccaattactgttgaaaggataaaagagtgagctcagggatctacctgaaacagagtctaaaggttaaaaagagaaatactaatttttcacagcatggtaacaagaggttacttcttttgaattctgcattccaaataacctacagtatgtcccaagagccttctttcctccttctagatatttccttgctactgtgccctatttttctttttctacttacgtttttttcctttgcactttttcctaaccaattcttgcttacctttctcacatttatctaatcatattgaatttaaaaatgtcttagagtattctgtttattgaatacaagtatgaatgctaaattttcaaaagctagataagtttaatgtcttaaaaaaaaaaacacctaaattcactagcattttccatccatgaggtcatcaggtgatctgtgtttttaaggcttggtgactacaaggtacaacaacaacaacagaaaatatcttcttccttggttctctggaggtcctcccctgaaaggagtgaatttcatgaggcctcttatagaccctgtgcatctttaggaaaaagcccatgatcctgccctagccaaggcattgatctatgctgaatctcactttccacatccataaaatggtagcaattccactcagcagctctcaatggagtcagctggcctttctgaaaacctaagagacagatcccactctttttttttttttttttttgagagagagtctcactctgtcacccaggctggagggcagtggagtgatctaggctcactgcaacctctgcctcccgggttcaagcgattctcctgcctcag

SEQ ID NO: 3477 - DNA, 4001 bp, Homo sapiens
ggggaagggcagcctgaggttccaggatgggcagcccctccggccccctcccaggtgaggcttcgagtgaggggtcctcactcactggtgtagaccaggctgacgggtgggaaggcatgcaggcccaggccctgggctgccttgacctcctggaagccacagggcaggccgcacaggaactccttgcgctgtttgctgaggcccagccacaggtacagctccaccttggcctgcactgtccagcctgccgagccgaagccccgcttccctggcagctgggggtgggcatggggtcaccaggagcctgacggctgccagggcccaagaggtggggaaggggcaggggccggcagaggccctggtcagagctgccctgccccttcacagccatcccgctgggctggggtccggtggaggcaggaggatgggcagggggccgtcatgcccccttccccaccccttcccccacctccttccccaccccttcccccacctccttccccaccccttcccccacctccttccccaccccttcccccaccccttccctcaccccttcccccacctccttccccaccccttcccccaccccttcccccacctccttccccaccccttcccccaccccttcccccaccccttcccccacctccttccccaccccttcccccaccccttcccccacctccttccccaccccttcccccacgtccttcccattcttggctcttctctgagcacctgctgcttgaaggccccaccctgtcactcaggcttccagccccaggtgggggctgctgctcccctgaaaggacccaggcccccatccatcctgccccctccagcaccttaaggaagagcgtcttgaccttggcgcagtccttgccagtctcctcctccacgatggagaagagcaggtccttggagggcacacgggcataggcgacacgcttgttgttgctcatcatccagatgaagatgtcgggaatgctgtgctggggctgggggttggggggtggccaggggcagtgggtaagggggtctagcctcctgattgagccccctgatcctgaggggccccagagagccagccctggatgaggcaaagccccgaccccttgggccgcacctcgtccgccaggaagcgcagcttctgcaggaagttctggcacagcctcagcttgtcccgcaccgtgtgccgcttcacctgggcccgcagcatcctggcctgctgccccatgttttcctgcgaaggagggggtgtcagtgaacccagcaactgggggacagctcgggccatgacaaagggggttgtgacaccttctcacaaccaggccctccctccagcccccgccgtccagttgcgtcctcaccagctccctcatgcaggacttgaggcgctcccggtcaagcctggtgcgggatgagtggccctggtccttgtcagcgagggagaggaagcggctgggggtagggcgagccggggtttagcgagcctgaccagcaggggctctgtagattcttcctcatctgcccagccctggcagggtcccctttgtccagttccgcctcatcctccccccacctgccgcccctcccttctcaccagcagccacagctcagctcctccaggacgccccgcaggcgacgctcagggtaggacttctccgttttgatcatctcctgtatgtcgttcaggccttcttcctgtgaatcaggagtgtgggtgatgctgggccacagccccgcctccccagcctccccaaatgcctcctccctgttgatcaggggagtgagggacctcatgatctgggagctctcgctagggccatcctgagtatcggtcatcatgaggaagtcatcaatttcccaggttctgttctcagaacctggagatgttggtgttcatgggggttcttcagttcctgaaggaagaagccacctctgggctgtgagtctgtggctctggtgagctcacagggcctgggcagaactcacggctacggggctcagggctggccagagacagagggaaaccctaggactggatgtgccaagatcctgacgtcactccagaatgctggagcctgtggcaggggatgggaacagatgcctgggggaagagggagtggctctggctctgagagcactgggagggctgtgagacccaggtcccacaggaaacacaggtcagcttgtaccccagctccttagggggaagccttgcagataactgcagacccaggtcacactgcaaaggctatgggctttaattgtggttatagtcacaagacagggatgacaaggaggacattggcagggggctgggagcagacctcatattagccttgatttttttggaggttttaattcatttttataaaatatgagctggctgagcttcagggaacttcaacagggaacagcaacagctcagggaagggcgggattatctgctggtccctgcttccccaggctggggagaaggaggtctcatgccaacagctgcactcctcgcccagtcagtgcccatggctcatggggggagaggggtgggcagaggaggagggggcagctcctgagcttcagacactgctcgcttctcccttttccccatttcccttccctagccttgcttttttattttgttttattttattttattttattttttgagatgaagttttgctcggttgcccaggctggagtgcagtggcgccatcttggctcactgcaaactccgcctcacgggttcaagcgattctcctgcttcagcctcccgaatagctgggattacaggtgcccgccaccaagccccgctaatttttgcatttttagtagagacggcatttcactatgttggccaggatggtctcgaactcctgacctcaggtgatccacctgccttggcctcccaaagtgttgggattacaggcgtgagccaccacacctgtctccctagccttgcttttaagatttctggaaaaatcagggaacccaacactcctgccccaggattcactggaggctgagtgactagaggtggctcctgtccttgtctgtgccctgggacctggggctgagaatgggaacagaggtcctgctggggccgttcctgcagccccctgggcagaccagctttgtgtgttccagggaaggccctctgacagcgccgtctcccccaggaccccacccctgctggcccctggcctggccctgaccagcttgtcggcaatgtggtccatgatgttggcattgtagaggcggcggcgctggtccggccaccagctcttgatgtagatgcagggctttcgctccaggtagggcagatggaagtagttcctggggtgggcagaggcgggaggtgaggtcttgggggcccagggaggtgggagggccaggccacaggaggatgggaggctgggcccacctgtcggtgacctggggccgcattggtggagtggaggagactgaggccaggtccccggcatcaccggcctcgtcatcacttgcgttctgaatcaggtctacttcttcctcatcccccggctccttccggggccgaggccgctggggccgggacaggccatcaacttcgttcccatagttgcctggagcagaatgggcccagaaggcctagagtgcattccccaccaggcccctcccaccgtccaatccggtgctgccttgggtttgggaaaggggagagggagagtcagggaatggggctcagacgtgacacatcattagccagagagcattagcccgtgtccccactccgctgagagtcagggagtcctcatgacgcctgagtgcgaggcccagccctggcccaggctgtggcctgagttcccactctctcctctccagccccgggaagggcttctccctgccctctgccccaggtcccaaacacagcctcaccctgtaggtggagctgagggttggcccctttatggggcgtggtccaccccatgcacacacaaaggtgttttgtgggt

SEQ ID NO: 3478 - DNA, 4001 bp, Homo sapiens
cttagtggcccagagcgggggtgcctggactagaatctagctaccccctaaccagctgtgtgaccttaacaagtcaggctgtgaccgcatgtctctgcctcagtttcctcacccgtaatctgggggaactgcagtgccccctaggatcattgtgggaaatggatgagtgagagacacagaaagccagtcctgagcctgcccaggatataaaatcccttgttgatgccaatgtggatggaaatgttgcacatttatgaaagagtttatgaaagtgctccccaggaatcaaaataaaaccagcttcatttgtgaaataaagtaagtggggcctgagcgcagctgtccttgaaagacaacccacaacgctggttgtgcatcttcagtccggagtttattgagcgtgagaccaggcctgactcctgcaggggccaggtttttgcggggactccatgcctgtggaggcccgaccgagtgcagcctggcggggtgggcgggcaccaggctggacaccattcagtcctcctgatagggaacgtggaagcccagcgtgctccccagggggaagtgggcaaagaaggttcgggccatgtcctcgatctgggggtaggcccccagggcctggaagtgctgcacatagttccagaagtcagaggtggagaaaggccagtagggcatggccggcagctccgcgtaagggtctgaaagacacaagacacctgccttgggggctgtccccatggtcctgcctggagacaccatcctcagaggtctcaaggcaagtggatggttcccagctctacctacagtgatacaaccttcccagagtgggggcctgagcccatcccctctcagatccttggggatatctggtcggggagacagaggaagaagaagaaggggaagagagggagggaagccctgtcctgtttgaggaaggagttgtgtggggagggtgtggggcaccagcagccacctgctgggatttcagaacagagcacagacaccccactccgctaccccccgtataacctgtcctaaagcttgggcaagagcagccctgaagatactggactgagctagggctcagagttgggagggcctgggggctggaacccaggtctgatagtgggaatgtcaggggtcatggggccctggctccccctgcccagtgtgttccctggtggctggagggcagggtcccagctggaaggagctcatagaccctctgcttgcacagctccaagctggctctcaagggccatgttttccatgcttgggcctgagctgagccagggcccctgatgcgtctgcttgggataagaagctgctgctctccccagcagtttctccccgctgcataccagttacttatgcaaatgaaaggaaagaaattggagaacggtacctccttcctcctgcacaggcttggcccctgcaaaggaagagaagagctgtcacccaggaggaccacccaggtgccggttgggcccacccgacaccagctgcagggctctaaggtttcctagcagcctggggatgcatgcgggaggggagagaacaggagggctgtcgggggtcctggtggctgcctccctccagagcggcccctcacctgcaagaggccccagtaggaggcagagggccagccccggcaccatgcaggcctgcatcttcccggtgcttcctgatctgcgactcaggcccacctgcagcaggatgaacccaggaagggcgagaccacccatccgtcagggccggcttcctctaccagtcccagtgtgggcagccctggggaaaatggcatggatttaaaaaaaaaattcttactgttttcctagcaatttccatttcagtggtttcaaaccactatttggaggtgaaatccctgcctcaattggccttaattcccatgacttaagaaattgcacccccctccactctgcctggcctctccagagcttaccttgtctctgctcagccagccgtgctgcctggatgggctctgctgccagctcaagagtcctctttatagaagggctgcagatgaggaaggacacgtcacctgcctgaacagtcaaactgaatatttcatccccaccggaggactgtgggctcctgtcgccctgctggcaggcacaatcagagtgtcaatttctgggaatctgatccaaagttcaaactgagagaaaaacatcttggctcggccatttctgaaattgttaggactgaattcagcattggtacttgaaacaaacccagtttactctccgcaaggagcgatcctacgtccaataccggggctggctgagatttcctccctcgtgaggaggagctgaataattccagcgctgcttccacttaaaccagcaggcaggaggagcccccgtcagcgggacctgcctgcaggacgtccactgagcagagccccagcagaaagtgtggggtcaagatggacttccatctccaggtgggagcttccctgcgatccaaagtgtcagtctgtaggtgggcaggaggctgtccccaccctgggacaccagcagccagcaccaagggtctctgtgggcagggccattctgactacacagctgccccactgaccacatcggttcctatgctgacctgtctttccagtacatagagcctcctcctggtcctgctccttggggtcccgccaccccactgaatcaggggccgaatttgctgtggcggtctcccctgtcattcctggtcaccctgggggctgtttaaggactctgggaagctcctcacccatgtgtcccatggttctggagttcatcacagtctgctcacatgtccccatccaaatgattaagggctcatttttccccacacaatgccatacatttaaccaaagatacccagagaggtggttaatttaattcagatggtaaggcagccatccacggattagattttgggtttccttttcagaaatctggagcctgtggctacaggaggcaatggattctttcagggcagttgtattcggggtcaccaagagcacccaggtcaatgattcactaggaagatgccctaggaggactcgtgggactcagcatcctctcgaggaccccacgggatgctctccattccccagcaccacgttgtggtgacacctgtggaatctccccatgaggggagcccttcagaacctcagagcccagggctggtcgtgcagccccctctgactcgtgcatgtgcagatctccgacccccaggaggaagcaggtgcttagcacaaccatttgttggcacatagagcttaggggcagtggcccctctgaaatccaggtgccgaggtgaggacccaggcctgctcgtcgcccttccctgcacagctcagaagatttctggttcctcacctgccccctgagctgggaatttaagctctgcgctcgtcattgtcttttcgcagattcggcagcacactttccagttaccaaccaagcccacggtccttatttccgtggcttcagctgcttggtcacccaaagtcctgctctctatagctctgttttgcactgggtgggtgacagtgccctcttttccatgggaaatggaaccagtcttcgatctagtcaagccagagatccaattccagattccaccctgagcattcccatccctgggcccctctcgagcaccaatactgtgtccagctgggttggggagagtgtggccagacacggagtgagcttgctacaggaatgggccttctgcgactgtgggaggtggtgaagaagggagggcctgggagggcgagccgggaaacagtctgggaggccctgtctgaaaatgcacagcccagcatcggcggtgggcctaggacctccgtgtctagcagggaaggtgggagctagatgcagaggggaggagggtgagggtgggccgggccctgccgcagcctctgaccgtgatggggccgccagagaggatgggcctatcatccttctgttaataaccgcatgtctgaagat

SEQ ID NO: 3479 - DNA, 4001 bp, Homo sapiens
gcacctcaaagggtctcggggatttgtgaagccggagggcagcaagtcgcgtgctgccatccttgtagctgaacccgcggccccaggacacggtcgagaacagagaactaggcctcagcggcgtagcccacgcagacccgagctgggaggtcgaagcctcgcccccgccgctgccgggaacccggggtgccactctcaggggtcagggaggggcgctggaaactgggcctggggccctggggggccatcgctacaccccgcttagcgggatcgctgtgaagcaagccagggactcgggctaggacgttcaaggagagaagttagagctaaagaagctccccccagccccgttcccgcccccgtcttctgggacccaagacctgggctgagggagtccagcttgtaggaaggggaccggaagggaagcagccagggctctagggccgaaggaaaatgggactcaaagctgcgacggctttgcgaagctgcagcgtgagttttcaaagactttctccaaacttagcacttcagcttggttacttcggaggaggcgggggagggggctgcgggccgcgacagcgccccggggtcctcggctcaccaagaggggagccaggccgctcccacagccccgaccacctgctggggaccggggaagccgggatccatttgaggagggggagataagggtaaccaacgcgctcccggagtccggggtggccccgcggctttctccttacctgccctcagctgccggggccgttcaccatctacctggatctctcacagagacccgccgggcagccaacctgcaaaacagagcagcactggaattaccctggcggctggtctaggacccccaggtttctttcttttcccaacttccttcttcccacctctatcttttttttcaatggctttgtgcgtgtccttctgggtttcactttattgcacagacactttgtttgctaagccccacacgttctcaggacattgcctcgcctgggatcgcgccgaggggccgcaagggggggaattcgaggggcagagttgggaggtggctcggcgttgccgcggcactcccggtgcaacgtggaggcagtggggactgggaagtcctgcagagtcactttgcaaactaaataaatcaagcgatttaccttgtcggagtggcttgtcttgctcggttgtttaggtgattggaaatgtagcctgatgaagattgatcacctttctactgccctccccgggtatgtgaacgcgaggcgagtgcgtaacggggctaggccgccaatcgggggccccgcgcgggctgagtgacagggagccgggcaatggctgcgcgagccgggggttacctccgcgcgcccccgccctcccccgccccccacaccccgccctccccgccctcccgccccgccccggtcgcgcgctaactccgggactcggctggcaaaagcggcgcagagctaggcgaggaaggcgagcggagagcccgagtcctggccgcggagggggccgtgggtctccaggcctgccctgggcgcccccgcccttctcgcgctctcggcgctccggagggagtggcagggaggaggcgaggtgctggagaaccggttccttcgctctcccgcgcgctacagggctcagccgctcgggtgtgggcgccaggacccgggggcggcgggctggaggagcccgggcctcggcccctctcccggcgccgcgggccccagcgttttcttccccggcgccgccacctgagaccgacgccgcgggctgctcgtgccggcgcaggctactttgcagagcgcgggagcagctccgggcgtgcagatctctcctcggcccctccggactctcgcgcctgggaagagcacccactgggagggcgccgccacttacctgcttgctcgtcggcatctcccggggttccaggtccccaccaagggtgtttgcaagtcttaagcgcttctactgaaacgttggagcccagcgtcctcttcccctcacacgtacaccctacttcttaattgaaacattttgataggaaagtttctttttcgctctttctctctctttcttagactgcctctaacagggactttttgatggaaaatgtggccacagacccctgccctcaacttttttccacatgctgcgtaaggatcctccttgaggcgatttccccggattgttcgtacgggcgaagcccatttcccacccgaaaaaacttcccaaacacgtctacctgggtggacttttaaaagtgcaaaaaagagttttcgttccaactctaagctaggcgaatcttttaaatggcacctcctcctgaaaattaggcactttattccctttcgaggaatttctaccccttgtttctaatctcccccactcccccaccccgacaggcggggtaaaaagtttgcacaggattaagtgtgagggcaagtcaaggagcctccaggcgcatcgcagtggggagcactcgcgctgcccgggctgcggggtcgggcgccgagagcggaccgggcgctgggtgaggaggaggagaacgaagggggagcccgctgagtgaaaaggggccgcggccgccgctcatcaaagtgcttccccctcccccaagcgacactttcctttggagtccgaataaaatacggtaacagaatatgatggagggcacactgtttccttaactgcttctcaaaggacccgggagatcttcttaggacctttaataaggctttggtcggttcttttgttgatctctcaaaatcaactccttctaattgaagttggagctgaaagcgagctaatgttcaaagaaagtggccgccagaccaacgaaattacattttttttttgacgatgagggaacatctaatcaaagaggcaggggaggaggggtgggagtgggggcgtacgaaggagaaaaggaggttttacaagatccttctctggttcacaaaagtcagcgacacgggcgcttctctacagaacaaagacaccgcggcccattcacaaaagggagagaaagagagaaagctgaataaaagaacgagagaaatggggaaaaaatgagagagagaaggagggagagagtgagtgagaaagaagctttaagaggaaaagaaacagtgcagagcgcagcgctaacccaggcggggacacaccttaggctcgcgcaggcccctaccaggagtagcccgcgaggcccgcggtcagccgcccgcggctcggagccactgtgatcgtgctgaggtttaaagaaagcaacgaaatataccccttccttaggttccgaggaaaggcgccggctggagcgcactagttttgggggaaagaatatgcggacgtcccggggtgcgcttcgccggcgtccgcgtccatagcccggcgctgccctagtcccggccagtccgctgtgtgccggggttggccctccagtgccggggcgcgtgaccttgccccattcctccaccttaactcattcctccctccaccaggccctgtttcgcctgcagcctcagcacctgacctgggtccggcgcagcgaggtgggacggcagtgcgctctggaatgtgccagcgcggtccccggggtacgcctcgcgggaggccggcgctctcggttccagatgctgccaccattctcggggaagttgggaggtatcaagtagcacggattttttttttcctaattagagtatttatctaatcccaaattgcaggcgaattttcttaacgctcagcccataaaaccccaggattaagaaaagaaagaggagagggggagagggaggagagtggagagggagagagactgggatgaaagtttcttgaaagcagcgcagaggattgaggcggccgtcgctaggcaaatgtccaggtgggagatgctgggccagaagccatgaccgttccagcatcggccgcggtgcgggaaggggaagtggggacaccactggaggaggtgaagccgtccagctcaaggccctcga

SEQ ID NO: 3480 - DNA, 4001 bp, Homo sapiens
aaggcaggttacagaactgcgcagggtggtcaactgggatccacaaggccttagcccagaaaccacagttactttgaaaagtaaagttttctgggtcgtctggctctagggttggaatgagccaaagacactggtagggagtccataggagtaaggagaagttaaaagcagggccaggctggggaggtcagagccagaaccgcggagtgtacaagctcccaagtccaggcaaaattctgaatccggcagaagccagcttcatgttgcacaagcaaaggttcacttggtgcccggacggcaggccgcccagagcatgaggcgttgtttcattttgtttcacgtgtttttgaaaaggtagagactacaaagggccaatgtggagggctaattgcacttcttgtccacttagacacttggttcctttaaaggtctccagggctgcgcccctgccccagatcccgcaatcaccactccagctgacctctctgtgcccagccactgaaagatcgctgacgcgaaatcccaccgcacctcaaccgcagtaacgggcccaggcttcgcagagggccagaggacgccgaaggggccactgtagaggggggcgaccccaagatgcggcctgaggtcgggagcgcctcagctgcggccagcgtccttcgttgccagcgcgcacccggccttctctctgcccagtctgggctgcggaccgcagggtcccagcagggggtgaagggtgactggcctagcacctcaaagggtctcggggatttgtgaagccggagggcagcaagtcgcgtgctgccatccttgtagctgaacccgcggccccaggacacggtcgagaacagagaactaggcctcagcggcgtagcccacgcagacccgagctgggaggtcgaagcctcgcccccgccgctgccgggaacccggggtgccactctcaggggtcagggaggggcgctggaaactgggcctggggccctggggggccatcgctacaccccgcttagcgggatcgctgtgaagcaagccagggactcgggctaggacgttcaaggagagaagttagagctaaagaagctccccccagccccgttcccgcccccgtcttctgggacccaagacctgggctgagggagtccagcttgtaggaaggggaccggaagggaagcagccagggctctagggccgaaggaaaatgggactcaaagctgcgacggctttgcgaagctgcagcgtgagttttcaaagactttctccaaacttagcacttcagcttggttacttcggaggaggcgggggagggggctgcgggccgcgacagcgccccggggtcctcggctcaccaagaggggagccaggccgctcccacagccccgaccacctgctggggaccggggaagccgggatccatttgaggagggggagataagggtaaccaacgcgctcccggagtccggggtggccccgcggctttctccttacctgccctcagctgccggggccgttcaccatctacctggatctctcacagagacccgccgggcagccaacctgcaaaacagagcagcactggaattaccctggcggctggtctaggacccccaggtttctttcttttcccaacttccttcttcccacctctatcttttttttcaatggctttgtgcgtgtccttctgggtttcactttattgcacagacactttgtttgctaagccccacacgttctcaggacattgcctcgcctgggatcgcgccgaggggccgcaagggggggaattcgaggggcagagttgggaggtggctcggcgttgccgcggcactcccggtgcaacgtggaggcagtggggactgggaagtcctgcagagtcactttgcaaactaaataaatcaagcgatttaccttgtcggagtggcttgtcttgctcggttgtttaggtgattggaaatgtagcctgatgaagattgatcacctttctactgccctccccgggtatgtgaacgcgaggcgagtgcgtaacggggctaggccgccaatcgggggccccgcgcgggctgagtgacagggagccgggcaatggctgcgcgagccgggggttacctccgcgcgcccccgccctcccccgccccccacaccccgccctccccgccctcccgccccgccccggtcgcgcgctaactccgggactcggctggcaaaagcggcgcagagctaggcgaggaaggcgagcggagagcccgagtcctggccgcggagggggccgtgggtctccaggcctgccctgggcgcccccgcccttctcgcgctctcggcgctccggagggagtggcagggaggaggcgaggtgctggagaaccggttccttcgctctcccgcgcgctacagggctcagccgctcgggtgtgggcgccaggacccgggggcggcgggctggaggagcccgggcctcggcccctctcccggcgccgcgggccccagcgttttcttccccggcgccgccacctgagaccgacgccgcgggctgctcgtgccggcgcaggctactttgcagagcgcgggagcagctccgggcgtgcagatctctcctcggcccctccggactctcgcgcctgggaagagcacccactgggagggcgccgccacttacctgcttgctcgtcggcatctcccggggttccaggtccccaccaagggtgtttgcaagtcttaagcgcttctactgaaacgttggagcccagcgtcctcttcccctcacacgtacaccctacttcttaattgaaacattttgataggaaagtttctttttcgctctttctctctctttcttagactgcctctaacagggactttttgatggaaaatgtggccacagacccctgccctcaacttttttccacatgctgcgtaaggatcctccttgaggcgatttccccggattgttcgtacgggcgaagcccatttcccacccgaaaaaacttcccaaacacgtctacctgggtggacttttaaaagtgcaaaaaagagttttcgttccaactctaagctaggcgaatcttttaaatggcacctcctcctgaaaattaggcactttattccctttcgaggaatttctaccccttgtttctaatctcccccactcccccaccccgacaggcggggtaaaaagtttgcacaggattaagtgtgagggcaagtcaaggagcctccaggcgcatcgcagtggggagcactcgcgctgcccgggctgcggggtcgggcgccgagagcggaccgggcgctgggtgaggaggaggagaacgaagggggagcccgctgagtgaaaaggggccgcggccgccgctcatcaaagtgcttccccctcccccaagcgacactttcctttggagtccgaataaaatacggtaacagaatatgatggagggcacactgtttccttaactgcttctcaaaggacccgggagatcttcttaggacctttaataaggctttggtcggttcttttgttgatctctcaaaatcaactccttctaattgaagttggagctgaaagcgagctaatgttcaaagaaagtggccgccagaccaacgaaattacattttttttttgacgatgagggaacatctaatcaaagaggcaggggaggaggggtgggagtgggggcgtacgaaggagaaaaggaggttttacaagatccttctctggttcacaaaagtcagcgacacgggcgcttctctacagaacaaagacaccgcggcccattcacaaaagggagagaaagagagaaagctgaataaaagaacgagagaaatggggaaaaaatgagagagagaaggagggagagagtgagtgagaaagaagctttaagaggaaaagaaacagtgcagagcgcagcgctaacccaggcggggacacaccttaggctcgcgcaggcccctaccaggagtagcccgcgaggcccgcggtcagccgcccgcggctcggagccactgtgatcgtg

SEQ ID NO: 3481 - DNA, 4001 bp, Homo sapiens
cgagggcctggagccctggtggcctgcctgaggcctcacccaagaaagcagttctgcctttcaggacatgccggggcttcccagaagttctgggaaggacagtgccccctgggatggggctgtgggatggcttccccactctctcccaagtttcccttcaccttggggcgctcactttgacgcctactgacagtcccaggttagaattaaagacagatatttggtcttgcaaataaatatatttaaaagggaagtttattaatattggaagggacaaactggagagcacagaacatgcagctgtccaatttctaaggtgactctgctgtgacagtgattggcgtctgtcccctgcagctgcgcaggcccctgtctgagctggtgtgccaacggcaccttgcctgtctcctccacccggcatcctgctctcccctgcattctgggaatgccatcctggacacactgagaggcctaggtgggtttctctccctgccacccacctgagtcctgccagtgctttggcctggcccctggtctgccgccatcccttgtccagttggttgaggcaccgtgtgctggccttgtccctccaggccagagcgcggcagcccttacccccacagcgctgcagccctgcagctggccctcagccctgggaggagccttccttttccagagagacctcgccctgcactttcagcttccctatggcctccgccttcctagaggcctcccggtagcgccactgcctggagggttggtaggagctctcgtcgctcactgggccctgccggccccgcgtgaggcccagcaaggcccggctctggtggaggaagttggggctagagaagcagtagagcacggggtccaggacactgttgaggtaggtgaaggccagggagccatggaagagctgtgtgcagaggtccagggatcggcaggcggacagccagaaagccaccatggaagccatgccaaagatgatgctgggcaagaagcagatggtgtagacggccaccaccatggccagcacacgcatggccctctgcgggcctgcctgcccgcccagaccacggttccggatggtgagcccaatgctcacaatagcaaagaggatgagcgccagtggcaggaagaactccagcaggtacagtgcctggtgccagcggagcgaggccgagggcttcgtgcccaccctgtagctgaggcaggaggggccggagaaggtgctcaggagcaggtgcccgttgaggagcaggatgcccacccagagtcccccggccacccgggcagctgcccccacggaagcacggctcagcacgtggtggggctgcaccaccttcaggtagcggttgagtgcgatggctgtgaggaagacaacgctggccgtgcggttggtggacagcatgaagaggttgactttgcaggcagcagccccaaagcgccaggtctcatggaggaggtagtagtccacgcggaggggcaggttgctgatcaggaggaagtcagcggccaccaggctgaccaggaacaccgtgttggaggtccagggccgcgtgtggatgcagaagatgaagagggccaaactgttccccaccaggcccaggacaaactccagggccaggattggtgccaggaaggcagacaccagcgaggaagaggtggggtggcagggccctccagaggacccccccacagtggtaaaggcagagggagcagaggagggtgagggagagaaggagggagggagaacagaggaggagagagagggagatggagagctcaggttatgaagttccatgggctgcttgggccatgggcctgagagaaggttctggagtcttctacccctgcaggagtgctcagggcaaagtgggatgattggcactatcagctggccaccacggtgacacaacatcctggggttttcatcagcattctcgcagccactgagaaacaccctgtgttcctgtttgcaggccaaggggaaccctgcagccctccctccttccctccgcctcggggtactgagtgatcccaccacatgaggtctctgagcccagcctgggggttgtgctgctggtagaggaggaagcagggctcagcaggggcaagatggaagcccagagaaaccctgaagtgggaggatagtccagccgggtgaggtgggggctctcaggatcatgcagccctccctggacaccccctcctccactacatatagaggctggtggctgcctccctgcccccaccagctctggcttcagggactgtggagccaaaaggacattgtcctgagaggtaggcagggagtcagtgaagacctccaccgccctgctggtggcctggagggaaccagtcctatttgtgctccgccagcctgctgtgtgtctgaaagcccactgtagttcagctttcagttgctcccaggttcctgatggttccgaagtctgtgatggtcccaagtccgggtacacggtgaagtaggccccatggacggggacgcccctgccaaatttctactgccatggcacggggagctgggggcttctcccgcaaatagaacaatcctgatttttccctgtctgtgtctccccatggctccttgtccactccactccttgcccccattagcattcactgcggaatagggagtgggaggctggggctagctccagacaaggtacaagtccagctgtcccatggtgaggtattctcatgagcccatgggctggtcctgtgggtggagatgagggcttcaggctcctgataacccgggacagcagggccaagggaggtgctggttccaggctccagggcctgaccccatcactgccaactggctggggtcagcagtctgccatgtgtggcctggcctctgtgtcccaggcacagtggcccctggcctctcttggctgccctgggctcccatttggtcaaggctgagggcaaacatccctgggagaagcagggtggtgaggcccagcctaagctccatatgcagacaggcctgggttggaaacagagctgccctatttccaaacctctctgagcctgatctgtaaaatcaggcactaccaccttcttggagagttgtgaggataaaatgagataatttatgtaaaaacttataggccaggcacagtggcttaagcctgtaatcccagcactttgggaggccgaggcgggcagatcacgaggtcaggagatcgagaccatcctggctaacacggtgaaaccccgtctctactaaaaatacaaaaaaagtagccgggcgtggtggcaggtgcctgtagtcccagctactcgggaggctgaggcaggagaatggcgtgaacctgggaggcggagcttgcagtgagctgagatcgcgccactgcactccagcctgggcaacagagtgagactccgtctcaaaaaaaaaaaaaaaaaaaaaaacaaacttctaggggattccttgggacagagcgagtgttcacaaaaacagatctaattttcatgactttctctctggattaagcttgccctgcatatgagagtaaactcttctcttcacggccatcggtattctgacctgggtcctccctggaacattctatgtcttcttctcaggtcctgcacggagcagtgcattgctacaggccaggaacgagccgcgtggagcctctgcctgtgcctatcctggaccatttgtgtttgaaggagcctgatggtgttttttctttgcttgcaggagaggaaagcccttaggggtgacgaggaggttgaaggtcccgatgtctcttagggccagtagccttttcagcaaaggcaggtctttctctgctcccagtggagtgtaggaaggcagtgagccactgggctggggatgagggagacaggggtcaagtgttcttttctagaggaagctttgagtccacgcagggacctgttctgtccagatctgtcactctcatgtgcatgccctcattgacttctcacggaagtcccaggaaactgag

SEQ ID NO: 3482 - DNA, 4001 bp, Homo sapiens
tgtcttaaactcctaggttcaagcaatcctcctgcctcagcctcctaagtggctgggattacaggcacacaccactgtgctaggctctagtgtgatttattaacaaggcttaaacatatggtccattagacaaggctgccacctcagagtaaagatttcttttaattcactataatagacttttttctttatatacaagatacaattttaccacagtaaaatacaaggaagcatactgatacatacattacaaacaggataaagaaagcaatataattttttccacaaaagcttgcaaaatcctggccaaaacacagtgaacatgatgttaaactcatagcttacatttctccactgaaagctaggaaaaacaattccaatttttgaaaagtcaggaaactaagcactgtgagaatttacaagattttgtaaacctgtatattctccccaccccgatatacaagtagccagaggagcctatcagtcttaccccaacacttcaatctcctccaaccttcaaaataaaaccctcactgtccaatatctgaatttatattttcaaacgtctaaaatcttaatcaaagctaagagcagtgcattagcttttccccataaaattgttggcataattttacttaggcacagcatagtttgtactgttatcaaaaaacatatggctagaaccgacattactagaaaccaaacgaatatactatgaaggtgaaaagggaacagggaatgttgtttttggacagattcaatgctgttattatcccttcataggttgggtgtgatcgaatcacactgtgctgtacaactaagtatgttctatattttatgacaaagtagggtagccaggcccttacactacaaactcccagaaaccccagttaagctgtttaaagtataatccaattcaatttactgaaaataatagtaacaaaatttaaatcccttgcttctagttagcccttttcaactgcattttcagcaattaccaccaaaagaactgcattaggacaaagattctagagcgggtataatggtcaaatgccatttgaaggcaaaaacagtctaccaggaacaaaacattaaagttcccaaccttgccaaactccctgttctgcgtattctgcctctctcagttcaccttccagctgcctggaagaggcaagtggaaaatgttagttttctggagagatgagaatggaatttaggggttggtagggggtgatgggctcactcacggaccgcaaggcacaagagaagtggcgaacgtctcccaggcaaatgaggcatgaagaatgagggctggagtcaagggggagatggagcaagtataaaaaggcagaggacgcgcaggggccgcgaataggggaagggcacgacgcgcaatccctcccgctccagcccggggagaggggcgggggatgccgcgcgggtcaatttgcctagcattgttgcacctgggtagaaatgggactcaggccaagaattcggttcgagtgttaggaggacgctgaggggagtcaggaacttgggtgggagtcggggggaaacagagcacctgtgcgggggggaaagggacgaaaaccccctattgctcccgaggggcaggggctgaccccagcggacgccccttttcgccgatggccgcgacgtgggaccccgcgcgctttccctccctacaggagctcgggcaggcgcgtgccgcccttcacagccccgacggcggcagaaagggaggcgcagggcgcccccagagccgggagaacggcgtttccctcgagtcctttccccagcagcccgggcacccgagcccacctgggctaaccagaagcccctccttcagatcgtactctgccactcctccgagagcttaagccgttgccgtagaggtcgccgtcgccacaacagtctcggcctttagtaccaaaacgtgaagcacagcacccgagaagcgccactaccacttgccaggttatctcttactgcacactgcctcctcgccccgcccccgaacccaagccattggttgccgggcaccgccccattcgtctattgggccaaagaagatgccgttcggtcacctagaatggcatatgtggtttttattggtctaaatgtgaagcagtgcccgcccactccctcagaagtttcagcttctgattggttttaatgtctgtcttttctcttccttcattttttttttcctgtggtggaacacctccttgagggagatgccggctctgattggctgaaaggacgctacgctagcctgggataggcattgggccaaggatgcgcccggcccactcgtgggggaggagaccaaggcgccgcactctgggtttgtttacacaggctcttgctcccgcttcgtctattggctgagctggaagccactgccaccgagttttgcctgtcagcctagcaaggaggagggtgggggtgggcctcagtaggatttccctcagctgtcaattaccaaaggaggagctttgattcaggctgctttggacctggtgctattctctgtagggaaaattaaggaattgggctccttgggaggctggaaggaagcaaagggacgctggaaggaagcagacggatgcttccacgtttctagaaacaaacctaacttcttgagtgctttaaaaaaataaaacttggccgggcgcggtggctcacgcctgtaatcccaccactctgggaggccgagacgggcggatcacaaggtcaggagttctagaccagcctcgccagtatggtgaaaccccgtctctactaaaaatgcaaaaattagctgggcgtggtggcgggctcctgtagtcccagctactcgggaggctgaggcaggagaatcacttgaacccgggaggcagaggttgcagtgagccaagatcgcaccactgcactccaatctgggcaatagagtgaggttgcgactcaaaaaaaaatacatcaataaatacaaattaaaataaaactttattgcctcccttggatttagaatgtccaatctgcttgcaaaggacttcgaattgtattccacaggaagtagggatttctttgtggagctcttactttatacatttttctctcccccccacctctcaagctgactgtatacatgacacaaagttagggaattgcagaatgaatggaaaaaatataaaaatgaaaaagataaactcaaataacaattataaatattagctgtatactttgatatggtttggctctgtgtccccacccaaatctcattttgaattataattcccaatgttgggggagggacttggtgggaggcgattggatcatgggggcagatttcccccttgctgttctcgtgatagtgagtgagttctcacaaggtctgatggtaaaaaaagtgtgtgtccttcccccttagctctctctccctcttgctaccatgtgaaaacgtgcttgcttcccctttgccctgattgtaagtttcctgaggcctcaccagccatgcctcctgtacagcctgaggaacggtgagtcaattaaacctcttttctttataaattactcagtctcaggtagttctttatagcaatgtgagaatggactaatacatacttcatattaaatgatataagtaaataaataaattcattcaacaagtattatttagcatctactatgaatgttctaggctctgatcatggaactgggtatatgatatgaataagacagtgaagatgcacccatggtgtttatactgtagtgaaggagactgacaacagaaaagtaaccaataaataataaaatggtatgttgtgaataaatgctacaaaggaaaataaagcagagtcatgggatggttggggaaatggctattttaagtaggatggttagtttaagagctgtttgaggaaacagcactgaacagagatgtgaataatgtgaagaagtgaagagtgggaaggggctaataagcagagccactacagtgcacaactccaggatca

SEQ ID NO: 3483 - DNA, 4001 bp, Homo sapiens
taaagatttggctttttacctctgagaaagctagagcagtgttttggtattgtttgtgtaatacatatgtaaatatatacggtaagtgaataggacagagtaattatctacatatctatatagtatcactcaatcgcaataatcctaaggggtattgaataagtgccattttacagataagtacctgaaagtcaaagagaggacaagccagaatctgaactccaaaacctctttccactactccattctctcctctctaactacttcagctctgacaccatgatgacgggcctcacttttttacctgtatgctgacaaagttggccaactagcctactggccctaaaattccaaatccaggttctgaacttcccccatctagaggggaggggaaagtaaacaacagaatcccacattcccttcaaaccatcaatttcacttacaggcaaacaacctagagaaattctagttacaagcgtacaaagagacacctaaaagaacgttcactgtcacattgtaacattaaaaacttagaaataaaatagtcactaacaggaaaagaattaaattagggtgttttcctacaatagaatacaatacaataattaatattaattaattacaactaaaatactaacatgaacaaagctcagagatactatgttgtgctaaagaagttacagaattccaagtgtgatacgagttatataaagtttaaaaacaactagaactatgccagttattatgaacacatgtgtatgtagtaatagcattaaaaaacatgcagctcccatgattcgagggcggaaaaaaaagaagtaaaataaaaaacaggcagcaacgataaacatcaaattcaagactgtggagacatctggagcaagagatgattgggaccagagaaggaggtaggagagtccttcagatgtatctggaatgcttgatttctttttaaaataaatacacagatacgtatatacacaccgtgtgtgtgcgtgtgtgcatgtacgtgtatgtgtgtacagttacgttttgggagaaatgggtggtggctccacaaatgatgcttatgttattctctacatttttctgcatgtttaaattatttcctaatagaccaaaatggaagaagctacaacaaaatcttgccaagtacgggaactgtttctgacttatcaaagtgtgaacaagaggtacagaccggtagatgttgtgggtaggtggggaagcagggggtgagggagagggtggggacggcggtgaaaagactgtagcctcatatgaaagagaaacccttgggctgcgataggtctttcactcctgaagacctggagacagccggtcgggaagggaggagggggaggcagggggatggtatttgcgccaatgcagacaggagcagacgggctcagacagtgctgggggcaggcgagtgaccgacaatttctccctacggacacaggcacctctttccctcctcatccttttctgagggcgtcctcggaggcgggacagctggggactcccggagtccccgagtccgtgcaggggtggccaggtgagccgccgggtttaggggaggtgcccttgcggaccggccgggagccgggaaggagaccatcccggcgagctgcgtgcagggcgcaagggacagggaacggaaacaaggacacagtcggaccacctcagctcacccctacccgcctcaccccaaccgccgccccccaccacttacgcagacatctctttcatcgcttcctgcgtctccctctccagcgagtgtttatcgctctggagtcctgttcttgctgttcccttctccccctgttcactttcctccggtcgctagtagctcgcttgctcgctcactttcccacttactatggctgaggcatccaaccgagtagtgaaaacaccacaaaaccggctctatttatgacaatacagcgcggccgacgccaatatggcgccgcttcccagcctgcctctcgcaggtctcagccccgcccctggaggtctggaccaccctcagccacgccccctctgcctttaggtcccgggaggctccggggccccgcccacaagctcagggctctcagtataccgttggttcgaaggagtatttatttggtactctcctttgtccgcggtactgtcaatgccggtagaccgcttggaaggaaatttggagatatgttttccttgcctctcgaatggcagcatatatcatacattttttaaaaaggtcacacccttgcctagcaaaaactatttcaacgcctccgttatcctacatctttgatttaattatagttatacataattaactcaccagttgagattttgtctcgaaagggtcacacccaggaacatacgactttcacacaagtatcccagggaaaaacaagcttgtaaattggaggcttaactgttcacttcacccctaagtaccacctttgattagtgacattctggcatttagctgacagaggttgaaaatagtagctagcagtttgcaataggataaatcccaggctgaaacaaaaatcttacacttttaaatagtggaaatcatgttcgatgtgagtgtggggatgaaaatgagaaaataataaccaattttaaaatgctgaaaggtagaagtaatttcaagcactaaatcattacaaagaaaaggaagtcaagaactgcttgctcttgaacataactcagagtcacagtaaatagaggagattacttgctgattaattcattaaaaaatatttattgaggcaagatacagtggctcacacctgtaatcccagcactttgggaggccaaggtgggagaattgcttgaggccaggagttcgagaacagcctgggcaacatagtgagaccctgtcactacaaaaagttttaaaaaaattagctgggcatggtggcccatgcctgtagtcccagctactcaggaggctggggtgggaggatctctttgagtccaggacgtggaggctgcaggaaaccaggatggcaccactgcattccagccagagtgatagaaggagaccctgtctcaaaaaaataaataaataaataaataaataaaaactacaaaacatatttttgaaaacctgagcaaggtgcagtggctcttgcctgcaatcccagtgctttgtgacgccaaggctggtggatcacttgaggccatgagttctattaagaccagcctggccaacatggcaaaaacccatctctacttaaaagcaacaacaaaaacctgacgtggcctggtgtggtggatcacacctgtaatcctaacattttgggaggctgaggcgggtggatcacttgaggtcaggagttcgagaccagcctggccaacatggtgaaaccccatctctactaaaaatagaaaaactagctgggtgcgtggtgcgcctgtgatcccggctactcagcagggtgaggcaggagaattgcgtgaacccgagaggcagaggtttttttgagatggagtctcgctctgttgcccaggctggggtgcagtggcgtgatctctgctcagcctcctgagtaggtgggattacaggcatgcaccaccacgtccagctatatttttgtatttttagtacagacggggtttcaccatgtgggccagctagtctcaaactcctgacatcaggtaatccgcccacctcggcttcccaaagtgctaggattacagatgtgagccaccacacccagccaagcagtgttttattatttatttatttatttatttttgagatggagtcttgctctgtcacctaggctgcagcacagtggcatgatcttggctcactgcatcctctgcctcctgggttcaaatgattctcctgtctcagcctcccgagtagctgggactacaggcgtgcgccaccacgcctggctaattttttgtattttagagatggactttcaccatgttggccgcacatctcagcctcccaaagtgctgggattacaggcgtgagccaccgc

SEQ ID NO: 3484 - DNA, 4001 bp, Homo sapiens
tttacaagcttgtagtttatctcttacttggatagccccctgtactaaacttctaaatatacaagatttgagggcataaattatttaatagttaaaaagtaacttcaatttggtaagacaatccctcaatgagatctatttcaataatctgtctggagtaatgttgttactattaatcttagctcactttcaaaagttagtgaaatatgatttaatagacaattggttacttgtttaaacatcagttaactgaattacatgatttaaacagcaaacactattttaacaatggcaaacacatatgcacgtgcacacacacacataacattgcagttgattttcacacagctttataaaccactttaattttttccctcctccacctcaattccatcagtaaagagttcatctttaggggttatatttaatatattaatagacctttcattgtactctcctccagttcttgagtatccaaagcaatatgcacatgtatctgtccagagctgaattttttttctgtataataattcttcatggaggcaaagaaggtgcaagtattttcttaaacccctaagctatacacttgtaagaaacaattacttttatgctttggataaccgataagaagttaaaagaaattaaaacttacgtttttccatcactagattgaccaacccactattttagtcacatggcacgagaccaaatattaagagaaccattggccgctaaaacaagaatttgtgacttgccctgtttgaggagcatttgggacatacaaaatgttccatgtgaagattcaaaaaattaaaaggttattcaatgccttcctttaaaagtttcactgaggaagtcccagaggcccaatgttacccaaatacttggcataagttctagtgccagatattttctcaacatgtattgcacacttaaaaaaaattgtcacttaatttatacttgttcctgacttcagctacagagctaggaacgtctttctcattttaatagtcactcaggacctgacaacagcccacacacatagtaaatggtcatagaatctgtgacattaaactgaaaacactcaaaatgtagacaggttggctaagcaaacagcatgctcccacctgtgttcctgcccaagtcactgagacagggcagctcacaaggctgaaactccaaaggccccatcagttgtaacttccgagtatgtgtcacttgcacaatcaactttctaactccaaggagcctaagtgaggcgggccttaatgggtcaaaaatcacacttaggtgagcagcaccttttaagacgttccctcaaacaagttctaaaccagtggttctcaaacttcagtgggcattccaatcacctggggatctcgttaaagagcagatcctgagtcggtgggtttggagaactgcccatattgggcagttctaagaagctcccaagagattccaatgctgcaggtccactcacgaccctcggagctcaaggcccacaaacacccaaagacacccacatcactgatattagcaatagacaacagctgcagctacaggcagtgccccataatcccctgggttttctgcatcccctgagtgtcgccaccgggtcgcacctggcaggtgccttggctgcagccgcgccccactcctccgcgccgcgctcaccttctcccgggtcttcaggtaccgctgcagcgcctgctgggtgagctcgccgacgcgcagctggccctccttgcagggcaccacgatgcccgtcctgccgaagcacacggtcactttcatcctggcccccggcgaccacgccgggccgggccgaacaggtgtctgaccccgcgggcgcagcccccactctcggaggacgcccggggcgggtgggcccagagacccggggcgccgctccccggaacaccctgaggcccggaggctcgcggcagcgccccttccacctggccaggcggcaggtggcgggaatcggggaggggcggccgcggaaaggggttacctcccaggtgcccggcggcccgggacgcggcagctccgcggcaccggctcctcctcctcctcctcccgctcctactcctgcccggcccaggcggctgctccgcgcccaccaaagcgaaactgccggccctgccctgtcgctggtcctggccctggccctggccctggcggcgttggcagggccggccccaagccgggggctggagtgggcggcggcggcggcggcgcacggggccagagttgggaggaaacttttgcgccggctcccaactcctctgcggcgcccgcgctctgggctcctgcggtcccggcgacggcctgggcccggctcttaaaggggccgcggcgctcccgggccccgccgcacgctgggcgacgacgtgccccggccctgcgggccagtaactggagcccgggagcctcgtctcgtcacctgggtctctccctggctctctccctctcgcacgcatgcacacggagctctggggagttgtaaggggacctgagggctacacgctcgaggattgaaaccggatctcagaaagaacacccgagggaagagcgaggagactgcagagctgcgcccttcacaggaggggactgcagcaagatgcaaaaggagcccaggagcaggtgcttctagtcacgcccaccaaaaacacccaaggggcgaggctgccgggtgcggagatgcaggagtgccccgagggcctgttaggaactcgccttaagcacagcccgtgccgctgccatcaggagccctgggatagcagagctgaagcgaaccttggagagaacgcgccagtggaaacttttccttttacagaccctcgaggacactgagtatttggccaaaggtcacacccaagacccagatatgatcgcgtgtgttgacacatagccttctggaatgcgactaccgttgtgcattttattaggaaaaaaaaaagttaacacccttaggctcatgatttggcaggtgtgtatccatcaccaattgaaatgggaatatgtgggggaaaccaacaaattacgttagtttcattcttagctctcatgtaaatgagctcctttgagcttaacaactacccggtaggtagatattattcttcgcatcttgtgcatcaagaatggtgctcggagaggtcaagagactgagcagaccatggtgttagttctgttgaaaagaactcaggtcttctgagctcaatctctggtctctccctgcagttttcttagccatccagttcatccagcaagaccctcagggctgcatcatgtgtttctctacagaaggatgtgctcctatgtggacacacttaaattgaacgtgaattgcctaggatggtatgataatgcagaggagattaaattcatgggtttcaagaggttttttaaaaaaataaattttagctcattcatacattcagtaagtatatattggttgtcttctatgtatagaaagtcagtggcaaaccaagaggatcacgtaaaccaagtccattgtaatttggttgtaaatccaatacaaactaatttacatttaaataaaccaaagacagaattgatcacctcataaaatcagaagatccagagggcactccattgaggcaaggttgaaagcaggaactcaaactatgtcctcaggggccagctagctctgtccagctcttagctctatctgttcctcagtgtggtctccattctcaggccagctctcttcaaaggagacactttatcctctttttagagatgaggagctgaggccaaaggaagttaaatgatttagttaaaatctcattcttagaaagtagcagaggctggcttaaaacccaggtcatctgattccagagtcttcatcgtaactgctgtgctgtttcttacatgagaagtaccaatgagtgaatcaaacaaacaaatagatactgatgccgtgcattaatgtgtggccctcacttttaatattcggtatttcatggacctataga

SEQ ID NO: 3485 - DNA, 4001 bp, Homo sapiens
cagctgcttgggaggttgaggtgggagaatcgcttcagcccaggaggcggaggctgcagtgagaggacacagcaccactgcactccagcctgggccacagagcaagaccctgtctcaaaaaataaaataataaaaaagtaatataactattcagaatatattgtaaatgttacagaagtttctttgtaaaagtaactaacatgaaatggaaagggggaaaaaaagcaaagggagggtaagggcatgcaattttttgtccttcatgggagaaagtaaataaataccaactaaagttgtggaagtttaattaggttactgagagttacaagcctatccaggagggaaactgatgggaccctctgcgggagcggggaggacagcaggaaagatgcatcctttttcccgctgtgcctcctgggcatctgaagtccacgtgggccagtttgtcactgaacagcataggcccctggagcctcccgtgcactccacagccacagcctggcctcaagaaagaacagagtctggcttcacatgaccttagatcactaaattttgactcagacgttaaccagaaatacctgcacgtccaggcccaaatttttaaaattgtcctttgtatccactgtgagctgcagacacgggaacccaaacccagcagacagcacctaatggtgccaccgagtaaccatattcccattgctagttttgattccagaagacacaagtgaccccacctcagaccaaacagaagcaaggacaactttgcagggagcatctcggcgaacttctagaagcaactgtccccctcccaccagaacataagctaagaagcaaacagctcccattgctgtcagcacagctgtacaacaaaaaggagaaccagtttcaggatgaggccaacaaggtgaacagtgcagtagaacacagcaaggatgtcagtcctggaggaggcacctgcagagccgggccctaccaagcagagtgaagaagtctttcagaggcaaagcctcccagagaggagttcagtacccagaagagtaggtggacgtgggcctggaagggccaagcatgagcccagagcctcctatgcctgcccaaagtcttaattttatccccaaaatgaacttttaaggattcaatgcttaggagtaacatggccagatatgcattttacaaagattactccagggaccatgtcggtgcaaggctggaaagcaggagaaaggctacagtaatccaggcaagaaattataaagtcttaaattaaggtagcagcagaaagatgaagagagggaacccctaagagaaaaatggacatcgaatggtactgagatgcggaaggtaaggacgagaaaggcctcaagacggcagcgcaggcccctgccgtactctgggaaagaaaaattagtgaaaaaattaaggctcaagtccaggtctttgctgtaaccacgagcgccggcggcgcgcgcccccgaccccgcggcgccggctgagcccgcagggacccacacgcccagtgcaggaggctggcgggatccgggctggttctcctggagctcgccccgcagggccggctgcggtgaagagagcgcagggtcccgaggcgacccgaggcgcggggcctcggcgcccaccgggcaggctacactgaagggcaccccgaagacgctgggggcgcggggcccagggccaacggccgcaaccccgccgcgatttgggcacggagaggacgcgggctcggcggtgcgcgaagggcgacgggcgcaggggcgggagacccggggtcgggctggtctaagagtcgggcggcggatcctcctgggccaggggcgcggagccgcgcaggccccacagccgccctggggagatggcggagcccggcccgctctcccgagcgcaggtatctcacctggatcaggcgagggtcacgccaagccggctacacaccacggaaaggagcccttccgcgcttttatcccaccgaccaatcgcacagcgactagcaccgattgacaagctccacggaccagccacttgcgcgtatgggcgggactaagctagccagagtctagaagcccgcgctaagggttgctagggacgcaccaaacacccctacggcgcttcggaggagccaaaggaataatgggcgcctccgcccccgggccgggcagatgcggtttcctcccgactcgcgatcaaaatgggtgagtagcgcagagctcgcctcttggaggcctctttctgaaggcggaggacgcggggcggctcgttcatgggccgggtggctccgcagggtagacgaaggctgcagcgtccgcactgggctgggaacgacttgcaaggggagcccagctggcgccccggagccagccagctggctagcggccccaccagcgcaagtgccccgcacctgcccgcctgctccgagcgtcaagagaaggcggcatttcgcatgggtaaaatccgcgcggggacgccgggagaatgttgttgctcttgccgttcggcccattgtacagacgcagccagcgaggctcgcagaggtcagggatgcacgtaggactggcccgcaccttgcagccacggaaagatccgcctggcccgcggcccctccacgcctccgaggtcgagacagtgacataagtcaactctcaagcccagggcgtctctccactctgcctagacgtccactccgtctgcctgcagctacggctctgtgcgtcccgcttcgactccctctgctttccttcccagcttctcgcctccagactgttccggctccgccgcctgaaattacctgctctgggggaggcgcggcgcgcggcctcatgacggaactacaactcccatgaggcgctgggcccacgcaggcgcggcgcggctgaagtcgccgcgccggaatcccattggcagggccggctctgaggcgggagccctgattggctgaggggtctgaggcgacagattccggaaaggggaagagcagccaacatggcggcggaacgcggcgcggggcagcaacagtcgcaggagatgatggagggtgagcggcccctgcgggcggcggcccaagggcccagcgggcggggggagctgcgggctggaactgctccgtgcctgagagaaactccacgtcctgcctctggccgccgccgcgcggccccctgacagctgacagccggacccgggggagcgggggaggcgctggacctcgggggagccccggcccgggggcggcagcggccgggaaggacccagagctagggggagagcggcggcgcgaggccaggccgggggtggggctgaatgggacgcggtggctccattcagtccagttggagcctcgccccgagcctctgagattgacgggcgggggagcctcctcggtcagctgacgaggaaactgaggcgctgggatctaccagagtctgctccttggttcacgtggtgagggtggagaagggtcttctcttgaaatcgaatggactgttgggaaggggtaacaaggaaccggaagattgagttacacaaggtgatacctgttttcaaagctgtcatagttccaaaaagtctgaattcaactttcttcctcctcattcactttgttggaaaaaaaaaccacatgcatatatgtatatgttatacgtacacatgtgtttataattttctgcatatctgtaggtacagtcatatacgtgcacgtacagtatgtgtgtaaaaatgcgtgcacacacccacttagcaactggggaatcagttgtgtcatcagcttaagtacttttgggtcccatggtttggtgaggggtacagacctcccagaagagcagtcactgccttatgtgaaaggggtagggaagaggaatgtggagctggggaaggagggcgggtgcagcaggaaggcctgacatgttagggagtggtgacagctgcagaagcagggcgagctctgagctggagcctgaagaataactcgaaggcaacgaggttggggatagggtgag

SEQ ID NO: 3486 - DNA, 4001 bp, Homo sapiens
cccgtgcactccacagccacagcctggcctcaagaaagaacagagtctggcttcacatgaccttagatcactaaattttgactcagacgttaaccagaaatacctgcacgtccaggcccaaatttttaaaattgtcctttgtatccactgtgagctgcagacacgggaacccaaacccagcagacagcacctaatggtgccaccgagtaaccatattcccattgctagttttgattccagaagacacaagtgaccccacctcagaccaaacagaagcaaggacaactttgcagggagcatctcggcgaacttctagaagcaactgtccccctcccaccagaacataagctaagaagcaaacagctcccattgctgtcagcacagctgtacaacaaaaaggagaaccagtttcaggatgaggccaacaaggtgaacagtgcagtagaacacagcaaggatgtcagtcctggaggaggcacctgcagagccgggccctaccaagcagagtgaagaagtctttcagaggcaaagcctcccagagaggagttcagtacccagaagagtaggtggacgtgggcctggaagggccaagcatgagcccagagcctcctatgcctgcccaaagtcttaattttatccccaaaatgaacttttaaggattcaatgcttaggagtaacatggccagatatgcattttacaaagattactccagggaccatgtcggtgcaaggctggaaagcaggagaaaggctacagtaatccaggcaagaaattataaagtcttaaattaaggtagcagcagaaagatgaagagagggaacccctaagagaaaaatggacatcgaatggtactgagatgcggaaggtaaggacgagaaaggcctcaagacggcagcgcaggcccctgccgtactctgggaaagaaaaattagtgaaaaaattaaggctcaagtccaggtctttgctgtaaccacgagcgccggcggcgcgcgcccccgaccccgcggcgccggctgagcccgcagggacccacacgcccagtgcaggaggctggcgggatccgggctggttctcctggagctcgccccgcagggccggctgcggtgaagagagcgcagggtcccgaggcgacccgaggcgcggggcctcggcgcccaccgggcaggctacactgaagggcaccccgaagacgctgggggcgcggggcccagggccaacggccgcaaccccgccgcgatttgggcacggagaggacgcgggctcggcggtgcgcgaagggcgacgggcgcaggggcgggagacccggggtcgggctggtctaagagtcgggcggcggatcctcctgggccaggggcgcggagccgcgcaggccccacagccgccctggggagatggcggagcccggcccgctctcccgagcgcaggtatctcacctggatcaggcgagggtcacgccaagccggctacacaccacggaaaggagcccttccgcgcttttatcccaccgaccaatcgcacagcgactagcaccgattgacaagctccacggaccagccacttgcgcgtatgggcgggactaagctagccagagtctagaagcccgcgctaagggttgctagggacgcaccaaacacccctacggcgcttcggaggagccaaaggaataatgggcgcctccgcccccgggccgggcagatgcggtttcctcccgactcgcgatcaaaatgggtgagtagcgcagagctcgcctcttggaggcctctttctgaaggcggaggacgcggggcggctcgttcatgggccgggtggctccgcagggtagacgaaggctgcagcgtccgcactgggctgggaacgacttgcaaggggagcccagctggcgccccggagccagccagctggctagcggccccaccagcgcaagtgccccgcacctgcccgcctgctccgagcgtcaagagaaggcggcatttcgcatgggtaaaatccgcgcggggacgccgggagaatgttgttgctcttgccgttcggcccattgtacagacgcagccagcgaggctcgcagaggtcagggatgcacgtaggactggcccgcaccttgcagccacggaaagatccgcctggcccgcggcccctccacgcctccgaggtcgagacagtgacataagtcaactctcaagcccagggcgtctctccactctgcctagacgtccactccgtctgcctgcagctacggctctgtgcgtcccgcttcgactccctctgctttccttcccagcttctcgcctccagactgttccggctccgccgcctgaaattacctgctctgggggaggcgcggcgcgcggcctcatgacggaactacaactcccatgaggcgctgggcccacgcaggcgcggcgcggctgaagtcgccgcgccggaatcccattggcagggccggctctgaggcgggagccctgattggctgaggggtctgaggcgacagattccggaaaggggaagagcagccaacatggcggcggaacgcggcgcggggcagcaacagtcgcaggagatgatggagggtgagcggcccctgcgggcggcggcccaagggcccagcgggcggggggagctgcgggctggaactgctccgtgcctgagagaaactccacgtcctgcctctggccgccgccgcgcggccccctgacagctgacagccggacccgggggagcgggggaggcgctggacctcgggggagccccggcccgggggcggcagcggccgggaaggacccagagctagggggagagcggcggcgcgaggccaggccgggggtggggctgaatgggacgcggtggctccattcagtccagttggagcctcgccccgagcctctgagattgacgggcgggggagcctcctcggtcagctgacgaggaaactgaggcgctgggatctaccagagtctgctccttggttcacgtggtgagggtggagaagggtcttctcttgaaatcgaatggactgttgggaaggggtaacaaggaaccggaagattgagttacacaaggtgatacctgttttcaaagctgtcatagttccaaaaagtctgaattcaactttcttcctcctcattcactttgttggaaaaaaaaaccacatgcatatatgtatatgttatacgtacacatgtgtttataattttctgcatatctgtaggtacagtcatatacgtgcacgtacagtatgtgtgtaaaaatgcgtgcacacacccacttagcaactggggaatcagttgtgtcatcagcttaagtacttttgggtcccatggtttggtgaggggtacagacctcccagaagagcagtcactgccttatgtgaaaggggtagggaagaggaatgtggagctggggaaggagggcgggtgcagcaggaaggcctgacatgttagggagtggtgacagctgcagaagcagggcgagctctgagctggagcctgaagaataactcgaaggcaacgaggttggggatagggtgagggaaaagagcaagaatcactcaagacggagaaaactgctgtcaaaaggtgtggaggagagtttgaccaaatcgtatgtggtggggatgggggcggtagtgttaagggtcttggacttcataccctttgagtctttttaagaagcgcctcttcatatcctcccactccctcttcagctgtttccatgtcttggtaaatgacagatataaaagcccggcttttctcactgtcccactcccacccatgtcctgttagtcaaggagctctgacttttacttttgaaagtatctccaaatctccgatacgtcctccattcccattgccagtaccttaactcagaccttcatcatctctaggctagattgattgtccctgttcaccagcccatcatccccagtacaccaaagtcattttcttacatgcagagccactgtcccatgttccagaccctctctgctgccctcaggcttcacttt

SEQ ID NO: 3487 - DNA, 4001 bp, Homo sapiens
atggcaccaggacgtatggagccagtctcctggtacctgcacaggatcttggagacgcagccgtgggacacgcgcagctggcgcgagatgacgcagggccggatgccgtggtgggccatctccacgatcttgtggcggatgtggttgggcagcggcctgccgttgataaaaacaccgccgagctggttgacgcggccctggccgaggggagtggacactgtgggaaggtgaaaaagagaagcaagggaaaagtcactggaggaaaataaaaagcaaagaacagcagcacgtaatttcgcagtcttctgtcctatcctcatgttacagcaccgacgctgaaactgctcgacatcggactcccagacccagacctcctttcaatcacatttgttcaaattattcagcaatatagcgcatgtaatcttgtgtaaagacagcaaatggggcaaaataattctccccagagaaagcgtcttccccttcgggcccggggagtggcaacttaggagaccctgcagctggtagagagtctagcttgctctagaaacagcctcctggcgaagagaagttcacccaggagctggccttgatgaactctgctcccaccgatccctgtccaattgggatctctccctttctaagggacttgggccagctgatagcccttggggtttctagccaaaagtgcagcagccaagggtcaaagagggtccagaaaggaggcccaagcagcagtgcctgtgtcacctgttacatcttgggacagagaccacagcagcggcagggctgttcctgggcccccagcccccattcttgctctgggtgttacattctactctaggctgggtgtgaagggagtgggtggcgggggcgatgagcatctctgctggggcgccctaacctggaaaaccattgaaaacggctcaggcttgcaagacttcctgcctccccgggattcccagaatcttcaagtggacggaaaggcgattcctaaacaagttatagaaacttctagatgctatttgagatacatagaattctaatttatttaattattctaaaaattccaatcacaatggcgcggcgttagccaccacaactttgcagggcaaaaaaaaaaaaatacttcctgaactaacatatgtttcacaagtgtgggcgcagccgggacaatttcgagacaacttcgagacaatttcgaatggacaaattgcggagaagttgcttctgccgctcagaagccggttcacctccttctccaccgcggcatttccaaaacaacagggacaagtctccccggctcgccgcaggcctgaccgcccagctccgccaggatttgcagagagcagcgcgctccatttgcagaaaggaaatcgagtaggtcctcgcccccgactggtgcttcttggggtgtggggtgcccagggaatgggcttcctggaagcaccaaaggagcctgcggagcctggggatggggtgaggcagccggtcccaggccctgggatccaggcggcgcgctgaggccctcccttaccttccagcgggaacccgctacgcgggtagttctgccccgggcccggccgcatcatcctgggcacagcgccggccagcgtggtcatcctgggggcagcttcgctcggaaattatatccaggtgaaggcgaaacggaaaggcgagtgcggcgcggatgaccctcgggaactatccggagcgtggagagcccctccccaaaacggctggagagagagggagggacgcggggaggggggctgtcggttcctagtccagaggccggagctggaacccgggaaaggggaggacggggaggccccggagtccaggatcccgagcccagggcggaaaagtttggtacgagtctgggcaaatgttccagcgactggggtccctgaaaagggggctcagagagccacggcgagccggggagcctggtgaggctggagcgcggcctgcctgagtctcctcctgtggtgacaccgagtgcggggatccgggctcgggagcatttattagttcttttacccaaagcttggtcaggagccctgagctgcgattggccgacgggtagaccgtcccgggtggcggagacacgcgctgattgggcaacagcgaccactttctcttcccatctctggtggtgccgaggcctctgctggccccgagggggacccgcgctgcgccccttgcccaggagagaaggttggcccggtggaaactgagagagacagccccagggagatggcagttgctgagggcggagaagttcctgtctctctgtctctgtctctctgtctgtgtcactctgtgtgtgtgtgtgtgtgtgtgtgtgtgtgtgtgtgtgtgtgtgtgtgtgtctttctctgatcactctttccttgactttctatttccctctctgtctctttctgtgcctctgtgtgtgtgtctcgctcagcctctattcctcttgtgatttcctgtgtctctctctatgtctcattttttctacctgtaggtctcgctctcatttctcttggcttactgccactggagggggcacaattccaataagaaggcatctggggccccagacatatttagctttccttcctgtggtcagtgccccttggcctaggcttgttaaggggtcctcccgatggggctcctcctgggaggagtccagggtgcgctgatgttcttttgtcttctccgtccgcaagcggggctaatgtgaagcacaggcagccgtcgctaggcccaagcactcgttagttgaaggctgggggtatgggggagggtgcagaaaaaaacctggctcctcttcttggtgtaaaaaccgctctggcaagctgcggttctaaatctctacatatagatccccgatgcgtcgacagagatgtgtctgtatgttaaagttttgcccgggttcagcgtttgttctcaggaatttattatggcattcagactaaactgctggaaaaataaaaggaacgaagtcttggctaggagctgaagtgtccccagcaggatatgacgccaggagtgttgtaaagactgtctgtccttagagaaggtaccattgtgcatagccttttatttataacttggtaagtgccagcgaactcgcctcctttacacccccgagtgccagccccgcgctctgcactgcgctttattcgctcgagcctattcagggactgtcactccggggccgcgaggtattcagggccttaatcaatcaaaaggatgagaatcgggcaggtttttccctttgaaataaaggaaacaatgacttctgggcttcaagttcccccttttccttttatgatttttgaatttttcctgcccctggagggagttctccactcctctctctctgtccccctcccccacctcctttgacagttttgacgtgaactcgggcccccaaccctacttccccattccctaattaaggcaaactcagaaggcaagatgtaggggggtgtggggtatagccgctcagcagtccacaagttggccctttaaaaacccactcaccattggggaaaccaggcaagctttcagcctgcctgatgccagaaggcttggttgaccctcagagccacggagacaggtctcaggagactcccagaaatgtctggacccatgaaggaggcatgtgccttgtttaacctggttttacattaaatgattcaatttttcaaggggaaaattttctcattttctttttaaggcgttggggccaccaaagcctgtgtccgtacgttttaagccacttctcagcgatagcattttgagagctagactttttccaagttttcttcttcccaaaggttaagcagagtcgacagagcactttctggggtcagcggtaattgctgtgtgaaggaggtaccagaagtgtaatttcaagaaggcaaaagtaggctcaactctcagctaaaataaactcttggaccccgcgagcagttaaagaacatctagagctgagtctcatttgt

SEQ ID NO: 3488 - DNA, 4001 bp, Homo sapiens
cagggatggtcctggcgatgtctggtatcgtaccacggtttggctaaagattaagggactaaaacctgatcctgaccttagatagtggcctaggagcgctcgtggttccaggacgcggaccgtaaagaggtgccagggagctctgctcggtcccagggctccccaaccccgccgcgccggggaatggctgcgaggtctctcccctgaggaccttgaagggaccccgcgccttctgggggcagccggacgattctggcccaggtctctgaggggaatgggggccgggagggagcattcgtctgcagctctagagagaacccgagtgagaaatcttccggcgccccagggggttcccgctcccctcctagttgggccatggccctgggactggagactgcgccgcagagcccgggcccccgcagtgcgcttggctaaatagagatctcagcctcgctgcgcgcccgatccgaccctccttattataacaaatgtcccgtttgcagagcgggacatcatattcgcggagaattcattctgaaatattgatttcctctcacttcgccggcccaaatcgatagcgatgcgccctggccccataaatcgccttctctgcggccggccgggctccatccatcactgcgggccgcgctgcgcctccaccgctgtccgcactcgctgcgcgccgggacggctgcgcccaccagccctgaccctggagctccttcccagcaaagaccctgcccagccctggccgggaagggggaaaacaggcatcgcggcctgggagctcgagtgtgtttgaaggccctgcttccgggcgcaggtggggagggggttttgactccgcgagcggcttagtcctcaccagccggacgccccgcgcgcggcgcccggcctgcccggtgctgggccaggaggagtcggagagcacctgagtgcgctgccggctcccgggcccgggaccaccggctccattgccgttggcttgagagatgcggggagctcacagtccagccaggggagtcactgggaaggactgcgcgcacccgaggaagaggacttagaggtcggggacggggaaacggcaagtccagcaccggtgcagcccagggacagagcacgaagaatgtccacactaatgcgccatgcaaggctgggaatggagctcaaaggaaaccccctctaactccacagagatcccctcaccgatccatgtggtccctcgaaaccgggcaagggcggctcagctggccgggtggaaccccagtgcccgagaacagcgaggcggctccagcggagggccaggccccaggcgccccagctgggtccccacgcgggtgggtcccgcgaatcccgtgctgacgctctcgagatccaaccacccgagcgcacgcacggacgctcagcggcgcgggggctcggggatcctgaccacaccgcgttcttaccagatctgatggagttgtgaggcatcgccggggagtcgctcgcagcccgccgagggctcggggcttcctcccgtaggtccgggccgcgcctgccgctgccctgcacaaacccaggagaagggcatgagatgcgatgagattcgatgcctgcatcctcaggccccctccccaggcctcatcctttacacctgcatcgtctgccaggagtaggaggatttttaggcgaagtagggccaacctcagcctagcctagctaacaggcttcccgggaggatcaaggattgggagtgcgctgaagaagctccagactccaacctccgtgcccactccctccgctgtcccagtcttatcccgtttaacttgggagggaaaaggctgccaggcatcctgggaccctctcctttcttccatcccccgtcctcactgctagccagcttccagctaacccctgggtgacatacctggccggccggctgcaggccctcactgcttgggtccgcccgcgagggtgccctgggcccggtgtctctcctccttctgaagtttgttcccatccacccggcatcaccgaccggttttatcccgctgaggccctgggagatgggtctggcgaggctcgtaggccgcggattggctggctgggtgcaggggggtgcgggaaggggaggattttgcaagggggacatggctgagtggactcaggagttagaaacattcgctgggagcttctgtttccagcggagggaagagggaggcagctgagccctaactcagcaggcctggaaatattggaggagtggggaacagaggcctaggagcctgaggatgaggttctctgggtcctcctgggtcactgaccaccagaagtgagagggatggtctctgtaggatgccctccttgccccctgtctcccctggtttgctcaccaggaagcagccttttcttttgtaaaaggaaggagggaacttctgttttatgcctgattctttaggtagagcctgctttcggggctgtaggcaagatgctattaccttctcaccacagctatgacctcttccagggaagaatcctgagcagcacctgaagccattccctctgttctacacagatagcgttcacacccttgcattgtcaggctaacaaaattgtcacataacccattccacagcaactcctcgcctctctcctctggaacacacacgcagccacctgccctctttcttgctccttgaggattttgaacttggaagaagagttcaggggaagggcattgagggcctagacttcatctctgtgtggaaaggccttagaaaggaacaggactgagctgacctctggcctggtctgtaggaatcaatagcctcagcaatatgggggcctgggtgtggttaagaaggggtccactggtgggaatgatggcagggttggtgagccctgggaccgagcagagctgcctggcacctctttaccttagtgatggcaaaagctgccccctccttcctcatagttctctcagtcggggaaccggggtacacgtaagattgtgagtgggtatgagtgagcaaatgtcctggaacactggcaggcctgggggtcaaggcctggatgctcctccaatctttggccagacctctggactcaggattacagtctagaggacagccatgcccttttcagtgatggctctgcaggcctggtggggttgttctgggacaggaggctaagaagccagtgggaggggggcaaggaaggtgcaggggaaactgggatattcagggggattggatgtgtgtgtgtgtgtgtgtgtgtgtgtgtgtatgcacatatgtacacgtgtgtgaaaacacatgaactatttttctgaattaaaaaagttttctctttcatgtcaatccacaacctccttccacccagtctttctcatttctcaatttaggagaaatgaatcatcttgtgaaaaaagagagaagaagatgtgtatccctacatgtttcctccacatttgcaaagaggggctgtaaacaaaaatagttggtgcttcatcattttaaatctttctctaaaattgtaattttaaatatctctgtggttttcaaagctccagatccctaacttctctggcagtccctcccagagagagacaatccaagggtgttgggatggaaatggatcttggcataggtcctccggaccccatgggccagtttgctgccctggattgtgtcctgctgcaggggaggtgtggagtgtggcagccacagcagaaactctctttgtccacccaggattccctcccaccagggaggcaatgctccagggtgaatctaatacgccctcatttcaaacagctctgacaaccttagagattctacccaatctaaggttctgatacgtaccaataaccattgactctcatgcaatcattcttgcctgtgcacatcttttctgcccaagcaatgaaccctctccctttcctatcccctttttgggcaaaatttcttagaggacaaatccagcaagttatcagaacattcctgtcccatgtataaatt

SEQ ID NO: 3489 - DNA, 4001 bp, Homo sapiens
agaaaaccttgtttctaccagagaaatgggcagaggcctctctctggaacttgaacctctctgtccctggaaacatcccaaagcaggcccagcctgccatgttcctttgttggggcacagagggaatggaatcttaccgataaggtgagaagagcttgagagaataccaaggacgggcccacccttctccctcctccctccaaacacctcaggctaaaaggggagggaaaaaaaaggcaccaacaaagagtttaagacagcaattcccagctttttcaaatatgaagcattttttaaccaatccgttttttaattcttaaattcttgacattacagaactaaactgaaatttattaacattccactcttacatttcttatcgacaaacagaaataaaattcatgagccaaaaaacccaaaacaaaactaaaaacagggaaaagcttataaaactaaatatggatcccagcattaacagctgaacagagaatgtgatttttaaattcttagcggatgataaagttgtgtagaaactgaacacttacaaattatttaaaacctggaatcactgaccagaaattacacagttggatcatgggagaacagcagaaaggggttattgagggaacctacactgttctagctgcaccccatgcccttctcagaggaaagcctggcattgattagatactgggccagactaatactggcagcagagccagtgatagtaacctgcctaccagaggagccttccactgggttggcaattttgatctgggccccggacatctggcggatctcattaatgttggcgccttggcgcccgattatgcagccaattaagttatttggaatggtgagttcatgggtggtttgagtagatgcatccaaacttgcccaatagcctttcacctctggagagctggagtcaattccggcgaatccggtcccgccgtgcatcatggcaaagtgagactgttgtcttgccacctggttcagcttggccagatcgagcggagaaatggtgtgttgtccttgaatcgagtaggcatctagaggtggtccctccaggtcatgggtggcatgggggtagcccgcagcgtcgctgcaccgatcttggccgcccgcgcagatgactggggagctggccggcatgggctggtacggaatggtcatgactctcccttgcggagactgggagagcgtctccagcatgaccaggcaaatctgcttgacacactcggtgacagactgcggcacgccagcgatggtgatggcccgctcggtggagttgggcagcatatcccccgccacctggacctgcgcccccgtactctcgcggatctctttgatcttacacccgcctttcccaatcagggagccgcactgggtggccggcaccaccagcctcagggtgaccgggggcctgctggccgcggtactgttggtcatggagctgttgatatcttcctccagcttgtcgatgatcatagcgaaagccttaaagatggcattggtggggccggtcagagtgatgattctctccggacaattcccctccgagatgttgatccgcgcgccactctcctcgcggatcctcttaaccgactcccctttcttcccaatgatgcttcctacttcctttccgtgcataagaagccgaatggtgagagtcacatttagtccactttcagtcacaccggcatccatggcgagcggcgggcggcgttcgggggagttgggctcgttacgtggtcaagtctttggcggctggcggggggaggggaggtgtaggcccaaaactgccggcgcgaggcgagcgagggccgcgggagcgagcgggagcgggcgggaggccgcagcgtagtcgcaggggcgggcggcggcggcggagggggcgagcggggccgggagcggcgggcgggcgggtgggcgagggcgcggcggtggcgactccggcggcagcctcggcggtctgggcggggcgggaagcccgctttcaaccccgcgtaccctctgaccccggaagtgcttgctgcgcaggaccccttgaaaaaaaatgaggacccgtcttttttaggtcacaagattgcgccaacccttacatggtccttaaaaaaaaaaccttctgacactgcagtagtgaaaatgaagcgcacgatgggcggaagctgtgagtccggcaaagttttaaaatgatgacgtattttattaactctaacggcactggcgggtgactgaaaatactagtgctgtgtatgcgggatagacattattttcctgccctacatgaggggctcgtgcgcggaacgacatgggcagccccggcggaaactgcaggcacaagccgggacgccgcgggtttaaaacatgcgcgtgaggtgaccagagcgcgtgcgcgagggtgtggggggatgggaggggcagcagccctcttccgggggggaggggcggcgaggcgaggcctgcggagcgggtgcgcgcgggcgggcacgtggggccctttcgtccccggcgtccgggcgccctgcatggatcccccaccccagctcctgctccccggcggcggccggtgggcagaaagaccgaaacccactcacggccgcctgccgaatcgcggctctgctgtttgtggggcgtgctagaaacgtggtcctaaaaagaatggcgtccatttacataatgctttgtttgcgtttcgcaagtttctttcggttaaagccacagaaaccccacctcctgcccttgtgtcgtttccaccgcggcacccttttccgacattagaaacaatagtgtacgcctgtggaggcctcgtttgttcaggggctgccggccagggcttcaggacgtttctgcggctttccccgcgcggcctgggctcccgcggctgcttttcgggcccatgggcgcagccactgcgccaggctcaaggggggcggccccgtcagggcccgccatcttggaaggccttttttgccggttcttcccgctgaggaagtgtcgctcaagacgctggcctatgagttgtgatttctgccttttccccttcctccttgggctaagccagaccagaaagggccccgtgcgcaacgtgcttcacaatctctcagggaaagcggctaacgtggcgctactccgcctcccctgttccttacccttggggcggccgccatgtttcctgaacacaaaatggcgacacgtggttagcattcgtcgccaacgagaaattggggtcggcccgaaagctctagaatgcacccctcttcctccccggggccttccacctccgcgagttttatgacttaaaaaagcccacaggctggtctgaaggtcggaggcctaattttaacgcgttttcctccctttaatttgaaacgggaacgcgaatgactgtaaaatgtgggcacaatatttaatctctcgcctttttaaagcttaatagtggataataggggggcagtatcaagggataatttgggtccccacagtaccaaagcatttagaaacctctgtttaatttaaggaatgagataagttactgcttttctagacttcctagcatgggctgttgtgctggagagaacgagagctacgaagagactacagtgcctctgactttttcataggacagttggccggtgaatcttattaatagtttaccacaattaagtgttcatttttagtctagaagggacaggcgtttattgtgcattggccagtgccagcacatccgatgcaaggcagttcaccgtattctatctttaatttttaccatggtcctctgaggtaggtgttcttatctctctctctctctctctcttttaaacagaggaagacaaacataaagatgaagtgcttaattcaaggtcacacaatgtcggggatggacctccagatttccttactggtgagcacattttccaggtttttctgtaaatcagggttttggaatttaaatactatttaaaacgtttaggtgagcttgtcatttaaatgagccc

SEQ ID NO: 3490 - DNA, 4001 bp, Homo sapiens
ggtgagtctccttagagaggccctcccctcagcccttctcacctgcaggacgcttttattcttgtctttgccagaactggggggaaatagacacaggttagggaatcctatctttcctcctcttccccacccagagccatgatatactctcttcaaggggataggcactcactcactgctcagcctctcccctagaccctccctggctctgggtcattggcactgtcacctcctgcaacccctgaccttctcctcacctcagccgctccaggcacaggttcaactgctcatcatagcgatagtagtgggctttagagtggtcaaagctgctgaaggggaggccgaggttgctcagtgctggctctgagaaagatagggtagtgaggtggctggtggcacacattccatactcctctttccccagagagcaaaactgggcaagaagaatgctctggggtctttactgtcccgcggccaaggacataccttccccagtgggctgggtgacccggtccaaacctcgggactggtagaattcccgaatccgtttctcttcacctagaagaaggtgaagtatgagaataaagtattagcccttcggggccgggcgcggtggctcacgcctgtaatcccagcactttgggaggcagaggtgggcagatcatgaagtcaggagattgaggccatcctggctaacatggtgaaaccccgtctctactaaaaaatataaaaaattagctgggcatggtggtgggcgcctgtagtcccagctactcaggaggctgaggcaggagaatggcatgaatccaggaggtggagcttgcagtgagctgagattgcgccactgcactccagcctgggcaagactccgtctcaaaaaaagaaaaaaaagaataaagtattagcccttcctcactttttgtccttccctcatctttggccttctgcctacgtgagtcctaccaaacccgtcacctcaagctgccactcagcaattagtcctcaagaggcccctcaaagtcaggttggtgactcactgtcttgcaagccaggcaccagcttatacacgatgtcctgcatgacccggtccagtttgaggttgagcagtggctgtgtctcgtggatcttaatgttgcacatggggcagtacttgctagtttggaggtacttcacaatacaactcttgcagactgcaggaaaagaaaagcagattctcaggccctctggaaactggattcatgggctgggtggggtgcctggatgcgtgaggcaggccgcacagaagctggcagtcagcttggtgaagactagggactggaagaactaggcagtctccaaggcactcacaagtatgaagacactctgtgatggtggtggcatccacgaagtagccggcgcataggcagcaaacaatgtgttcattcaagtctttgatcttcactcgaacctcctcctgaagatacaccctccgtcaccaatcatccaccctcaaaccccaacccgtgcgccttcccaccttgggggtcgcctccttcatcacactagacggccaagccccgcgccctgcgccatcagccggggattagctcctgggggctggcactccccctccgcccagcagagggctccgcgcacagcgggggcttccctcacgtggactcgcctgaccctcctttcccaggggagactacacaacgtcggcgacacaacgcgcaggcgtcctaaccggagtttggcaacccgatcgcaaccacgcaggcgcactgggcactctgtctctgcgcaggcgcactgggcgcccggccagccaccgcccgtcctttagcccgccccaattcgcaccgctggccgaccacagcagtaaccctgccgcccttgcacctcgttccgtagcgggtccatcttgtacactgactggagctggttccgaagcctcatcgcgatcgcaatctggcccccctgaggagacgccatcttaaaggctgatcccagccggccacttccggtgccgcctgcagggcgggacttgtctcccagcaacgaggttctaggtcttttcggattcgctcaccctctgtaaggccccgcccacgtccctttctccctgtgtgctcacctgagccccaccggcccctcccctgctcaatccgtaattaaggagtgggggggggggagcacagggaagggtcttatctcttcaacctcctgtagaaatcatcataataggccctacgcgacctcaagactaactttcggagcctgcgaaagactgccccctcctacccccaaaggcctggcagtctgtgcccgctacccgctcagggtcgtcggtcttctgtgacgacgaccctgctgaagaagcccctcctgggtcctctcctcgtaatgccgccctgtcggcgtccgcgtagcggagcttcgtccagatggcgggtcttctcccggcttcacggagggagtttcttgggctttgcagagtctcggagagggtgccgggggatggggagtgagagacccccagggacttggtagtgatcttattcccccattctcccccctgctgccggggatggggggggcaggccctggttaatgatgatgatttaatcatcggcgcctgcggaggcctgggacagactaatgcagagcagatgccgaaggaggaggggaggacgactaggacactgccacacacagacaggcttaggcagcgagcgcctgtagtagcataggcccagtcccgcacttggggactacgcggggtgctcgctcgagagctctacaccgccggctctgggtacttaaaaagggataaatttgctatgaggtattaacatcaaatgcaactggagatacgagaagggagagattccaatggagacctcaaaaaaggctttctggagaaagtgggactttgggcacaatttagacttgggggagggggtggaagtgtggtgaaatagaaaggacgtggaggggaatgaccagaggacaggaaggtcaagatgtagatttgagagtggtaatagaaaaagcagggccataaagagttgcgatttttagcctgagggcaattgggagctagcggacttttttgaagggaggttatcctgtgaaagcgacatttttgttcatttctcttcagagtgaattgaagtgaatatgcagcaagaagttatgagattagtgattaatcaattattcgttacagcccctgtttacctacttccctggtccgagccactatcatctgtcctctgtagtggcctcttgactgttttccttgagtcccccttcgcctgttctcaacatcacagttgagtgctgtttctcagagctagtgattctgataaaacatgaaacacaaaggacaaaggacaatttttgagatgtggatatgtttattatttttatggtgatgatggtatcatgggtatatacatatgtcaaaacttatcaaattgtacacttcaaatatttgcagtttatatgtccattatacttcaagaaagctattaaaaataaagttgaaaaattaggttgttccttttttacgtttaaaacctgttgagagcttcccttttcaatcagaatgaaagtcaaagtctcagagtggtgtgcaagggcctgcatagtctcttcagatacaccaggatatccttccactgtgtccccaacttgaaatgcttaggtatccaaaatggctccctccttctttcaggtctttactcatgaggctgctgtaatcactctagatgaataacaactcacccaccctttcacttccttgctcttttttttctggttagcacttattagcattctatcatttattattatttaatatacatttctaatatatattatattttctagttattttcagaaaatattttctagaaaacatatttcctagtttttcatctgccttttccactagactataagcttctcagtggcaaggattttttttcctctgttgtgttcacagatatagctcc

SEQ ID NO: 3491 - DNA, 4001 bp, Homo sapiens
ctcacccctgtaatcccagcactttggaaggccaaggcaggcggatcacctgaggtcaggagttcaagaccagctggccaacatggtgaaaccccgtcactactgaaaatacaaaaattagctgggcgtggtggcaggcacctgtaatcccagctactcaggaggctaaggcaggagaatcgcttgaacccgggaggcagaggttgcagtgagccaagatcgcaccattgcactccagcctgagcgacaagagcgaaactcctcaaaagaaaaaaaaagacaatggcagccattcccacccccaccccatggctgtaattccagataactgaagatacagacaactagtgtcccattacagcagaactgctcctaactcaggcagtaccaactaacaagaaagtgaggaaaacagttttaccaacgtctctgtaaggcaattaacaaggcagaaatttcagttctccatctgataaaaatatccggggatgtcacacagtaatctggtgagctccaagaccaaaattacatacccaggtctttgacaaaacgtttcatgtgcagatttaaaggatggatgacagaacctcctgcctcgtattcttgcccctgcaccatcatggtagccaggcggcccccgacctcttctctttcaaacaggtctatcttcacatctttcccaaatttctgccgcaggtaataggctgctgaagtgccaccaattccggctccaataatcgctatgagggaaaaaaacagaagattatattttccccttttaccagctctgtgagttgttttgtttttgaaagaccatcaatagcagaggttgttactcaaagctattaccaacaatttggtgggggaagagtgacacctgcagcgaaggtctaactccctgaatctggacagacactgttcccagacaaaagcagtagattaattaacatattgacattaactcgattttttttccagatgcccaaagattctcacaggtctttatggaggaaccaaggggcctgcacacccttccagatgcccaactcacgggcacattagaggtggacctttccagcacgcatttttaataaagtgacggccatttatgcctagctttgttgtgtctagattcaatgtagataggttaatgataccgaagaacacaactttaaaggggggcgggagggagacaggaagcaaagagccaaggctcctgacactggagctcttgacagtggaaagagaacagattctttctgcagctgtgttagtcctaggcggagaaactgtgcaagccaagggcctctgagagcaggccgacctcagcaaagcggagctgggggaaggcggttcagcctcccaagggaagcaggcagggtcaacttgtttgcactcctccctgtgctgtgcctgcgtgagcctgttaatctggccgggcgccccaggtcaagccagaacactggagtcttcacggtcagtgttcaacgggaagatagagaaacctaggcctccccggagccccacacctaagagacaggggctacaggtacgctaggcgcctgcctgcccgcccgcccctgtccccgtccacgcccattcctcaagtgggcacctctccacgcctgggaatgcacagtcctattccgaccagagctgaaagccgccctgaagtgtgaatgggggaaagcgcgacctgcgcagctggctcggcctgcaccgctggactgcgtcgcggctgtgggatctgggcgcactgcgcagcggccgcccggcgcggggcgcgctccagcaccttcccgcgccgcccccttctcgcctaccgattttatctggcggagcacgcagctcggcgccctcggggcatccgcagctgcacagcaacagccacaaccccagcagcgaggagacgagctccgcgacgacgcgccccatggcctccacaagctctgcagctggcctcaagagccccgcagtcctcccaccgctgcgcggctgcgcgctccgcccagccccgcccccaggccgcccagcccctgcgagccccgcccaggtcctgcgagccccgccccgacctcgccccgccggtcctctcaaccctgcaggagctccccactctgggccactcagtgccctaagcacatcctgccgcctcgaagcccaccctccttcagaagacatcgaaggcagaagctggccgggcgcggtggctcaagcctgtaatcccagcactttgggaggccgaggtgggtggatcatgaggtcaggagatcgagaccatcctggctaacacggtgaaaccccgtctctactaaaaatacaaaaatttagctcggcatagtggcgggcgcctgtagtcccagctactcgggaggctgaggcaggagaatggcgtgaacccgggaggcggagcttgcagtgagccgagattgcgccactgcactccagcctgggagacagagccagactccgtctcaaaaaaaaaaaaaaaaaaaaaaaggcagaagctgaggctcgcctcagctctcctcctccttccctatctatttgggtgaagcaccttagttcttcactagtaccctcttctgttccctccgtcgctcctctcaaagaatgcgcacagctaatcgctgccagaaacagaccaaagggacaacagtacttactgagtgatcaccctgttgcgagaactgtaaggttctccgtgaatgggtaaatggtgctaactgtaaagaaaaatgagggagactgaggatggggtggcccaaggtgaagggggtgtaatagtagtaacagacatgaataaaagtagtgtacctgtaaggacaccagaatgtgccaccccaaaatacgcctctttagcctaaggattatttcaagccgaagacaattgagaagatgtagatacgatgtagatacgtgggtggaaagttctccgccttccccatttgcctaaaagcaggacataaattttatttttttaacaatttttaaatatattgcattttattacataaaagtaaaattagtaaaataatataatttgatatactttataatttataatttctctcagtataatgtagaaaagtattactctgaacacttactttttttttttttttttgagacggagtctcgctctgttgcccagtctggagtgcagtggtgcgatctcagctcactgcaaactctacgtcccgggttcaagcaattcttctgcctcagcctgtagctgggactacaggcacccgccaccgtgcctggctaattttgtgtatttttagtagagacgaggtttcagtgtgtcagccaggatggtctcgatctcctgacctcatgatccacccgcctcggcctcacaaagtgctgggattacaggtgtgagccaccgcgcctggccatgaacacctaccttaaacattacttaatttaggctaactacaatgagcctcgctacttatatttttatcatgcatcttacattttaatgtccttactcttttatagaaaaggtcataaagaatgcccaactaataaagaatctctaatatctctgatacagcaacaactgatcacatactttcacatgtgaatacaatagaaataaagtaacagcataaagtaatttgaaagctgtattatattattattcacttttcaaaaaattgttttcaaggaaacaaatatactttcaatgtaattacaaagcttcaaaaaaactccttttaaagttatatacaaataatttaacaactttaattgtgaattcatttttatactcaacactcctatttagtgtaatgtctgaagtaaagcaggacataaattttaaaaggcaaaggtatccctcttcccacactgcctggaaggacaaaggttaatcactaaagacaattttacgcctgttaaataaaattcataggaagccattggtttggactgagctcctgcactagactaggcccaacagactaaaccaaaatggagtcactcaagtc

SEQ ID NO: 3492 - DNA, 4001 bp, Homo sapiens
aggcgtcctcacccatgacccaaagcacacggagaagtcagtaaggggccaagtcctgtcgaaggcccagagctcagcagtggcagcgctgactggagctcacagtggtcccacgccaaagcagaggctcttatttatgctcctgccctcggacggggccaataagcagccgggttggggatatctcataaaacacaagggaagcacacacctgaggtgggagtggtggccccgggaatgaccgaatggcgaacgcagtgaatagatcaggagggaaaagaggcatcctggaatgaagaccactgcggccggggtggccacatctgggtcaggacccacaggaccccagtcatgcccactgcgccttgctgagtgccctgtgctgttaccagtggggaaaccgaggcatgccacctgtgagagtcttgtccggcacaagcgcgggcacctgaggcacgagtgtcaggctgcggacaccttgctcttatctttcccgcctgggtcggggagggtggcgtcccgagggcgtgcctgaagagccgggacacggggggagaggctcggctcccctcctgcctcgctcagctccccctcccctgtgacgagcgcccctctgccctctggttcccccgcagtcgtctccctgggatgccttttggccctttgctctttgccttttgcccagaatctccagttctgagtcctgagtgacccacgggccaaccttaagaggtggcgctgaggcaggaaggcacggccctgacaaggatgctgcctcaggtgccggggagcaggccccgggagaggggccgaggtggggaacccccagtcgcctgccacagtgaaggggcaccaggacccccggggcaggagcctcgagggggtgtcagggcggccccaggggtgcccctcatcttgtcctcccagtggtgtcacaccccggtacccagcagggcccagagggactgtcttaggcttggcctgggtgaaaccaccctccccaggccttggcatccccaggtgcaggctggctgggcacagagggccagccgggcacagagggtccaggagcgggctgtggtcacagtgtacacagagggcccagggtcacgggcagcccaggaagaggctccctctctcctcgatccgggagagtgaggccaaggcctcccccacggatggtctgaacagggctcggggagagccctggaatctgggcagagacccaggcgggcacaatccccacccaggagggatcctggagacagaagaactgtcctcactcgaacaggtacactttggatataatgagaaaaatatcaccagctcatctaaactttgacgtcgtaaagccaaggttagtcccacatggggctcatcccatccttaggaaaactcgagtgaggaccaaggatgcctgggcaaggcagagccgccacgcagactccccacggccaaggtttggggttctggccagcctgacccgtcattctacagaaacacgcagccccaaggaccggctgagaggggacagaggtcctgcctgcccaggagcaaagaggggacttgggccaggggaggagttggggcccagagaggaacccaggagttcgagctgcccaaagccacacagctcagggtaaggggcagagctgggggccaaggctgggcctgccacagcaccccccgacctgccagggactgagagtgaaaggtccctccagacccctcgctccgggacccctgggctgccagggccaggcccgcctcagcaccccccgacctgccagggactgagggtggaaggtccctccagacccctggctctgggacacctgaccgccgaccccacctacctaagaaccatcctggccgccagcccagttgtagcaccgcccagacgactggccagggcgcctgtgggatctgcatgcctggagcagccccaccagagtgccgccttctccactgctcaggcggaggtgagcggaagggaaactgtcccaggtcaggttgaagggagggtgcccgccccttgctcccgccccctcttcctccacatccacgtgggcgagagtgacagaggcagtgctgggggaggaggggtgaggagggggtaggactggggagagggtgggggagggagagagagacagagacagggagacagaggagatggggaggaggtgggcccgtggcccccacgccctaccccgtgggggtctccccagctcagggccccttcctcctctgtgtctctgctcactgctgtggcctctttccatatcccgcccgagctgcccctcctgaggctgccgggtgggggcaggcccttctcctcccccatcccccccatctccctgggggccgggcctccctgcctggggaaggtgggtggccccctctgggctcaggttcctgggctgcagtgaggggtgggctcaaccccactcccattctgtcggagcctctgggagcctcccggctgcccacagcctctgcccctgctgggggcaggtgcctggcctctgccttcccggcccatcccccttcgctggggcacaggtgaccctactgaatgacaactgtccatggctaatcggctccccctcaaagcttccaccttgtggatggcctcacaccatggccacagttccagatctttccaccgtgtgatgcctgcaacagcctgacgggggggctggggcggtggcaggggctggctgtgaggctgacctccccttccagccttgaccttcttccccggggccctgccctccagcccactcgtgccagggtggggtggttcagggggtccagtgcctgggcctggctggcggcccggcgtttgtgaaatggcttgcttatctccttgtattctgtgctgagcattttattacagcgaatggaaaacaggagaaatgaaactgctgatattagtgatgagatgcgtcaggctcatcagcttaaaataaccgaagcgaggctagaaaccgcctgacagctggcgcggctgcctggctccgagagacactcggcccggctctgaagggaaaacattaaagcaccgaaacagtggaaaaagagcatcaaagatgatgtctgcgaggcgcggccacggcgaggaagctctcgtttatgaacaaagggccactcccgggtctcagagatgtgaggctgtgtgggtggcttggtggggaggtggggggggcccagctggccaggtgggcttggcggggggcccccagggagcctggcagcacccactgtgctgccagacagctaaggtggcccgcagcaactgtctcctggcacacccacccttgtgcctcaggggctggggctctggggctggagaactgttggttggtaggtgcctccatagccctgtgcctcgcccaggcagtggataagtggctaagctgcccctgctggctgtacttgtcctgaaggcagattctggacagaacctccctctgcccccagccctgtagagccttgttccaacctctgttgaatgctgtctctgttccagggcagcagtgggccttcctcaaggctctgagctttgtgggacgaagctgtcctctgaggactgggaatgccactgtgtgggctggaggggaggctgggcccaggaggtgggctctgagatgggagatgctatcagacccctggaaggtctcctcaccaccaaggccctgcccccaaaattccacctgccagggcttggacacatgtcctggagtagggggcgggcacagggagaaacccagcttccatcctaccccttccttccttctccttctcccacccctctcctctctccctgcagttcttccctgtcacccactctccttccctcctcctctcagtcccactgaaggcccctgggccatgggagaggagacctggtggggtgggcccagcgtggagccaggggactgcggccactgaggccagggctgcctgatggtctctccacattgctactcgctgga

SEQ ID NO: 3493 - DNA, 4001 bp, Homo sapiens
gagtagctcataaaatacagggcactctaagccctttttcttgtaccttgtccctgaatcctcacaagcctaggagaggcacggcatttagaggcactgccatgctagaacggctggccaaatcagccagcatcaaaatcacaaaggatcattgtcacaaagactgatgtaaaagtggctcttagatctagaacccagctgcccaagcaccggtttgcatggtgtggcaagaacactgctaatggagctcaggcttgctttggaatatgaaatcaggagcactgtgaaaagggcaccgggataatcggtctccaaccccaaccctgtgtaacagttctgagatacatcaaaagaaaaatgaggccgggcgcggtggctcatgccgataatcccagcactttggaaggcctaggcgggcagatcaccaggtcaggagatcgagacaattctggctaacatggtgaaaccttgtctctactaaaaatacaaaaaattacccgggagtggtgacgggcgcctgtagtcccagctactcaggaggctgaggcaggagaatggcgtgaactggagaggcggagcttgcagtgagccgaggtcgcgccactgcactccagcctgggcgacagagcaagactctgtctcaaaaagaaacaaacaaacaaacaaacaaaaagagcagaatcctttctacagggtggtcagggaaggcctcaagggacctgaaggacagggaatgcaaaggaggccagggcagccctcaagctaccacttcaccatttaagagtgtctaggccaggtgcggtggctcatcctgtaatcccaacactttgggaggctgaggctgggcaacatagggagaccccatctgcacaaaaaattagcccagagtggtgggtgcacgcctgtggtcccagctactccggaggctgacaagggaggatggcttagccccgggaggtcgaggttgcagtgagctgtgacagagccactgcactccagcctgggcaacagagcaagacccggtctcaaaaaaaaaaaaaacagtgtctggctcctggcagacacgccctcccctccagcccctaatgcctccctccccagcaaaacccgcaccctctcctctccatctgccactaagcagagattagaatttctgaccactgcgggatctttggacagtgacaaaatttagttggcataggttttcacccacaatagtgcccatttccatggtgttttcattcattctccttaggctttaaccaaattccgctagtaaattgcagctacagaaaaataatttattttacctattttaataaaaaaaaaaaaaaggacgaaacagagggaccctcgcggggagctctggaacccgagcggtcagatagggaacacgccccaagcggatcccagggctcgggggaagagggtgtaactaagccctcacctggctctcagtggagccaggaacaccggctgtggcgctgctttacgtgcggaagaccccaggccggaccctccgcttcctaacacctctgcccaggtgtgccttaggggagttcaggagaggaggtaacttttgttaggcgggatccggcaagaccttcacaggcccgggtgggtagagaccgcgagaagacatagtcccggaggacgaggtttgggggacccggcacaccgaggcggggacgcccaggccgtgggtcctggtgggaccacgcccgcctcccgcactgcgcctgcgcagggcctggacgcgccgggcctccctcgtgcctgcggcgccggagcttcccccagggcgggcgtccactgcccgcccgggcctaacgagacaaaggaacgggccgcagcccccagacccgagacccgtcctagctcacctgcatcttgtttccagttcagttgctcaaaccagctgtgccgcagcgcccccgcccctcagctctcttttgtgcacgcgcacagcgccgccacgcctcttcccccagcccagccttcgccccgcccagggacgagcggcggggagtaagggcggaagcaacagccttgagtctgcgcctgctcttcaaggaactggcacagaagcgttcgcatgcgccagataggatctgcctactgtcctgctcggagtgcacttgacctggttctaattctggtggctgccttattagggctggtcttcagcggaggaggggtggggctgggtggaggaggagcccggggccgtgtgccttttccagctgccggcccaaacctgtaaagacgtctcgctctgactagcctaacaagtcagaaatagaaaattgcctctaggccgggcgcggtggcacacgcctgtgatcccaggccgaggcgggcggatcacttgaggtcaggagttcgagatcagcctggccaacatggtgaaaccccgtctctactaaaaatacaaaaaaattagccgggcgtagtggtggttgcctgtaatcccagctactctggaggctgaggcagaagaattgcttgaacgggggaggcggagcttgcagtgagctgagatctctccactgcactccagcctgggttacagagcgagactccgtcttaaataaataaataaataaaaatgatgcagggtcttctggaattcacccacgatcacttcagccttggaaaaggcaactcattaataagacattgagagcctgctgtgtaccaggcaccattctaggctctgcagatgcagcagtgagcaaaacactaaaacaaaggtgaaagtcatctgccgtgcctgagtatcaggagacccatgtatgcaggcacacaggcactgagcaaaaagcagcaatctgacttgtaaaatgcaggtattgggctccagagcttctgcccaggcacactccaagtttaagagagcaatattcctacctggtatggaaggaagcatcttgcacacgtgggctaacttgctgcctcctggcaactaagcggacacagagagtagagacccacacacctgtgagataggcgcagggcttccaaccgtggctatgcattagaatcacctggaagccctcaaaaactaggaatgtcctggggctccatccccagacaaattaaatccttggaaatgaggcctagcacagatactttcttaaagatcctcaggtgatgctaaagtgcacagtcgttgatatagagtgaatcaaatgattgcttgagagcaaggagtttttatttaatttataaggatccttaagatttttctcactcatttcaactgaattacaggcccttttagggatttattaatgtatctggcagcacaatgtttgttaatgaattttccttgggtcttaccaccaaaatcaggactggaactaactttgagtttgatcctgtgcttcttgctcagtcctgcacagcaacagagcaggtggtgttttgtcctttcctcatccccagcctttgctgttccctgaggcctgttttccaggactcagctattctacagttgctcttccccacatgatccggtcagaggcattctaaccaaagccaatccatcctgaataggggatggggaaaaggaggctgagacctactgggttgtattcccagaaggttacgcatgcttagtcacagaatatttaccaaacagacctaagacaacagacccaggaaatggcctggtgtcctgaaagctttcttttttctttcttttttttgagatggagtttcactcttgttgcccaagctggagtgcaatggcgtgatctcggctcactgcaatttccacctcctgggttcaagcgattctcctgcctcagcttccgaatagctgggattacaggtgcgcgccaccacgcctggctaattttttttttttgtatttgtagtagagacggggtttcactgtgttagccaggctggtctcgaactcctgacctcaggtgatccacctgccttggcctcccaaagtgctgggattaaaggtgtgagccaccgcacctggcctt

SEQ ID NO: 3494 - DNA, 4001 bp, Homo sapiens
gagatggtgctataagttcatgcttttacacatctgatcttttccaaaaacagagcaaagactgataaaacacagaggaaatcagaaagacatttagagattgaaaggaagagagaagaaaaggagagggaaagggaggagaagggaaaggagggaaaagatctctaaagtcacaagcctgaagacatgtaggcctgctgaactccaagtccagaaacaggctggcagtgatggtcggaatttcagctcctgctggggtgtgggaaacaggtgacccagcttcaccccaagaaactgaaccaagctgcctctagcttggtgtaatattactacatagcaggaaatctgagccaccagaataagtcttggtttttgattaggggtcaggaagctgggcaaactattagacaggtaggaaagagggcaagagagaaagaaagaaagcaatggcataagcaaacaaaaacactctcccatccaaatcagctgcaatcccaaattcaaaaacacataattaatacaaacaactaaatcaacaacctacataattggacaaaaaatactgaagaatctgttaagctaaaaatttgaacacacccataatcagagattgatagatgaagaatagaaaagtattaagaatatagatgacttggacaacatttcattcttgattaacggggtcttaggaaacgtcggctggacaagccgttaaaaaagaaaaaaaaaaaagattttcctcagctgggtgcggtggctcatgcttgtaatcccaacactttgggaggccaaagtggaaggattgcttgagcacagtggtttgagaccagcttgggcaactagtggaacctcatttccacaaaaattagctggatgtggtggtgtgcacctgaagtcctagctacttgagaggctgaggtgggaggatcacttgagcctgggacgtcaaggctgcagtgagctgtgatggtgccactgcactccagcgtaggtgacagagtgaaaccctgtctcaaacaaacaagcaaacaaacaaaaaggattttgctccctgagagaaaagagagggatgtgaaaagaagtttctctttcttctcctggacacagttatgtgtggacgtgctgcctagtgcactataaagggaaaagccagctggtgatggccaaccactgagacaaacagagggcaatggacagagcctgggtccctgatcacatcatctggctgctgcgtcatccccagaaccacctcctggagacttctagtcatgtaagttaataaatgttctcagtgtgaaagccacttgcccttgaatattctgttacctgcaggagtcacccaaattgatccataaattagatacatttcaatcaaaatctatacagagttttcatggaatttgctaagctgctattaaaattttatggaagaatgacaggtcaagaataagcaagccagttttaaaggggaacaacactgaggacttggcctatcagatatcaaaatgcattacaaaattacagaaattcagatagatactggtgcagaaataaacaaatagaccagcaggacaaaattgtgagctcagaaacagacccaggtatatatggaaactataattttgaagtgccactacaaagtggaggcaaaacagttctaagacaattggttatacacatactgctttataccccacacaaaaacattctagatggataaaaaagaccatgcataccaaatggatgtaaaaagatatacaataatgccattatagctaaaggtagataaagatttttataacaaaacccttaaagcaaaaatcaaaaaaggaggttaataaatttgacacattaaaattaaaatattccacaaatatacctgttgagagaggcaatccacaaaaccaagccatgcatgtcaggactttaaggccctagttcagttctcaggattgtatttgcagtgagcaaacctgggagatgaagtaacatctttccacagacaaacatcaggcttgataccactccacagaaaagggatatatttcccaagcacagtgttgtaatacgacctcttctgtaatatgacccagtgcatgtgcatgcccatacccacctgttgcacctgtggaacttggagaacatggggaaccagcaccattgttatggtttacaatataaggtttacatttgtatctacaagtatatgctccactgtttttagccttacttcgatatttaaatacattcaatactcaatacccatcttacttatcccaacttccccactcatcacctgcttggctagatttcaaactctcatacttttcaggaagggcttcttagaactacatttgctgtgctcttctttgtatatttgaaaatatctctctgcaacttgtgtaattgtctatgagtttggctttaaattttggatttaaaattatagggtcacattttctttccctgaggactttgtagatattgcccattgtcctccagcacaggagactgcaactaggtagtctaacatcagaatgaattttcctgcaatagatgctttgatttttttgtgtgtaaatgcccatatgcttttttcaacatctttgaagtctattaacaccaaatgtgtttcagtgctaagcagtcggtatcagttttgcctgaaatggtgtgttccttcagtctgtaaatccaagattgcctttatttcagtaaaatgtcctagtgttataattttgaatgttttttttttcctgttccatttgccatgttctctttagagttgcccagaatacttagtttggacctctgttattctgattccatttttatcattctccttttttaatgctttattattatccattttattttcaattttattatttgtgtgcctaaaagtattttagaagtattatttcttcttgtttttaatctagtattcctttctgtgcagctacatatttttcttctactttttttcaagttctaccaacccagtttcttatcttttatactgcttatcatttattccttaagcttttgtatctctttcttgaacaactttatttttcctgagagatcttattattttttatctcatttcatggaaaactttaagcatttttctggtgtgtgtttttcacttggcttttgttttcacatcccttcctacttctttttttggagtatctttgcatgagcccctgctagtggctctttgttgtgtgttagtgtttaaatgaataatggatggggagggtgaagtcaggggaatgatttagggtggctgcatttgaatttcagtttattgtctttgagtgtgttctcaccaacactgctctgagcagccatttcagcttctgcctggtgagaagtctcctgtgcttactgtaaagtccaatatgacatagatatttttgtgtaatgaattagccttcaaatatcttcatctggccaagataagcagctgcagggtgacttgccatttgtgttcctatttatcctgatacatcaacagccttgtttccaggatgacttgtctgcaactttccttgttccactcaccctggccacaccttctgccaatctatggcagcaaggaggactcaagaaacatccccgagcctgcccaggcacctgctcttactgtttcaagcaagtatacatgacttattttggtgaacattgtgctctacccaagatggctgaagggaagtaacctcactcagccttttattaaatacttcatcttatctaatttctactgaattaagtagccctcccaaccttatatggggtggaagtggagtgatgacttgtggcatggggttatgagaacttcttttgtggattatggagtctgcatgtcttgtcctgggtccagattggtctttaattgctaaaagataaatccatttagcaaatcctctctcctgacaccctgacttttaagtttgttctcttgctaagaggttgactacctgccctttccttcc

SEQ ID NO: 3495 - DNA, 4001 bp, Homo sapiens
aaaacaactaagctattaaccaatagttcaggtttcatggaaagccgggtaagaaaacttactttatccaagagaagcttactttaaaacttcaaacatcactcagagtactgcattcaattatcagttctattaattacctaaataggttcagaattcagtgagcctttgagcacagaccatagaggataaaacttcactcacaaaagcacatttttggccttttcacaaaatacattcaccataaccataaagcttgtatcataaaaaagtcatctaagcactaactagataatctttatttccaatttttatacaaagcagaaaaatcagattgaggctgggcatggtagctcacacctgtaatcccagcactttgggaggccgaggtggttggatcacctgaggtcaggagttcgagaccagcctggccaacatggtgaaaccttgtctctactaaaaatacaaaaattagccgggtgtggtggtgcatgcctgtagtcccacctactcaggaggctgaggtgagagaatcacttgaacccgggaagcgaaggttgcagtgagccgagatcgtgtcactgcactccagcctgggcgacaaagcaagactctctcaaaaaaaaaaaaaaaaaaaaggaaaagaaaaatcatattgatttttatactaagtaaatgttgctagtaattcaggaaaccagacatttaaaaacaaacaaaaaactgtccttactcataaactacagatttcacattaaagtcacgtgtaacatatttccattataactgttaaaactaccagcattaatcacaattaaaacgtttacttctgccctctctaatcatagacgaatactgccagtgcaaatacctatgaccctcttccaagtgcattaaaaccaacagattcagtaatagcaggaagggaagagcaggatagcaagggatagaatatcttaagaaggacaggaagaatatgaaaagaattcattttgtcctataatcatttggcactctatcagcatttcatatttcaaaagaaatatctcactgaaataggcaaagatgtggcatctagtatgaaaatggtcattcttccaagaatgaagtaatttcaacattaaatagagtaacagtagcaaacatttgtatgtgcttagtatgtgacaggcatattctaagcactttatatattattaactcatttagttctcacaacagccctgtaagatggataccattaacatctctatttttatagatgtagaaaacgaggcaaacagaaattaagtgacttgtttacggtcacagattggtgagcagtggagaagaattaatattcaatctataatcttataggtttaacaattcctttttttttcttttttttttttttttttgagacggagtctcactctgtcgcccaggccggagtgccgtggtgtgatctcggctcactgcaacctccgcttcccgggttcaagtgattctcctgcctcagcctcctgagtagctaggattacaggcatgcaccactatgcctggataatttttgtatttttagtagagacggggtttcaccatgttggtcaggctggtcttgaactcctgacctcgtgatccgcctgccacggcttcccaaaatgctgggattagaggcgtaagccaccatgccaagccaacaattactttttaagggtgacttggcaaccctgtgttgaacacaatatctgtaacactgcagatgcttacaactttttacccaactgagagtgcttaaagaggaataggtgggtacataccattgctatgtcttatttttcataaaaagagaaatgctaatgaaacactttttaatattggcattaaaaacggccagcggttcctccctttgcccccgctcccagcagtcacctggaacagccacctggccagagtccacgcctcaacttcgaggctggcgatccagaaagagcacctcacgccctgggctgcaagcgcagccggacgcgcgcgaccagtgatcgccagccaatggcaagccgggacccggtcccactgctgattggcccccagatcccgtgggatctcacctctcgcagaggcttaaagccttgtacttgctgtgcagtgcttggctctgcgtgcccgctgtccagtagctgtggatagctcttgagctgtcggaaactggctaattcaactgaagaaatgaatttttaattattttcattataattcattttaattttaggtaattttaagtaattttaatttaaatagccacagtcaccagatgctttaatgaaactattctaagtggtatctatgaattttgtcctgtgatctacacatttaaaagatgtatgtcatcaagttgaatcaaaaggagcaggcatactgtgaaaaaaaaaatcaggtgttagatattattctcaaactcaaaggcatgcaaactcaagaaggagactaccatttcttgagtgcctgccacaggtcagactaagtaattgcctacgttatcagtagacagtagccttacagatgggtcaaatggaaactctggatcatattcatatacaacaatctgaaagctactaattgatcaccaataagtcttagttttaaaacctataaaaaatttgcaaatagggcgaaatatttttagttaattgatgtaacatatgaagactaatatcaccaactaagtaagcctcattgtacttcagtttggaaaataatgacaaaaatttactatttgctcctggcatttcaaaaattagtcacaatatcacctctcatttttaaaaagaaaagatttgagggagaaaaagtttcaaaaaaatctgaatttcatgtgaaacaaacatgtgtgcacattctaataacagtgctttataggctacatgttctaaagccttgaaaaaaatttaatctgcaaatgcccagcacctggtttcttctattaagcagactaactaaaaatcattcttttaaacctcagacatttttaggtgttttagttacatgtaattcatgttcaaaggttttatgatttgaaatataacaatttggtcattgagtgatgaaatgttctaaaattgattgcgatgatgcttgcacaatgctgtgaaggcactaaaaacgatttaattgaatacatcaaatgagtgaattgtatgatgtaagaattagaactcactgggtgtggtgggtctcacctgtaatcccagctacttaggaggcgtaggcaagagaatcacttaaggccagttcgagattgccctaggcaacatagtgagacaccaatcccttaaaaaaaaaaaaaaaaaagaaaagaaaaaataagataagaagaagaattatatctcaataaatctgtttaaaataaatacatgtcatgaagaaaatgtacttactttttttaatttataagtaaatttctaattttccttgaatatgtcatatttcacataattggatagtaaagaaattttgcttttctggcattttccaatatttgcgttcctggttttgttttatgcaatcttttatctttttttgagaaaagaattaactgttctcaataacagcctaaaattttcaggacaccaatcagtagtcttatttcacaaagaatagagattgcccagtcaggacaatttaagaaaattacacattttccactagatggcactggtttgcaaataatattgctttgcagttcctctcatcaacaaaactcacactatcaaattattttcatttaccttgattgttgtgggtaggaaaaagagaaatggaaagtcaagaaaagatacttcctagagttgttcagcctcagggtaaacagaaccctcactacagatatggaatgtaatacaaggagaaattataaaaatcttagtgctaaatccagggtgacaacccacaatccctgactctcagtagtcatcacacaactgtataatatcagtggtgggggagtggataccatagtc

SEQ ID NO: 3496 - DNA, 4001 bp, Homo sapiens
gaagcacgaggtcaggagatccagaccatcctggctaacacagtgaaaccctgtctctactaaaaatacaaaaaattagccgggcgtggtggtgggcgcctgtagtcccagctacttgggaggctgaggcaggagaatggtgtgaacccgggaggcagagcttgcagtgagccaagatcgtgccactgcactccagcctgggcgacagagcgagactccatctcaaaaaaaaaaaaaaattgtttcaaaaataactttttttttttttttagtattaggaaagaaatcataatgtacaaggttttttttaaattgacaatatcccaaacatcgcaagatccagaaacgtagcatatttgtattaatttttccaaatttttgacagcatgcttttttattgcctctgcatgtaactataaattttaatattattttcctatagatatacagaaaataattccattttcattagcatattgatacaaatgagctttatattatttatgatgggatgcataatacatacaactttacccagagacacatttcctatttgcactactagtactggtttgtgtcctacaaatgcaggaattccaataaataatattttgcataattctcatctaaaagcaaaaaaaaaaaaagaaaaaaaacatgtttatcatggcatatgctgcatttttgagtatgctcctgataggagagcataaaacttctatttgaataggcatctatgaaaaaccacattttacgagtctgattggaagattttttttccatagactagtttctgacttcgtacatttcaaaccttgtttctccttcactatacatattcttccagacccacatactatagaccaccttcatatcaaaatgcaaccactgaccttgtatatctgcatcaagatgttgagtgaactgggatggtgagcaaaagaatattcagaaaagccgttcctacagcataaagctagcaacaactttccacaaaagggattgggaaccataaaaattatcctactaaactcaaaagtatctacagctggacttcttccctagctacatcccaagaatgtctgtggcctgatgaatggggaaatctgacagacaggaagctggaagggaaaaagaattatctcaaatgaatatcattaaaatatcttacttttgttaactttacaaaactttcctccttctcacgttcctttgcagaatgacttttttcccatctgacttactttttagcattcctcgaggcttgattctgagacttcctatctcactctcctctctttctaaaaaatcttatctacaacactggattaaattgacctctgcatgcatgactctcaagtttatatttctaacccaggttacccccttgagcccaagatctgtgtgtatccaacagcttactcaatattttcacttagatgtctcaaaagcacctcaaatactttatgtccaagacagaactcataattaaacaccctcttgacgagttaatgggtgcagcacaccaacatggcacatgtatacatatgtaacaaacctgcacattgtgtacaggtaccctaaaacttaaagtataataataataaaattaaaaaaagaatatataacaacaacaaaaaataataataataattaaacaccctcaaccacttatttctcttccaagaggagtatatcttagtgaaggcaccatcttgccacaaagggctgaacccaaaaacctggagccatgtcccatacctgacatcactgagtccggctaattttacctgttagttatgtctcaacattgtctgcttcctttaatcatcacttcccactccctcacccccactccaatccaagctacctttctggctgttccatggcttcctattgcttacagggcctacactcaaagcccttcataatctattcccaacacacagtggacttttcttgactcatcttccagcactcttctccctctacatttcttgtattccagtcacaatagattatccatgcccatgtacaactaagttgtatacctctgtctttgttcatcataattccctcattctagaaccttcttgcctactttgtgcatctgtcagactctacttattttacaaggaccagttcaaatatctcaataaaatctttctggacttttcgatttgctctaccattgtctctctgcattctcctcattccaccaaagaaatggcactttatatgcttttatagctctaatgcttttatagctctttgtacatacctctaatgcagtacttttatattaaatatttttaatttattaatttattatttattttcatttaatttttttaaaaaatacagggtcttgctctgctgccaaggctggagtgcagtggcacagtcacagttcatggcagacttgaggtgagaggatcacttgagcctaggagtttcaggttgcaatgggctatgattgtgccactgcactttagcctggatgaaagagcgaggctctgtctctcccccagcaaaaaaaaaaaggagaaagaaaagaaaagaaagtaagtacaggggtagggctagcttcagtaagtgatgaataagaccttgaatgaggtcattaaaattctgacccatcctccttttatctcagctgtccctcactctcattgacctaaattgggtcacgtggtcattgttgacccaatctctgaggccaaagaaaaccaatcctctagtagacttagccagaacttagccatatgcccatgattgagctttgagtagagctttgggctaagaggtggggacaagatagttctccagaggaaaatcaaatcctcctatcaagatgctgaatgtccaagataataaatgtacacaaatataaagttatttgagaaagttataattaaccttcatttcaggcagaattctcagtgttacctcacttatttagatttcataaaatttgaaatctacttctaaaaatattccggaattcttaagaatgttaggctgatgtttctgaacatccagcgcaatacctagcacagagtggtggctcaagcaatatgtgttaaataaataaaagaatcaattaataaataacacagtctgtaagaggtctaagataatgtataaaaatgtcatatataaagacatatattcaccaggtcaagaaacccagatatctgctttactctaaagtgtaatttattatttaatgagtaagcaagtcggacacagcttgtgttggcttaaagaaacatctgtagattttcgccacctccttttttatttttcctttaaaagaaatagttcagaatatgagccatggctttaaattcttgtcttcacttactcaaataaatgtaatatgatcacatatgaacccaaattgtactttggatttatattgatatattatagcatccatggccatgatcaaatcagagcctgacctaagctgacactacagaaatgctgactaccaagtagagttttgcctgagccaaaagcaatgatgcctgtttgtattggtcttaaagggcagaaattttccttacgaatatctctggcagactaactcttgcaagttagtttgattccatgacttctctaacacttattcatggccacgagagctagagaaggccatcactcaaggaatttataagatccagtgtcaaatcatgaagagaaagtgaactccttgatatcagagtcaatattttatttatttttctctccttctaaaacagggcacaatctctggtacaatgcttctcaagaaataattcttgagttgacatacacacatacacacaaatatatatctttatggctttatatgttgattcacattctgccggctgttaagctttctttttttttttttattatactttaagttttagggtacatgtgcacattgtgcaggttagttacatatgtatacatgtgccatgctggtgtgctgcacccactaactcgtc

SEQ ID NO: 3497 - DNA, 4001 bp, Homo sapiens
ttggagttgctaaaaaattatcaatatttgttgtttgtttcataaattaaaaacctacttgctcagtcctatcaaagctgactacagataatgctatatttgagcctaaagataactagcccctctatctgtccaatctttctaatcttaataacagaaacagttacgatactaagaaggcacaagtgagtcacaggaccatttttcccctgacattcctcttcttttcctcttttccctagcttaccacttgtgcaactctaatctagagaagggaacagggaagtagttaagcactttgttctctttccaatattgacttagagaatgaagcattatggtccccaaaagacaccaaagacaccaaaatgctcatcttaacaccggaattctggagcacacatctttttctagcaactcacaaacacatactaaaaccacacattgacatattaaagagaggaggagggagctgtggatgccagaccagccaaagtgtcagtgttaaagacaaagtgtcttgacagagaaatacgtggtgttattgggtgatatattaacttcccacaagccattgggtgttaagaaaggaccaacacatcaaagatgccgtagtaacattctaactagtctaaactcgggaatttaaatagcaaaatttgtattgtaaagagcctaaattaatgtgttcctggatgccagatgataaccgaaggcttatctcccaagccaatggggctctgggagaaggggacaatgcaaagtcctacctggtaggcatcaggaatgttgaccgtttctccatgctccccgacatagccaatgatacctttgccccaggggacctgcacctcatttgagttctctgtgctgctgcaaggcagcagaggtgttcctgcatgcacatcaaagaatttggagaccaaggtcttcttgccagcagctgccccttccaccaggaaaagagagcagcggtcagcatccaccataaggcagacaaagatgagaatcttgtagctcaggctggtgaggtcaaggtcattggagatatctttgaccaattccagaaagaactgacgctcattatgctttttcagatggcacttgtagtcgatggctgtagggggataccgaggcagattcactctcgattccagcagcgcactgagaatatgggctgtggtggggggcagggagcttgccttccggagaagtgccctccgtcgtacactactcaggggttcctgagcccgggaggtcacctgttcatcgtaggtcctgttcacgtggatggccttggagcgggcaaaactcttccttagctctttctgagaagctctccgctgcaggttcccatcgcccctgctgccaccggcccagctgggactcaagggaaccccaccacagtccccgccaccgggaaggggctggctgtgggcagagccatttggtccagtgccaccaccaacgctgctgccacctctgcaggtgctgtgagccaagctgctggtaccagccaaagagggccttggacctaaagccccctgaccctgactgtgcctctgcagccacttttcaaccatctcctgcttccccttccgcatcaagtaatcttcaaacaactctgggtgcctgtccaggaaagtttccacctccccaaagtccaggcgggaggctgccatggtcccagacagctttccttgcctgtttacacgtgaaccaaatgttttcctgccccgaggcctctagctgttcctgcacatgttcacccccaccagtattcccagttcagcgccacctcccctggagattattcccagcagtggaatctgggagatgccccttccttctctggctcagagtggctggcgccgaccccaccccgtggtcctgctactcctgctccgcacaggtgcccagcactgagctgccgccgctgccccggctcctgttccggaaacccgagctatcgctgctcctgttctggctgccgccgctgctgctggaactgctgctgtaaccggatgagtggaccgctgtgacagggaggtagggcaggacacgcccctgagtgaggcacggagcctggagggaggagagaagaggagggagccgcggacgccagaccagccaaagtccacggcccaggctgccaggcggttcctggaagagtctctggacggccggaatcggcgcctgggtacaggactcctgattggaacacgattagaagagggaaacgcaccttgttccttccccgcttcttgctcccttacctccccaaccctccctactcaccgcgccccttaatccgttagcgtttcgaggaggcccagcgggagcccagtgggagtccgagatacaagtgttgatgttttgcagggatctgaacacagaagcggactccgaggaatcgagagtgtcgttcaccctcagagacaggcagggttatttttctgggatgtgactgtggattgttggttcccaggattcctgggacttgctcactaacactgcccagcgccttgtgggtgctcagtaaatattaatggaatggcatttccccgaaaatagcaaataaagtttccgatgtgagcaattcatgactttaaccaaattcatgtacctggggcagagacagattacacagagaaagggtgtaaaacacagtacagaaaaagagtttaccaggtagaggaagtaagtgctgaagagtctggagtatttaattaacagcagggagaccagctaggagacagtaaaccaagcatagaatcctggtaatttggagctgctggtttccaagaaggtgagtggtgatcaagatttaaaaagaaaaaaaacaacgtttagcatagtgcctggcacataaaaagtgctcagtaaatgttagctgttgtattacttttgttattattattattctaaggtgacgatgtatggaaactttactgaatgtagctatgtctctggtcacttgagtgatctatcagtaaagatggttagtgatatgttgaaactggcttgtaaggactcacaagtgcctattttaaaatctctttccaattctgtattcagtcacatcatggagtttgcaatcagtcacaacgggaatgtttacaccatggaaatcagcaaatgttatgtgtcagggtttttttttttttaatggactgctaattgttaaacatttacggatatgcagtggaaataatccaaatgtccatcagctgaggaacagacaaataaaatgtgataactccatacaatggaatattattcaatcataaaatggaataaagcactgacacgtgctagtactcgaatgaagcttaaaaacatcatgcaaaatgaaagaagccactcacaaatgaccacatagtgtaaaatttcatttgtaagaaatgtccagaataggcaaatccatacagacagaaagtagattactttctagatggagaggaagtgggtgacgctaatgtgtatgagttttttggggggtgtggggggtaataaaaatgttctaaattgattgtggtgatagttgcacaatctgaatatgctgaaattcattgaattgtacatttaattgaatgaatcgtatggtatgtaagttatatttcaataaagctgttacaagataagaacaaaaaacatttactaccctgagactggtgataatacagcagcagtgttgtgcacggagacaagaaaagcactgagtagagatctgatgaaaatgaagcaatgagcttctcagggaagtgagagaagtagaccaaccctgggcttcctagaaacagaaagtttaataaagacacttccttaattccatcttccatgtattcattatacaagcagttgtttggcatttatcatgttccaggctctggggacaaaagaagaccaagacaaaagctgtgcttttgactaaagatctccgtctacagcaccaagagaagtgagagtggagaagaatactgggaaggatggggaaagca

SEQ ID NO: 3498 - DNA, 4001 bp, Homo sapiens
ctaatgtttaatttgcatctatgctaattaattttgagagctgttatttgctttgataggattacttgttccgctagagaacaacctcaccaaaaagctgtaatttctaaatcttcaatggatcttagaaacagatttctagctcatccaaataatgtaaagatggcttcctttttgaaagttattctctgctatatgttctttgcattattgtgctcttacactaatgcactgtaaagccatgtattacttcaagaagtaagaaaatatacaaagaacaatatttaaatacacaaacatcattaaatacaatcaaatggaggaaagcagaaggaatttttacctctaaacaaagtttgatgtaattttctttaaaaaaatatcaaacagggacatcaaatttactcaggtactgaatttttaaaaatagtgtgtaaatacagcattagagatataaatcttagaaaatctctattttgcatagtgtaggattctttcagctgttattatagaaaagcaaatatattaatattttcatttgagatctgcaaatatactaagcaattacaacggcctgtaaaattcatattcatatttctcatttttatccaaatgttaaatctgatttttaaattatgacaattaagataaagcatacaaacagtgtggtgctgaaacactaaacaggaactagtagcacacacagctaaaaaaaatgtaagggtgtaaatatcaagctgaatagcattgcaattaacgtctgacttaggtaattacatcccatgtttgacataatgcataattcttgacccattttactaagggctattatgtactatggactattctgtactctcaggagaagtgaactgtgaactggttaatttaaagccaaaactctccaataagtttgatatgctgttaatatttttatcacgtaaacattttttcttatagaaatatcatttaagcaaaaagaagcacaataaagtataattatttattatcatattaatcatctcattgcttttccaaatctaatcacagagaaagaagtatcagtcttatttctctctctgcttacctgagggaaattttatttgtggcagtatcccggcaaatggctttcttagttacctttctgcatatctgaaccacatatctaaacagcacatacagaatgcgtaaaagaaaccatgtaatatgacagtaaagtgacttctccagaagttaccttactttaataacatgtgcaagtacaaaaaatcattcgtctttcaacaagttgttagctgaggtaggcacattttatttttcgagagaaaatctttctaaaggaaactagcccacaaaggcggatagcaccaacaattagtcacgttaatagtcaaatcttttggggggaaataaaaagcaaagagcatactcacattcctttcaggcgctgccacattttttcagtctgttctcctgtaagatacttaaaagtggtgttttccaattcttcaatctctgtggcactagaccccatgatgatgctcctaagacaatacagttacagtcagtttcagcagctagaacaagcattcctcagtccattacaaatcttacacacttatacagtagcctctcttatctatcaaaacagtgctgatgtacaaagctgagggaagactctgacagatttgctattgactttgacaggcatatatccactgctcaccacctcaccacccccctaagcagacagcagtataaacagatgctctgacctcacaagaacaatccgtacatgtgagcctgctactgtactactgaccgactgagtactcaagctctccccaaaagcagctcatctgttactgttctgtgcactgaagcacatcagaattcctacagtttacgagctctattatgcacaagagaaacgtgaatgactttcgcgctccagaagaagctgaattcctctctaccaacagaacaagggcaggatgtaataaggaaacagatggtaggagccagtatcagcagcaccaccatgagaaaaaaaagtgcctgtttaaatgccaaggtttttttctctaaattgatctgaaactaacacttaaaaatgtatcatcatctaacaataaatgcaacaaatattaatgataacaaagagaaaataacatctaaagccatacagaagaacacagctccacaggttgttattgcaagaatatgtacatcaactgatgctgtaagcatgcttattcaccttctcctagcaactccacacagtaggtaactgccaatttaaccagtggaaaatacggcagctgcacacagcctgctctatgaatcctttggggattaaaaaataaataaaatgaaactagtgtaaatgcacttgtgtgtgtgtgtgttttttgaaggaaaagggaatagatttgtgtgtgtgtgtttatgagagagagaaggagaaagggagagagggacaagagagaaactgatggtttgcggcttgtgcattttagaagagaaatgagagagagtggacataaaaggaatcagaactgagtcgtctgccaagctcctaacacatggcgagctttctttgaaacaagcacagaccttaagtatgagcaccataacagctcttgctatctgcaagctgctatagaaaatatacttataaacaatatttcttcttgtttgtttgaaaacccagatgtagttttatttcttcttgcaagaaaacttgcctgttactatgagttttaaggtagagacattcaaagattggtaataacatccaatatttgttgaatatttctgatgtttcagacaatgttctcagtacctattacatattacctttttaaattcttacaagatgcctgtgagataggcaatactcctgttcaacagttgagaaaactgagaaacagagacattctccagatttaaagctaattcttaaaaatgggaactattattaacaattagtcttccaatgtaaaattactatgtctatacaaatgacactgatgctatctagtagtcagttataatgtgtacgtaaaaaggacctttgcaaaatgttatagaaaatggcttctgatttgcaaattataagagggtaaatcaagtgaggcttccattttcctttctcagacaagatatttccagaattcaatctgaatgtaatgtctttagctagcagacagctttgtgaaattaaaacttcattcctataagcatttaccagagttgtcagaaataagtgaatctttgccctgaaagtaccaattttaccctcactgtgccttcatttgtaatcttagctatattcatgtaataaactgttacctgatatttctttaatgaaacagtcaacaaacatctatgttctgctttcaaagaaatattgcagccaaaaatctccatagatagcaagtactctataattattattttatgaatcaagatacctaagtccttgaggctatacagatgattttctaaatatgacatgaaatgtcaagacctcacattgaccagcttaccaataacattgcaaagtaaataaagaatgagaactattctacttaagtatatgtctaagaatcttgtttcaatactacaattcatttgccctttgctttcactatgtaacttctatcacacattgatatttaagacctcaaggtatactaattcggtcacttactagaaaaaaatccttaatcatttcattaaatgtttcataaaataaaattttgaataataaactagataaaatagcttattatttaaatccttgaccaagataatcttcatccttaggaagtatcaaaaagttacttctgttaacatagagaattcaaatcatttttctttgttagtttacaaaaaaattcaatataagttctgcaagggaaaattgagaaaatagtcataaaaatacagtaaaaaatgatccaatttgtatgtccctcatttctcatagtttccattta

SEQ ID NO: 3499 - DNA, 4001 bp, Homo sapiens
gcacctaagcatataattaattaattaggaagaaatgaggatttggcataaatcagtggtgaaaaccacctgcttcaatccccacagctctccaaaggggtaatacaataaagatgatggctaggtggatctgattttatccaacacaaccttgcctttccaaactgctgtgggtgccctctgtgagttgtgcctcactggtgttgagtttagaatcatctgggcaactatcatacctttttgaagtcgcacgtgcacttgggagaatatagatactacatacaattggaagaactttttaggaaatatggtaggtgaatatattttgggggtcattttagatttttggttatttaccaacatcattgcataagacacaaaaacatatttaagtagagggggatagtaatattaaatccatatatatgaatttaaatataatttatgttcaaaggaagactttaaaacagattcaagctaacatcttgttttaagcattacaaaggtataatgttgctattaataattcagtaatgatgtttaatcagtaaaaatggccacattttatataattatattcctcgaggtctactcattcattatgtagaaaccacagagaaattttgctcatacgttttatcatcctgtatttaattccagacaaaaaccagtggttgcaacttgaccttaacattgctaacatgtagtatctctgctttatctagaatattattttgtggaaagacaaaactgatatataactgactttcttaaaaatcttctgttttgaggggcaaaaatagggttcaatttctagatacttttaaattattttttattttaaattctaaagtacataataggtaactaaagaatccagaattaaagagtcaatgaagaaacagctgctttcttaaagaaagggtgtacctccctccaaaattaaactttagctcaatccattatactgtatctacattttgcctggtcacagattccaccacagtgtaaaatttttcctatcaccctgttgtttctttaactgctggtctgatattcctgagcgagctgtaaaatgtgcactctagtaaagtagctatcaagttcaaatttatctcccgacacttcactccagaaaggtgtagtattcacagcactgaaacactgcccttgcctgtaatcagttgaaagaactaagcacaacgtttcctatttagagggctgtgcaacagcctacagaaacagctagagattgcataacgtttccaaagtttttccagtactatgtcacttatgtgtttgaatagttaagattttgtaaaatgtattttcaggagttgataagagtttgtgcacaaagtttcagaaaacagaaaacaaaaaggctccctcagtatgcctgaagttaaactttaagcactcttgattgctctgctgtagcttagtggcagaatccccaaattaaggatgaagggagaaactattgttcctgacagccctagagccacctgcgatgtagcattacttacctaaagatgggtctttggagatgtttcttcctgattgtgacatggtcatccatttaaaggtgaaggtttaacttcttcctggaaaccactccagaaactccagagaggaaatgtggaagcttatcctgatctattgtgctgcaaggagcccagaaagaaaaagtagtttcctctttctctttttgggtgctgggagaaaacttccctgttctctgccagctgagcagtgtgtccatagaggccacataagacaggcacgttggggcactcccccacagagcagggtgtgcaaaaaccaccaagagtcacgttgatccaggcaagagaagtgcacgggaccctccgaaacagaacaaaacaaacagaaaacttcctaccccagtgtcatccaggtaggaactccctaagttattgcagccatgagagctctccttccacatgctggtcaagctccgaaaggctaagtccctccctgtctttaaaacagactgttctgaggctcaactttttttcttcaaaataaaagttgtacagctggttcagcagccccatgtgagtaccctctgaaagtttgttctcttaaaataagaactgtatacaaattaatgaagaaagataggctcgggttgcatggctggctctgcttcagattataattattttacaatcttgcttgtattcatgctggctgaagtgtggagacgactcatcatttttagcacttataatctaataacctcctcttggctgaagttgaagatgccatatcaactgatagaagcccatgcgaagctgaccagagctacaaaagttagaaaaacaaaaattgctaatttctactggtgacattatacccagatgtctgtacccaaatgtggtttccaactaagaggaaacatctcttgcaaaaaagagatggaaacacacacacacatccacatgcttttttttaacaaaaagcccctccaaagtgcctgggagcctatggtttatatattatgtgatgaaatttggatttataaaagtaaaaggaaagaaaagaaggtataaaagaatttgtgaacagctgaaaataaatgatattaaaaattgttttcttttagaagacagatttacactgcgggaactcttattctagctccagataaagggaatgctcgtattttaatgtaacttattttggagaccttcctgtatctgaatcactaacaaagttcctattcagtcaataatgtcataagattccaggtcagagatttgtaataaactaaatcatttcaaagcatgattagaatgtttttaatatatacatgtaataaaaagggaaaaatgagtaacgtgcatgcctttagttgaatgatccataaaaataaagatcaaatgtcacaaaggaggatactatctgtagttattggcactctccaaatacttccagggagaaagatcacctttttattttcctccctgaggagagataaggaaggagaagagagttataagggaatcatggattttatcgagccgttctaatccaaactaggaaatgtaatcattatgagagcattgaactaaaaataaaataaatgggttctagtcctagttctattgcaaatatgccgggccactgtgggcaaatttcttgacctgtctgagaccattttcttgtttgtaaaatgaaattataatattaattgaattctatatttctttccagctttaatggtactatcatgttatttctaaatctgattcgcctgcttcttgcaaagaaactgccatagaagttatgatgcctgatacttcaaaaactacacacttattatgtactgttataaataaataaggaagctataaataaaaagatgattttatattatgtataacatatttatatagatattacatagttatgtagtgacatctatgtcactgttctctttatgatcaataagtaccaatgataaattcacatgtgtgctatacagcagttaaatatactgaccatgtataaacaaacttagatacagatctttgaagcagatgctttattattaccatatgctttggctttctttgtatttaggaaagcacataagaaataacacattgtacaggtcttctgggagggattttgcgtttgtgggtagcattcaatttctgtagtcatggtttacctatattaccattaatatagcataaatcttcctcctgagggaaaattcaagaaaataataagcccatcaacttttaaaaattaactttcattttgtcttcttttgaattggaaatgtgagacaatttctacatgaacacaatggagggaactcaacataaatactaataaacatctagccaaggtacagttcaaacggcaagcaagtatgaaatatagcttgaagtccaaaggcttgattaccagctgaagaatctgaaagttgttaatcataggaaatccataacatacttcattac

SEQ ID NO: 3500 - DNA, 4001 bp, Homo sapiens
tgcctttcaaatgttactgtcttgagataccaacaatttcacttacctttccacaaaaattccagcttgaacagcatgcacaatgctccgaaattttggtttttcctcaggtttcttttttgtcatccccattttccgtgtaaaggtagaagccaaccagtcccggacttcagatgggactgagtcagtctgaatgtcactgagctcatcttcagtatccagaagtcttctacaaaaatttatacagattaaacttttttataaaaaagtgaagaaaaacatataacagaaaaacaaggattgcaatgggatttaaaatatagccaatcactctctgattattccttaatatgtactctctaaagaaagaaaaaaaattcattaacatttggaaagctcttaatttctcaaattgatcatatgaagacaacaacgaatagacttgagcatttgcagcttcccaaacatttcagcacaatgatacaccagtctagaggtaccgactgttaatatctttagtgtgctattctaataatgaataaaactaaggaaagatagggaagtgaattcataaacagatgtctgctattaaaggaagtaactggagtgggaagaaaaaagggggattgaatctataatagttgtcatatacttaataatcttgtgtgtatcttaagtatagtacatgctatttgaattaggctttgcaatttataaaagtcattcacagatgctacttcattggataagtacctctaaattttaggaaaataaccacttaagtgctcccaacgatatccattctatcaatgtcacagattttaaaagtgaaaaaaaaaatgaaaacacatgatatcaaatagattatgtttaaagcgcatttcaggtgaccacggggtggagctctcatgggtttagagctgctggctgaggaaatcaacccagtgagtgaggtagtgaataggaactgaaacaatgaccacgctctgtataagctccaggtagataaaattgactggactgctgagtaataacagctgccattaaagaggaaactaaggaaacatcgttattttaaggccagtcagcttcggcagtcaagaacttcctagaggtctgaactggcaacatcccagaggctccccaccaaatacagaaacagcttacagaacagttgaactttgcctctaggaagaacacaggccagctctgcctgccatttgacttggttctttccttatctgtgcaccaatctaaaaactctggcacatgttagcttcaacctttgggtttcatctgcttttgaaaatctctttgcccagacctaggcctaacgattatgagctaatgttggaaggtggccagagatggttgtacatgctaatgcctcagaaacaaggcaggggccatctcaaaaagcagggacaaaacaaaggacaaaaaacaggaggtctccacaaagaactcaatctgactaaagagaggctcaaaaggtaatatgcaggagaggaactcttcatgttcctttaaatgacctctcacatatgctgctgtttcctataaacctgcagaaaagtcatttgccaatatttattttccatggtattaaataagcatgaatgtatttatgaaataccttataaaaaataaacataagttctggagtcacaaagatacgtgtatacatataacgataaaaaatatttagagttgaatgttaatactgattaatacttactctatatgatttttaactttctttctgatctgacatttggatggttttgatttacccctaaaacactgaactagaaaattaaagcaaaatagtttgtttatctttttgcccatttgaaattagattccctagcccatttcagcaagtcactaaacttcatggcttgaaaatatcactactttaaagataatgccatttctactatctcttatgcagtgatcagatacagtgtaggtagaacaagtggaataggaatcattgtggtgtaatcttgtgatgtcaccatgctccaagcattccactgcagcctagttttgtcagctaatctccttagaatgacagaaacctggctgatggtgccaattcctccacagtaaatttcatgttgatggctttaaggctatatgtcctatactcataaatgatccaagagagctcaccaaacatgacaaaaccagcatatggaagggatattccacatagtagagtggtacttaggaggctggaaatccttagtcgtgatgcatgaggtcatctactgagaagaaagtgcatataattttagggagaaataatgatacggattaattagggacacacaaataaaggacgacagtgtgttaagggaagagcatggaatatgctattgtgtaacttgaaaagggaatcttgaaaaggcaacaactacctccgtgaggtttaattttatgtgtcaccataggtaggttatggtggccagtcgtttggtcaaacaccaatttaaatgtcgctgtgaaagtattttttagatgtgattaacatttaaatcagtagactttgaataaagcagattaccctctaaattatgggtaagcctcatctaatcagttgaaaaccttaagaaagaagattaaggtcccccaaagagaaaggaattcagcttccagaacgcctttgaaatcaagactgcaacaatgactcctgccagggtttccagcctgccagtttgctttgcaaatttcagacttgccagcaccaataatcacatgagcccattccttaaaatacgtatctcgctctctctctcctctctcctctcctccctctctctctctctccctctctctctctctctctctctctctcgtgtgtgtatgtgtgtgtgtgtgttgtgtagctgttggtttggataagaaatcatctttccatcatttatgaatgctgcgtgataactaccagtgtaggttataaataaaatagaatataaagactcagttctctattaatattcatttaatagaacataccagtcctatttctcatgtaaaaatcctatttgcaatgaaataaaatgcctttttagcaattataaatctaaacaccatactgtttaaacattacagaattattgtcaaactaaatgaagtgattaaaaattgaaaaaatgagaatgatcccttatcaggtagaacttatattttaaaagaaagactaaaaataaaataagaattatgatataaggttaattatgagaggaaacactatgttagataagatgatcagatagttaagacccgaacaatgaggaagtattagttataggaaagtctgggggaagtctgttctatctattccagatagaaagaagggcaagtacaaaggcccgaggcatgatcagtattggcatgtttgaggaacaggaaggaggccaaatgtggctggagtatactgactgagagagagagtgacccaagttgggaggcaaacataggtataagtaagctaatatcaggccttggaaggattctgtcatatttgcaatggcaggtcattgaattattttaagcaggatgtgatatgatttatgtatctaaaagaccaatgtgcatgctgtgagaggaatagacaaagttgtaagaatggtgttttgagtttagttagtttagttaactgagcacaattgcaaaaatggtcttttattttggaagttcactacttttcaaagaccgtaattggtattgagttgggtatcattttgtcctataaacatatggctcaaagtcttaatggtatattattttattgacttattattattatttttgagatggagtttcgctcttgatgcccaggctggagtgcaatggtgcgatctcggctcaccacaacctctgcctcccgggttcaagcgattctcctgcctcagcctcctgagtagctgggattacaggcacgtgccaccacgcctggctaattttgtatttttagtagagacggggtttct

SEQ ID NO: 3501 - DNA, 4001 bp, Homo sapiens
aataaacacaaaatcacttttcaaatttcttaaagacatatgcataaatccaccagcatacatcttcatacattcaagtaactacaggaaactagaaaaatgcaaacaaaacaaaataagcaaaacatccttctaaggagaagaaaatctaaaataggttgtaatgagagacataattttcccggtactgatgttcatccactcattaggctaaaacacaaatcatctgctgactgctaatgtttaatttgcatctatgctaattaattttgagagctgttatttgctttgataggattacttgttccgctagagaacaacctcaccaaaaagctgtaatttctaaatcttcaatggatcttagaaacagatttctagctcatccaaataatgtaaagatggcttcctttttgaaagttattctctgctatatgttctttgcattattgtgctcttacactaatgcactgtaaagccatgtattacttcaagaagtaagaaaatatacaaagaacaatatttaaatacacaaacatcattaaatacaatcaaatggaggaaagcagaaggaatttttacctctaaacaaagtttgatgtaattttctttaaaaaaatatcaaacagggacatcaaatttactcaggtactgaatttttaaaaatagtgtgtaaatacagcattagagatataaatcttagaaaatctctattttgcatagtgtaggattctttcagctgttattatagaaaagcaaatatattaatattttcatttgagatctgcaaatatactaagcaattacaacggcctgtaaaattcatattcatatttctcatttttatccaaatgttaaatctgatttttaaattatgacaattaagataaagcatacaaacagtgtggtgctgaaacactaaacaggaactagtagcacacacagctaaaaaaaatgtaagggtgtaaatatcaagctgaatagcattgcaattaacgtctgacttaggtaattacatcccatgtttgacataatgcataattcttgacccattttactaagggctattatgtactatggactattctgtactctcaggagaagtgaactgtgaactggttaatttaaagccaaaactctccaataagtttgatatgctgttaatatttttatcacgtaaacattttttcttatagaaatatcatttaagcaaaaagaagcacaataaagtataattatttattatcatattaatcatctcattgcttttccaaatctaatcacagagaaagaagtatcagtcttatttctctctctgcttacctgagggaaattttatttgtggcagtatcccggcaaatggctttcttagttacctttctgcatatctgaaccacatatctaaacagcacatacagaatgcgtaaaagaaaccatgtaatatgacagtaaagtgacttctccagaagttaccttactttaataacatgtgcaagtacaaaaaatcattcgtctttcaacaagttgttagctgaggtaggcacattttatttttcgagagaaaatctttctaaaggaaactagcccacaaaggcggatagcaccaacaattagtcacgttaatagtcaaatcttttggggggaaataaaaagcaaagagcatactcacattcctttcaggcgctgccacattttttcagtctgttctcctgtaagatacttaaaagtggtgttttccaattcttcaatctctgtggcactagaccccatgatgatgctcctaagacaatacagttacagtcagtttcagcagctagaacaagcattcctcagtccattacaaatcttacacacttatacagtagcctctcttatctatcaaaacagtgctgatgtacaaagctgagggaagactctgacagatttgctattgactttgacaggcatatatccactgctcaccacctcaccacccccctaagcagacagcagtataaacagatgctctgacctcacaagaacaatccgtacatgtgagcctgctactgtactactgaccgactgagtactcaagctctccccaaaagcagctcatctgttactgttctgtgcactgaagcacatcagaattcctacagtttacgagctctattatgcacaagagaaacgtgaatgactttcgcgctccagaagaagctgaattcctctctaccaacagaacaagggcaggatgtaataaggaaacagatggtaggagccagtatcagcagcaccaccatgagaaaaaaaagtgcctgtttaaatgccaaggtttttttctctaaattgatctgaaactaacacttaaaaatgtatcatcatctaacaataaatgcaacaaatattaatgataacaaagagaaaataacatctaaagccatacagaagaacacagctccacaggttgttattgcaagaatatgtacatcaactgatgctgtaagcatgcttattcaccttctcctagcaactccacacagtaggtaactgccaatttaaccagtggaaaatacggcagctgcacacagcctgctctatgaatcctttggggattaaaaaataaataaaatgaaactagtgtaaatgcacttgtgtgtgtgtgtgttttttgaaggaaaagggaatagatttgtgtgtgtgtgtttatgagagagagaaggagaaagggagagagggacaagagagaaactgatggtttgcggcttgtgcattttagaagagaaatgagagagagtggacataaaaggaatcagaactgagtcgtctgccaagctcctaacacatggcgagctttctttgaaacaagcacagaccttaagtatgagcaccataacagctcttgctatctgcaagctgctatagaaaatatacttataaacaatatttcttcttgtttgtttgaaaacccagatgtagttttatttcttcttgcaagaaaacttgcctgttactatgagttttaaggtagagacattcaaagattggtaataacatccaatatttgttgaatatttctgatgtttcagacaatgttctcagtacctattacatattacctttttaaattcttacaagatgcctgtgagataggcaatactcctgttcaacagttgagaaaactgagaaacagagacattctccagatttaaagctaattcttaaaaatgggaactattattaacaattagtcttccaatgtaaaattactatgtctatacaaatgacactgatgctatctagtagtcagttataatgtgtacgtaaaaaggacctttgcaaaatgttatagaaaatggcttctgatttgcaaattataagagggtaaatcaagtgaggcttccattttcctttctcagacaagatatttccagaattcaatctgaatgtaatgtctttagctagcagacagctttgtgaaattaaaacttcattcctataagcatttaccagagttgtcagaaataagtgaatctttgccctgaaagtaccaattttaccctcactgtgccttcatttgtaatcttagctatattcatgtaataaactgttacctgatatttctttaatgaaacagtcaacaaacatctatgttctgctttcaaagaaatattgcagccaaaaatctccatagatagcaagtactctataattattattttatgaatcaagatacctaagtccttgaggctatacagatgattttctaaatatgacatgaaatgtcaagacctcacattgaccagcttaccaataacattgcaaagtaaataaagaatgagaactattctacttaagtatatgtctaagaatcttgtttcaatactacaattcatttgccctttgctttcactatgtaacttctatcacacattgatatttaagacctcaaggtatactaattcggtcacttactagaaaaaaatccttaatcatttcattaaatgtttcataaaataaaattttga

SEQ ID NO: 3502 - DNA, 4001 bp, Homo sapiens
tcctctttctcaacaggttcaagagctaagactgaaggtgagaagctcaaacttttctgctttgttcaaaagccattaaaaaggcctttcttcttttcagcaatacggtatttccaatcagatgaaaacgttgcttctgaaatctctcaattctccagtttccggtttactgtctacaaagcatgttaagtagcaatattattacattgttagatgttaatagtataaattatttgagggaaaaataaaatccatgtcatagcttttccagcacttcagtcatccctatatacctatttgatccattatggagagaaacacagaaaggcacatggagctataaaagaggctgctactaaaccaaaacatgaaagtactgaaagtttatcacagatggtagtatgcaaaggtgatacagcctttagtttttttaaaaagcatagatcaatttccattcgaaaaatctcacttgtacatccaaaacttcctttttgcactgtggtctaaaatgtattaccaacttggtttctgattatagcaaagcaattaaatttgcaagcgtgacatggacattgtgaaaacgcaacagaataccaagaaaacagtgctttactaaacctccaagggaggagccctgaagtggtgactaccttttcactgagggagcaatttaagaacgttcgtactatagattacagataggatgcatgaagagattaaagttggcaggagaatggaaaatttgaatatccaagtttgcattttttcatctgcatcatatggtgacagactaacacactccacgaaaacacaaagcttccttacggagaggatgcaaaaggggcaccacaacaggcccgaggcaatgatttctctaccccactctatcctaccgtggccccagcgacatcacaccattgctggacagctccaccacagctaggcataaccgcaccgacaggagcgagcaaagacacctcggctaggagtcccagcgcgaggcaccccacacctaagcctatggtcctcatcttgctggaaagaaaactgaggcgctgagggggaagcagtgaccaatgcctgagaaggccaagagtgttaagacgaggtcgatcttggacttctctttccccacctcccccaactactccagtcctggaagaagccacaagtttggaagagaagttgtggaaaccagacgggggtggggtgcggtgcggtgcggtgggggacctgagagagttttaaaagcactggtatttgtcccacacaaggtcgcccgctccaagtcactgttccccgctccccgggtaggcttatagccaaagaggcttctaggcttcgagatcagcccaccgcgccccctcagcccttctccgcgggccgcagccccatcccggcctctgggtcccggccggggatcggaacccagccggcttctccgacagcgtttccgacgcccggcacctctcgcagccccgtcccccaggctcccccgtctccacccgccaccccccggcgctcccgtcaacgtccccttcctccctcaggacgccccttggggcgcctctcgcgccgggtcccgccgggtgctcggcacgctgttcctttcctctcccctcccgcggcccttcttctgtggggcccacctggcgcggcccccgcccccggccagtctcctcagtgagcggccgcctcccaagtcctcccggccccgccccgctcccggacggatacagtttgaagcccctcaggatctccctggcccgctcgtccttggctgacatgatgcggcggtcgccgcccgcggctttctcactctggtcggcggagcctcgcagacggtgcccaggagccgaggatggagccgcagcccggcttggagacctcgggctagcagccgcagcggccagaccaggaccggcctctctctcccctcagctcccgcttctgatcccttctccttccccctagcctcgcagtgccctcctggaaccaatggaaagccagccttggcgattggcatctcaaccagccagtaggagcgcgcagcggcttcgcagggggactgttaacgtcaatgggaagggccctccccgggaagtcccataggacacaatattcatctggtgttgttgcctagagtttgtcccagcggagggttggcttcggatctgcagaggctttagggacctgctccagccactgagcacactagccgtctgagacggcagctgagttgcactgtgcgacgcgacagagactacatttcccagcattccagcggcgcactcgggggaccacagatcccagcgcaccacaaagaggcccggggactacaaatcccagcatcccctgcactcggttcctctgtaacttagactccagtgtgccgcgcagtgtgcgcaaattcacaaacccgcccgctgagttggtcgtttcggaatcccgagacttgaaacccaacgggaagacccttctcaccctcaaaagaagatgacagcccgcagagagttaacttctgtttacatggaactcagacatctgcaaatcatggtaaggctgcaaacaacaaacaaaaacactgattaaaccgtgaaagagaacaaaatgacttcttcaaatcgtgcttgtttgttggtctgaggcgccttttacatgtatttcagggttttttgctgtattcctggtttgcaccgggagagctatggattgtatactcagaatatcaaaacataaagggactttgctaatctatcccctgttgttacgtatgaggaaattgaggcccagagaggcgaagggattggccacagatcacagcaagttcgggcagagttagaattcagccctaagtcggctgacttgcagtctggactctttgcaccacactaaggaggtgatatttttagcagcatggcaatgtgaattattctccttgaacggttttcctatccactgttgaaacacccagaattaggtagcatttatttggtggatttcttgcgagtgagggagtgtgatatttatttattttcagcctaggtaggatttggtgttttgttttttgccactcaaggtgacatttaatgtgatttcaggaagtaggtaaaattacagtgtgagccacggtttccttggaaacctcctctgtccttctcttggccttccttcctctgcctgtccccactttcacccatctgggaactcacccaattttttcttccatgtaattcaacaaatatcttttcagcctgttatttgtcaggcactgagtgggtaaaaggtgaaggacatggtcactgccaccaggaagatgaacatatatttagggaaataaggagactccactgagattcaagatggagtgtgataaaatggcataaagaaatgacatcagaatgctaaggaggccctgatgaaaaggttcattgcagctggcaaaactttaatggacaaggtggcatttgaacttgaattttttttccatgttaaaaaagttttttttttgttaatgaggtgtaacatacagtatgggaacaattttcacataggtatacacccctgtcgccactacccaaatcaagatatagaacatttctagcacacttagtgctccctcccaatcagtattacatccttacatattgagataatcactcttctgactgtatcaccatagatcagttttctctgttcttgaattccagttaaatataataatacagtatgtacagtatgtgtctggcttttttactttatcagtatttttgtgaaattcatccatgttgtgtgtagccttttaattgctgaatagtattctgttgtatgtttataccacaatttatcttttccactgttggcgggcatttgggttgttattttttggactattattagcaaagccgtagtgagcattcttacatgtttctttttgtagacacttgcacacatttctaggagaggaattgctagtgtgtagggagggtatgcacatgatc

SEQ ID NO: 3503 - DNA, 4001 bp, Homo sapiens
cacccagagcctttgcaggaagcagcagggcctttcctccctggcggcctggggagtgcagccaagggacaaaagaggattctaagttgttttctggagctcactctctcaaaaataaaatccaaaacccagcccatgagggcaaagcaattttgtaggagatacttaagtcttcagttaaagtgagaaattagttcaaggaaatagggagaatgtggcctcagacttagagctgaactgaactgcccctccaggccctcgggtcaccccctgcgcgggcgtggctgtgcccctggacacacggggactccacctgcgcagagtgggctggagctgaggtctgcctggtgccacccccgccggctggtggctcaggaggcacacggggcacttctgtggtctccttgggcgcttggccacgtcagcttttcagaacattcagttcctccccacttagcctctctgtctccctcctagggagaaatgagctccctcctgcaccggcccagcccctcactgtccctgagccacaggggctggcggggagggcccttgtgggagcgcagcggactccgctctgcttccagccgctggtgagaccccccttctctctttccgggattccttgactgcagtgggtttgggttggcctcacccttggcacttggagccgcagatgagtctactgtgatagggcgggcgttgatgagcgctgtgaccacttgcccccacctacttagccttccccttgaccccgtggccagggctgtggcgctgccctcctcccgggcccgtgcacattgtagtctacggcactctcttgactcggggaaacgcaggctggcttgtttctgagggtggcccccacctgacaaaactgctcagctcactaagaatcagcggcactggtcacattacttctccggctccttctccctgtaagcctcttctggcatggtggctggagccctcccttgcagctgctaagactgcgtttcacccggcagccccacatcctggggcaggggcaggtcatcggtcagacctctgggtagcctgaatgggaggtgtcgtcagctgctgatttgggtgcaataagcagctttcagatccagctacgatgtgcccctcgcctccacaccctgcctggcagacacaagtaatctgctcactggacaggattggccttcactgaacacgagttaattgataccaacgtctccttcatcgcgtgattgtgtgtctgacagattctagggcctgacaggatgcagtttccaagcggaacccagctcccggccgtagtcatcctcctcctcccagccaccttcctggacccctgctgtcctgccttgggcagccagtcatggggtgtgaatgtcctctccttcctctcccctcaaacctctctctcctcatgtgccaggctctctgctgggcgctgagggcagaggcgggcaagccagggtcccctggagctatgatggtgccactgcactccagcctgggtgacagagcaagaccctgtctcaaaaaaaaaaaaaaaaaaaaagaggagagaattcatttcaacagatatttactgagcacctatgatattccaggcacaattcgaggtggtggaatatggcggggagtgaaatagacaacaatcctgccagcaatgttgaactggaacacacccacccagcatcccaaccccaggcacatactcaccccacgggcgtgtgaattcaccgaaaggcaggcttaagaatgctcacaacagcagaactggccagatcccaaactgcaaaccgcccaaatgcccatcagcagtggaaggataaattgtgttctgctcacacagtgcaatgcagtgcagccgtgagaatgagcaaactgcagctgcagatatcctcgccatctacgcctcacaaacaccacctggtgggattctattaattcctgtttgaagcacgaggccaggagacctaaccttgcagcgggcaccctcggttgagtagtgacaggaagtgaccgcaagggggcgctctgcccttgctctgcgcaggctgctgcggggatgcgtgtgggatttgagctgtgcgctcaggactcgtgcgcttttctctgtatgtgctgtacttagatacaatatttacactaaaaaatcggggctgtggtggaccgaagggcccaggctcaggccctgggctggctgaatcctgcagtcagcatctcccgcctcggtcttccttccaggaggtcgggtccagggcagaagagggcgaccccagatgaggcatctcctgaggggaggggcagctggcttggaggccaggctgtggcttgccacaggaacagggtaaggaggcggtgaggatcacctgggcccccagggacatttggcggacgcagaaaaggcaaggtcgaggccagcgctggtcccaccccccgcccccccagccactgagacccgcagaagccgggactctggaggctcccagaactccagccctctggggtcactctccttaaaaggccaagtgatgggtgggagggagctcacagatgatattggggcatggagaaaggccaggagtccccatttcccagaggcagagcagtcagaaagcatcccctcccctgcctggacaggtgtccatgtagagcccaggctctgtgtcagggacagccccgctccctcgacaggccagttccgcggaaggggcccatgtctgtgtggcctctagtctcactttggccaggctggctcctgccctcgggcaggcccaggatctggggtctttttccctgtccggtccctctcctctcccctcctccggctcccgcagttgttaatcatcctttcccgtttggaatttcccgatcagcaggcctgggaggcagctttctcaggcccccactttgctgctgtgtctctgagcttggtgtgtccccaccccctctgggggttttcagtccatcaccacagtggggtaataagcctcacagccaaggggagtggcccccagaacctcaaaaacccacagcgggctcattccctgacttctgccaggtagaggcggctgggccctctcctcagaacatgtttgagccccttctcagaagtttccagagtgccagtatggttggcaccagccttgtaagcccctatgaatagagacacatccctcttatacccatacacagattggaactcccggaggcagggcctggattccagggcatgtacttgctgtatagtgggctctgcagggagatgtatgaagttaagtggatgtggacatcgagcctggaaaggttaaatgacatccccagggctggaagccatcaagtgtctggaagtggagcttggagctcgaggtgccaagaccctgaagtggcagccagtgtctggttattggaagccccagacgcttgtttagagaaatctttgcctcctcccaggtcccaccagtgctctctgtgtttctcttatctttggatgttgccacacggaagcggaattctaaaataatttcctctcccttcccccatccccagacttctgaagaagatttaaactgggcattaggtgttttctaaatactgttgcaaagtcccaacagcttctacagtgagagcaacgcagatctggggaaagatcccagtgaatttgtatctttctttggggtctcagcagcaattgcatgatttcaaaaggaggcagtgcctcactctcctttcaggctgcgcttctgagcagagacaaaaaagggaacctctcaggctggatcaaaggcgagcctctttctatgtgggccacggatgctgcctgcagcagtgtgctttggagagaaagaccctctctgtggagagggaacattctggacacgtgtgcccttctcctgtgaggcttccctccctccctggggctggccaccctccctccctccttccacggaggcctggcctctctgtggcactgcccctcacccctctgggctgcagtgact

SEQ ID NO: 3504 - DNA, 4001 bp, Homo sapiens
gaagcagagtttgtagtgagccaagatcgagccacactgcactccatcctggacaacagggcaagactctgtctcaaaaaaaaaaaaatactttcagaccgtggagtaccttggtgcctgagatgatcctattggcctcactaggtgcccgtgggggtgccaccaccagtgatgaaggggaagggagatcaacccctacttttccgagggtctttcccatgtaagaaatacaagctgaatcttcctgaaattcagccacagatcccacactcccttaaggcacactcaggtcctacgatggcctgctgcagacactggcaacgtcaggcctggagcatccttgtctaggatgggtctggggctttgggctctgtggtgttattttattatttatttatttatttatgtatctatttttagagacggagtctcacaaagttgcccaggctgatctcgaattcctgaactcaagcagtcagcccgctgtggcctctcaaagtgctgagattaaaggcatgagccactgtgcccggccttctgtggttttaaatgaaacttttgcaggcttttttttttttttaattaagagatcattcgcatgccatagaattcactcttttaaattgtccaatttggttgtttttagcgtattcacaagtttgtgtaacccccccagcaattccagaacacttcatcagtcacctcaaaaagaaacctgtgccaatcttccccttcgcttacccctggcaaccactgatctacttaaccttttctttatattgtgtcttttcattgccgcttgtgttctatggggattaaaaaaaaatagatggcttacttcatgtgagcaagaagggacctgtgtctcagggtagcagacagggttatggggactccttggggttagaacgtggggtcccatgcctcaaccctctctgatgagctgtgtgagcacagaggaatgagaacatctttctggctttttgtcttctcattctgtttcattctcattcatgatggttaacagtgatgatacttgtcccacttacagcaaggaaatcccacgtctcctaaacaacagaaccccaaatctgcctgggcttgatgctgggaggagaagcttccaggggcagcaggatcaaggagctggctctgtccctgcctctgttctcactgtcacccctctctgtttcccatgagtgcggcccccagcaagctgggcctgtgtgctgctcccatggcggccacggcccccttacccaggacaccaccagcccagcagggaggggctgacgtcctcacaaagacttactaaatattcaaggaggcgacggggaaaagagagcacgaaacacagcatttagttccctgaagaattagaagcagtttgcaaagatgcactcaatatgacaagattaaaaaacatacgtgaggaaatcagagaggaataaaaatgagggggagaaaaaaataagatgaagccagggagaggttggtatggaaactccagatggtgatttaaggagcacttatgcagcacacttaccacgatccgagcgccgtgcaagtatcatcaactcatttgatcctcgggacactttggaggcaggggctgtgattatcctcattttgcagtcagaaaagcccaggcacagaattgcagcttgttcaggggctccaagcttctaggtggcagagctgggtctcaagcctgggcagcctggtgtgcaagttcatgccacccctgctgctttttcatgatatcacatgaacgcactgggggtgggcaggggagcccgggcatgagcagaataagcagggaatatctttgtcatcttggatcttgttccagaaatcataggtattttgcatttttccccatgatgtttctatatttgtgcaagtgtgttgaaaattaggttgtgtgtgtgtgtgtgtgtgtgtgtgcgcgcgcacgcaggcactctgtctgagcttcagctgaggccctgaggggttctgaagaaagcacaaggtgtcaggtagcccatctctgcctgggcggttgagagctgttctaccagcatgggccctcacccactccagggagaataaggcagggtgagagtttggggagcttgaggaggctggtgcagggactgctctggagaggctgcctgtgcactagtctctcccaagtctgggggaggcatttgagggaactgtctggatagttgtgtgtgtctttggaattggagggacccagggactggtgtctgagcccctagaaaattctcgtgatgagagaatgttggctaaaaggctggcgttgggcgcttccttcattcattcattcatatgaccctcaacaaacatttactgaatgtttgattgtgtgttctaggtgccagggatgcacctgtggaccacacagattgccccgtgaccttacattctagtaatgagggtaacagcttcagagggaccctgcccatgagttgggggcaaggggcctgcaggtgaggagtgggctgcagcgggctctgattgggcagctggaagagggcccgggtctgtggccggatccctgcactccgcatgccccaagatggtggacgtttgacaccattcattggttacctactgtgtacatatagtatctgtaatctgcgttctccctgaaggtagagattatagccccactttgcagaggaaagcagtggctcagaaagtgccgggggtgggtgttgaggtccacccaggggttcttttcctcagagctggccactctcttgccactctgatgagtttctcttggttttcaaaaatggagcaggcaggaatggaacctctctgagctccatctttgctgcaatctgacacacgtcgtgagttatgtcaattttccagaggctccaggcaagaacagctcctcgtggagacttctcaggcttattaaggagtcagatctgggtggcagcagcaaggaagcagctctaagcatgttctggaatcattcataggcttttattttctgagctgttcccaagagtgtaaccaaatgctaataccattgacattgttttcttaatgattactttggcttgtattaggaaacagcttaattagcattaattagagtgttctctctacaggacacatctccctcaaagcaaggtctccttagtttactcatttgcagggggagaactgtcactgactgaggttaagggtgtggcccaaggacacaggaggtgacaaactggggaacaaagctgtcagtctgttcaggctgctgtaaaaaaatcaccacagattgggtggcttaaaaacagcaaaaatttatttctcatagtctggaggctgggaaatccaaagatgagagcgcctgcggatctggtgtctggtgaggacccatttcttgggtcttctcaatgcatgctcacacagtggaagcggcaaggcagctctccatggcctcttgtgtaagggcacggatcccgtcaaccacttctcaaagaccccacctcccaataccatcacactgggcattaggatctaatgcatggattttggggagacacaaacactcagtctatggcaaaagctctaaccacagcccctagtcctgtgttctctacatttgactgtgctgcttctcagagagcaggacttatcatcagagaaccttccagtttcttgctcttctgctggagaggcctgtgtggacgttccccttgccagggccagccttgtccatcggaggagtcgcacagggccaccccagggttcagtaggaagtgacttcattcagcggcaggcctgaccgtacagcattttccacagcgttgatgagaaaggacaaaggtgctgaagtttatgaagaaaacccacaagatccagggtttctttcaggtggttgttatttctgaaaatctgaatttttaaaatgctgggtatgtaattaccgtattctgtagatttgtactcgaataaaggctgcaacatcaacagtcagtcaa

SEQ ID NO: 3505 - DNA, 4001 bp, Homo sapiens
gttctgtttctaaaattcacatcaccattccactcagtgataatgaacaccaatgggaaattggaccatccgagtgagtgtctagaatctctgtgagcagatggctctgccatctgtggttttccattcctccatggcagttaaggatgctataaattcacatcagtaacatctctgtcccacatctgctaggaggagtctacagtcccagagcagtcatctagaaaccatgaggtttcccagaaaggctgccatttattaaaatgagttaattaatagactcacggactctttcagggtctagtctgaattcactcacaggaaactaaacagactaaactcttttcccctcatctactctctccacagtaatatggcaaatatttacatctctttaaaacatgtactagctgggccaggtgactgacacttgtaatcccaggattttgggaggttgaggaaggaggatcactcgaggccaggagtttgagaccaacctgagcaatacaatgagaccctgactctacaaaaaatttaaaaattagccaggtgtggtggcatgtgcctggatcccttgagaccaggagttccaggctgcagtgaactatgatggaaaccctgcactccagcctaggagacagagcaagaccgtgtctcaaaaaacagaaagacatgtactaactcattaatcctcaggacaaccctaagggagtactattatcagtccctaaaatggtgaacaccgttgaaaaggcactggcacagagtggttaagtaacttgctccaagtcacagagccagtaaatagggggaaggtggtctgaggccagagccgaggttaaggactgtcagagccaaggctgtgaccaaggcgagcccggcaaggacaggaccctcggcctcgcccactaagaagcagacatttacagaattcctaagacgccgcgttccatttcgtttttaaggagtccgatcacatgcgaagcgcccctgcgtcttaagcccagcttttggaaggcactgtccctttctaagggaactatgggtccttatttcaggactgagatttaacatttcagtttttcgtttctgagacagagtttcactcttgttgcccaggctggagtggcgcgatctcggctcactgcaacctccgcctcctgggggttcaggagattctcctgcctcagccttctgagtagctgggatcactggcgcgcgacaccacgcccgactaattttgtatttttagtagagacggggtttcgccatgttggtcaggctggtctcgaactcctgacctcagatgatccacccgcttcggccttccaaagtgctgggattacaggtgtgagccaccgcgcccggcttaacatttcagtttttaaaagtaggagctgcataaagcaggtggcagaaacaagcagcagtgcaggacgcccgccaacctccgtccccacgcacgagttcgagaagagcccggaacaagctcccctgcgactctccgggaatacagaccccctccccgggatccggccggggctgggctccgcggctctcccgcccggccctggaccccgcgcccggctccagcgcacgaggctcccgccccccgcggctgcggaagcccctccccacgggcgcccgagtctcccgcgcacccgcacctccgccggggcaacctagcagctcctccggacgccgaggcccgcgcctcccgcccgccaggcccacttccggccgcctgcggccgcggcccgccggggaacggcctagagattcgaaacctttcaggccgaccccagctcgcccgcctccctccgctggcccgcacctaccgagcaccaggagagccatgccgagcgccgggctacgtgcagtccccaccgccgccgccgcttcagccctgcagcgtgccgcacgccgcgcccccgcgcccacgtcccgccccaggccagtccggtggtccgaggggcggccgcgcgggggcgggccggaaggcgctcgccaagccgtggctgcggctcattggtccgggcggacatcgctcactcacatatccaatgggaggcggccgggtagaggttaccggtttggttttttttcacgggggcggtggcgagcagcggaaggcggggcctgctgggggcggggctggcagtctcggctcgcaccgcctcagctcctccgggccctctcggggtgctgctcggaggggagtccagtactgggcgtttttaccttagttccttattctgcacccccccaccccgcctcctccttgcctgtgtgcgcccccaccctctttatcccgggggagcgtgactcggcctcagggcacccacggtcctgggagctgacagggaattcctcttgtgcccgacgaatattccgtggacacacatttgctccgcacgcgctgtctgcaatgtaattcgacaagtttctattttgttgaattacttttgaaagttcttccgtccagggcgcatggctctgcagagccttctcctccttctctggagaaccccagggacttaagcggtagcctcctcgctgacagggtctccactttgtcctggggggcgagggggctggcaatgcgctcacgtgggtgtgtgctttgtaaaatatgcaaaagtgaaaaaaaatatgtttgtggggcaggctggcgagcagtggcatgatacagttcactgcagccttgaactcctgggctgcagtgagcctcctgcctcggcctcccaaagtgctgggatcacaggcatgggccaccacgcccggcaaaagtaaaaatttttttgcttttttttgagatggagttttgcccttgttgcccaggctggagtgcaaaggcggggtcttggctcactgcaacctctgcctcccgggttcaagcgattctcttgcctcagcttcccgagaagctgggatgacaggtgcatgtcaccacgcccggctaatttttgtatttttagcagagacagggtttctcttgcctcagcttcccgagaagctgggatgacaggtgcatgtcaccacgcccggctaatttttgtatttttagcagagacagggtttctccatattggccaggctggtctcgaactcccgacctcaggtgatccgcctgcttcggcctcccaaaatgctaggattacagttgtgagccaccacgcccgacctaaaagtaaaatctttcaagcacaagttaagaccactgtatctttccgccttgattctccctcctatgtttggagtggactcggacattttgtttttgtattagtaatttctccatattgtagtgtgtaaggcataagtattcttaggcaggggtccaggagtggtgggggccggctggtgggcttcctggaggaagtggcactagagctgcgtttggaagatttttcaggcaaactgaactcagaggcacagcagccctctgaagtcacgggggcctctcctggaagccacatgccagcattgattttccccagggaggctgcttgtcccgggacagaaatcctcagcttggtaccccgggcagctcctcctgaatgtgaaggtgcgtgggaagcccaaccggtgatcgcagggctgtttgggattcacagcaaagggcagtggactgcgagcctgttcctccaggcctgtctgctttccctgaagggcgcctgaggggcaatgaatgctgtttgtttttctgacccctttcctgcatttgacacatttccccccttaaatttgctgctgttgctgactggattacagcgaagtccttccttttcctctcagcctggaaagtcatgcttttcctccctggatggaggaatttaattctcttaccagaagagggccccttcatttgtctttacattaagacagttaactttgtccccatgggccacagacatcacagcttccacaacgcactcacgatcgagtttgttttctcagggttgtgagttgatcgcagcctctccaggcctgctgtgttt

SEQ ID NO: 3506 - DNA, 4001 bp, Homo sapiens
gttctaggcttgggaggctcaggctgaaatttgaggttacagtgagctatgatagcaccactgcactccagcctgggtgacagagtaaaaccctgtctcaaaagaaagaggaaaattttgatgtttgcataggaagactcactgattccatatagaaccactaatgctaattaccataagcaaagattaagtgcagtccgggcatggtggctcacacctatcatcactttgggaggccgaggtgggaggatggcttgagcccaggagtttgagaccagcctgggcaacatagtgagaccccatttctatttttaaaaaaaaatacacacacacacacacacacacacacacacacacacgggaaaaaagagtaagtgcagaggaaagctttcaagcaacagcaaaattcaccactgcctgtttgcaccatcttcaagtaggtcctattcaattgtctggttactgaaagtctcctgacccctctacactcccatatcaggatcccatatcactccctaagcagaatcgttgtagaatgtcctttggcaaacagctccatttaaaattaaactaaaaggtcttattattccagtaatgcattttaaacttactattcttgctgctttagaagagaaaacgttagcaaaaactagattgtcaacagtagaaattaaggtactaaaggaaaacagcttgtaaaagttttatggcatactcatgaataccaccaaattcgccccttcctcgaactagggtcattttaaagtaaaaacaaaaacctaaggctttgagccaaaaattatgccactacaaaccacagttttaagacaaagttgccaaccatgcaggtatcgttcaatgcagaagtcacaatgcagaagataacctttgtactcaaattttatgaattcattaaggttttcccttttcccctcatcgccttcacatgggaagtgggatgtaaaagttaaaatgcctaactatgcaattccttctgcaatttgttgaacagcttctagagaaaaccaagataatgtggtaaataaacttcacagcatcttgtcctcatgcactcaacacgtgcccaagacttacttgctgatgatgaaatgtgctgttggtgccaacagttttaagccactggcaaggaaaacattctaagaaaccctgggccagttataatctgccttccctattatcacgccaattctatgcaatcatcatatgcaaaactgggcattcatcatcactgcacggaatccaaacgcgattctcgggggtgcccacgctcggcctcccacccgggtccgactccttggaaggggcctggcctagcgcgcacctgcacacgtgcgccgggaggcgggaggtcgtcccgcggcccagctggtttgttttcaacaatacggtcaaagccacacgcccaccgttatttacgccgccagccagcgccggcacttcggagggaggaaggaagcacctaaggcgctgggggcggaaacgctgaggaggaggggtgcgcctcaggcgagagctggccggcgccgacccggcctggggcagcggccgcagctccccgcccgggaccgcgcaaaaaggcccaaggtcccgggccgcactcaccgaagtccaggaactgcttcatggagagcggggacggcgagaagcgcgcgtagaagtccacctggcccggaacgccgcgctcggacgccgggctggagcccgagtccgagctgaagctgcggctgaagccggcggcgcgcagccccgggcccgggccggccaaggcggctccgcgaagcagccgcgccagcctcatgccgagtcccgctagagaagccacagccagtacgccaggtttccccgcgcctctgccgagtggtacgtgagggacgtggcgggcagcaggggcggggatcggctgtcaccggcgcggcccccaccctcctagccggagcccggccccctgcgccgctgggcgggacgcggagcgggaaggaggcggggagagaaaaggggcgggcgcttgcggggcccgccccctcgccggagtcccgcccagcctcccgaggaaggagatgcggagcgcgcgccaggccgcagccgccgcccagatcccgccccagccggcgaggtgtggggtgagcgtgtcggccgtccccgtacacgtcgggtgatgggactggggacactaagaggcgaggcggtatggagcgtccccttcccgcacccttttgaaacaaatcccaccttcctgcttcctctgccctcccaatctcagccaaaaggctcaaggacagggcggcgttccgcttgcacacaccgcggtgtcgtgctgcgagcgcgttccagaaacgctcctctgtgacgcaagccacgcattttccagggtcagagagcttcaggagtccccgcttgccaaacagtagtacgtaaatacgaaagctgaacactgggacgtgtggccctaaatagtatcaccgcgacggcggccccgggagaagagatgtactgccatgtactggctctgtgcctttgagtgagctgtttaacctctctgagcctccgtctctttacctgaaaaaggagcatattatctgtttcagttgctgtgacatgggtagtagagctatctgtgttagcacaatgccggggacataccagataataaatgggatttatttttaccattattgctttttaaaattatttcattattaagattttatcagaaccaccaatctgcgttttccctgaagcacattttaccaaaagtttgagagaaaacggtttttggcggttttataactatttgatgtattcgagtatcagcagttctcccacactgactgttggttttagaaagtgtaacgggtacatagttttgtgaactccgaaagtttgagacaagtctcagttaatgtataaagtttatcttgacaaggttgaggacgcgtgcccgtgacacagcctcaggaagtcctgagaacacgtgcccaaggggtgaacagcttggttttatacagggagacaggagacctcaatctatatgcaagaagtacattggttcctgccggaaaggtgggacaacttgaagcagggaggaaggcttccaggttataagtaggtgagagacaaatggttgcagtctttggagtttctgataagcctttcccaaggaagcaatcagatatgcatctgtctcagcagagggatgactttgaatagaatgggaggcaggtttgccttgagcagttcccagcttgaattttccctttagctcagtgattttgtggcccgtgatattttcctttcacatatcagtgaatcttcattcgcattatgtttttctggacaaccacatgtggataccgtatgggacattattcttttggccagacagctttgtcaaacctggtatcagtatgcgcatctggagtgcccatctctttcttggcaaatttccagatatctttgctgagtgcccgaggggcacacttcctgaagtccgtttcaatgggatgtgcttgggaatgttgatggtgtcaccacctcattgatggctgaatggcccccttcttcttcccacccttcttctgcgggacctaagttggaaagaagaaaacaattttaagttgaatattacacattcttaaaatagtccctcaaacatttccacagctctaccccagcctctcaggttgcctcctcctttctaatctccttccttctagattattccctgagctccaaagtcttgtcactttatcatgcacagcattattcagctccctcaatccctgtttgcaattttgctgctttctgcctgagcatgtcaagatgctcagctgaacattaatttgcgtgaaagtacaaaggcccagcagaaaccttgagactattttagcaagatttttttccctcaggaaggaatcaactgttgtataaagtgctttttcctttctccaaagtatattcaccatgcttcaaccaatatacag

SEQ ID NO: 3507 - DNA, 4001 bp, Homo sapiens
actaaaaatacaaaattagcctagcaaggtagtgcgtgcctgtaatcccaactactcgggaggctgaggcaggagaatcgcttgaacccaggaggcggaggttgcagtgagccaagatggcgccactgcactccagcctgggcaacaagagcgaaactccatctcaaaaaaaaaaaaaaagtaaaattggaatgctattaggtttagaattctacttttcccaataatatggtatgcatttctccaagtaagtcttcaatagcaagatatttatttatttattgagatggaatctcgctctgttgcccaggctggagtgcagtggcttgacgtcagctcattgcaacctctgcctcccaggttcaagcgattcttgcgcctcaacctcccaagtagctgggactacaggtgtacgccaccatgcctggtttgtatttttagtagaaatggagtttcaccatgttggccaggctggtctcaaactcctgacctcaggttatctgcccgcctcggcctctcaaagtgctggaattacaggcgtgagccactgcgccaggaccaatagcaagatatttaaacggaagcattatatttcattgttattgatttaactattttccttatattggatttttaggtaatttccattttttcactactcaagactacatccttgcatgaaaatctttgcttgactccgtttccttaaattcctgaaaaaggaattactgtcatagagcataaacattgtgaaggtttttggatctttttttccaaattgccttccagaaagtttgtaataatttacattcctgccttctcattcctgcatcaacactttaatttttcccaacatttcaaaattttgttagaaaagttaaatcttactgtttcatattttattaccaataaagttgattattttttcatatgtttcttgcctgtctgtagttcttcttttggaacgcttagtccataccattagtctaatttttctatcagtgtgttggattttttctttatttgtaagagctctttatgtataaggctgttggccgaatctagtggctcagcctgtaatcccaaaactttaggactcagaggcaaggcaggaggatcccttgaacccaggtgttcgagaccagcgtaggcaacagagtgagaccctatctcaaaaccaacaaacaatttatcttatgttgcaaatatttttcttcatatgcctttaaactttatatatttttttaattcaatgaggatttacactttcatacaggtagattgatttatgttctcctttgtggtttattccctcacttatgtgtttacaaaggccttccttcacccaagttaaggtaaatattcagcatatttccttgctgtggttaagagatgtgagaagatactatgagagactcactatgttcacaactttttccagttaaatgaagtcttcccacgtttcctaatcactcacattaagcatatagaatggattaattttaaatctgaatataaaactaattgcacagcatgtttcactgctcttcttactgcctacctggggcacagtctctttggcctgagtggtctcttcagtttttaacgagtggctccacaattccttaggaagagctgctctcttctgtctccctggtggtcgtaatttcgcccacacctgccccgtctttgctctgcagctccacactccctcagccccgccgagagctcctggctcccgtctccaggttaccccaggtcaccacagccacctctctgcaccagcggcccgctcacgtacccagctccaggagctccttcacgatggcttttccgatgcccgtggccccgccggtgacgatggccacttggccctgcagcaaaccaggcgccaggtagctcctgcccttagcccaggaggccatccctgcagcggggtgccagagcagctgagcgcaggcccttctgggtctcagggacattcgaggcgggcgggcggacagggcggtgctcgagcccacgtgaccaccagaaccccgcaccctccccggcccggccccgccccgcccgccggccgcggcaaagccgcatcctcccggagcagaaccgctccccgccggctgtccgcaacctccgccagcgtcggtccctgggcaggtgtgggtgagactgctcgttcgtttctttaaatttcgatgccattggggagggtggaagggaaatgcaaaaaaaaaaaaagaagaagaaagaaacaagcagggtgtgctctatttcaaaaattcaatcctcagggctgaagctctcacgattaattaaaattaaatctccagtgcagctggaaaaagaaaggctgctgctcggcgccctcgctgcgcccgcctgccggggtcggacgtcggcgatgctgtggctccaggtgctgtgtgccgctggctgggaaggggagaaagggcaggcttagctgagggggagaaatgcggctttcagatcctttcatccttcgggagggagcccgggaaagagagtgaaggggaagaggagatgcggttgcagttttccacagaaccaagagaataaacgatttgaaaaaataaactcaggcccacctccgtctcacctcccactccccacccaagaatcaaggggaaagatcatctttaccaggtttgagacctgatccatttcagctgagctgcatagcgagtccagaagaggatctttccttgaagggtgcacgcttcctgcaagatgcatctgtaggtgtttgagatcatgtcctgtagttcattccttgtgcaggagggtgagcccgctgaggatggggaaaatttctcgtctgtgttatggtgcccagtaacagtgatttattattcagatctgctccttatttttcatcttgcttcccgctctgaacccaccagagtgagattacacctggactggcctactgagacttcaccctaagaacttggtcgaatgtgccagttgctgtggtcttaacaatccagatgggatgctatttctaaggctgttgtcagagtgttgcattttccccggacaggtattaaaataatataaaggcaaataaatgccatcatccttttgttggacctaccacctaggattcacaaagccaattggaaatgggtctggttgacagaggaatcagaccatcacttcctccaccaggtcccacccaccagcgaggctgcagttcttgttggacagctacacttccctgttgctccatcctcttgtccttctctgatctctttttagaatcacttctccctctatctttgttgctgacagattcaaatctacactcgttaaagaaaggaataaatctcctggttaccatttgctagatagtttatccaggaatcacttaactctactacttaagtcaattctgtagttaggaccaaatttttaaaattacaacgccatcacctcctttaaaacaaagtaaattcaaacaggaaagctcaaagtgttgttgcagaaacatataactcctcttggtttgatcccaatgacaaggtgtttttttttaaggaaaagaaatattgattcagttctgaggggtatcttattcaagagaagtccagactttctttcttgtgggtggggacactttaaattcttttaaatgataactttattgaagatataacttaacatgatttatgccctggtctggacctatagattcttagaggtgtgccagggtgggtcagtgggaagctggctgtgctgcagcttccgtgtggctgctgagcggactgagagtgggattctgatgtcttccagtgaaacagggactggggcctgcaaaccggttatgcctactgaggatgacaaggtgccattcctcagctgcaaggaagttgcaggatgaacagtcagaaggcgatttttcatgatccaggcagaacctgcaattaagagagctttggggtctcttcaagcgatcttttgtttaaaattaggaggcatga

SEQ ID NO: 3508 - DNA, 4001 bp, Homo sapiens
gtgatgcttggtttaaatttttggtgctttccagtatggtaccgaagaaataaaaactcacaaaataaataaggtcctcagagttaaagacttttccccagaagaggttgttggtataaataaaaaaaacaaggaattcatatgctgtatttgtacactaagaacaatgttttgagacatgtaaatcttatcactcagaaaatattttgttggctataaagaaaacgcatcgtaaactgaaacagaactgaataaagtgaacctttaccacaattaaaatattttaaattcaccctattatgaaaacttaataataaattcatttatccttaagtgtaagagtaatacatattcgacacagtaaaggacaatgccatttctgaaacaaaagatcatgtgcaatgaaaacaaagtaacattttgcagagtaagaaaaagtaaagagcctgtgaaccgaaacagatgaccttttcttatatataaagcttcagtttttagcacaaccagcaccttatgaataaagttctcaataacatttgttgatatactgtttgatgactaaacgacaggaatattgttggtgctgttaaaaccaaggcacatttccttgtgtgtagtgattaaaatctgttaaatgtacatttttaaaaaacctctgccctctgtccccttcttgctctcttgcctctaacagacctgcacgtacaaaaataaaagtagatggtgacgtgagtttatgatttacattaatttccctactcggagcatttttcactaagtctttagaggttttaagattcaaacactatgtaagaagaattatggtttgaactacgtaacaattacctagacatcttttggacttcagttaacctgtaagtaaaatgagcatctttaacttttccacggggctttggagaacgggttcttcctcataaacgctttcatatactcagacacgaggcgcggtagaagatcaagcgtatccatcaatttgagagcttttcacgacctcagtttacccacttagggaaacgggcgtattaacttgtttcctaggggacccgggggtgaaattaattagcgtgtttaaaatgctctgagatccaaagatgaaaggaaatgtgaaagacgcgcagagatgatgacaacaatcataacaataaaaagaatgactaacttgaagtctgcgttatgtaagggaggaaaagaagttatcagatccgcacaaacaaaagggaaacccaccgccccttttgtttctcccatttccctctcctccccgccacccgcagagctcccctctcgcagccggagcgcgcggccagccaggcgcggggctcggagttggccgccgcgcgccccgctcccgggcggagggggaggccgcgtagggccggttcctgacaaaggcgcttcctcgagccagggcgcgggatgcaggcgccgcaaactccgctccccgccgcagcgggggcgcgcaggcgggcggggagagccggctgctggccgccggggaagccgccgaggaagttgcgcgcccgccctccccgcgcccctcggcggccccgccgccatccatcccgcggcgccccgcggtcacacttaccggacaattgctggtggccgggatcccagagcggcccccgagacccgaggcgagagggtgaagtgttgtgcgcggggagcgcgagcagacagcccgccgttccgccgctgccctccgcgcccgccagccgagcccagcgaggggaagttgaccacggagccgagcgctgaggagccgcggacgcagggagaggcgttggggctgctttgtggtgcgctcccggagggctggggaccaattcgaccgcaccgcgggactagggctgctgccgctgctgctagtggaggcggcggcggcgccccccgacggtccctccgcctcacaccgcctctgggtcactgacatacactcgcaaggaggggaggggtctagccggggggcggggcctgagggaggggaccgggcagggccacagcggaaggcggtgtcgccgcaccgagaaggctcttgggaattgtagttctccggttgaagaaaaaagggattcattgttgtccagcaccctaccaggctcgctctgcactgagcatgctcgagggcgaggtttggaccgccccctcccaccgttaccatggtcaccgacacacttagcgaacgtgttcagtgctgctgttggctgaacaaggacggtcttgtattatggtgttgttggggatccaacccttagacggtccttcctacttttctccacctccaactcctagccttaccagtcataagtacccagtgaggtctgactttctctccatatttcagtcttccctgctgcgtaatttatcttccacaaaccctaaatcacaaatacctctgtccctcacttccctcaattgaatcttctccggctaaattcaattttctttacctaagacttgtcgaaatgtagttgtttccagtaattgaacaattaggttataaaacttaggaatatcaccactatcaaagtcccgtaattaattactttgctcagttagtcacatctaactttaagattagcaaaggcaaagtacagaattaagacccctatattttacttgattactataaaagaatccgggttcgttcattttaaggcctacaatttttaagacatacaaatttcataaagtatacgttcaaaagacaagttgaaaattgtttatgtgtattggccaactttagtttggtaataagagaagtctgaaccaaggtatgagtatgttgttgggctggtcagctaagtctacacccatcttgggcacccaggtgtggaaaggtggtagggaggagggtggagaaaggcaggacacattactggctctccggagagctaaaggcaacgcgtcctgagcgcttttgttttccttctccacctacctagaaccccacaccctggaagaaaaagattaatgcttaggaatcagacacacttttggagcaaggctttcagagagtctcaagatcagaaatccttatatctacagactatataattatacactcattcaaaaaatgcttgttgagtgtctacttgtgctaggcactgttttgagccccagaaatagagatacaaaaatgtaaaagaaacattcttattttcagagtgcttactatgcaaaggaggagacaggtaaatagacttaatttgagaagtactacaataggaaaatgcaaagctacccacagatgtgggcaaaatcaggaaatgcttcaaagatcacttgagataactaggaattaacatgtttgtgtattttggtaggggaggaggaagagagaggtgggtgagagcattgggggtggtgttggggagagcatcaagcacaaatacctaaaggtgtgagacccaaacgtattttggttcagcaaatagttgcattgctggcagtagaatggagttgggggagtggcaagaggagacactgaaaaaggtaagggagacagcttaggtaatgaagaatcttgcacaatatgctaaggaacatgaaccttttcctggaaacaatgggaagccacacaaggattgtaagcagatggaattttgataagataggcattttagaaagatcactctatggagtgtggtatgtatgggacctgttacagtattacaggggaaaaaaccatgagagactgaactaaggtaaggcagtggcagaagagaaaactgagggtaatcagacactattcaggggatagaatatagaacatagtgactaattgcctaggtttgggggtgaagggaaaagtaaagttatgaattatgatgcttgtggttgaaagcagcagaaaacccagctctaactggcttaaccaataaaggagatttattgaaccatctagctagaaagttcaggaaaaaggcagtctatagggatgactgattcaacaaatcagagatgtcattaaaggcact

SEQ ID NO: 3509 - DNA, 4001 bp, Homo sapiens
ggttcccaaggtgggccagctttccagaagtgtggcgacagtctctgccaagcttatggaattgtgtgtttctggctccctctgccaaacagagtagttttcaaaaggtaaaagcacacccagagcctgtctttcttctgactaaacgccaagtggccctgccagctgttcaatgacctgacagagccgtggtttgccgagtcctggtgaagttacatcatcgcttaaaaacagcagtgtgactaccagtatttttgagaaagttcagtgggtacgagaagtagtgcacaggagaggaatctttcctttttccttgtaagcactgcagacgtggctcacaggagaacattacttggcccaaaggcaagagcatatcagaagcctctgtctcctgcgagaaacctgggaaaaatcatctgtagggtaacagaaaaccaaaaacctgggaattaaagtagacctctgagactgcccaatctgagcccctccaaacaaacaaggaaactgaggcccagactgggagccagcagcagccagctggctgacacagggctcccccttcccacctggcactccagtctccacagaaagccagggctgcgttagttctgtaccaatgaatcataccaaggcgacagtgacagataactgcaaacacccacggtgccatccccgcgctggcacaccacacagcttccactcaaaaaaaacggagtccctttcttcattatagtcatatagcacacaaaaatcaattcaccttgtattttaaaactcaatttccaaataaagccttcaggtagagtcctgttttcttctcaggcacacccagcctgggaccagaagccccaggtgggggtagagggtgggccaagaagtctagcagtcctgctgtgccatatacaggtgagaggcgtccatgtggggctttagccaccgtgtggggttcttaacacatttcccggacttaaggcccttcctcccaaattccagcccacccaggattcagcacgcaagtggaggccatcactgaacctctgaagctcatcctgccccaggacgatgggaagatcctgcagacagcctgggcctgggcctcagtttgctcatctgtcaggctgaggggttactctgggtgattttcagggtgccttctggctctgttgttctgtatgaatcagctttccaaacgggttccttctgtgtaggttacagaaaccctggcaaccaactcgtcatcccttaccctggccttcctgaagggggaagcaggccacctcccaccccctggtctatgtctgggacttggcagccaaagtacatcccagaaggtaggcgcgactgctgcaccaaagagtggacacccccattcccttctatccagtccggggaaagggaattaatacagggtggtccaggggaggcaaaggggcgaacattagagggtctccccgccctcaggttcccaggcctggcttggcaccgggacttccttgtccctctgatcacccattccaggagacccgtgggtgtccaggaaaagctcctagatcagcgcccctccatggcccttccccagcccaggacttagccctgtggcctcagaagaggcagtcagctccccgagggtcctccagatcccagggccggctgcgctgacccttggtttccttggccttccccatgcgaggggagggagggttcccaaaagagaatcgcccacggaaccgcagcccgcgcgcagtcactcggtagctcggtgccctacacacgctgcctcacctttcggacctcaggctcctgagctgcgaagcgggggttcgagtccccaaccctcggtgtcaccgcagttcaaacgagcgcaccctgcgcgcggctcgaccactctccacctgggacagggccaagggcacacgcccccacgccggcgccgtttcaagccgaggagtccagcagcccaaggaacttccggcggcgcctccgctgcccgagccggcgctgggaccccgacctgcccgaggcccgcgcgccggcggcggttacgtaagccgcagcggggccgcgccgcgccacttaccgccggccgcgcccgcgtcagcccgtccgccggtccctccgccgactcgcggctctgtccgcccggccccgcgcccgccgccgccgcccacagctgcacgtatcccctcagcgccgccgcctccgccgcggccgagtcgccgctgtcacatagtggaaaacgtgaccgcgcgcgccgcgcccgcccccggcctccgccattggccgcgactccgtctcatctgcatacatgaggggcggggcctacgaacgccgcgcgcccattggtggccgcgcccgtcgctctttttacataagacgcacatggaactccatgttcacctcgtcggttcctcaatggagacgcggcgcgttcgtgctacccgtcgtcctccctagtggtctcatccacttccggcgtcggcgccttccattcactacgccctcaagcccgccagctcggggagcgcggagtggcgcgtaccattgcgggcgggggagctgggcgcggggctcctgcgcacctccggccggcctggcagacccggcgcgccgaagccggacgagggagacctccacctccggccaccggccagaggcgcgcccccagcggccagggccgcgggaaagtccgcgcggcatgcttcattcacgcattcacattcattcatttactcattcactcactcattcatcgcggggccccggagcagcccaggagaaggtggcagcaccgccctgcagcagctccgggggcacgcccacccgggcctctgaggtgcctgtggtcgacacttgtcccggcagctaccaagtgacctttcttatttttgagaccacgtgttgcaatttttggttcaggaaatagagtcattgttactctggggaggtacaaaagaaagaaatgatgttgtccctgcccccaagcgcatcactagggagaaaggactatctcataaaaaggaaacttaatcaaatgctaaattgggcgatgtgggctataaattaaccagagctatccccacaggctccgtgagaaaggcagcacttccaaggcgggtaagatgggccctgagaaagggacgccttacaacggtgcaagccgtagagacgcaggagccaggggtaggaggttgtcctgggagacagcgcgggaccctgcatcaccttgtttcggtaagcattgtgtggggcatgtggagcctctaaacttccatttaaagtgtcaggagaaagagtacaatttccccgggtctgggtagaagcctgagacttacaggacaggaaggagctttcaggctcccacgcagcaggctctgaatgtgtaggctctcatggggaaggcgagactgtccaagaagctggagcccgcagcatctctctttactcttcttgttcttctttacctggactcacctggggaccagggatgggacagaaggaaaagttatgaacccacatcaggaattcctgagtgtgataactccttctcttctacttgacaaggtgtgtgtgcaacttctcagatgcaaaccagggcaaataccaagttcatcggggcagcccttcccacagaagccccgggaggcctgcatgctgttcacacactcagtcaggtggcccctcctcctgttcctctgacattgacacctcgacacactccccgccccctctccctaacacatacacacacaaatgccaagcaaacccaggcccggctgctgcgccctgcacacacccaaaggctcttttgtttcttccctcccattgacgtcaatggggagctccattgttctggaaacaagagtaaacagacagctcatccacaccttaccgagattcttcttcatgcttttgctgggtcttgctccatattcagcctgctacctgatgtcacatttcctccctaaatgtagccttttttatttccaccaataaatctggta

SEQ ID NO: 3510 - DNA, 4001 bp, Homo sapiens
tgacatagatggcattaaaaactaagaatagactactcaataaatggtgctgcgacaattagttacctatatggaaaaaaaaattagatttttatacaaagtcagttccatgtggattaaatgcaaatgaaaaaaccggaagatttaaaagaaaacatacagaaaaactgtcctgatctaggtagacaggatttcttaaccaagacaaaaagcataaacaataaaatatgacaattttggctgtattaaaatcaaaaacatctgtacaaaaaattgaacataaatataaagaggagaagccacacagtgaaaaatattagcaaaatgtagtaacaaaaaaggattagtttaacaatactcttacaaattggtaagcaaagataaagccaatagaaaattgggcaacagaaaaaacaaaaacagatacaaaaaataatatataaatagtaacatgtaattagatataaaatatatattattgttacattgttaagttttagatataaaatgcatataaatagcacaaacctaagtactaaaatataaaaacattactgggtatgcgaaacaccaaataaggacaatagtcaccactataaagaagaatgggagagtttagccgtcttttattttgaaaaattcgacataagtctggcaaatgttaacactgtttaaagttgagtagtgaatatataggtattatcttactctctactggtctctgtgtttaaaatatttcacgataaagtgggaaaatggttaattttacataaaaagaactttaacagatgcaaaaaataaaacctctctcattcgacaagcagcctaaatggggaaaaaagaacccactcaaaaaaaaggtagcagataatgtcaccgtggcttaccagcctaatcaaacttattacttgttatgtatatatccttattaaactaagtcgttactgtgttaaagcattttagtgtttaaataaaagatttcagaatacagcagaaatacattccaatatgttggggtttttacgcttaggaaaacctacaatagtaggtgatttgacatttgaatcacacctatctgaattaagatgtccagcactaccaaacaaaagccacacgaggccacgaaacactcccaactctgcatgttttagcctttttaaagtcctagaaaccaactgatactgattaaaaaccaaacaaaaaaaaaatacaggcctcagaaaaatacactattttgcacacaaagtccatccataggcctcagatctagaactcctgctttaaagttgcttctccaatctcgatccgaaacactggctgagttatgctggaaaagaatgcaaagtgtacggggcttgagttcctgttgcgtaaaacctttccggctttcagcaacttctcgagaggttaacacctttaaggagagactttgctccctgtcgatgccgtggctggacaaatgccgctctcaactgctacagaccaaagtctacgctttaaagatagagaagccattctgtcaaagtgaaaacagaagcggtaggtaggaagccgcccccctttctttcaagcacagagacccagagagacgcccaggagctcccgaaaaaaacgttgctgattagagctgccgggtcagaaacagctgtgagacactaaagtccccactggtaagcgccccagctccacctcggcccctatccccaaggttgggtattggttaaaggggggaagggaatacctccactaacaaccgctacaaccgcctcctgccaagtccccgctcgggcccactaaactcacagcctgaagaatcccacactcactggaaagtggggcccggtcctggtcccggtccggctcccggaattcggcgggtctcccagggtttggggggaggtggcggctgggacgccatctcctccgcctcctctcggctcccgctcctacccctgactgtccaggcccgcgtagaccagcacctggagcgtaagacacaacgggcagaacaccgagccgtccaccccgcccacccttgcagtcaggacaaggcttgagttactttgccagctgaatccatacagcgggaggatgccactaatttgtaggaagaaacacgctctttgtatttgccccagaaagagctgcctttctaaacctcagggtaaaggctcatcgatatttctggtagcggctacaactccctagacgtcggagtcccaccgaggcttttctgggagtggaccagtcgggctgggagtaaagccgcacgcactccttcgctcgtgggggaggtagggtgaggtggcaaaccaggcagtttttcggatttcctctacaaacaagaagggagaagctcacttagtcctagcgagagcgggctggtacttttgttctaaaacgcacgtttcctcggggaacagaattgctagacgcaataggtgcgttgtctttagtcttccctcttcccttcgagggccggaaggggttaaatctcaggctccggcgtctggggagaaggtgaggcgggtaggtaagaggtgaaggagtgcagactgggtgcaaaagaggtgtggcgggagagagttcgtttctctcctgctggagcggctttgttagcaaaggaggggtgagtgggaagtttgttgcacctgaccgaagggggaagggcttgcttggcgaaaactgaggcttgaggttagatctcgggatgaacttttcaagagtccacagtagattccagagctgaatgtttcagaagcccagtgaagtgtgatcacctctttctccgtaaatccacacccccagccccacgccgcgttacgaatgacacccttcggtagggaaatgagttttaaaagatcttaggatatgagactcagtctggtcatttcgctagtttttcttataccctgccccttttctcgttttcgatgactggtttttgtaatcgtccaagaggtgaaaataaagtccttcctctcctccagtaagccagagactgggctagttatccttgatttggggaggagggattcagtcctcctagggagcctgacacatgaaaggcggctttgtagcaacttgttacagagttatttctataaaacaaacacataaacgaaaagcaaacatcttgagggtaaccaacactggaaaacttacattgtggaatgcctttctcagggcttgctttcaaacataataaatctaatatggacaaccgatttctaatatcttatgaaatcctggcatttaattatctcacgatgaaaaaaccaaatttaagacgtaacgtattttctccttttaatgttaacattcttgagaagttgataaattgttggtaggtgaaaatgatgttgagaggtttgtaaattcatagctcgtttattaacacacattcaaaagaggtcttttttggggtctatttttagacctcttcaaattactcaggactggaagttttgtaattctcatcaatcaggtttgggaacttctcagagccaggagattgtaatgtgtcatttatttactttgcatgatacctttgttcttgtgaacttactggaaaaataaacattgtcttctagccatggaaaataaaataaattttaatatagctatttaagtatcgagggaaatcttcattaagtgtccttttaaagtgcttattgatttattggaagagggtgtatttcttctgtctctttttgagttaaatgttacttctgaattaagtaaaattcttgaccttaactaatggagaaaaaataacttagagtaacaggtgaaacagaaacagtttctctgtgtatgtagtcagagatgcactgtaaatgcttatattcgcccctcacagcatccgatctcttctctgcatcaaagtagattaaatgggctgggaaaagggatccagatcactagtaaatagtaatgacttgaccttgaccacacagatcttatttatttatttattgagatggagtctcgctctgttg

SEQ ID NO: 3511 - DNA, 4001 bp, Homo sapiens
ggacatcactgggcgttacctggagaggttacatggttagagcaggagtcagccaactatggctggtggccagccaaatttagcccactacctgttttttatggcctgcaagctaagaatggttttcatgtttttaaatggttggggaaaaaaaatcaaaagaataacacttcgtgacacttacaaattatatgaaattcaaacttcagtatccataaatataaaattttattggaacacagtcacattcattcttttatgtatggctgtttttcctctacaattgcagagttgagtggttgtgacagagactctacggccctgtgctatagtttgaatctcatgttgaaatctgattcccagcgttttcggtggggcctaatgggaggtatttggatcatgaatagactgatgccctccctgcgagctgggggaagctgtgagttttcactgtatttgttccaggagagctggctcttagaaagagcctggcacctctccacttgctctctcttgcttcctctcccccactgtgatctctgcacatgctggctccccttcacctctgccatgagtggaagcagcctgaggctttcacagatgaccagtcttccaggcagtagaactgtgagccaaataaacctcttttctttataaattacccagcttcaggtattcctttatatcaacagtaaaaagactaagcctagaaacctaaaatatttatgtagctctttacagaaaaagttcatttaaaagtcatgtctgggctgggcacggtggctcatgcctgtaatcccagcactttgggaggccgaggcaggtggatcacctgaggttaggagtttgagactagcctgaccaacatggtaaaacaccatctctactaaaaatacaaaaattagccgggcctggtagcgcactcctgtaatcccagctactcgggaggctaaggctcaagaatcgcttgagaggcggaggttgcagtgagctgagatcatgccattgcatcccaggctaagcaacaagagtgaaattccgtctcaaaaaaaaaaaaaagtcatgtctgcttcattttttggaagaatagaaataataagtaaatcaagtcttaggtccaaacttgttttttcttacattgaaacctggtgatgctacacacaagctccgctcctggattttgatgagggctgcactgtccacatgcttggttcccaagagggtgtctaacaataagctctgcaaatggctcatgttccctcaactctgaaagggaaagtgcagttgaagccattgactctggctagcttttaaaaggcatgtgaatacaaatgtccttaagacactgcagacagttctaagatcagcaagtgtactttgaaaaggtacagggtgaaaacggtggtccatcattcagggcccaccagtacccaaagaggaaaacagaatcatagaaaaatcacagctcacacagaataggttatgaagctgagtttggaaaatcacagcctggtgattttctggctatgtcaatggtttacatcaggattatctgcgatttaaaaacaaacattacacactgagaaaaactctgtaaaataaaaaataaaaacaaaaaacaaaacccagccaggatggagagctaccctgctaagttaaacacgactaaaagagattatgcgtggccataaacccacacattcccttcccggtgacctgcatcagcgccagctatgaacgctgatcaacatcccaatggactaaaaacaccttgaaggcacttaaacccacatttcccgcacaagtccccaagccttggacccccctcatcaggacctccggcacaggcgcccgtttcccgccactgccttccagtggtttggtccccgagcaggacccaaggcggggcagggggtggtgagcggtgaattccctggcaccgaggactcgagggagcggacgccaccccgctctgtggtgcccgcaaggacccggcgaccaaggacccgaccgtcaacggacgcggttgcgggtgggtggcggcggcaggattggccgggccacgcgccggtcaccgagaagcagcgactccagccccttccgcaaaccaagacccgccacctagagccgccgcccaatcccctttgggcctgaagccgtcctccgccgccccggcaccgcccgcgcggactcgctgtggaacccgcggcgcagggggcggagtgctcgcgcggcgctgcgtccgggagacggtgggcgccaacattcgcgcgttccgcagacgcgggcgggctcccttccagccgcagtcggacggctccggggtcgtcgggccgggcccgagtgtgtagcaggacggccgcgggcctgctggccttgggagggcagagaggtgcctgtcgcggccggcgacctccccgccaggccgggcggtccccgcgcacgacgcgcctgcgcgggaggcccccggcccggggctggcgtggaggccgcaggcgcccggcctagtgggtgggaggaagggccgggagtgggcgcgatgagcgagagcgggtgcggacgcctacgacatccccgtcgcacccgtgcctcggggaggacttcgagccgctcagagctcgaagactcgcgcagtatgaccgaaagcccctccctgccttctctaagcagctcagcctgtgtttctgtggccagaaagttgcagttcttcccactcgaggccaccaaagtcagaaaagtgttgcaaatgggactccgagaggccaggctgaagctgccacactggctggaatgggctgccttggagggggacgtgggaatccattccaagggacgggggattctttcaaagagcatctcgcctgcttataaaggaggctggctctgaagccgtcatctggagtctgtagtgaaggcctcttgttagggaaactggatggttagtgttcaaaatccattttgcgtgtgtgcaaggacacaggtggtattaaacagaagagaaaatcagatgactgtgaaatgttcaatactaaataagatgatttttagtttttccaggggcattgttatttgtgaccacaatgaaaaatgtagacagtgatgatctggtaactggcacacttcccaagctcaagagctcaaaagaatggttggagcccaagcccctttgttttatggaggtatatatcaaatagtgtgggatttggagatttttttacttggatcgttgcagtaggaagtggcttgtgctaaatatattgttttttctattgtttgtttttatttcattctgtttattattcccttcactttactaactttgtatattcactttgctgtttttttctaacatcttaaggtggaatcataggtcattgattatataccttttaaaatgtaacatagctataagtttctcttgaggtactgccttagctgcatcacccaaattttgatatgatgtatttatttatttatttatatttgagacagggtcttgctatgtttcctcctggaatcaagccatccttccactccctagtagctggaagtataggcgcacgccaccatgtctggctaatttttgtattttctgtagagatacaaaaaatctctacactgtgtcgcctaggctggtccccaactcctgagctcaagcaatccacctaccgtggtgttccaaaatgctgggattatagctgtgagcccttgcgcccagccagttatattgtttttagattgtagtttcttttttctaaacagctttattaagatgtaattgatatacagtaaactgcatatatttaaagtgtgtgtctggcactgtgcctcatgcctgtaatcccagcacgttgggaggctgaggtgggagggtcgcttgagcccaggagttctatctagaccaggcagagcaatatactgagaccctgtctccacaaacgaacgaacaataatagccaggtgtggtagcatacacctatagtcccagctgcttgagaggc

SEQ ID NO: 3512 - DNA, 4001 bp, Homo sapiens
ctctttaccattagctacactaattttctgtttttccagtcaatttatgaggcaggaaatgcgtctgtgagatccatatgctttgttcccaacgctaaagagaacaatttctacttctgtgaatattaaaatagcttcaataattgtaggaaatctaaaaataaatgggaattagtactgtactgtcacaaaatgattttaaccaaactcttcaatgcggtacaaaactaaagtgacctacttcaatctattgggagtttcctaattattaaaccaaaaataaggagggaattataatagctctattttcagttttttaaaatactaaactaaaaaggtttgcttagaaatgaacagagacgacagtaacatgtcaaaatcttctccttcgatagcatccctaccaaatgtttccactctcttatcatcataaatgcaaaaccaaggtaaggatctaaacacaaatgaaatctaaatttactagaatttttcccatgggaaagaatgctcttcagcaatttaaaccttaagtagtcttaagatcaaaataatagcagcgtaatcaagtaacaggcttcctccataatgacttgtacaaagaagcaatcaggacttgcatccttcaccctaaaaaaaaaactgctgtgattttaagagtatactaaaaatgtattttatcaatatatgttatagtgcatatacattttatggtagggaattattacaataggtagtccataattaagagatgcacttagaaataaaagaatcattcggaaaaattctcttaggacagttgtgtaatttgtctgcgcctctttttacagctagtcatgaatgaaattctagatcctactatgccgaactaacgaagccattgattgaaaacattcaaaatggcatggaagcggtaggggtggagagagaagggttggctctctcttaaactccgaacccagcgagaaaacaaaaatagcaccatgaaatagattttgtatgcaactattaagaggctcggctgctgagagacatgcataaacacaggtatgcacacacacaggcaagcccacacacgcacggccccttaacctgcaaaataagaggatctgcaacatctttccaagaggggatctagtttccaattcaatgactcgccagtttacccataggcaaaaccctggagtctctaaaaacagccttgggaactatctagccaatatacactctgcagacgctcggtccctttctagaaatgcgaaatctgacgagcagatcaccgggcgcgaggggaatttaggcgcgtgggaagcaaaggaaggtcctggggcacgggttaaggcaagaacgcgagagggatggagcttcggtttagggagaagggttgaggctgcctctctgggcatgaggggggctgggcccggccagtcagaagagcttgtgcccaggatttggggctggggaggaggcggagggacagcggagtaactacgaggacgaccacgaggatgctctcgggaaatcgtctaacaaacaccccaccgtgaagaagggacacaaaggggaggtgaggggggcagaagggggatgcagagtctccccgggcggagaaaacagaggcgaggacgggacagggggcccgagaggcgcagagagccaaggcaggacgaacccacagaaggaaaaaggcaccaggggccagagtcttggagcgcccggctgaggagagggcagaaccttacctgatactccgggtactcaaacatgtagctcatactgcacttattctcctcgaagccgaagaagacatcccacagccccagggttgccagaaagaccatgaagacataaaacgccaggttccagagattaactgagtgaagaaacatggtgccgccaccaccgccgccgccgccgccgccccctctacctccttctccgccgcggggccccaagcccggactgagcgtgctagacactgtccgaccgccacccccggagccgagccccagccgcgcgcgcctgcgctgatgcccggcctgcccgttcgccagccgcgcagtgcgcctgcgcgcaccaggtccgcggcgcctctggcctggcgactcccagagccgagggaggagtaggtgttgcagcgcgagcgcggatctacgggaaagagaaagagggagaaagcagggtgggctgggctggagggtgaggggaaagaagggaagtggggagagaaagacgcgaggagtggctggcgggagggaaagaagagagagagaggaagcatccagagggggatgggcggagcgcgggagccctggagacgagccgggggattgggcaggaggcgggtgtcagatgggtgaatctggggaggggactagagcccagagtccagaggcgattaaggaccgagagcggaccgagagaggggaggaggacttaaaagcccaggggtcatcagctgtcacctcgcaaacgcctctccctgcggcagtttaaaaacgcttcccgttcaattttgaaaagactcaggcctccgcaatttcggttttcccaacggtagtagagcacactcacagctctctggagcagttagcttgaagagggaacaaatggctttattttccctcttctaccgcctacttgggcccagtaggtaacagcgcttaaaagcaccggctcattaaaaaaaaaaaaaaaaaaaaaaaaaaaaacacccgcaagccgacgagattctgctcttggtatcagatgaaagcctgaatcacaaaaagcatcgttagtccttaaaatatgttaccaaaatatctattagcactgacgtccccaacaggtatctgcgtaatcagtttgacgctgactcgccttgctctccagaacctccatctcttggggaatgggttccacgttaactggaggaggcaatttcgtccagcttccattcaaactcgcaaatgacttaattcgttttgaagaatttcggttctgttttgtacaaaggaggagtttttaaaaaaagctcgaaatcaatcacttgtagcagcttcaaaacactagaatgttaggaaaaagacatcactctttaaagctgactcaacagtagacggtgtgtgtgtgcgtgtgtgtgtagtaaccacaggattcttagaatggtctttggcactaaatgaatttcattgaacttgggctgattttctggtatattttctgtgcagaggaagtttggctacaatacataaaatcaaagaattttaaaaccaaaaggaagcttatagtttatcttgtacaacaccctgatgttcagattacgaaactatgaagaagaagtggagtgatcctgaaaatcaagatagtctttaccctgcacagaaacagttgcaagtctaaacaaacacagctagctacggaatgtggagtattgacggagaaagacagaaatgggaaaatgcggaagcagtctccttttttgtagggagataagtctggaaagaccaggataacaggggagctgtaggtggtactgatcaggagggcaattaagtaatatgtcattgaagtaagtcctgtatgagacgtgtcgtttttgtttgttttgagactgagtcttgctctgtcgcccaggctggagtgcagtggcgcgatatcgactcactgcagcctccgcttcccgggttcaagtgatcctggtgcctcggcctccaagtagctgggattataggtgtgaccaccacacctggctaatttttttttttttttttttgaaacggagtcttgctctgtcgcccaggctggagtgcagtggcgcgatattgactcactgcagcctccgcttcccggattcaagtgatcctggtgtctcagcctccaagtagctgggattataggtgtgaccaccacacctggctaatttttttttttttttttttttttttgagacggagtcttgctctgttgcccagactggagtgcagtggcgcgatctcggctcactgcaccctccacctccc

SEQ ID NO: 3513 - DNA, 4001 bp, Homo sapiens
caaattaaataagcaagtcacaaaatagtgtgtacagtataatcctgtttttgttttagaaaatgtttacatgtgcagtgggatggttatggttggttcaaccgtagttcacactttttctacatcaattttgtaataaaatttttttcttctcagaataatttaaactctgtttcagatcagagtgcatatgctaccttattaaattcacaacaaagaaataaaagagtggtgggtataggacaaataactctagattgacttggttgtgacaatccacaggttggagctggaatctcgagtctgaagtcaaattatatctgaccaccatgtcaaattggcaagtaactgacatcaaatcatgagattcaatacttttgtaaccaattttgttaaaattccagaaaattgttgttgggagacaattttccctgcgtctctggtggttctgcatgtcttactgactgccctttcctctagactattgtctcaaggatgtttgtacactggacagccttgagaaacatgcttatttgtccaaatgataaagatctgggttccctaagctcagggctcctttcctgtaattcgacacacactacatctaggtgacttcttgcccactttgcattatcctgtgggaactggggctttagggaactcaggcgaaattgctgatttactggctactgctgggagtaattcattcctgaaatgaatagtcttgtgtcttccatgaaactgccaggctaagttagcctgcaaacagggtaaaaatctctgttccttcccagttcttgaaactttttttttttttgagacggagtctcgctctgtcgcccaggctggagtgcagtggcacgatggtcggctcactgcaagctccgcctcccaggttcacgccattctcctgcctcagcctccagagtacctggaactacaggcgcccgccaccacgcctggctaatttttttgtatttttgctagagacagggtttcaccgtgttagccaggatggtctcgatctcctgacctcgtgatccgcccgcctcggcctcccaaagtgctgggattacaggcgtgagccaccgcgcctggcccccagttcttgacactttttaaggtatagttccaaaaacctaccagcgctgtatgtgcacaaactaatttctgtcttcaaatattttcttaattattccatacttaccagcattattacgtggaacatctgatagaaaacctaaagaaaaatagcacgactatgtgttagaacattcgttattaaaaatctttttgttctttcattttgagagactccaatttggtgcattatgtgtacacgtcagagccaacttgttagtaatgaagttatctgtacatcaatgtgttagaaaagcatcttttgaaaccaaacgcgcagctactcctaacagatttctgtggtcatgtatttaccaagaaatttaaaatatctcaaaggtcctaacgtaaatattctaagcatatcattacgttttaacattcctatttttaaaaaacttggccccatctagtcctgaccatgcctcagaaaccaaaggattaaaaaaacagcgtttatgtcagcgaatccgcgggtttttatagttaagggagggctttgctcctcacactccacccgcgaggagatctgcggacgcacacaccacgcctaggcctcgcgcgctcacacacctgccggctccaccccgagggtaggcatcggacccaatcgggggtcgtcccccatggggagcgcgcaggtggggatgggagtagcaggcagggcgggggcccacgggcttctcactgacccagtcccgccgtcggcagccgccccggcgcccgtgacgctcctgcgggttcagtcctttggcctcgccccacgcctgccctctcggcagccccactcacaagcccagctcgcaagcgcaggcgcctctcttctctagcccgaccgccaactgcagcacctcccttgttcctcggctacggctggcgtcacttccggcggcgttgccaagcaaccgcgtggtacgagtaacaactccaccggctggcgtccgcggcgcttggcgccacagtcacttttccagatctaggagcatcatggacacctcgtcagagatgctggtacggtttggacggcgctgtggacgggcgaaggaaagtacaggtgagctaaactgacctatccagggacagggattgtttctggacccccggcatggagtgagaggcgaggatgccgaatgagggcttcagttgccttttgaaatggactccaccaggtcgaaagcatcctcaataagcatctttgggctctgtgtgaagttaggccgtcttgccctcaggtgaatgggtgaaggagggaaacggggagtggaagtgggtgggagaatgtttacagaaataggggtggagaaaagataggaaatcagagacccccacccccagccccagctgacctaaaactgcgcagttgcagctctgagagtctgggttttgttaaatttcccgcacgcttaaagtttgttattcactgattgaattggaatatctcttggaaatataagtcacctctttagaggcttggctcttctgcaaacctgctgattggtctttactaaaagtctctgaaggaaatatctccatttcctcctctctaaagtaaatataaggtctctctctaagtcaaatgcttttagagagttaaaaaaaaatcgtgtgacataaagtactgtaattcaggtgacctgttataacaatttgattttggaatagaaatagacttctaaagaactctatcaattctagctacaacagtttcttacgtctgtaaattagcaattaatgttgtcatggtgacaactagaactttggcaatttgaagtatcttcatgtcattgcccgagcttctgtagcaatagtgccccctgcaccagatgcagagtgacagccagtcattcttcactagtggatatttatgcagtggaggttttatgaggttagcagcggacttttgccatgtaaaaggaaagaaacagtaccaacatggccagttttggaaaagcacaattagtcccacacattcactttcctgcatatgcatttctgcactacctggtttagatttacctaatagttgttaaataatgttttgtggcaactagctcaaaagcttccacctgagcctcactgctaaattttaatctccatttttaggggaaggctaagttggagagaggttcagagatgtgtgcagctattagtaaaataaataatttataaagatttagtgggatgacatcagccagaatggtgaaataggatctatgcctgaaatcctctcctccataaaatcaacaagaacagtggcaaaaatcatcaatatcgactttttcagaactctggaaattaaccaaaggcttgcaacaatttgtagagtgtttactaaagaaaaacagctggatttttgtaacaacagcaaggtttttggcattttaacttgccatagtcctatacttttctcccagccccgtgtcagcctagataaccacagtaatcacagtgaaaaatagtgacttagcaactggtagaggggacaaaacagaatttgacccactccaaagccagacaactgttattattcgacatgtttgatagttccttggaaaatctcactcatgaggcttattgttatttagtctgacttcaaactcaccaagtatgtttgtcaaatgttcagtggcaattttaaatatcacagctatcagaggcatgtgtgggaacttaatccccaatgtaaaaatgttggaaggtagggactaatgagaggtgataggccatgagggcagagtaaagggattaatgccattatctggggaatgggttcattataaaagtgggaaagttggccctcttctttctctctctctctctctgtctctgtgtggtgtgtgtgtgtgtgtgtgtgtgtgtgt

SEQ ID NO: 3514 - DNA, 4001 bp, Homo sapiens
atctctatgggaaggcaagcgagagcgcccacctgccaagggtcacatgctccagagcgcacaggattccctaagtgaaacaggccggtaggaagaacttgaatagtcaaaaatctacaaactcttcagaggtacagatcatcaggccataaaagccacctcaaggaattttggtcacatctctctaaggacttccaaaagctaccctctgcacttgaacaggaaacctgccagctcccctcaatcattctgctcctttggaatagaagttacgcctttaaccgaaggagaacttcaaatgcgccactggtatctggtgccactgccaaaatatatttacatcaccttctatcagtcattcagagcccagtgctgatattctcttagtaagacaaggagggggttaggaggttggtcatccacctcctcatctgcaaggctaaatgcaggttttcttgtttattctacttgagaccctggggaactggtctggtgtctcaggctctgataaattgaacacactccccgcaaatcatggcccagggagctttggaaaggagctgtggggcatctgtttctgctaaatgcaatgccctctgcgggttgttcctctgtatgaggactcctagacaaaggttagcctctccctgcatctgagaaactgtgcttggggctgtaaatgttcattgagaagcctccaacctagccagggcctggcctcattgtcctaagtcttcagatgcactcagcctccaatggtgctgtattttaccagttaaacacgtcttcaaagtttactacgaaacaatgtggctcctagcttgccaaaagtttaactgcaggattcagtggattttatctggcagagtagctgccgtgactcttgacaatatttgccagcaaaaggcagtcctcaaaccttgcaaccagggcaatcccaaggcccaacgtgtcactgaaggagttcttctgggaaaggtccctctttctcttcaatcgcctcccgcaaatccccagcttccagaatccaattcaaggcagtctggcatttcaggagacagcagtaaaaaacttttgatgggataacccaggacataaatattcctggctgaacctacttttgattcttaaatatctgaaggagcttgggtttaaggaagataaagggagagaaccaatgaatagggaaaaataaaataagtagcataccatgaccaagccaaaccaagcttgatatttccacattatattggcaaatggatgctttcacatatcacttgttctgtctttcctggtgaccacaaaaaaaaaaaaaaaaaaaaaaaaatctggcttcaaaaatcctaaccccagaccactgcattgtgtcagtggaatgcaatctaaattgccagtcagaaagtccaaccttatatgtaccaaccaacacgcacacaagcacctccaagccaaaagttgtaacgcctgaacccgtgcgtttatcaatttcatcatccccatacccctgccgggttcctggcgctgggtaaaccgacagcatcatgttgccatcgatgcgtcttacaagatggttttgggcaaatcccctaaagtaggcagaagcaaaaactaggttcctctgcccgggcacctcctcctccaggctggcccccggctcccgggtgccccttacctgcaggcgctccgtggccggctgccacatcttccagccctgggttttggcagaggagacgctggcgagactgtcgatcgcgccggggggcgaggggctggggtcccgctttacatctggggtcggtgtccgcgggatgtgcgtcctggcgctggccaccgccgccgggtgggcgtagggggctgcgagcaggaggaggcgcggcgctcagctgccggcaacttgtgggcacggccgcgcgccggctgtcctggcgcagctgcgagaggactgcgcagctccgcccgggcccggcgagcgcgcggcggcggcgggggcggccgctccctcctcccccgccgccgccgcccggacctgcgcgctctgagcatgcccggggcgggcgcccaggggccgcgcggggcgggagtgcagcgcggccgactctaaatcctagtgaggggtgaatggggaggctagaacagccggcccttccctgcaggaagcccccattgggttggggtctgggaaaagggacagactggctgaggggggaagggcctggagccgggggtggtgggggcagcggggatgtcgggggtggcgggggtgggggaaattcctaaaataaggaaaccgtagccccgggggtcccgggtttccatataacaggcatctctgaagtgcctgtgctgtgcctggcgctgtgctagggagacacttccattcattcttcccactccagttaactgagcatctattaggctccagcccctatgctgggttctgaggatgcagcgacgcagaatagaagacaagagaatgttccttctctctggagcttaccttctgctttggagagagagtcgtgactgagcaaacacatcaacaagccggtgctatatcgggtggtgataaaacagggcagatgtgggaagaaggggagaggagagcttcttagacaagggccctggggaatgcctggagtaagacctgagagatgagagggattggccacgaagaggccatgcttcatgatggggagaggactcgactcctaacctatacaggggtgaggagggccatgcagactcccgaatcactaactcatcctgagatctgccaggtgcagcaggaggctctcagaacccaagggaaagccgctctgggctcgcaggcctggaggctccccggctagtgccggccaccatgagatgacttcctgtcctaaacaggccagcccttcccattctcttgacaactcggcaaaataactattaatattttcaccatgtggatcaaacaaatgaggcttataaggtttaggtcacttgtccaggtcacacagccagtgagtggcttagagagtgcacagtcagatgacttcagggcaggagatgtggccctgcgcctctaactgaccatggaaacccagtggaaagagcatccgtctagggctgggggttaaaggcacttggcaagtcagggatactaagctgattctcgagctgatgaagagtgggagaggagaacatggtgggaagaactcaggacatagaatgaccaaagagaggagcagagagaacacaatgtttgtggggagccctaggctcctacaaggcagggtcctgagagcagaggggtgtgaaagagaggcatttcatactgagacagctgcacagcttgggccgtgagctactcatgcaatgtcaaaatccacactccatgtctggaaggaggatctgtccattttccttgttctgcatgactacaatgatttccagatatggaaccactccagaatctaaccctcagctcatcggaccctcgcagcaactctccgtgggacagaagcccctatctcccaaggcttggggagcacagggttcacagagtcacactgtggggagttacaatggcgattcagatccaggattccaggcagatccttctggaccctgcggttgctatgttggtgccaccagccttggcaagcccaggaccctcagtgcctctaggagcctctggcaaagccacagagctgcctctgaagagcttgtctctgtctccctggatatccacaggaccctcccactcctgcctgataaccacctgaaccttctcagctccttctccagttcctgctacttgttctgaacttattaataaatctcttttcatgaggtgtttgcctgtcagcccgcacagacatgtgcctcacatgcttggtgatatggtctctgtttgcttttccggtaactcctcctgcacacctccacacctacaaaattccttatgaccttcccagcccccagttctcttttatcaaatcccaaagtagaaagaaatg

SEQ ID NO: 3515 - DNA, 4001 bp, Homo sapiens
atatgcataaaagatgggtatacagtagtctcttgatatcgttatctttcatggtgttttcttggatggctagctaacaaaaaacaagaaaagaagagcatatgcaataacgactttttccattgtcttaaatgttttgacccctaaaaataggtcataaagtcaattttctatgagcaatgtatttgtttcaaaacacaaaagatgcagacgtgtagatgcacatacagacttagctttctattctacctttgattttcttaatatggtacaaacatctctcagagcctaaaaagaacaaatttactaatttcttaaatattgtgactggtttctgcaaaagggtcatgtcctaggaccaataaagcaattcatttaaacttttttggccaatatcaaagagatgaaatcaactgtgtggattaaattatctactgcctgttgcaattataaccaaagtttatttatgcggtttctagaatgcataggttataattccaacaactccacaaatatacttaggctgaattgttggtatttttttttactcttgtctaacattacagtagttcacatcttctagcaaatgccaaatgacaccaagtgcacattccaatactcaaatggtggccagtggaatcaagagttcaaagagcaccacactaaaccaagggatcccaatgcttcagaaataccaagatgacaacgtctgttacaggtgttaaattccaaccaaaagtagagcacgaacggaaggaggaaaaaaaaattaccgtctctaaaatacacgtatttaaattacctgagagctgactaattgtactgctaaacaaggactttattaatttaaagtaacagtcaatatgttacattatggagaatattccagaaaatagaaatatctcagaaaaaaaaatactatacacacacacgcacacgcgcgcgcgcgcgtgggcggaggggcgcccactagtgagaaaagcagaaaggcgaacctgggccttatcctaatagctctcatttaattcacccaatgcttttcaaaggcagatattttactgataaggaaacacggcaaacaggtgaggtggtccaaggtcccatgcgctacagccatctctctggtataaggaaatacactaggcatgaaaagcaaacggatggcaagaagggacaaagggaaagtttcccatagattctatcttaagctgattgagggagggcaaggggatcaggaatccattctctcaacagatagcccttcagcgatttttctgagccaccctcggaatcgcagctgccagcagcagatgtggatgtaatacagtgagcaggacccaaactcaaatgtttgctgaatgaatgaaggaaccagagtaagcaaagagggaaccagcaccggttaggccctggcgtgcccccaggacgcctgcagaagtgccacgggcatgacccggcccacctcgctacgcaccgcagcggagagaaggctcttccgagcggcacccagaggagccttcgcgggcatcgccgcaccttcaccggcagccccaccccaacccgggtccctcgggattctgcccgagcctacgccggcgcaagcgtgggcagcgaggaaccagctgagaggcaggatcaaagagcatgggagttgaagacaagggaaaactgggggacagaggcgaaaactcggatccgaaagggggtctgtccatcagggcacgccggaagagtggcgctgagctgacggcgagcgccggcgggtcggggcgccaaggctcagggctgcttcggcaattcgcgggggtagcttgcacctcgtgaggcgagacgccgagggcgtccagcggggcttacctaactctccctcccgcggaagggaagcggggaactactgcctcctaccatcaggtacgacgggcggcccaggcccacgcgcaggcgcagggctgtggggcggagacccacgcctaacagccagtcgcagaaagggaggggcgggcaaaaggggcagcggctttccaggtttggggtaggcgggagtatgggcttagaagccggaagtgggttgacgtagcccggaaggggaatacttccaagttgtagtgttgttgttttcagcctgctgctgctgctgctgttgcggctaggggaaccgtcgtggggaaggatggtgtgcgaaaaatgtgagttaaggggccgcttctgcgggaggaggaggctgggagaacctaactgagctctcccgggaactttgctttctcgttgttttttcttcgcccacaggtctcagattctatccgctgtctttctaccctaccctttgaccatttttgcacctcccaacgaccatacagtcctatatattttgtactcagaatggtctcagttctgcacctccttgtctatttctgttgccttcccccagccccagatctcatcagctctcctcccatataaaaatgtgcagttaaaccccaacgacacctttctgtcttggcaattcttgatctttcctttctattcatgtaagaagtattgttctcctgccaaatgctagacactagaaccaaagactaaggactttgccttattcattctcattagtcattatgccaggatatggcttagagtaagcccagaagatgcttgaattgaaaatcaacgtaagtgcaaattattatttccctaacttaaaacctttaataaattctcagtgtgcagagaataatttggggattctatatttggaacctggcgttcaggaccctccacactaaggccccaacttatttttccagcttcatcttcactgaggcttatcctcttcacattttgaccaaacaaaatactctttgtgcccatgtgtactctaagctttctatgcctttcctcagaatgtgtcctttatctagtttgccttcatcctctttactcctttttgttcacagtcctattgccacatatccaaatcctctgtcttgccttctccccaaactttcttttcttggatttccttagctagggttatttcttcctgcatggaatttcttctagtactttagctgtcgattattatactttttattttttaagcttacattttggttgaatggttctttttggggggaaggtctctgatccctctgataatctgatgaaaactatagactcttgccaggaaaaaaaaatgaatatataaaaggtttgtgtacaactccaccttgttcgcatatctcttaagatccacctgtggaacccaggttacagattgctgttaaagaaattagtgtactgtaatccctttaaaattgtgtctgattcatcacttcatttttctcagcactttgtatagtttatacatgatagatgcttagtatatatttatggaacaaatagacttaccagatttgtttaaaatataaaccaacagtgaaagcttattataagtcatcttattatcctacgcattttactgagggtcagtcattcattggccacagttaatatgagtctcagttgattggctgctctcccagcattaacaggctcctacggtaataccattgatagtcgataccattgtgaaccttaggcacaatgtaatgcacttattaaataataaagtttaattttccttttactatcttgttctaacaggtgaaaagaaacttggtactgttatcactccagatacatggaaagatggtgctaggaataccacaggtatttcttcttttagaaaataggaatttaaccgaatacttactgtgaataataccttagtttttacattatttgtacaatgaaatgttatgtgttcaaagtattttatctattaaacattaaagaatactgggtcctcaagtgatttaatatcttctatttagttctcagttacttgtacgggttcctaatatcaggagatagcaaaattattaaatgattgtcaagtgatggcaatatcacagtatttgattatcagagtatttgatttgatt

SEQ ID NO: 3516 - DNA, 4001 bp, Homo sapiens
actcggctttggaaataagaagataaaaattcccatgaaaacacttagcaagtgtagtctctgaaatataaacccaatcatatagttaaccctaataattacataatgacactagggccctgaaaaaattatcttataactctcactctttagcagcttaacaacgctttaaaatataaattaggactctttcctgagtggtaatcagtcctattaacctacctacccaaagccttctgatatatcaccaatacttcaccatttctaattaaggctactaatatatgcagacctactacaaactatcagaagccagtcagtaaaggccggacgtggctgctcacacctgtgatcccagcactttgggaggccgaggcaggagaatcccttgagcctgggaggcggagactgcagtaagccgagatcacaccacttcactccagcctgggcgagggagggagacccccgcccggtggctcacgcctgtaatcccagcaccttgggaggccgaggcgggtgaatcgcctgaggtcaggaattcaaaaccagcttcgctaacatggtgaaaccccgtctcccctaaaaatacaaaaattagccgagtgtggtgtcgcgcgcctgcaatctagctactcaggaggctgaggcaggagaatcgcctgaaccctgggaggcggaggttgcagtcggaggagatcgcgccactgcactccaacctgggggacagagcgagactctgtctctcaaaaaaaaaaaaaaaaaaaactggcaatgtaataatttaggaaagctgaatattggaaatgttagcttctatcaacaaagatttcttgttcaatttttgaccaacacgcttaaaggaaaaccagagcaggatccagaaagcagaaaaagggagaacacaggaaattagccttgctccacagaagagatttaacctacacaatctttgtcacaaacacaaaagaaagaacattttttgtaagaaaactgacagagtgggagttttggagtgccaaaaaaggggctcaaataaatcagaaataagtacattataccaagcgactacctctattgtcaacactggacatattttacaacacaggatgcactgcgtcaatagtagataatgaatcatgtatacacatcagatacacacgaataacttgctttatacagaattctagcacttcttatatttcttgactgtcttaggaataacctctgattgggcagaaaacccctaagtcctaaaagtttccaacacattccattctcatccttttgttgggaacattctaagcaaagggtaaacactaattgggaaataatgctcctcctcaagaaactccaaaacctaagttgaaatggaatcgtctcaaatagcagaggcaagcatttaaaaagacaaacacttatttgaacccccacggttggtatcgtttctgcagctcatgaactttcttttccagcctacggatgcgcctctgacaaactcagaactcatgcactcagagggaaaagtaactgtactcttcccctcctaattaagttcaggcgtaagggtcgagagagaggcaaaggaacttcaaatgtttccaaggaaatctcaagggccccacccggcttccgtccccactcgccagacaaggcagccggggaatagggaggacaagctaattctaaagccagattctctgcccttccttgctcagccggcagccaggccctagcccccgactgcggagccctggttctcactttcacctcagctctggccctggagctccccataccggcctccttcccatgctgagccccagccggccaagctccaggccccctcccttacctgcgcctcctgccccggccgcgccggctgccccccgccccagcctccgcttcaacggctcagcccccggaagtcggcccccgagagcggcggtgggctcctcaggccgcggacggttgcggcaggaagcgaagctgcttacatggttgatgcggcttctcgcttcccccccccaagactccgccctctgttttcctgtcccccagtccgaaatctttcccgggggccggctcctcccagcccggccgacgctcggatcagatgctcaggcagaaggagtccagcccagatcgagtcgtcctgatcttttggccgagattaggccgcttcagccttcctggaagaagccagggggactgcgcgcgtgagcgtcacgcatgcggggtcaacggatgggtgcttggtgctctgggcactgcaggggtgctggctggactgcggttaccgtatgtgttcgatactgtgggcactcataatatgttattgctttgttgtagacagttcactcgtgtagcactgaaccggagttagcgatgactctgtttccagacttgcatgactccaccaataaccagccatatgatcttaagcaaattgctcatttatttaggccttagacctctggtgtgtaaagtcggattaataaaaggactcacttcttaatacttttttgagattaagtaaatgcacttaaagcgaatggcacagttccctgacccagagtaagtgatgtcggctttatagttaattttttcatttaggtgttgtgttgcaaatgctgatgcaaataaagttaccaagcccaagccctatcttgttcagcttggctagagttattcgtcatttctgtcctgctgagagcgcagtgcagttaactgcagaaaacatgctcgccgcagttgtggggcttggtaggggaggatggaaagcagacgaaacctaaagggaaatgcagttttaaattctgtgagtccttttcctcaagagttttgtcaaatcccagcccagttttcctggagttggaaagcaccatcgaaacctgcaggttgagtccagtgcaaatcccagtcaccatcctcagctgggcccttcagcaatctttctgggagtctgtagtcagcttctcccattccttattactgctgcgtcagaccaccaccacgacccccacattaccttgaccatcattctcatcagagaatcatattttatacccacgtgaaaaatcccaaggtatctgggcgtgacccttaacaagctaattccccacacaccacaacatttacctacatccacatctgccctggtctgcctttctccctcatctctctgaggaaggggcctcttcttccccagctcaatccttttggcccccaattcaccctctcctgtctgggagcttgcaccgtatctgcaacctccccttttccaatgactctgcctcctcagcccataaagatgctcaagtctctgccttcctttaaaaaaattttttttaaaaatttaagataagcaaaaaaggccctcgtaattatcaccctatgttaatatttcataaacctacaataaagtatgaaataggtacagagatcatatgaaaagaataaattgcccagccacgacgactgcagtgtatgtagaaactccatctatggtttaaaaaaaaaaaaaaaaagtgcactccgcaaatatttttgagtccctaatttaacctgcagtgtgttagttatagaagcactacactaaggatagaattatgaacgtatcccactgcttcacttgactagcctaaaaaataaaaatatatgtgaacattacacagtccatgtcctcaagaagcttaccgtctaatatctatattagcttacagtttaatttctgtggaaaagagattgaaaactgggctactgtttttgcaaaagaaatcattttagattctcacttcacactagacatccaaaattaattccagatgaattttatctgtagagagattatttgtctgtgtatatatcctcctcaaaaactttcattcaagcacagatttaggattcttgctgaatcaattattgttcgatgatattatacttctattcctctgtatgtattagttgaattttactgcaactaatagcgttccatctttttc

SEQ ID NO: 3517 - DNA, 4001 bp, Homo sapiens
cagggctggggtgccatctcactcctaaggaaaggagagagggactcctgggtttccagtcatttctgctgggtgcagaaaggttagtttgagtgggctggtaggtggaaggtgtgtgcaagatttcatccgttggggaggctgcacacacccatgttcaccgggccaacagcggtcagggattcccctctgtttgctcagacatgtgcaaagggaatagtctgtctaatcttaggatggggggagacctgagagagaggacgtggagtgttagggcggtgctgggactgtgagaggcccactcaaagtctagcttggaggggacaaggtgggggtttcagctctcgcctgtgtctccagtgaacaggcgaggcagagtcccgttgagtaggaacctgagcatttggccttctcaaccttccagcctcttggctatctatatacactcagacagtgtgacatttagatcctcaggccgccagtctgtccactgagctgagaccttcaggcttctccaggggctcaaggacccactttaaggcctggggaacccttagttcacttctgggaaggactgtgttccctttttctagcctgctccccagcccccttccagtgtcttctgggtggcgctggaggtgggtgggtggggagactctataggaatcaagcctgacacatggtctctttccagctcttcccagccccactgctgtcccgtctcattttcaaaaccagacaaatcactggaagttgggagaagttccatcaagaagggggactttatcacacagttggaattctgactcaagtgtcttggcttagggtcattttggcttggggtaatatccctggtgttcaacctcctaactccagcccggagtagagtcctaaatcctaatggactgccccaccccctgagttttgggagcctctgtcctggcctgtctttaagagatgtgtggaagccgagaaacccaggagttctccggtaaagggacgcccacccaggagtgagaagcagggtggtgcagtgggaagggccatggtccggtttctgcgtctagcttagcctgggtgcagtcactggcactccagatcaaggggttctcttccagccaggttgacaaggtcttgggcactcccagccaacaccgttacccccgcgtccccaccctcgtacctgcagcacgttggggtgccgcagccgctccagcagcaccatctccttaagcagcttgtgggccgccagccgatagcagcccctccgtaccccgaactcgcgcacgcagctgcccagatcgtggccgctaaagtccaccgccttgagcgccaccgcggcaccgccgggcaggcggacccggtacacggccttggtgtagcctgagcccatgtactgcgcgccggacacgttgcgaagcgcggcgcagcccaggcgcgggcccgggccgggggagcctgggccgggagccgggggccagcctggggcgccgtcggacaggggccgggcccaagggggccgggggcgcggcaggccgggcccgcccggagccaggtccatcaggcgccgccgctccggccggcccgccccgggcccggggcccccgcgggaatagcgctgcacctcctcgtagcgcgcccggatctgccgggccagctccccgcggcccccgcgacggcccggacccggggccggcgaaggctcaggggactggcctggcctcggaggctccgagcccggagcgaagagcacgttgaggacggagcccagcaggaaggaggcgcagaaacccgcggccactgccgcccgccggcgccgcatcgctcccctccccccggccggccggccccgcgcggctccccggccccggccccgggcggctcaggctccgaggcggctccgctctgcgccccgccggccccctgcccagcccgcgcgcatggccccggcggccccgaccccggcccctcgcgggcgacacatcggcctgacacttgcctccctgccgccctgcccccgccgcttataaggcccagagccgccccccgcccccgcccccgccccctcccccgccccctcccccgcccctccgcctccacctcccagctcccggcccgagcccgtcctcggcgccgccccctccggccgcccggcccggccttccccgctgactgacagcgggacctcctcccgcggccgtccgggcctgggaagcggcgcggaggcggctccggtcctgcccagcccgcggtcccgcccagcccgcggtcccccgagctccgtctgggagcgggggagggggcggcggcggccaggaggcgcgcgggggctccgcgcccaacgcgagggcggataacggggccggggcggccggataacgggattgggaggtggataacggagccggccgggcggagtgggggaaagataaaggggcgaggccggcgggtagcgggctccggaggggacgagcagctaagtccggggtgcggagatccgagtgatctcagcgctccctcctgggactgggggcctcggggcggtttgggcgcagggaaggcgcgtggaccccgtctctcgcgggtggggccgggggtggcggctcctcgctcagccccggattccggattggggcgatggtgagggggaagcgggcacagccgggccagcacctgcgagcgcgcgtgggacaggagctctaggcatagaggaatgctcgtgagctcgccgaggatgccctgttcaactccttttaccaaagtgtttctgattttccttgcctctaaagccccaaatgcagctgggggtcgctccctacccctcaagatgcctggggtctgacggggtcagccgcgtataagaaaccatgtgcatgctagtagcttgggcaaagagtgcgtttgtgcccacggacggctgtctgtggagtgtgtgcctcggcgtgtctgaaggggccattgtgtccgatgaagggaatgtgtaccttgtgtgtaagttggtgctgacgccaccagaacttcggtccctcctcctccctccctgattgcatcattagtgctaattgaggggctttcacacgccagtgcactagctgtttggagtgagctcccccctcctgggagagataagccgctgcccctccccctcgcagctctcctcttccccgccactctgaaactgcccacctagatcctctcaccttcctgggcagcttcctgcctccctctgggccaggttaatctctgtcctcctcacagtgtcagggattggctggggaggggtcagggaggagaagggtccacagccttttttctgggggtgggggtgggtgggggggtatccagggaggggagattttccctgaagaggtctggcgttcctacagaatgcagtgtctgtgatgagaaagggacaggaatttctgccctgttcctttggacatggaaggaccgaggagagagctgagtccctgatctccagcctatgatcccactgaggtgggccttccagcccggactccttgttctctatggcttggggagttggggcccagtccgacttggcaagcatggaaaggcagggtgaaggaagccatgattcctccgagaacactgggtctggtggagtcaggtctgtaccgatagagctgttctgccccactctgggccgtggctgcagtctgcagggtgtagggggaaggctctgagcagatgccctctccgcagccttgcaccagatgtctttggtctaattaactgtgctgggaaaaccaacctgggtttgtaaacagagctactggctaaagtcaacagggaacagcagcaaacagcaaaccattcccctcacactcagccttggtccaattcagacccctggggaaaacggggagctgggtggattaggaggccccccccggcccacagctgaatcaggaaaagcctgtctgcctgtgtcaccccaatatggctgctagttccttatcagttccatgtcttctttt

SEQ ID NO: 3518 - DNA, 4001 bp, Homo sapiens
cttgtagggcagcatttatttttttttttcagtcaaactcagtaacaaagagaaaaaactgagacctccactaataaattacatcttgaaatatacatgattgtggtgtccccgtgttactttcaatggtaactgacacgtcccgaatttaactgtaccagacagttctatctgtcccatcgctgaccgaacagtgcttctctgtttctattcattatgtattatacgaggtctaaacacagcccagtatgacgagggaaaaaaattacacttcttaggataccaaagtgatgcattcaagatctctctcgcagtacatgcccgtgagcactaacaggcattttttgatagagctaaaatatgttggctgcaagctcattactctaacaaccttcaggccccctgtttctgctggttttcagaaaaccctagtgaaaaccaggcactatccaaaccttgcacaccaaacttgccaacagccctgtgcaatgatcaataaccttggctacacagtcatcggccccaaattcacggtcctgaagaccaatgcagcaaaaacccagacgaaaggctagctggagccccaaagaattaccgcgcttcccctctgccgcatggagggaagctatgggaggagaggagtggaatgaggctcaccagctccgaagatgctccggtgacctctggctgcgcggcgagagctggggagggaaggcgctagggcagccgcggcgggctgtgtggactctgcccctggtgcattcctcgcattcctgcacaatctgtcgccagcccaggagccggcagcgcgcgtcccccgctgtacacacacacctgactaccgctgcgccccgagcggccacggccgccgcggcacctccactgcccgcgctcgcggtgtgtcgcactcagccaacacgcagccaaatcccggccccgccgctcgctctccgggtagcggtccaggggagagggccggcagcctcggcagcgggcggggataccagatccgccagggaggtgccgcagctccgcttcaactcctggcagggagaggaggaagcggcggcgcaggagggcagcggcgaggctcggcgctggggagccgggaggggtggagcgtgaggatccgcggccggtagagaggggcgcactaggcagaggggtgggcaggaccggcaaggagtacaggacttcggggacaaacgcaagaccgcgcgggcagcaggggcgtgggaagacggggaggggaccaaggtgcaggatctggggctagaaggacagacagccggccccgagtgctgaggagggcgggcgcccagtggtgtcgagggcgacttggggcgcgcggcggcaggcagcggggaagccgccgcgagggcgtccagcagggctcagcgcggcgctcaagttcggggctgggagctctgaatccgaacagcccagcgtgggcagaggtcgtgcgctgcgcgtacgggagaccggggagaggaatcgccgggaaaagcaaatggagggtgaaacttgtgcgcctgccggggggaggggagcagcaggcgagtgcgggcaggaacacgaggcggggcaggaaagccgcggcggccgcgaggcgctggggacgcggcagcgggagggaggcccccggcccccggcgcgcaggtcctggccctggcgcgtgttcggggcgagggccgagggtctcgtgggcaggagtctccgcgccctcccgcgagcccacacacttactttccagcttaggcagcggccgtcgtcgctccagggatcagggacatcggcgccgaggggtcgccgctgcggcacccgaaaaaattaaaaaagtgccgcggcggcgcggctgcccgcccctccctcccccaccggcccccgcccccggagcggctctcccaccacccccggcggcggcggtggccaacttgcccctctaccccttgcccatggtgccgcctccgcggccggcgtcgacgcggactcagccccggagccccctctactgcccagaggccgccgccgccgcccgccccgctgccagccctcccgcccggccagccccgggctcccgggaacgtcagcacgccgccgtccccgggccagctcccgccaccccattggcgggaaggagagggctggccctccccattggcccggccctcatattgaacaggccaatgggagctgcggtttcaggtcgccatagagaccgatgctgttcagcgcgagagggcctggagagggtgggtgtgagagagaaggtgtctcaggtctcgggcgcgggagggggtggcggagaggacagggagattccccagcgctggctctgaaatctggggcaggctttccttgccttactgccaatcccaactgtgcctggtagggtttgtccctggcgtcaaaggtaggaacagctgagcccttagatgtacccctgacggcgagagcccaggagtgggcgtttcacttttcctgcgtttggggagtccctgaggctatgccctttgacctttgacatgtgtgcagcttctgcttctccaggtgagtttgcaccccatcccttccatcgctgcttcctcctgacgtcactgagccacctaaatcctacttatgtttgttctctgcagccactcccccttccctggggtggatctttcctcaacgttttgggtcctcaaactcataactcttctgaaagactcaaagaggatttcctttgaggatattttggtaagggaacgaggtggcggattgtatgatagatgccaaagcgtcaacacatgagctagcctgttccctgattctcaaagcaaacctctaatctccctgtgggcagatatttattaaacacatctgtgtgtacatcccgcactatgagcttgacaggtgcatgttctttcacttgagaggttacaggcttgttaaagatagaggaaacagaaacaatccttcacaccttgtgatgatttcacaaaagagtaagggaaatggattacagttgatggattttgttttctattttccagtatctctttaaatttgatatggaaataacctgaggcatgaaatcagtacacgcaaaaatcttgagctttaataatgtcttctactttcatttaaaatcattttgtggtggtttatcaatactaattgttttttgtcaataaattttatgtttagatatcaccttcttaaagtgagatttcatgaacatattaggctttaaaagatgatattgctctagcctatagccactgatattcttacattcttttggcgattttactttttttagactaatctctttagtaaggagactatgttactacccctcaaattggagggaccatattgtgtgaaaaagctgataggattttggaaattacaaatattttgttgggagaaacaggttaatgtgtgtgcaagctgcatatgtctaagtattgttctgaattttaagttgggtgatatgctttgctactggtttttatcttactataattgaagattacaaagatgtaacctaagaaatgttaatatggtgccttgattggaaaaaaaaaaacctctccacatttgtagtaaaatgtgaactcagttgacagtcctacacagggtaggactgtggaacaaaacaggtgaacgtgtgtatgttccccctaaatattttcagaattgagaagggatcagcaggggccaggaagtgctgtgccatggctggccatcatggaaataggctgttttttacttcttccggctttttaatgtgtgtttttgtttatagaacagaaaaagtaaaccacaaattgttatatgagacacatgtttaatgaaaagataccaatgattttgcttcttttaaatttcaataacatcaaatgaatgaaagttgtgtctaatggaaagaaaaaatgggtcttttctcttgccttaggctagcatagaaagaagaaaataaaagattattactccaataatctttttgtgtgggt

SEQ ID NO: 3519 - DNA, 4001 bp, Homo sapiens
tacaagggctagcagatggctctaatttcagagtgcccttgactactaaaaagaaggcactgatgagaatttgtctcaggccagtatttggttctgctacatatagaagggattagcccttcactcggaggatcaccagcacatactctctgtgtggcccagtccaacttctgtcctgtgggctgctgccctgttctaccacctagtgcccaggcaaaacccacattttaaaatgcaaaggaataaccactgcatggtaaacttagtgggaaggaatcatacatactacaggatcagatgtgcatccacaggagcaattttctgaattgaccaagaaggtaagagcatctctgactttggtcactttagaataagaatggtcttgttctacctgcccctgattaagcctccagggagcttaggaaacacagtctagaaaagactacctcaaaaatgtagacatattctactgtggaggaaaaaatgtgaacgcagatattgatcacatcttgtgttaccccttctctccaaacttatctccaaaggcagagaggatggaggctgtctggaggctcctcctggcatatttaactccctcctgtccccctcctacttgcatatatggacttctgcacttaggcgcaggcttctctgcctgaggtggcccattctcaaatgcgggcccctgcaggccagaaatctctcctccctctctttacacaaccttctgagtctcatgtgtagtaggtgctcaataagtgtttgctgaattgaaccccgtttttccactgagagagactaaggcataaaggcttcagatcacgcagttcatggagccactggggcttctctccctcacctggcctgatgttttcaggcggggtgcggtgggtcaggcctgtaatcccagaactttgggaggacgaggtgggcggatcacttgggcccaggagttggagaccagcctgggcaacatggtgaaactccgtctccaccaaaaatacaaaaattttgctgggcgtgcgggcgcacacctgtggtcccagctactcgggaggctgaggtgggaggatcgcttgaccccgggaggcggaggctgcagtgagccgagatcccgccattacactacagcctgggcgacagagcaagaccctgtctcaaaaaacaaacaaacaaaaaaagttttccttaaggaagggatggactggggaggcctggcttgggggtcactcctaggtggcgacgcagaccctgagcgcttgctttgcaaggggacgaactgagccatctttttgctatcatttatccgtcccaaataagcagctctcagaaagtttccgttttgaaacttctccgacactcctatcccgggctggctccgggcgccagagccgagaggagttacctgcgagaccaagcccccccgcccccgccgcccgacccccgcaggagccaggagggtgccgggccgcgcaagtggggtgctgggcctagacaagaggctgcaggacaccacccgctccccccatgctcaggactgctgacacacgaacccctacaaacgcggccgcccttgcccgccagcttggcccctagcttcgccccttcttcctctccttcgaccaccccgacccccctccccaacgtaccgatccagtccccgaccctgggagactcaccctgccactccaggagccgctcgggggtaagcgccgccgccacaccctcggcgcagccccgcggcgcccccagcagcagcagcagcagcagcgacggcgacagcagcatcgctaaccactgggctctccgggagccccttgtcccgggagccccttatcccgggagcccagagccgcgtcccaagcacccggccccgccgcgcggaagcggatccgtagcctcctccgcgccccaccccctccgggggccttgccagcccagagccctggagacccactccgccaccgctgtctccacagtgaaccgacactcggggctctgggctgggatgcgggaaagtcgcggaggttttcctcgccccacccactgcggcttggggaaggaggaggaggaggggtgggccatctgcccatcccagaaattcctgcctttggggtggggacaggcggagtgaggctgctcgggtcacactctccgctcctctagcttgcagccctgctctctcctttctgggggaggccgaagaggagttgtgggtgagcgatttgagaatctccgggacaaggagcctgacatccgggtttgcaaaccacctggattctggtaaacaccgcggatttgcagcgggcagcctagagtgaacccagctgctccgcgacgcaggcgctttgggagggtcctggactcctttgacttgtggagcactggagacacctgaggggccacgccgtggtctccaccttccttgccccagagtaacccggagattcttctattcagctccttcggttttgaaataacctcctctttccaactcctttgatcccccaagccccgcaaagtagccggggtccctattatcccatttttacagctgagaaaccctgcccagaaagtcgaagtgctttgctctaggttacttcctaatccagcaaaagttactctctagcaagtaggacagccctggctagaatgtagtcgttctaactgtcctccttcaaataaccagcagaacactggaagcgtttaatattctgagaacaggctcatataagacctttcctcagcgggaccttgacattagtcattaaaacataagagagggggaggggaggggcagaaagcagagcctggaaggaaatgcctagcagggagcaagattgaaggtcagagccaaatggggaagaagggaaagtggttgccttggccatggccttaacaaaaggtgctcagtcctgcaggaacctcagagagcctcagaactgtctgtcgaggacaaaaggggcaagcgtttatccatggactttatccttccctgttggtaagggagatcctagggttattaactcctctgcactgttctacagcagtggtgagtttcagtcatggtcccataccttgtctcttagaagccctgggtgcatagcatggcaaaaggtgaggcgctgtcaggttgtttctcagagggttggggggtgggggacagccgggggaaacaggctgcagagggggctggaataagaggtgggttgagaggatgtgagaggttccaatgtgtgtagagtttataacatatcattacatgtagaattcagcatccttgcttgaaaacatgcagaaaagagatgctttaagcctagtagattacacagacttcagccacaaactatgtatccatctctcctatggcctcagaactacattgctatgggaatatccccgtagtattatgatagaagatttggccctgcccgagcaggctggcatgtattgcagcaggcaagtgcaatgcacatgacataattaggtcataaaacaggacactgatgctaatctctggtgaggtccagggcagtgagagtaaaggggagagagactaggctggagtgggcatagaggcctaactatgctcagatagtatggtgggtattgggaggaagaggctgttctaggatgggaagaaattgtgaaaaaaaaaattatacaaaggttggagtgagaactgcttgtatgggagagagtgaggcatgcctggctgaaataaaggcagccactggggcaccctgacgaatgaggacagttgctgggacattgggctacctctcactggctgtggaccagggtgagttattcacgtgctatggtcctgttttagtctctgtataatgaggggggaaaatgcctcccttgacccatagcagatgctattctgaagtagcagagctaggtctgtgagtaggataagaagggagaaacaaaccttatttcatcttcagagcaattagtataatgaagagaggtgttgacagcttcctggccta

SEQ ID NO: 3520 - DNA, 4001 bp, Homo sapiens
caaagagcacaaaccataaaggaagatttaaaatacatatacttaagaataaaggccgggcacggtggctcacacctgtaatcccagctctctgggaggccgaggcaggcagatcacttaagattaggagtttgagaccagcctggccaacatggtgaaaccctgtctctactaaaaatacaaaaattagccaggcacggcggcaggcacctgtaatcccagctactcaggaggctgaggcaggggaattgcttgaacctggagggcagaggttgcggtaagctgagaccaagccactgcactccagcctgggtgacacagccagactctgtctcaaaaaaaaaaaaaatagagaatatacaaatggacaacggtgggaccacatatgataacagaactctgagccacagtctgcaatcggccaggccagagaaccaaactgcagcctctgcagcaatcagcccagaatggtcaggtttggttaatgactgccatcttctctattttttgctctgcttccaactcaggacccctcagagaaagccagatacactcccaactggataacttcagatgccgtgcctctagtcagctggtccctgataccaacaacctccaaccagagcagatctgaagatttcccttttttccactgtgaaactttcccactcccctgcctgcctttgaatcttggccaaacataagtgatgtctcgctacagcgagctctgaataagtagcctctgtttgtcctcatttgggtagtctacatttatttacacaaaattaagaattttgctcatcaaaagtccccataggaggacaagcttcagagtggaacaagatatttgtcatatatgtaacctccaaagagctagtacacagcatatatggagaactcctaaaaaatcaataggaaaaagacttcaacaggcacttcacaaaagagaaactcaaacaatctctatgaaaacactccttggcctcatcagtaatcaaagaaatacaatcatcctgtgcagaaggcatagcaagcatcgtcattctcccccacggctcagagcggtaactgacttgccccagagaagcctcaagcatgggctcagaccctaggcaggcccaggactctgtcccatgcctcctccactctctctggggagtcaagggcaagtgccttctcactccagaccccgtcctctcatctggagaagatgaaagatctttaaggcccttttcagtttaaaagattctgccttcctaagcaaagggagagccaatgatgggaagaagaggggcagagagggattgtggcagaggcacaatctacccacagtcattaatgttggggggaatggaaagccctggctggttgcccactcagttcaatgaaagctcagcactctgtttagcagcactaaagaatgtaggcaatcttttagaatttatcatctggaaatctgtcttcctttgtccttcaaaaacaaaacaaagctcataaatggtaatagtaatgatcaaaatgtgcatagtagtagtatttccattttaaggatgaaaaaaatcaaggtccagggaggtggaagaacttgcccaaagccacaaagcacaaacaaatagaatccaggggttttttttgtaccatggtactgctaccggactgcacttctctcctgtcccaagatctgcctcgctcccggcagcctttgggacatgtaaccctgtgtaggcagcctctgcatcccattccgcaggaggcaaaccagacttcttattcttgaactgtacgctttgtgctttatctcttcaaaagcacacactcctctcacacacccattgcctaagcaacatgggacaccagcggggctaaaccactggttgtcctctgagcaaaaggcacgcttaccttgccccagaagcagcagcagctccaggaggaaaatgcctggccgcagccccatgccagaatgctccaggtgactcgggcctctggaagagctgctccagcagatggatgggctatcacacctcctcctgcttttatgttcctctgtgttctgatagagcacctgtcataaattttactgtgttcacctttgaaagggggtagtggcgggctgtaaatgataaatattaacacttaggcggaagagttcttaaggcagatgagtcaatgatgggtagcatgttctagtcatagacactgacagaccagggccgcatagctgcctccatacagccttccatgatggtgggtgcccagaaattgccggtgttcgggtctgctgggaagaacgtgggcctgggaatcccaggtgctggtcggaattccaaatcaaccacagctgtgggaacttgggtgtatcccttaacgtggcctcagctttctcagttgtaagccaggagatcaaaagtaccttgtaacaaatgtaaaccataaacctacctccaaatgtgaaacgtgttcccaccgtgtctcagaagctctgctaggttccctggtttgcatgacacagagaggtttgttctgttccccccatctccaaacccatgggtggccagttgtgttgggtggatgtgcacaccatagatttgttgtctgcatgttgaattcagagatacaagccagagagggggaaccaagtttgacaaaatcagccgtttcctttgggtaaactaagtcaggaatgcaggctgggtctaaactgggcagacaaagctggcatttaaagcctgagtgacaaatacccttgagagtagaatttaaattttttacacaaatatcaagaaacaattgccttggttgataggaacaaatatatttaaattatccttgctttctggccatgcttgtgggtgtgaggctgggatcctgacttctgaggtctagctaagactctagggctggttcccatgacccaacctcagattctgatctcctggctgacccacttttctcatatttaaaaatcacagccagacacagtggctcacacctgtgatcccagcactttggaaggctaaagaaggaggattatttgaacccaggagtttgaaaaccagcctgggcaactccatctctacaaaaaataaaaataaattagccaggcatggtggcatgcacctgtagtcccaggtacttgggaggctgaggcaagaggattgcttgagcccaagagttcaaggttgcagtgagctatgattgcaccactgcactccagcctggacaagagcaagattccatctcaattaaaaaaaaattgtttttaattactgttataacctctattgtcttgagtagaaagtgaagacgaagtgagtggccctttgttcctgaatctctggttttaggatgttgtctccctttctcaactgctcagaaaatatgtgacttgtgggtcaccactgatttagccaatgccaaaggcttagcctaagcctcaggactgtaggggggtattgggacatgccagaggtgtgtggacactgacacacttagtccagctggccatcagctagttccagagcctagaagagggcagcacacacagacacacagaaaaggaagaagaaaatacacccaaggccaaggtctgtgggggacaagtgagcacagatgcccctggatatgtagacacttgtcaacttcaccaaactgcccccaagttcaatgagaagccagagctgctgtcccactaaggatgtcaggagtttacccagctccatgccaccagcagctttgaggagcatcactgaacttgcctgggctgaataggccaaggtccccactcatgtgcaggccagctggaggtggggtggaaaggacatggggcatgcgcagaagtaagttggttccacgctccaggtactcgctccatctcttaactgcttctctccaggactaccacagcccaactgggttaccatccttcctctaactcctttcacatttagaaaaattgagaaatgccttaaaaacatttgaatgttgggaaggcattttgg

SEQ ID NO: 3521 - DNA, 4001 bp, Homo sapiens
ccctctgctcagcctcacttttctctgtatcctaggagattgaccaaacaaactgcccagacaatgtgagttagaacctaggtattctaggtcttgctgtttcctctggtgtctaatggtagaatgggaaggatgcccacagctgatgcaggtgcaatgagaagagaaggaacaaagggtttgggagtgagggcactgggaaaaacacagaggatgacatctgataataagaaaggttggtcttaaatattaactcatagacacatatatggagatcttcaatgatatggtaattacctctctaatacagatacgaaaatagggacacaaaatgagatgggaagtagcccagagctgcagagcgcaatttggtcctcaatttctaagagacttcatgtcacctagagatggactttggcagagttaccaatggcaccaaggagattacagtgggattcagggtgtctcaggtctctctgaggggcaagaaagaagagaatcattttgtctactcccttgcttctgagaaggattatgcctaacctggttcatatagaggacaaattggctctggtcacaggtcacagaatgttggagcttgaaggttctttttttttttttttttgagacagagtctcgctgtcgcccaggctggagtgcagtggtgcgatcttggctcactgcaggctccgccccccggggttcacgctattctcctgcctcagcctcccgagtagctgggactacaggcacccgccacccacctcgcccggctaattttttgtattttcagtagagacggggtttcaccatgttagccaggatggtctcaatctcctgacctcgtgatccacccgcctcggcctcccaaagtgctgggattacaggtgtgagccaccgcgcccggccagttcttttataacacatctaatccagacattcccagctacatcaatagcctctggaatgtcttgaaattgagatccttagccctacccaaaaatctaccagatcagagttacccagggtggggctcaataatatatttatttttaacaagtacacttggtacacaggcaagtctgggaaaccctaaactctctcgtatcacagatctggaagttgtggctccaggtcccgtagctagttaatggcacaggcagaactagaagtaggttttcttaccaacgtagcactctggtgcactaagaaactgctctggcccatggaataggcaaagaacaagttctttagagaactttctaagggactttcataactctctctattaccagggatctctgattccccatggttcttggccaacccctattttgcaaccctcaacaaactgttaatgaatctatgctaaagcttagctactccaattttttcttcccttattgggggtggagttcacctcaggagtggctagggttggcacttctggccctgcataagctaagaggtacctcatataaagggcgactgacacagccaggaggaaagctgtaaggataaaggaggataagctagagagaaccaggaggtgggagccctgtagagctgttgggatgaggaaaggagtctagggtacaatttaatcagggtggataagcatctagagggcagaggtagggactcagggaagacagagcttagagcagagggtagtcagagcttccagatccttaccgtgggcaggagagcagaatagcagtcctgtgtttcctgtgtctgtgagctgtgcctcccgagctctgcgatgctgtgggatcaggaagcccagcctggctccttttctcttttgctccccttgcactggcttgtttcctcccctcttctacagcagctggctgctgtgactggcaagttatagccggagggaagcagtaagaaggggagaggtgtgagctctctccagtccagcccatccaactcttaaaggcccaggacactggtcaatgtgagggagtagtgggggtggggtggggagagaaggattaagggcagcacatctccagggaggagcctggctgcccttcatcttgatgccagccctcattgaccccaatcccgcagtagctctcaaagtgaagggagtgtcctcagttgcagtgctctgtgaatcactgcttttcattctggttcctgcatgtaatacggctgtttttgcccttatttaatctggctcctttccatagtgtctgtttccactggcctgctcctgtatctctgaatcctgcctgcagggcactcactgtagctccgtcccacaggaaaagaaagaaataagatgggaaaagaggaagacgaggagaaggggaggacaggaatgatgatagaatgtagagggacagataggttagaatctatgtatattttaggcactcattaaatattgaaagaatgcatagatgaacgtgtgaaacagctcatttttttttaaacatccattcgttcctcctacaagcatctgttcagcacctctgggttataagtcatagccctcagaatggaggtagcaccttcaggacatacatgcatgtttataaagatgtgtgcagagatgaagcataggctcagaggggaactgtgtgaaatggtgtaattttaagtgtgctgacgtctggctgcctatcatggtttccacaagcatccctcaactgcctaatattttaccattagtgattatagctacattttttagtcccattaaaataaaatcctcctaagtgattactataaaagtcaggatagtggttactgttgggagggggaggaattgtggtgagatgggacacagagggggcttctggcatagctagctaaactctatttctagttctaagtgctaacaagggtcttcacttaataatttattaagctatacattctcttgatatattttctatatgtgtttttaaatttatttttttaggtctcatttaaaatatcatatatctgtgttaacttttgaaggcttaatgattttaaatatacatatatgtatatgtatatgtgtgtgtgtgtatatatatatatatatatatttttttttttttttttttttttttttgagataagagtctcgctgttgcccaggctggagtgcaatggcgtgatcttggcttactgcaacctctacctcccgggttcaagcaattctcctgtctcagcctcctgagtagctgggattacaggtgcatgccaccacccccagctacttttttttgtattttagtagagacggggtttcaccgtgttgcccaggctggtcttgagctcctgagctcaggcaatccacctgccttggcctcccaaagtgctaggattacaggcgtaagccactgcacccagccgattataaataattttttaaaaattcaatcctaaggtcaaagtagattttaaataatttatacctaggttgggttgtctatattctttactgagagcaggttttgatagaagagtagtagtatgaaggaaggggacacattaggagggaggccattcatggggaacaggaagattggggggcatcgtagtttaaactgtgctgatttcagatttgacttaatagaggccctgttttacatgcttgtcttgctctcccatttctacttccccaacatggccagcttatttttccaagcctcaccttcacagtccacactcctcttctatacccccagattatataccatctttctgagtcactatttgcatcaatttaatgctgcccaacctccttccctcttgggtaatctgtgaggggtgttatcactcatagtggattttctgggagagtctagatctcaaatattctgtttcaatgttcccatgaatacaacagtattcttcagcccatatgttctgatttttggggcagggacttggagactttcacaaggttagtatggttccagagtgccaaggcatgcccactgcaggactctcatgaaacagagggagggagcagacagacagggccccct

SEQ ID NO: 3522 - DNA, 4001 bp, Homo sapiens
aacagtgtgctttctgacctgtgggttaaaaacaaaatagtaatttccctttgtccaaattcacacccagaatagaacactcctgttacataatcaaaaagccacaaaataacagaaactactacaagccatttgtaattaccacccactcttctttatatattatagaaacctctccactgattttaaacttccatgtgtcagtgttgggaaaaagactttactggagccacattctgtggttagtctacctaagctggtgctgggagcttgcaacatgcgtgatgcactggttacgcagcttaaccctgaacagagcttttgaatatattagtgaacccaataaattcaatagtaagtaaaagtccatctttcattgtcattgagggatgtgtgtgtgtgtatgtacacacacacatatatacttacatatatacatacatacatatcgttttatactgactgctccaccaaaatcaattttaatctgacatacatttgattgattactcacatgcatttacactgaggcccttttccagagcctgtgcgagggttctttcctaaataaccttaccccaaagtcatgctcccaaaagaggaaatctcgaacagaagaaacaagccccaagtggaaggaagatggaaagagaaaggggaggaaagaggtttacaaattccttgccaaatggatggagagaaattctgtgaggtgattagcgggtcaggaagcgttttccctggatgtggtggtaaccacaaggaccagtgataatgcttgggggattgattgctttccggttgtgctttctgcagcgcaaaaactctgggctcttgcattgctctttactgtgatgcagggtccacttaaaactctgcctccctaccgggaaagttcacacatcttgggatttcgggatcatttaagtctagagggattctttttttacacttgagagtaagctgtgcattttcttcattgtatgggaaaagctaacccttcattggaaagcaatgcacaaccatccggtgggtctgcatttatccagagttctcccttcctccctccatcaacggtttagtgaagcttgcagagaaaatgagggaaagcatccatcagaacgcaaagacgcagagcggaacttttcctctgccgtcagtggggagaaaaagtcacttgtgcgtctcgtggctgacagctgagtctgggaacctccggataaggaaggaaggtttggcgttgaaggaggtgggagaaaacaatgctgagcccggatgcctccggacaccgcacatcctgcccgggtccctgacccacccatcacccacagccacgctcccggtgcggcgcggctttgcttaccttgatgatgctgctgcgccggggggtcgcccgtgctgcctccaggaggcccgcctcgctgtccgctggggtccccgcggcgcctggcagtgcgaccccgctgcgacggtccctcatccggcccccagaggccgccgtcacgcagtccccggcggcatccgggcccactcgggggtcgtcttcgccccccgccgcgtcgggcggcgccggatcctccctgccggccgcgccctcggccatggcctggagcgtttagggctccccgggggaaagcgggacgcccggcagcggagtccagccgctaggcaccggtgcgctcctgcaccgggaggcggccccgccagactttgtttcaccgcccagcggcggcagtggcggcggcggcggcggcggcggcaactttctggagaggggacatcgctcgggcagagacgtcctcgggcttcggtctaggaggctagcagtccggcgggggacggtggcgggagtggggaggcgatgtgagcgggaggcagaaggagaggcgaaaaagagagggaggtatccgaaatgtgatgcaaacgccggccctgcgccagacaaaaggcaccgggcgcccagccaggcggcctctggagcccggacgccggcggcccgataggggccagagccgggcgactgcggccgggcgcacccgccacctgcccgcggactgcggcgcagcggtcccaggaagtgcggcggcggcggcggcctccactcagctctgttgtgacagggagggagacttgttttgacagcccttggggattggcaggcgtctgggcctcttaggagcctcgcctcgccgagggggctcggcccgaccaatcctcactgcggaggggtgtgcccgagcgcgaagaatggaatgtgttctgcaactgggagccggcccagcggggctaatgtactcgagccagggtgtacccgcgcgcgcgcgtgtgcaaacccggaggcgctccgtgtatattttaggaagtttagatttgcgaaatgagcctgagatgcaacaaaaatccaggttgggtgaaggagaggggagaaagaaaccttcttctgccaaacaaagcaatttggaggaaagtgggtattgagtatgaatgtctaagcgtttggggtgacggggtgaagctttgcgtggtcacaggttaattgcaggctctcaggccaattcttagaagtcaagtccatgcagagataaactagggtttactgggatcttggggttccataatttgcttcaggttccaggaaaggattctaaggtcattctgcagtgtgagtaaatataacaaggaaagggagtcagtgaaagagatgagggtgaaaggaaactgaaccaactaaatccctccgaagactgactcttaaaaagcacagatataatccaagtcagataaatgcaggtggggagtttagtctctatcctaaaacattcctatttgacaatggttcagcctcctttctctatataatcctatataaaaacatattttgctcatttccagtaagctagcaaccaagaagggagagatctttggatgatgagttaagtcactgaaattatccacagaatgctcagatgcaaaccatggtcctaaggctccctggtaagacaaaagacttggcattttaattttaaactcctttgatattagaatctatattaaacctcacttataacattacattttatcttattaataatttaataatttgagattttacttgttccttagtctggctaacagcatgagaaattattcagcattttagaccaacaatttggtttgaatctcataattttagagatatatggggatttagggatcaactaggacatcatttttgttttacggttgagacaaaggcccagggagtcttgtctactagttagtgcaggagccaaaattagaatcagccacccaactcctccgataatctcttcactactttatctgtctcctctgggctacaaccagccagaactggcaggggcacttgggaggtttcagatttgacatttatcaactactagggaatactgagaaggcttgactttgccttttctttaaacataaatgcagcctagtaatgaatgtactgtagagagtagcagtgacctctggttttagaaccaacaccaccctctagtgagattctgagaactgcatccataacagcaaaggcttctttttccccctcatctttaaaagacaggaggggtaacccaacaaaagtttccttttcaacaggtatgcctttacaacgcacagactagaggaagaaaataaagtgtacccagacttaaaacaaccatacatgtcttccatctcctttagttcagggaattcctgtctatgctatataggaaatatttttaattgctatcctcagaaatatatcttattttaggctatcatttttttctttgatattcaactattattacatttgacttctgtcatttacagttgtcagtgcttcatttttctttgttactctaataaaagtcccattcttcggttgtcctctgaaaaatgtaaaactgcctttatctcactcattatcttgttataggatattaatgtcatttataagttcctcatcctacaga

SEQ ID NO: 3523 - DNA, 4001 bp, Homo sapiens
gaagatgtaacttgtaaacatgaaaattatggaagatataaattgtaaaactatcaatacaaaatttcactatttaattccaggcacattttctagattggcttttacaatctgagagaactactctcactaattaaaaactatttattaatttaaatccacatgcttgacaaccctgactctatcatccccaatttttagtgagacagcttcacttattagaaatttagtcttcatatttttgtaatttagggagattaaaatatgagcatacaaactttataacagcaattttcattgcaagatgtttttaattgtttaaaaaaacaaacaaaaacttgcagaaatgttcctattcacttgctcttctcaggatactagcacaagtgatcaggaaaggaataagtcaatattaattattaccaggtctcgccaattattattggtgcctattgcaagtaatcttttacacttctatgtataagtgtgtcttttccaaaggatgtttcgaagcacagctggctacagagattagcagctgagggcccacttattctccagtaccaactcatagctctcaccatcacaaatacactacaaatcctaacttggaataaatctgctttaagaaaatgctggagtaatgaacaaagttcagtgccatgaatcagaaacctaagcatcagagaaggagtggctggtcacaactgtcatagccatgtgacttggggcaatcaccgagccttctgggtctgtctcctcttctgcaaatgaaggaattaggccagatgacctagggtccctccagcctgaagtcaaaatggaagcaggcagcaatgtgtgctatttaaccccccttacaggtagaacattgtaggttaaaacgtgaaacaaatgagtagcctaaaacagactcacattcactgttcattcaactaaaaagctaagcacctgaaggaaggcactacgttcagctcatttctgaaacaatccactcactaaggttagtgtgagcatatctgtgtatataggtgttgcccacaggacaccaagtcctatgtgtgaattcacatcccggggagctttcacaaccacacagcacacactcagcatccgaagaaagacaaacagcactaagaaaattcaattttcatgatgcacaccagggaggctaagcctttttcagtaccctaatctttaaaatggtgcatctaccacctcgatgccacattatgcaaatttactaagaattgtgagtgaagagatttcagcccaattaaaaaaagataaggttttttttaaacgtgtcaattccaagaagatggcccaagaaataagccgtaattactctatcattatatcaactctttaatcacttttttccccttgcctcccaaaaaaagaactgaggggaagtggaatttaaataaaaaatgaatagtccctccaagaaacctccatagaagaggagtatatcttctgacagaacacatctgtgtgcctcttaaaaaggatattctaaatctggagggagttagcttagatccccaccttccaggccctgccatctggaattctcagacccgtaatatcaaactgtaaggaagccggggctggatgagtatccccactcccctaaccccactccaacattctatgtgctaccacgctcccctatttcaacccaactggttgaacaggaaacattcctaagatgagcaggtagccggtggagctgaacccaagtctccccagcccatgtccactgacaccctggtaagtggcaccttcgctcaccttcttcacaaggtagccctctctgatccgctttggttccatgctggctggacaggcagatgcaaaggtcactctcaggcaactcctctcagcagctgggcctcctctgcatgctgaggtggctgtgggccgccttttctacagcaggtcgctttcacaatttcccttctgctggcggtcgcatgatcacatcctcttcccctcactgggttggaagatcagaataaggaactgcagagtaaaccacccattccttgctaatgctggagacttattaaaaccacagttgggttgaatatttacctaagggaaattcttactaccatacagaaaatccctcttttaaagagaaaaagaagtgatgaaaggaagaggaagatgaacaagaaaaacttgttggtgaaaattgtcctgagtaaggattattcttgagatcctggaaatgcccaataaaaatgccaagaaattcagaaccatctggttagcataacaaagttaactactaaatgaatgcctacttctctctatgccaagccctgtatcaagtgtttctcagcctacttattttaaactaaattagtctgcacatcggccaggcatggtagctcacgcctgtactcccagcactttgggaggccaaggcagatggatcacctggggtcaggagttcaagaccagcctggccaacatggtgaaaccttgtctctactaaaaatacaaaaattagccgggcatggtggcgtgtgcctgtagtcccagctactcgggaggctgaggcagcagaatcacttgaacctgggaggcggaggttgcagtgagccgagattggtccactgcactccagcctgggcgacagagaaagacttcatctcaaaacaaacaacaacaaaaatgagtccacacatcaaacccatagggaaagtatattattttccttatcttagagtaaggaaactcaggctcagagaagaaaagttgtctcaagttgacgctgcaggtcacaggggaaagcagaagaaccagggagggatgtgctagggtgccactgcctcacatcaggcatgagaacaggtgttccacgttgagtgctgatctcacagtcagcctgtaaaaagaagtccatcatcaaacaggtttttgagaaactttacaaaataatcccaggttggcaactcctctaaatgatgaacaaattaaagaccttcgccccgccaaagtactacagtaaagaatcctataatggtgttttccaaacttacttcgccatagcattcttttttgaacaatttatgttaactttttttgtcataaattgaattagatctcccaaaaaagaagtcctaacccttagcacttcagaatgcatccttatttggaaatagggtcattgtagatataattagttaagatgaggtcatactgaaacaagtgggcccttaatccaatgtgactggtgtccttataagaaaagggcacacagaaaacagccatgtgacaacagagtgatgcatttacaagccaaggaacgccaaggatggccagcaacccccagaagctggaagaggcacgcaacaattctctcctagagttgctatagagaacatggtgctgacgacaccttgatttcagacttacggcctccagaactgtaagacaataaatttccattgttttaagccaccagtttgtggtactttgttatggcagccccaggaaaccaatataatcctgaaaaacgaatattccatagaataaacttagagacccgttaatctgaccatgtgaaaatgagcaagtttgttattactttgtgcctcagttttctcatctgtaatacggggataataacacctatccaatgaggtcattctgaagattaaatgagatagacatggaagtatttagaagagtgtctgaaacataactagtatccataaatattagttgttcttcatcttcaaggcaaatctccgttatcctagagctgatccttttcaatgataagttcaacagagatgatgaaagcaatcgtaggactagattttcctcattacacccgtcagtgttctttcactgcaatcaacagataacaactctggctaatagaggcaaataggaatttactggaagagaatggagtggcccacagactgcaggaaaaatgaagactggggtctttgaaaggacaggaatcagggcagttg

SEQ ID NO: 3524 - DNA, 4001 bp, Homo sapiens
ccatttctctagctaaagcaatcctttcgcctccgcctcctcagtaactgggactacaggtgtgcactaccacacctagctgttttttgtttttgtttttgtttttttagtagagaccacgtctccctatgtggcccaggttggtcttgagcaagcaatcctcccacctccgcctcccaaagtgctgggattacaagcatgaagcactctactgtctttaacagttaacactatacctcaaccaaacagtataactgctctcacaatggccaaaatgaaaatgcccaataaaaaatatttatctaacttttaaatgtttcccgttaaaacatgtcacttatagaaataaattgagtttttagtttgaacaaaataaaacatctgtgtatcataaatgttaaaagcatttgctgctacaaatctggctttagcattctaataaatcaaaaagcaggtataactgtagctcagtgcttatgccttaaaaagtttacctgcacattttgcacaagatcaggtggacacaagtcgagagtaccacacaattactgagggatgtgatacttttggcagagcgaagaagtgggcagcaagtcatgatttgcctattatgctagaccccccccccccaaaaaatctgtttactgttcaaatttatgttaaaaccatcttctcacttagtgaggtcatggaattctggagttggaaggcatcccggggcaaaataactaatcaccctggccttatcagactgaggtcctgaaagaataactgacttgccttcattgttggttgatggcagagattggactacaactcaaatttaaggagcttttaaataagcctacaggctgccaatgtcatggtaaggggccctttcctgctggtctctcatttcttcaaagtttttccttccaacccacttcacaggtgaaagtgacttgcctgttccccttctgtgtattgacactttcttccactatttctcagttaacagaattccccaacgtaaggatacttcaatgacaatccctaagagaatattatctggggacagcttccaaaatcatgctcgctaagcttgaacaacctcaacaagacaacgttttaaataaaatgttaaggaaattaaaagaaatacaaaaaagaattaaaattaaatcttgtagttgaaacaattaaagggtccattccagtccaatactccgacaactcagttattaacaaaatgctcttaaagtatgaatactaagtgtgaataaggacggagatcgcaacaacacatgtagggtgactgagaattgttcctgaggctacaggaggcaaggattagtattattacactagcaaagaagtggcaggtgcacttcccaccctctagaaggtgcgcagcctcaaaccctcccctgaagaggccagaaggactcaacaagccctggaatcgagtagagcgaattcgctctgagggtccgcggaggccagacggaggaagaggagccccgacccgccttctcagcagccccccgcctctcccctcttccctcatcacacgagcccccatacctgtgagatagttggtccacttgtacaacaccccctccatgcttcagagccccacaccgcgcatcctcccggcccggcgccggccgcggtgatggggtaggcgcagggcctggggcagcccctcccggcccgcccgggccccctccgccggcacgaagccgctttctgcctgcgcgcgccgcagggacgtggcggcctttagaggccgggacagcgggcgcagcgtggagcttgggggccgcgaggcgcgggcccagacattcccgggtaagcctcggcggcggcggccgcgacaacggcaaaaatgcgcccgcgaccggcctcctgctcgcgcttccgcagcccggctgctccctccggcgccccggcgctgcctcttcctcgcctgccttccttccccctgggctccccgtttgttttcattgaccccgacgtcgatttcacttcctggatgaaaggggccggatcgtcccgggaaacccctccccggcggcggggctgaaggagcgggcgcggcctgcggcctcgccgcctagccggaggctgcgcgaggagggcgggccggcgcgtcacaccctcggcctgccagccagggccgcctttactcctcccacgggccggtggccaacagtcccgaggctcccaagtttccccttggccgccaaggcccaggctgaccgcccccgggggacaagaccttcgagctccgctgcgcgcgcagccccggtgcctacctaaggaggagctgcccgcacactcatcccgcgggcacttagttctctcgggttttcctgggttttcttcagaaatacataatatcctgtttcttcatgaaatcctgtttttattttacataaaatcctgttttttcttcaaaaatacataaaagccttcctatttctgtttgcttcgtattttcctcatattcaaggggtctgaaattatctcctaggaaggcaatgtgcagcagacggggtcctctgacaaggaatggcgagggcccccaaggaactgtcatcacgccgataaccttggatagccacaattttatttagaatataaaacatggaactcgacttcggaattttagtctagaaatggggacttccccctagcttttatgatttttgaaactcctgcttggacgcaattgtcatcttgcataatcgacagtaattttcaggtttatggaattttgcaaactttaagcaaagcacatcaatcaggctcagtgctgcggcttttcttcgcatcaccgaggtagaatagcacctctactcccagaacttaatccaggcgaatgcagaaggcctttgctggttttctggtttgggtagtctttgggtattcacttggaaacaaggcgaattgatggatggatagagtgatggatggatatgtaataaatataatatagttcaatgacaggatccagatggtgggtgtaggagagtttactgtagaattcaactttctgtgtattttaaaggttttcatactaaaattggtggtgaagtggtgttgtcacacagatttgaccaaatccctgctgcgtattagctgtgagattgggacaacatgcccaatactcaagttttcttgactgatgtggacaattacgtatcccatgggatggtacaaaaaagtcaaaagaacattccccgcactaccagaggccctcgaatcaagggcggccccgagtggcggggaaaagaaatgcaagccagcggaggatgctgaattgtggaggtcggctctcggaaacgcctgcagccaggcagaggagttgcggtaccgcagtttcgttgcatcgggctggccttcaggttgtgcgactcagcctggaacctctgaatgcaagattccgacctgagaatgcgcttcaaggacacctccgaagcacccagaaagccaccgccagcctattttttacgctccttttccagcatgcctctccctccccccagtatctatctgctcgttccctaggggtcttagaagccttttgcttccagaaatgacaaccatattccctgactctacgacatcccaggctgtttatttcgtcttatgccagtttcattttagaaaatgcgaatgttgtcaccgaaccctgaggaaacctgctgtaaaatacgcgggtttagcgagaagaagcggagcgagtgtgcgttgcgatcttaaagactgaggacagccagcccgagggcctagaaacagcgttaaccgcgctgagcccgctgcgggaggcggaggggttggggccatgagagggcggggccgcatctatggccccgccccggccctttgtgacgcaggacaacgcctgccacgcgtcggaactcggccgcgggacatccacggggcgcgagtgacacgcgggagggagagcagtgttctgctggagccgatgccaaaaaccatgcatttcttattca

SEQ ID NO: 3525 - DNA, 4001 bp, Homo sapiens
actgaccacctacaaagtgccaaacactatgctgtttattagggaaaccctgcaacacagtttgattcctgtcctcagggagatcagtacgaatagggaagagtcgagtaaagagatcaccaccacagagagtaaacaccaggcacaaaggaagcccagacaagctccagtcctatcaatatccagccaaccagcccagggttaggaactttctgaacctagggaacactcctgagcaccacaattgaaccgtcacagcagtattcccacacccccacaggtccttaggcagacacacccactgcatgggcacagacgcacagctgtgtctgtgcatacatgttttggtcattagtttagtcaacaaatactgagggccacactaaacaggcagttaccagtgccagctcgggtcctaattcctcatgtgacttcggacaagtcacttcctgaattggtactggttcataccaaaggccacagaagaccttggaatattcctcccctcagctgtcagccctcctccctcggtggtggttccaccctttcctaagcactaaaaatttaaaggctgagaccatgagtcagtattattttgaattaaccatgttcctttaattttttacagtgaccactccacctcattcctttcctccacccaccctgaaccggtctacatttgagatttaagcggggtggcggggcggggatccctatgcaaatccctgacctccggagttttcaatctagttgagtaacagaatcaaacatgaagagagatatgtaagataaggtacaccaagcacttatgactaaagacattgcaaggccaagagcaggtgaaatgcagcgggggcggaccgcaccgcgagggtaaagcctcaacgccccccgggacttaaggaggggagacctctgggcaggagaactgagaaggcaagttccctggagcagagggagcagcaggggtagagatcggacgccgggagaccccaggcggcgggccgcagcaggtcccggcagtcagacatgtgggacactcccgagcggccagaaaggatgcaaggcggaggctgcagtcgggaaaggaggagggtccgcggggccggagaggaggggctcggggaaaggaccggaggcggacgccggggaagcgatgggaaggggtctgagaggccgggggggcccactgggagggctctcgaatgggctgctctaggggagactgagagggcggacctggggaaggtcagggtggtccagggaggtgggcggacccgtggccaggagcctcagggaaaattagggagtggggacaccgcggaggtggcgcggtgcggggtcccctcagaggggcgcgaggctgggcagctctagaggagaatctggagaggcgcgggccagaggggaaaggagctagggtcgtccggactaaacagggacactcacctgcgaaccagcgtggagaacaccaagacgccacggcgattcctcgcctgctcgcctgcaactgccgcacgtccggcgtcctggccgccgttctgacgtcacgcctcggcgcgcatgcgcggcgggccccggccggtggggcggggtgtctgggtggttttctgagaaacgggacggaaggcggcagggggcgtgggtctcccaggaggtcggcgcttccactaaaaggaagtgttacaaagtgagatcctgtcttaaaaatataaaaatttaaaaaaaaattgttagcaccctaatcttggtttctaaataccgctctctaaaaatagggccaaggcgccttagagaaatgggcgactctaggacccgggcgcagaaagctccagctgagccgggagcgttttgtaggccagaagcttgaggtgctcaaaaaactgaaggaccgggcgtccaagggcgcagggatctacccagagagcttccgggggccgcgcctgggacaatttgagcagcaatataaagtacattgcattaagttataacctaaagtataaaacagcccagagcccgtgctgctataaatacgtgattaaataaatgagggagaagggataatcttccttgcagaggaattctaataatacctcatccagaggggtgtggtaatccgtccacacccaccctgagtgtggcctatgcctggggacgacctttccaagagtacagtgtggaaagagggctgtagagccactccacgtgaaaatcaaagtgattagtcactgcacttgcccttgacatgtgattaaaaaaaaaaccgtgacctcagtctaactgaaagataaacatcagacaaatctcgtttgtgggatattcctcaaaacacctcaccagtactcctcaaactatcaaggtaatcaaaagcaagaaaaaaactgagacactgtcatatgcaacatggtgatgtagctaggctataaacttaaaataaaatttaagtttaggtaatagtagtttttagttataagaaatgtataatggttatgtaagatgttaacattaggagaaattgtgtgaagggtatactagctttataacttttttgtagtctaaaattattccagatgaaaagttgggggttttctgaagacaatagagggaaaataaatgttagccaggtgagatggttcatgccagtaatcccagagctttgcgagccagaggcaggaggattgcttgagcccagaagtttgacctgcaatcaagccactgcgttccagcctagcaggggttggggggtggtgtaggggtactgcctggaaagaggcttgagagagcctcctggcaaccccactcctagggtgctgaaaatgttctatacattgatctgagtggtgggtacgtgtgtgtaagtaaaactttatcaagctgaacactatacttaacatttgtacatttttggccgggcacagtggctcacgcctgtaatcccagcactttgggaggccgaggcaggcagatcacgaggtcaggagtttgagaccagcctgaccaacgtggtgaaacaccgtccatactaaaaatacaaaaaaaaattagtcaggcctggtggtgcgcttgtaatcccagatactcagagactaaaaatacaaaaattagccaggcgtggtggcgggcgccggtagtcccagctacttgggaggctgaggcaggaaaatggtgtgaacccgggaggcagacgttgcactgagccgagatcacgccactgcactccagcctaggcgacagagagactccatctaaaaaaaaaaaaaaaaaaaaaaaagatttgtacatttttctgtgtataaattatatctaaatttaaaagggaaaaactcttaaaaaaaatattggaagagccctattattattggtcttcaaaaccccaaactctgccaatcagggcccctgtcttaacccagctcctctctggggaaaatttaaaaaatgcagggtagggagtcctatgatgcctgcaatcccatcttttgcaagatattatagcttagtcaacacaagagttcagagatttgtgtgacatggggttcttcctggttccgctgcttctggatgagctcgggtaaattgcctgacatcaacaagcttcttgaccagccctcattaaggctatactagccctgaccaccttcagggtcagtcttagggacctttcagggtctgagtttggagtatccaaaaatacactaacacattctctctgagtgatgggactgtggatgacatttcttttttctacttttctgcattttccaagttttctttcatgaatatgtatcacttcaacaacaggaaaaagtaatatttaaggctgggtgtgatggctcacgtctataatcccagcactttgggaggccaagacaggagaattacttgagcccaggagttcaagaccagcttgggcaacacagtgggacactttctctacaaaaaaataaaaataaaaaaattagactggcatggtggcatgcatctgtagtcccagctacttgaga

SEQ ID NO: 3526 - DNA, 4001 bp, Homo sapiens
aaaggaaaaatcttatagtttgtgacttatattaagatctcaataaaaaagatcacatatttacaaatgactaaagaaaaagtcgcagtttaaatggatgtatactaggactgcatttacaaatttaatcaaccattatttgtggttatccctgccaagaatttcacaattagctcaaaaaattgagaggtaactgttaaccccaaatatgaaaagtatcatacatatatcttacctagcgcactttgctatgatgacataataaattaattcaaagtcaaacatacctatttctttagttatgctaattatatattttatagtgaagtagcaaagccttaagaatattattaaattggcatttaacatctacattccctattaatgggtcataataaatcagaactgcaaattggttggataatggtctgcactgagatccagacacctgattccctcatttcattctgtaatttcagttagttaacaagtacaaagcaactgttgtattagtgcaccatcttgggtagttaaaaattctaattttaaacaatatccgccatccttttcattaccactaatgttatagaactatataacattgggaatatatatataactatataacatagccgactgctaaataaagaaaataccacatatagattctgaatttgaaaggaatctatcatgtctagattctgcatttgaaaataatctatcttcacttcaggggacaggaaaaagtcttggagttccaaatacccccagtgatttttggaagtatttactgacataagataaactgtttacaattgtggagtgaatgctcttttctctgaatctctgacttcctgtttctcttccaaatcccaaaaaggaaagaaaaagaaatgaaagaattattctacttaggcttaccctgatgaagcgcagcgttagtctctatgatattctttagtttttgcctcttaagggacagcttaactgggctgggtaatcgtgtgtgtgagtgtgtgtgtgtgtgtgtgtgtgtgtgtgtgtgtgtgtgttaaaagatctttctcgacgagactgaggcatgccttgtttaaggaaccttctgaccaccacctagccacctagccccacttgggcaacgcctgcccttcggtgaccctgcccagaacagccgagctcctcactacatactcctctgggacacaccgctgtgcgggccaggcttccaagactggcattttcacaaagaaagcagtgaccctcaggtagcccaccaccagagcttttccaatgtaagtggttcgacttctatttccacagcgttacgcacaacaatatcgacgggtaaaaagtgttgtcctttaaaaagtgccccactaacttcggggacagtggtttccgggtaggtcaccttagggtgctttgacgtgccagcaactcgaggtgtacaaaatgcttctttaaagttttgagtttaaagtttcgccccggagatcctggtggatctcccgaagcctaaggcgagcgcggcatccctgaccgcgcgggtccctcggctcggggaccctgggctgccccgctgcgcccccgggaccgctcgcgccgcgccagaagcccgggcccagtgtttccaaacagaacgtcacgggagcccacgggcgcgagggaccgccggccaccgccccctgcccacctctcccggcgacatccagacttgggggccgactctgggctgtggcgggaggtgcagcggcggatcccgagtcagcccgctccgtccctctcgtccccgccttcccgctcctcccggcgccccaaacctcggccccgcgagcccccctggacggggcgccctcaagggggcggggatcccagggtggcaggaactctggagtggcccctcgtccccgggctttctcacctgtctatctcagcagcgggtccccggccgcagcgcccgatgtcccggccgcgactggcccccgggatccccggactctcagcccgcgcccgcctcaagccgagctcggagagggcggggaagggcaccgcctcctccagggactggcagccggtgtagccaatgggagaccacagccgaccaccgggcgtcaccgggggtgtggctataactttggctcctcccagtccctgccccaggagggagctctgtcctggagtggtacccctaacgtcccaactgcgagactccagagcttgctgcagcggccggtcaccttcattccactccgtctgcctggactgttgcagcaccctcccttggtctcccagtctgaagtctctcctcttgccaatccacccttcatcttcctgccaggttaatttccttaagagcagttttgatgaacagtgtgccaaagactttcattggcttccgtttgcttaaattatcaagaacagattccctagtctagtgttcaaggtctccatcccgtcttttcaggtttatttctcacagctgcccttcacacacctgagactactgctgtgcacctcgccacccgaaggaagtggcactaggagcgtttacatgctatttcctgtctccacttcaaaaagctcagaataatcttctcaccgggcgcagtggctcacgcctgtaatcccagtactttgggggaccgaggcaggtggatcacttgaggccaggagttcgagacgagcctgggcaacatggtgaaaccctgtctctaccaaaaaaaaaaaaaaaatatatatatatatatatatatatacacacaaaaaaaaaaaattagctgggcttggtggcgctcacttgtagtcccagctactcaggaggctaaggctggaggattgcttaaacacaggagatggaggctgcagtgagccgcgatcatgccactgcactggatcctgggcgactgggcgagatcctgtctcaaatcatcatcattatcatcatcatcatcatcatcatcttctccatgtaactatgtctgtcgctccacctggcagaaatgtcgtctctgggccgggcgcagtggctcatgcctgtaattccagcactttgggaggccgaggagggcagatcacgaggtcaagagatcgagaccatcctggccaacatggtgaaacctggtctgtactaaaaatacaaaaattagctgggcgtggtggtgcacgactgtagtcccagctactcgggaggctgaggcaggagaatcgcttgaacctgggaagcggaggttgcagtgagccaagatagcaccactgcactctagcctgcctacagagcaagactccatctgagacaaaaaaaaaaaaaaaggtcttctctggtttctgctccctgaacatctagatttttgcctctcttggggcttagctccctctgccttatgcacagctcctcacatctcttttagactgtgagcactttgaaaacaaggatttgtggttttttttttttttttgcattctcctcagcacagagcatattgcataagtaaattagtgataatttaaatccaggtgaattttacatcccaacttagggtctggagaggtcaatctcagggtaaaataaagagaattctgaatgttatggataatcgttccccaggtcacaaagctaggtcagacagattattctctttggttcacagttggccaatagagagtatcagaaaaactttttctactacaatctttttttttttaactttatctcatcttatataaaacacacacacacacacacacacacacacacacacacacacacacacacagaggatgggcacagtggctcatgcctgtaatcccagcattttgggagaccaaggcgggcagatgacttgaggtcaggagtttgagaccatcctggccaacatatcgaaaccccatctctactaaaaatacaaaaattagctgaacatggtggcatacgcctgtaatcccagctattcaggaggctgagacaggagaatcgcttgagccaggaaggcagcagttgcagt

SEQ ID NO: 3527 - DNA, 4001 bp, Homo sapiens
attagattctcataggagcgcaaaccttattgtgaactgtgcgtgcgagggatctaggttgcacgctccttatgagaatctaactaatgcctaatgatctgaggtggaacagtttcatcccgtaactatcacccccctactccccgaccccacaccacccgctctgtggaaaaatggtcttccggtccctggtgccaaaaaccaccaggggaccgcagcattaaacaacaaatccccattgcctgcctccctccaggccctggtaatcaccattccactttcaacactggcatatttttattttatatatttattaacaaacatgtatatagcaattactatatgccaggtacggttctaagccttgagctcaggagttcaagaccagcctgggcaacatggcgaaaccctgtctctaccaaatgtacaaaaattagccaggcgtggtggcttgtgcctatggttccagccacaagggaggctgaggtggaaggatcgcttgagtccaggaagtcgagactgcagtgagccatgatcacgccactgtactccagcccgaatgacagagtaagaccctgtctcaaaataaaataaaataaaataaaataaaataaaataaaataacaataataaaaaccctaatgaggtcaatactattattattcccattctacagattaggaaacagaagcgctaagtaaactgcccaagattacacaactaggaagtgaccaagcaggaattcaaactgaagtagtctggctttatagtttttgctataaaccatgacattgtaaaaatattcattgtaaagaaaaactcatcaggaattagtatcatttcttctatgtatatctatctattgtaggtgcaatttaacctaatattcatctcctgtctaaaagactatgtgaccaaggttacaaatgtctactgatatttttagagactagatatatagcccagcttttgttaaggcattttcttgaagtcagtcagtcaaaaactgccttgtattttaagtatgccaattataatttacatgtagtattttataataaaatactttataaatacaaatcacaactcactacgattacttaaaatatagagaaaaaaattcagctgtttctctctggtcccttccaaggaagaaaaaagaagagagaaataaacttctaaataagtttacaacagcatggctcaatctcagtttaacctggtaaattcaaatttgtcttgctttgcaaggtatacatccagaccagtctcaatttgtcatccaaatatatatctcagtagtaatttatttttgtttaagggatgagtgtgagattttcttatcttgattttttagcttaataattctttcctacaagaccaaaccatgcttgtcatcagtcatgtggtgtcatttactatacattaaaaacggacagagtcgacagaaagaacaatcgttttctggaagccccagcctgatgtaggttaaaagctctgctggggtttggttttataatccccaggcggggatggcagggatactaataacgcactcaacaagatcacctactatttcaactactttctcctcctattacatacctgattcacaaaaataagcagacaatgcatcatgtaatctcccctcacccattagccattgcagtgtggtacaatctccagcacgtaataaaaacctgagcatgcaagaaacagcaaaatcactgctatccctgggagctgctcggatatttacaatgcagtcgtccccaccccatcccccaaactggccggccaggcagcacagaagcagacggatgctcacctgggccccggctgctactctccattcacctgcggggccttcagtccgctcctggaggggcttgactcccgcagcctgccgcccgcctcacggtgacagcccgcccgggcgctgaccatcccggcccggctctgtttacaagcggcttctcgcggtcccactctgaaatgcttccgccggcggcccgggcagccagagccggacacacaaggttccaggccgcgaggacgagtctttcctgcccgagggacccggcagctaggcaaggcctgaccgcacccgccaggcctccttatttctttgctttcttatatacagttcctcttgtacacattgtgaaagcaatggcgtgtgtcgtggagtctcctcactgctccacccaacgccaaaatgggtgtttgcgattggaaaatgtcacttagaacatgtcaggatcgggctggtttttagcagctcccttgtctaagggaattaattactcaaataagttctttccaaaagtgggactattctggagattgcttctcatttccggttttggggctgcagtgaaaatccgttttcactgtcctttcctacgcaggttgaaaaggggtggttttgaggtgaggtcttcacccccacttgcggattcccagcaaaatagggtgtgcgtgtgtgtgcacgcgggcaggactgcctggtaagaccgcccacatcccacctgcagtgactgtggtcgctttgcagggatatgctggtctgattggacagaccttccttgcagtttcctgtctgttttccatcatagcacacttcttagccattttctcactttataagtacacacttatttatcagttttattggttttcccacgctcacccatctcacctataaactccctgagggcaggcactatttcagtttcactcaccaccatctagtaggcacctagcacaggcccaatgtatatatatctgaataaatgaatgaacaaaggaatgataaaaaaaaaaaaaggtcaaaggggtcagggatgaaacagaaatctaaaactctgattcctcttcccaccttcccaccctccagaagattaataagcaaatctttaagctttgagttaagaaaaaatttcctttggttgatattcaaagtttaaataagctttctttaaaccctgcaatttgaggtacttttttttctgttttgctagagacaggatctcactctgtgccccggccagagtgcagtcgcacgatcatagctcactgcagccctgaactcctgggttcaagggatccccccaactcagcctcctgagtagctaggactacaggcacgcatcaccacaacgtggctaacttcttttttctttctttctcttttttttttttttgtaaaggcaaggtctccctgtgttgcccaggatgatcctgaactcctggcctcaggcaatccttcttccttgccttccaaagtgctgggattacaggtgtgagccacctcacctggccagaggtacattttttgttttgttttgttttaattaccaaaagagaatatttgcagtattctcttttgcctcaggactttgtacatgtgattccctctgatgagagttctcactcctggcccatcctcttacttaggctggctaatttctctttgctctttaagaagcaggtaacaggtgcttggtctctcaagtcacttgcttggtcttcttccaagtgttcttttcttcttttccttcccttcattactactctaaagctttttaataaactttcactctaaaaaaaaaaaaaaaaaaggccgggtgtggtagctcgtgcctgtaatccacgcacttagggaggccaaggcgggtggatcgctggaggccagcggttcgagaccagactgaccaacatgataaaacctcatctctactaaaaatacaaaaattagcagagcatggcggtgcacgcctgtaatcccagcactttgggaggtcgaggcgggtggattgattgaggccagcagttcgagaccagcctgggcaacatagtgaaaccctgtctctactaaaacgaaaattagccaggcatggtggcacacgacctgtaatcccagctacttaggaggctgaggcactagaatcgtttggactcaggagacgcaggttgcagtgagctgatattgagccagt

SEQ ID NO: 3528 - DNA, 4001 bp, Homo sapiens
attttttttttctcttattcacctctaggactcatatggcaataggatttgatagggcttatttgctggcaaggaaacatcaaatcttttagtggaaaaatacatttatattataggcaaaatgcagatgtatattgctactgatgcaaatgtattttattaatggtgtgagaatttcttcctcactgtggtgtgtgaatgtgtatgcatatttgcatgtgtaaaagacttaatttgtgaaatggaagatgtttctccacttcccactaagcatggctgtaaaagaaactttttcctctccccgggcattgcagcacactggaaagatgatacatccacagaaagcctggctttccaaaagagcttatgagagaatgttccccccaggttggttaaaacattggtaatcctgtggcggagaagtttgttctagcctttgggtgtagcccactgaataagttcacagtgatctatgtcatagtttccatgcattgaaatataatattcacacccccaacatacaccaatttcttacaaaaatttctttaattttctcctgctctgtattttgtttgatagctccttgaatggcttccactaaattcaaatgtatttgactctaaagtgcaacttgtaaaattttatctggtaatttatagattgaatttcaagtatacattatttacaggaagaactactagcaaatcgtatgattccgttcgtatgaaatgttcaaaatggcaaagatataaatacagaaagtagattagtggttgccagaagctgcagatcgggggtaacagctaaggagagtggagtgcgtttttgggggtatgaatagttttaaaatttattctgatggtggctgcacaactctcaatatattgaaatccattggattgtatgcctaaatgggtgaattctatacattaattatatctcaataaagcttttttttaaaaaaagaaaaagaaaaagaactactaggacatgtttagaatattatttcaaaggcttaaacaaagctgaaaagtgagaagagccctagattccttctgggaaacctggcttaaatccagttttctttatttcccagatttgagaatttggtcactgagcaaataacatgattttcctaagtctagatttctttgtttataaaatgagggtgaatatgctaccctacctataccgcgagctaaataagctagtatttgtaaaggacacacactcacactcacattcacacacaggtatgtatgtatgtgtaaaaatgtagcgacctaacccaagcactaagtgagtatttgttgaatcactgtctgcacacagcatctggcaaatggatgcgtgtgatttttccggggattagaggcaaacgtatactgatggaaagccttcctcaggccataacaaagggagaaatgctgaatccctgacgctgccaccaccatgaactggtgagagaacagaatatattcaaagagaaatttcattgttttaacttgcaagtgaggggagcatgacaccgtaagagagattatataaattagtcaaactgagaaccaggcgaagagcttagccgtcctttgcatagttagctacattggctctttttcaattagactggccattatgtgggtgcactcatttagatttgaaaaaccacccattattttctctgcgcattcattccagcacgctgacaatcttcacaggaaaactaaacttatttcttgaagaattcctcaatcttatacaagattttcaactgggagtttcatgaatcaaaaattaaatgaattgcacataaagccatggcatatgtatttgtactgcattgtgggagaaaaaataattattataatttaaaaaaactatgtcttacctgatttcagaaataaaagaagtagaagaaccacttccttatgttccattttgggactggccagcagtgcccagaaagtgtgtcccaatcccaggatgttgttgacttacatgagagtaaacgcatccacagaccagatagtcaaattaagttaatgattctctcagacacccacgccactggctcagcagggttcaaacacgaccttgaataaagggtccttacaaaatgattgagggtggaatctgcaatagatgctgggaagtggtgaaagcaatctcccccctcagctgctccatgctgccttcatgtctccttactccttccctcacctttgtactttatctctcacaattagtcttatttcctcccctcttcttttattccctttcttttggagaaaatgaaatcagaaaagtatctcacatttgctggaaccttccatgacgagaccctctgccaagcgctgcacgtccatagcctccctcaagcttcccaacaggcagtgctgttctcattcctgctgtacgagggatggggctgaggccttccccaaggttgtgtcgctacccaggggtgcagctgatagacaaaaccctttcaggtcctggatgacaaacttaagttaggtgtaaatgttaatatctccacatcctacaccaaatgacatagaaattacgacataagtgaaagtatcttattatcttcaaaatttctttattcccagtgaactcacatgttttctgtaattataaattataagacatcaatctttcccccaaatgaacgtatggcatattattatattctcattctcatgaaataaagcaagactggtagcactaagtggaaagcgtctatctcaattttaaatgttgaatctgtacttttccctggcttaagtctagagcaaccaggtagtatatatgttgtaaaacttctattttagtgttcaaagatatttagcaataaatcaattgacctctctattttagatgtgaaataaggaccagaaagcattgttcctctttccaggcagtgaaattcctgcctattcattaactggcaaaagagtagaggtgggagcccaatggtcttgggtggaacgtcctgtggaattccctgggattgaggaatcatgcagaaccctcaagaagaaaccacactgggcaacaagagggtggccccatgtgaggaacagggggaccgaatcgcatttcctgatttcctattctagcctcactctcttctctcctcaaattcttaccactccctttatcctctctgactcacctcgtggcccagttcattaaaggggacagaaggtggaggcaaattgagaaaccagcagtgggcagacgttttatttttaatgtgaaatgtctcttagggggcttatgttgatgtgcttgagaaagtactttgggggaaaaaaaaactaactctactaatatataatgcttccagcatgtatttatttccacttaaaatattattgtagcagttcctcttggataaggcatcttgggaatgatgttatcagaaattctacatccacataattttcttttcctgtttttttggttttgacttgggtagtgttggtatagcttttgcccacctttcccctggtaggtgttagatgcattaaattctacaaatgcgattttataaattagttgccctcctaatggcctcctggctgtacattcttccctaccttcataatccatcagcatcgtgaaagcacagagggacattgagcagagttctgtgctggcgccaccgcactctgtagcctgtaagagagcagcaaagaggaatgagttgctcaggtatagacaggggtggatgcatagagacttccactgtggcacggcccttcatgtccagggtaggcatgaagcaatggactattccagattgtgcataggaaaccacactgcactcttagacggatttttgctctaaagacaactaattcaaaataaggtgctttctacctgaaataatggcatgaactgagaaaagagatatagagagagatctctgtgtactacgatcaggttgcacatattctgagatttatgtattcttatttagttcaattcct

SEQ ID NO: 3529 - DNA, 4001 bp, Homo sapiens
cccattttttttttctcttattcacctctaggactcatatggcaataggatttgatagggcttatttgctggcaaggaaacatcaaatcttttagtggaaaaatacatttatattataggcaaaatgcagatgtatattgctactgatgcaaatgtattttattaatggtgtgagaatttcttcctcactgtggtgtgtgaatgtgtatgcatatttgcatgtgtaaaagacttaatttgtgaaatggaagatgtttctccacttcccactaagcatggctgtaaaagaaactttttcctctccccgggcattgcagcacactggaaagatgatacatccacagaaagcctggctttccaaaagagcttatgagagaatgttccccccaggttggttaaaacattggtaatcctgtggcggagaagtttgttctagcctttgggtgtagcccactgaataagttcacagtgatctatgtcatagtttccatgcattgaaatataatattcacacccccaacatacaccaatttcttacaaaaatttctttaattttctcctgctctgtattttgtttgatagctccttgaatggcttccactaaattcaaatgtatttgactctaaagtgcaacttgtaaaattttatctggtaatttatagattgaatttcaagtatacattatttacaggaagaactactagcaaatcgtatgattccgttcgtatgaaatgttcaaaatggcaaagatataaatacagaaagtagattagtggttgccagaagctgcagatcgggggtaacagctaaggagagtggagtgcgtttttgggggtatgaatagttttaaaatttattctgatggtggctgcacaactctcaatatattgaaatccattggattgtatgcctaaatgggtgaattctatacattaattatatctccataaagcttttttttaaaaaaagaaaaagaaaaagaactactaggacatgtttagaatattatttcaaaggcttaaacaaagctgaaaagtgagaagagccctagattccttctgggaaacctggcttaaatccagttttctttatttcccagatttgagaatttggtcactgagcaaataacatgattttcctgtctagatttctttgtttataaaatgagggtgaatatgctaccctacctataccgcgagctaaataagctagtatttgtaaaggacacacactcacactcacattcacacacaggtatgtatgtatgtgtaaaaatgtagcgacctaacccaagcactaagtgagtatttgttgaatcactgtctgcacacagcatctggcaaatggatgcgtgtgatttttccggggattagaggcaaacgtatactgatggaaagccttcctcaggccataacaaagggagaaatgctgaatccctgacgctgccaccaccatgaactggtgagagaacagaatatattcaaagagaaatttcattgttttaacttgcaagtgaggggagcatgacaccgtaagagagattatataaattagtcaaactgagaaccaggcgaagagcttagccgtcctttgcatagttagctacattggctctttttcaattagactggccattatgtgggtgcactcatttagatttgaaaaaccacccattattttctctgcgcattcattccagcacgctgacaatcttcacaggaaaactaaacttatttcttgaagaattcctcaatcttatacaagattttcaactgggagtttcatgaatcaaaaattaaatgaattgcacataaagccatggcatatgtatttgtactgcattgtgggagaaaaaataattattataatttaaaaaaactatgtcttacctgatttcagaaataaaagaagtagaagaaccacttccttatgttccattttgggactggccagcagtgcccagaaagtgtgtcccaatcccaggatgttgttgacttacatgagagtaaacgcatccacagaccagatagtcaaattaagttaatgattctctcagacacccacgccactggctcagcagggttcaaacatgaccttgaataaagggtccttacaaaatgattgagggtggaatctgcaatagatgctgggaagtggtgaaagcaatctcccccctcagctgctccacgctgccttcatgtctccttactccttccctcacctttgtactttatctctcacaattagtcttatttcctcccctcttcttttattccctttcttttggagaaaatgaaatcagaaaagtatctcacatttgctggaaccttccatgacgagaccctctgccaagcgctgcacgtccatagcctccctcaagcttcccaacaggcagtgctgttctcattcctgctgtacgagggatggggctgaggccttccccaaggttgtgtcgctacccaggggtgcagctgatagacaaaaccctttcaggtcctggatgacaaacttaagttaggtgtaaatgttaatatctccacatcctacaccaaatgacatagaaattacgacataagtgaaagtatcttattatcttcaaaatttctttattcccagtgaactcacatgttttctgtaattataaattataagacatcaatctttcccccaaatgaacgtatggcatattattatattctcattctcatgaaataaagcaagactggtagcactaagtggaaagcgtctatctcaattttaaatgttgaatctgtacttttccctggcttaagtctagagcaaccaggtagtatatatgttgtaaaacttctattttagtgttcaaagatatttagcaataaatcaattgacctctctattttagatgtgaaataaggaccagaaagcattgttcctctttccaggcagtgaaattcctgcctattcattaactggcaaaagagtagaggtgggagcccaatggtcttgggtggaacatcctgtggaattccctgggattgaggaatcatgcagaaccctcaagaagaaaccacactgggcaacaagagggtggccccatgtgaggaacagggggaccgaatcgcatttcctgatttcctattctagcctcactctcttctctcctcaaattcttaccactccctttatcctctctgactcacctcgtggcccagttcattaaaggggacagaaggtggaggcaaattgagaaaccagcagtgggcagacgttttatttttaatgtgaaatgtctcttagggggcttatgttgatgtgcttgagaaagtactttggggaaaaaaaaaaacaaagtctactaatatataatgcttccagcatgtatttatttccacttaaaatattattgtagcagttcctcttggataaggcatcttgggaatgatgttatcagaaattctacatccacataattttcttttcctgttgttttggttttgacttgggtggtgttggtatagcttttgcccacctttcccctggtaggtgttggatgcattaaattctacaaatgcgattttataaattagttgccctcctaatggcctcctggctgtacattcttccctaccttcataatccatcagcatcgtgaaagcacagagggacattgagcagagttctgtgctggcgccaccgcactctgtagcctgtaagagagcagcaaagaggaatgagttgctcaggtatagacaggggtggatgcatagagacttccactgtggcacggcccttcatgtccagggtaggcatgaagcaatggactattccagattgtgcataggaaaccacactgcactcttagacggatttttgctctaaagacaactaattcaaaataaggtgctttctacctgaaataatggcatgaactgagaaaagagatatagagagatctctgtgtactacgatcaggttgcacatattctgagatttatgtattcttatttagttcaattcct

SEQ ID NO: 3530 - DNA, 4001 bp, Homo sapiens
tttttttctcttattcacctctaggactcatatggcaataggatttgatagggcttatttgctggcaaggaaacatcaaatcttttagtggaaaaatacatttatattataggcaaaatgcagatgtatattgctactgatgcaaatgtattttattaatggtgtgagaatttcttcctcactgtggtgtgtgaatgtgtatgcatatttgcatgtgtaaaagacttaatttgtgaaatggaagatgtttctccacttcccactaagcatggctgtaaaagaaactttttcctctccccgggcattgcagcacactggaaagatgatacatccacagaaagcctggctttccaaaagagcttatgagagaatgttccccccaggttggttaaaacattggtaatcctgtggcggagaagtttgttctagcctttgggtgtagcccactgaataagttcacagtgatctatgtcatagtttccatgcattgaaatataatattcacacccccaacatacaccaatttcttacaaaaatttctttaattttctcctgctctgtattttgtttgatagctccttgaatggcttccactaaattcaaatgtatttgactctaaagtgcaacttgtaaaattttatctggtaatttatagattgaatttcaagtatacattatttacaggaagaactactagcaaatcgtatgattccgttcgtatgaaatgttcaaaatggcaaagatataaatacagaaagtagattagtggttgccagaagctgcagatcgggggtaacagctaaggagagtggagtgcgtttttgggggtatgaatagttttaaaatttattctgatggtggctgcacaactctcaatatattgaaatccattggattgtatgcctaaatgggtgaattctatacattaattatatctcaataaagcttttttttaaaaaaagaaaaagaaaaagaactactaggacatgtttagaatattatttcaaaggcttaaacaaagctgaaaagtgagaagagccctagattccttctgggaaacctggcttaaatccagttttctttatttcccagatttgagaatttggtcactgagcaaataacatgattttcctaagtctagatttctttgtttataaaatgagggtgaatatgctaccctacctataccgcgagctaaataagctagtatttgtaaaggacacacactcacactcacattcacacacaggtatgtatgtatgtgtaaaaatgtagcgacctaacccaagcactaagtgagtatttgttgaatcactgtctgcacacagcatctggcaaatggatgcgtgtgatttttccggggattagaggcaaacgtatactgatggaaagccttcctcaggccataacaaagggagaaatgctgaatccctgacgctgccaccaccatgaactggtgagagaacagaatatattcaaagagaaatttcattgttttaacttgcaagtgaggggagcatgacaccgtaagagagattatataaattagtcaaactgagaaccaggcgaagagcttagccgtcctttgcatagttagctacattggctctttttcaattagactggccattatgtgggtgcactcatttagatttgaaaaaccacccattattttctctgcgcattcattccagcacgctgacaatcttcacaggaaaactaaacttatttcttgaagaattcctcaatcttatacaagattttcaactgggagtttcatgaatcaaaaattaaatgaattgcacataaagccatggcatatgtatttgtactgcattgtgggagaaaaaataattattataatttaaaaaaactatgtcttacctgatttcagaaataaaagaagtagaagaaccacttccttatgttccattttgggactggccagcagtgcccagaaagtgtgtcccaatcccaggatgttgttgacttacatgagagtaaacgcatccacagaccagatagtcaaattaagttaatgattctctcagacacccacgccactggctcagcagggttcaaacacgaccttgaataaagggtccttacaaaatgattgagggtggaatctgcaatagatgctgggaagtggtgaaagcaatctcccccctcagctgctccatgctgccttcatgtctccttactccttccctcacctttgtactttatctctcacaattagtcttatttcctcccctcttcttttattccctttcttttggagaaaatgaaatcagaaaagtatctcacatttgctggaaccttccatgacgagaccctctgccaagcgctgcacgtccatagcctccctcaagcttcccaacaggcagtgctgttctcattcctgctgtacgagggatggggctgaggccttccccaaggttgtgtcgctacccaggggtgcagctgatagacaaaaccctttcaggtcctggatgacaaacttaagttaggtgtaaatgttaatatctccacatcctacaccaaatgacatagaaattacgacataagtgaaagtatcttattatcttcaaaatttctttattcccagtgaactcacatgttttctgtaattataaattataagacatcaatctttcccccaaatgaacgtatggcatattattatattctcattctcatgaaataaagcaagactggtagcactaagtggaaagcgtctatctcaattttaaatgttgaatctgtacttttccctggcttaagtctagagcaaccaggtagtatatatgttgtaaaacttctattttagtgttcaaagatatttagcaataaatcaattgacctctctattttagatgtgaaataaggaccagaaagcattgttcctctttccaggcagtgaaattcctgcctattcattaactggcaaaagagtagaggtgggagcccaatggtcttgggtggaacgtcctgtggaattccctgggattgaggaatcatgcagaaccctcaagaagaaaccacactgggcaacaagagggtggccccatgtgaggaacagggggaccgaatcgcatttcctgatttcctattctagcctcactctcttctctcctcaaattcttaccactccctttatcctctctgactcacctcgtggcccagttcattaaaggggacagaaggtggaggcaaattgagaaaccagcagtgggcagacgttttatttttaatgtgaaatgtctcttagggggcttatgttgatgtgcttgagaaagtactttgggggaaaaaaaaactaactctactaatatataatgcttccagcatgtatttatttccacttaaaatattattgtagcagttcctcttggataaggcatcttgggaatgatgttatcagaaattctacatccacataattttcttttcctgtttttttggttttgacttgggtagtgttggtatagcttttgcccacctttcccctggtaggtgttagatgcattaaattctacaaatgcgattttataaattagttgccctcctaatggcctcctggctgtacattcttccctaccttcataatccatcagcatcgtgaaagcacagagggacattgagcagagttctgtgctggcgccaccgcactctgtagcctgtaagagagcagcaaagaggaatgagttgctcaggtatagacaggggtggatgcatagagacttccactgtggcacggcccttcatgtccagggtaggcatgaagcaatggactattccagattgtgcataggaaaccacactgcactcttagacggatttttgctctaaagacaactaattcaaaataaggtgctttctacctgaaataatggcatgaactgagaaaagagatatagagagagatctctgtgtactacgatcaggttgcacatattctgagatttatgtattcttatttagttcaattccttatt

SEQ ID NO: 3531 - DNA, 4001 bp, Homo sapiens
ttttttttttctcttattcacctctaggactcatatggcaataggatttgatagggcttatttgctggcaaggaaacatcaaatcttttagtggaaaaatacatttatattataggcaaaatgcagatgtatattgctactgatgcaaatgtattttattaatggtgtgagaatttcttcctcactgtggtgtgtgaatgtgtatgcatatttgcatgtgtaaaagacttaatttgtgaaatggaagatgtttctccacttcccactaagcatggctgtaaaagaaactttttcctctccccgggcattgcagcacactggaaagatgatacatccacagaaagcctggctttccaaaagagcttatgagagaatgttccccccaggttggttaaaacattggtaatcctgtggcggagaagtttgttctagcctttgggtgtagcccactgaataagttcacagtgatctatgtcatagtttccatgcattgaaatataatattcacacccccaacatacaccaatttcttacaaaaatttctttaattttctcctgctctgtattttgtttgatagctccttgaatggcttccactaaattcaaatgtatttgactctaaagtgcaacttgtaaaattttatctggtaatttatagattgaatttcaagtatacattatttacaggaagaactactagcaaatcgtatgattccgttcgtatgaaatgttcaaaatggcaaagatataaatacagaaagtagattagtggttgccagaagctgcagatcgggggtaacagctaaggagagtggagtgcgtttttgggggtatgaatagttttaaaatttattctgatggtggctgcacaactctcaatatattgaaatccattggattgtatgcctaaatgggtgaattctatacattaattatatctccataaagcttttttttaaaaaaagaaaaagaaaaagaactactaggacatgtttagaatattatttcaaaggcttaaacaaagctgaaaagtgagaagagccctagattccttctgggaaacctggcttaaatccagttttctttatttcccagatttgagaatttggtcactgagcaaataacatgattttcctgtctagatttctttgtttataaaatgagggtgaatatgctaccctacctataccgcgagctaaataagctagtatttgtaaaggacacacactcacactcacattcacacacaggtatgtatgtatgtgtaaaaatgtagcgacctaacccaagcactaagtgagtatttgttgaatcactgtctgcacacagcatctggcaaatggatgcgtgtgatttttccggggattagaggcaaacgtatactgatggaaagccttcctcaggccataacaaagggagaaatgctgaatccctgacgctgccaccaccatgaactggtgagagaacagaatatattcaaagagaaatttcattgttttaacttgcaagtgaggggagcatgacaccgtaagagagattatataaattagtcaaactgagaaccaggcgaagagcttagccgtcctttgcatagttagctacattggctctttttcaattagactggccattatgtgggtgcactcatttagatttgaaaaaccacccattattttctctgcgcattcattccagcacgctgacaatcttcacaggaaaactaaacttatttcttgaagaattcctcaatcttatacaagattttcaactgggagtttcatgaatcaaaaattaaatgaattgcacataaagccatggcatatgtatttgtactgcattgtgggagaaaaaataattattataatttaaaaaaactatgtcttacctgatttcagaaataaaagaagtagaagaaccacttccttatgttccattttgggactggccagcagtgcccagaaagtgtgtcccaatcccaggatgttgttgacttacatgagagtaaacgcatccacagaccagatagtcaaattaagttaatgattctctcagacacccacgccactggctcagcagggttcaaacatgaccttgaataaagggtccttacaaaatgattgagggtggaatctgcaatagatgctgggaagtggtgaaagcaatctcccccctcagctgctccacgctgccttcatgtctccttactccttccctcacctttgtactttatctctcacaattagtcttatttcctcccctcttcttttattccctttcttttggagaaaatgaaatcagaaaagtatctcacatttgctggaaccttccatgacgagaccctctgccaagcgctgcacgtccatagcctccctcaagcttcccaacaggcagtgctgttctcattcctgctgtacgagggatggggctgaggccttccccaaggttgtgtcgctacccaggggtgcagctgatagacaaaaccctttcaggtcctggatgacaaacttaagttaggtgtaaatgttaatatctccacatcctacaccaaatgacatagaaattacgacataagtgaaagtatcttattatcttcaaaatttctttattcccagtgaactcacatgttttctgtaattataaattataagacatcaatctttcccccaaatgaacgtatggcatattattatattctcattctcatgaaataaagcaagactggtagcactaagtggaaagcgtctatctcaattttaaatgttgaatctgtacttttccctggcttaagtctagagcaaccaggtagtatatatgttgtaaaacttctattttagtgttcaaagatatttagcaataaatcaattgacctctctattttagatgtgaaataaggaccagaaagcattgttcctctttccaggcagtgaaattcctgcctattcattaactggcaaaagagtagaggtgggagcccaatggtcttgggtggaacatcctgtggaattccctgggattgaggaatcatgcagaaccctcaagaagaaaccacactgggcaacaagagggtggccccatgtgaggaacagggggaccgaatcgcatttcctgatttcctattctagcctcactctcttctctcctcaaattcttaccactccctttatcctctctgactcacctcgtggcccagttcattaaaggggacagaaggtggaggcaaattgagaaaccagcagtgggcagacgttttatttttaatgtgaaatgtctcttagggggcttatgttgatgtgcttgagaaagtactttggggaaaaaaaaaaacaaagtctactaatatataatgcttccagcatgtatttatttccacttaaaatattattgtagcagttcctcttggataaggcatcttgggaatgatgttatcagaaattctacatccacataattttcttttcctgttgttttggttttgacttgggtggtgttggtatagcttttgcccacctttcccctggtaggtgttggatgcattaaattctacaaatgcgattttataaattagttgccctcctaatggcctcctggctgtacattcttccctaccttcataatccatcagcatcgtgaaagcacagagggacattgagcagagttctgtgctggcgccaccgcactctgtagcctgtaagagagcagcaaagaggaatgagttgctcaggtatagacaggggtggatgcatagagacttccactgtggcacggcccttcatgtccagggtaggcatgaagcaatggactattccagattgtgcataggaaaccacactgcactcttagacggatttttgctctaaagacaactaattcaaaataaggtgctttctacctgaaataatggcatgaactgagaaaagagatatagagagatctctgtgtactacgatcaggttgcacatattctgagatttatgtattcttatttagttcaattccttatt

SEQ ID NO: 3532 - DNA, 4001 bp, Homo sapiens
tgcagcgattttggctcactgcaacctctgcctcccaggttcaagcaattctcctgtcccagccctgcaagtagctgggattacaggagcgcactaccacgcccggctaattttcgtatttttagtagagacagggtttcaccatgttggccaggctggtctcgaactcctgacctcaggtgatccgcccgccttggcctcccaaagtgctgggattacaggtgtgagccaccgtgcccagccaacttgtctctcttaacatggtgacactcactccttcctcagctcacatggttctctctcagctgacttctaatcatccttccagatttagttcagtatcaactcttcaagcctttcttccctgctgcagcctcctttccttcacctgccaacagattaggtattccttcccctgcagtccccctttacctcatttctaattaacctcatcacaagttactctattaatatgtgtttctgtctgttgctcctgactcagagttctttgaggacaggggttttatatcaatcacacatcgctagcatagcccctggaatatagcactctataccatatgtgtaccaaatggaagggtttatatcgggcttacaaatcacagcaaagaatgtctgggaatatcaggatagtcagtcttccatatttgctgggagggaaaaggaacacttctgaagaagtgctgatgacccggaaagtcagttaaggacaacaggtgtgcctaaaaaagaagtaaagatcagagaactcacagacttccattagagagaacacaaagaaatcatttatttaaagatcagactaaatccaaaacaattaggttcacaaagccaacagaaatgcaagatacagacatacacagccaacattctcttaagtcaatttcaaaatgttgaaagctatttcggcaataaaaatcacaaactttctgcactgccaaggtgagggaaattacatttcaaaggcgattccaaaaaaacctaatcaagactttcctcaggatcaatttttggtattcacatttccttagcatgtaatacaggtgcctgtcttcggcgtacggataaacccagaaggccaagagcaaaaatcgtgattaactttaaagagtttaacttgcaccccttgtatgatgccacaggatacaatactataaaccgccactcacacaagatgagttacagttgccatgggttaaatctgctgcctggaaaacaaattttaagtcctccacccagaagggtctggggaatgggacgcaacaaagaccaagccagaacaccccggagcccagacctgctcagaaaacgcgttccacgtgtgcgcgcccgcaagcccggcttcgcttcccgccccgcggggagcgcccttagctgccctatagcgttcgcgcccggaccaggacgagtagaggggacggggccctcgagccatcgaggatataataaatacccgttagtcacaccacactaccttcctgctagcgcgaggcaggcaattaccatccactagccgcaagcagccagcgtctcacccgatgcgcaggcccaaccccgcacccgcacccgcacccagcacgcacgcgcgcggcagagcgggtgcagagagcgcggcactgagtcccgcctcgcccgggggcaacgtgagattggcgctgctcgcagccaatccgctggcagcgagtctgtccgggaaagcttccgcaagctgcgcagcgccgggcctgagggcgtgtatccgcggccgtagcagccgggctggtcctgctgcgagccggcggcccggagtggggcggcgggtaagtgggcacgaacgcggtggacgctgtacagtcgccttcgtcggtagggaactgctggcggcctaggggtcgtcctgagagggaaaagcgggctccggctgcatctgcggcgccctgcgtggccgtaagagccaagtggcctcagaggctcgccccctacgcaaatcctcgttgtcttgccagggtcctgacgtgacgtgcggccgcgagaaggaaggggcgggttgggggaggcgctgaggtggtagcagcggcggcttttgctgagttttctctggcccagagcgctcgggctgtcggtctagcaggggggactcccctgaggggccgctgcgggtcgccgtcttcggaggcaccggcgagggcagagccaacagcctcttcacggtctgtaaggtcattgtttgccagtcgtgggcagcgcggcaaacctgctgggaaaaggttttctggttggaataggatgagtaccgcaccagctttgccttccagctgagatgtaaatttcaggcctccatcctgtggaacgtgggaaaactatcttgagtgttggcatgttctaagtatgacataatagtttaatgtatgataaatcatgggtgtttagacgaaagatttacacatataaattggaggctttagcggtcttagtgtaactaacttttcgtccccttaacccttgatgcctgttctatgggtctctagagcggaaggagcattatactccggaaacatttgctggaaggggttatgagaaattcctctctgtatgctaactccgtaatacaagcgtttgtgtattttaaaatcacagctgttccaaatataatctagcctcgttttccccctccgtcggatgataggtgttcttcaggacagttttattttaagcaattcttagtctcaagtaaacaccatcattaaaagaactgagaactattatcaattcttcctttggagtccatcttcaatggaaaggagaagggaaaaccttttttaaaaagaagaaagaaaactgaagtttttgatttgactagagaaatattcagaagactccttattttcacctagtttaatcacaaaattgagaaacaaacattatcccttgaccatgtaaattttacaccacattatgtcaacagcatgtaccttccacattgagtattcagaaagaagtgatctgaactctgaccattctttatggatacattaagtcaaatataagagtctgactacttgacacactggctcggtgagttctgctttttctttttaatataaatttattatgttggtaaatttagcttttggcttttcactttgctctcatgatataagaaaatgtaggttttctctttcagtttgaattttcctattcagtaaaacaacatgctagaaaacaaacttttggaaaggcattgtaactattttttcaaatagaaccataataacaagtcttgtcttaccctaaagtcaaatgctgaagattctttactgctgtcatcagcatctacaagtagcatattttggatggtgtttgtgtgctacttcaaagtaactaggaaaaaataatcctcgcaacacaggtaccttgtcatgtcagaattgggggtgttaggttgccagttgtatcagtgttgattcatttcattacttcctacagagcaaacatgaacgttggagttgcccacagtgaagtgaatccaaatacccgtgtcatgaacagccggggtatgtggctgacatatgcattgggagttggcttgcttcatattgtcttactcagcattcccttcttcagtgttcctgttgcttggactttaacaaatattatacataatctggtaagaatttcacattatactaaacacttaaaagttttaagtttagtggttgccggaaattaaggggaggaaggaatggaaagttattgcttaatgggtacagagtttttggttttgcaagatgaagagagttctggatgtggatggtaatggtgatgattgcacaacaatatgaatgtttttaataccactcaactgtacatttaaagtcccagcactttgggaggccaaggcaggcagatcacaaggtcaggagttcaagaccagcctggccaacatggtgaaacctcatctctactaaaaatacaaaaattagccgggcatggtggcgcatgcc

SEQ ID NO: 3533 - DNA, 4001 bp, Homo sapiens
tgcttaaaaccccgtaactccatcacttcctggccaagtccaaacatggcacaaaaggcccagtgtggctgggtctctgcctgcctctttcctcctcccgcctagagcctgatcctcagcacgagccctgcattcctgcaacagcacctgtgcaggattttccaggcagccctgacgctttccctctctgagacttggccaaggtaccctcccagttttcccctcttaagctaagtaaccactgcttgggaggcactttggtatgggggaaagagcatggagtcacagactaggtgagaatcctagctcagtctcagttccttcctctgtgaaatggggatgtaatacttatctcaaacactaaaacattacatggcaaagtactggcacacctcacatgcagaaaaaaatgttgatttcttcctcctttctctttaatattggtcaataatatgtattaaggtcagagtcagagcccaatcacaatgttcataacgccttctgagtactactatacaactagtacaagctcacatgatctcaacgaactacttacttaaacttgggtctcactccaagctcccaaaagggaggatgaggccagggacccaagtctgaatcagatcaactcagcttactccacagtaaacccactgtcttctcaattccacatactttcccacctccactgccccacccctctgagattccaatcgaacccaacaattctgttcccacaactttggattcagctcgccacctgaaacttggagaagtttctaagtcctgccctcccctacaagccacgccccgttggtgggcaaaggggtggttaaaactcaccaggccagtcccacagctttcatggggttcttgcccctctttctgggaatgtattccagctccggggataggggttcaggttcctccttgccctctggggagctgtggctttgcagggcccgggtcctgttatgagaagccttgttagctgtggctcctgcgagaatccctgtggatggaggtaaggaaggtcagtaagaagagatgagaagaaagcaagcggggaggtggggggcagtaagggcttgggaggagcggctgagatctggggaaggggagtgactgcagtctgaagtaagaagtgccaaggagaatccaaagggaaatgggaaaatcgccaccgaggtggcacctttggaagccacttccacgtcactgcgggctcatcaccctggtgccaggacgaaaagcttcgctgttcttcctcagacgacagcatgggaaggactgcagtgggactcacataagacgtatgaaggaaatccgggaaaaggttttgaaactgcaaatgttagcactggaagggaccttaaagatagtctactccatcccttgcactgtacggaagaggaaactgaagccctgagagaaaaactgctttgcccaaggtcaaactgctaattatccggggctggaactcaaacctccagaagcccggggctctttcctctgcactgcggtgagtgtgaaacacctggagcgcgggagtccaacaggcttcctaggagctccctcttgcagcaagaccccggaggtgtcgagcaacccgaaggcggggggatgcactgggtgacctctaaagagcatctctgcacccccagactctaagatcttgcagaaaagtgtggggaggaaccaagagccctgacctcctgctatcgtcgggctggacgtgaaagaaaagggatcttctgcagtcctgccctccccggggtccctctccttaccccggaggacgcgggcatttctcgccccccggcccttcagcgccgtagcagctaccaccgccgccatgttcagatcccacccccgcttcaccgcgctccccgccgggaattgtagtttgcgtaaggggcctcccccgctccttccgtcctgcctacagaccagaaactacatctcccagaagcccgcagagcggacccaggagaactactcttcccaggagaccccggaggcgcgcgcgctcgcttgtttccctccagttgggggcggagtcaggtggggcggagtttgggttctctccgccacgccccggccccatcttccaatgccgctctgtgattggtgaggcggccagccaaccttcgtagctattggccgaacggccgtcgctcttcctgctggggagtcgcctacgcctacttcctgccgggaggaggggctcgagttccgcgtcgtcgcgcagagctgactctgggaggcgtttgggcccagagaagtggatccgccgcttgcgccgcatggagtccgaatcggaaagcggggctgctgctgacacccccccactggagaccctaagcttccatggtgatgaagagattatcgaggtggtagaacttgatcccggtccgccggacccaggtgagaactgccgctcctcaggccatgggacaggagacgctcacccctggcctctgactcctgcttttccccgctcccctccacacccgactggtcattcctaccgatatccctcttcccctcctcccccactcccaccctcacacttagttctcaggcctggctggggtgggggttccctgacgcctcctctggcccttcccctcacacacccccttcccatcatccccttggccctcccttaccgcacggtctctggccagccgtggcctcccgtcctgtgtcccgcgcgcccccgcggaccccggtgtgtctgactccaccttcccttctcgccacatgacccgccccagcctcaggcctcctcatgcttctctccgtacctcttaccgcctcccgagccccatcttctaaccctctccccaaagcagatgacctggcccaggagatggaagatgtggactttgaggaagaagaggaggaagagggcaacgaagagggctgggttctagaaccccaggaaggggtggtcggcagcatggagggccccgacgatagcgaggtcacctttgcattgcactcaggtaggtctttgaggcgatccacctcaaatcagtttaggtgggcgtgtaagcattaaacatcagccatggacagaacgttatgggggacacagagatgggcaagatgctggccttgcgctggaggagcccacaggtgggaaagtgtggcagaatggatgattgcttggcttctggcatcagtcgagacaccctctactttgccagttaaccttgattaacctcttagttttcttttaaaaagttatctttggccgggcgtggtggctcactcctgaaatcccagcactttaggaggctgaggcaggtggatcacttgaggtcaggagttcgagaccagcctggccaacatggcaaaacccagtctctactaaaaatacaaaaatttggctgggcatggtggctcacgcctgtaatcccagcactttaggaggcccaggcaggcggatcacaaggtcgggagttccagaccagcctggccaatatggtgaaaccccgtctctactaaaaatacaaaaattagctgggcgtggtagcgggcgcctgtagtcccagctcctcgggaggttgaggcaggagaattgcttgaacccgggaggcggaggttgcagtggaccaagactgcgccattgcactccagcctgggcaacagaatgagagtctgtctccaaaaaaaaaaaaaaaaaaaaagttatctttgataaaagttaataaaagtagtgagtataaaattagagataattggccaggtgcggtggctcatgcctgtaatcacagcactttggaaggccaaggcgggtggatcacctgaggtcgggagttcaagaccagcctggccgacatggtgaaacctcatctctactaaaaataaaaaaaaaattagctgggtgtggtggcatgtgcctgtaatcccagctactccggaggctgaggaaggagaatcacttgaacctgggaggcagaggttgcattgagctgagattgtgccactgc

SEQ ID NO: 3534 - DNA, 4001 bp, Homo sapiens
tgcctgtaatcccagcactttgggaggctgaggtgggcagatcatgaggtcaggagtttgcaaccagcctgaccaacacggtgaaaccctgtttcaccatgctgagatcatgccattgcattccagcctgggtgacagagcgagactccgtctcaaaaaaaaaaaaaaaaaaaaaaaaaaaagaaaattatttagataccttcatgtttgggatttttttttctttttcttttttttgttttttgagacggagtctcactctgtcgcccaggctggagtgcaatggctgcgatctcggcttactgcaacctccctctcccggcttcaagcaattttcctgcctcagcctcctgagtagctgggattacaggcgcttaccaccgtgcccagctaatttttgtatttttagtagagatggcgtttcaccatgttggccaggctggtctcgaattcctgacctcaggagagccacctgcctcagcctcccaaagtgctgggattacaggcgtgagccaccgcacctggcctaaatatttttcaatctcattattttaatgcaacgtgcagagcaatggtaacttacttggcacattatctaaactgcgaccaaggtttaggatattagagatgtgaatgccccaaaaggcacaaacacaagatccccaccccaccctccagcaccatgtttttctagttatcctgcctttatatctgcatttcttagactgtgagtggaatcctgcgcctgaagcttctgggcgtgtggggtggtctggggaggagagggtgaattgcacaatgtctgctcggaagctcgggaaattcccaggcttaggctctccccacaacctggcctgtggccagggctctcacaattcccatccccaacattactgtccctaaactggggcttgaggtcctgacccatggccaggctggtagtaggaaggggacagggggcctcggaggcctgtcttcttccctgcctctcagtgtccctggggctgaacagtgcttgctaggcaccaccctcccctggggccaggaaggaaggggtagagggaggcaggagggcagagtgagcgggggagggtcgacggagacaaatcactggaaaagtgggcagagtcagttgggtcagatttcacagcctggggcttccacacgggccaggctttggttagaaggaaagggacatactggaatccaacagggttgggactcttgcttgggacagaagaacctaacttgactggtgaggagttggatgctggggagtgggacaaggacatacgaaaggagttggcggttttaaatgtcagacggtgggaggcattccttctctccggcacttgccatcggagcccgggcatctgctgacctcacccccggacagggacggtcttcccagccctggctcctgcactatccccctgtccagcttcctggtctccagcccattctgtggcactttgctccagatgtcctctcacgccctccttccgtggccaccctggcccgcctctccgatcctccttccccagcttatcccaattgtccagccccccaaatccctcaggccccccaactcagtggcttctccagtccgtctcctcgatccctcttcccttagaccaagccccttcctaaccgccacgcccacccccagctccagcccccgcctcccagtcccctctcccagcgcgcccgcctcccgagcccgcacgcttcggagcccgggcactaacccgattcggaagagcagccgctggctgtgcgccatgagcagaccgcggaggccccgccgcgctcggcagccgcgggggctcacaagtaggacgaggacaaggacgaggaggagccagcagccggcgacccactgccacgccgcgggccagccctgccaagccatgctgggggcaggcacgcgccggccgggcggggctcggcgttgctaggcaacggcccggccccggccccccgcggggaacctgcctgccggctctggacgtgggggcgttgtggccccgccccgcccattgacctctcctttggacccgccccctcaccacctccagccgggcaagcaccccgaaggccacccggcttggggggcggcctggctccgcccggctggcggccaggaggcggggccacagcgggccgcgagcctgcgctgatcggggtccacagtcgcctgagccctgggaaggggcaggagctcgcagttcgccccgcccgcctccccgtccagggcactgctacactttctcaactggcagaaacctgagagatcatcggggtcagctgccattcatggatttattcattcgccgaattacttttctagctcctcctatgtacttggcactctgccaggctctgaggaggatgcaagggtcaaaggcacactgtctgcattcctggagcccacagtccggaatctagtgaggcgacgaaccaaataagcgagcaaacaaaattatatctgtttatgcatacacatacatatgcgcgtgataaattgcgaaaggaagtcaaggagggggcaatgatatggagcacagagagggccaacttagatgggggagggcctccccagcggacgacataagtcctgccctgaaggataggaagaggccacacaagctctggaggagcaacatgacctaggatatgtagccatgggtggcacagaggggcctagggctggggcattcccactcccaaacccagggcgatttccacatcaccgttcccagctccctcactgctgccctcctgatggattctagaagttgttaaggtccctggaatggaagcaggtgtgaggacaggcgtggtggtggtgaaatctacaaatttaggcacaggagccagggctgggcttgttttggctccagccctagctctggcccaggacaggaagggaaggaaatgctctaaagagtcaagctcggccaggcgcggtggctcacgcctgtaatcccagcactttgggaggccgaggggggcggatcacgtgaggtcgggagttggagaccagcttgaccaacatggagaaaccacgtctttactaaaaatacaaaattagccaggcatggtggcgcctgcctgtaatcctagctactcgggaggctgagacaggagaatcgcttgaacccaggaggcagaagttgcggtgagtcgagatcgtgccattgcactctagagcaagactccggctcaaaaaaaaaaaaaaaaaagagtcaagctcggccgggagcggtggctcacgcttaatcccagcactttgggaggctgaggcctgcggatcgctaggtcaagagatcgagaccatcctggctaacacggtgaaaccccatctctactaaaaatacaaaattagcctggcatggtggcatgcacatgtagtcccagctactcgggagcctgaggcaagagaatcgcttgaacccgggaggtggaggttgcagtgagctgagattgtgccacggcactccagcctaggtgacaggggtgagactccgtctcaaaaaaaaaaaaaaaaaaaaaagtcaagctcacctttgctgctgctgggaggttctgggagggagatgggtgagggatatgttaaattatcttcaaactgaattgtaattccaatacctgaatctgggtttaatccagaaaacccagacagacctggagtttcttctatgtgggtacatcttgagggacagagcctatggcctgctccctccctgtctcctcgcctgtaattaggttgcttctcagtgcctggcatataaagggctggtaccgcagaggagacagaggagtgagaaaactgataagccaatttgcagatgacccttgtaggatgcaggagtttgcatctccgtgtctgtgtctgtacatgcaaagtgaaggatcatggaggcatcatcaaaagtcattgtgcacacaactttctgcaggtaaggctgtgccaggtaaggctatatcaggcattctat

SEQ ID NO: 3535 - DNA, 4001 bp, Homo sapiens
aaggagagacgtcaaacaatgaagcaagggaaacctacaacgaaaccactccttggcaggaaaccataaaagcctgaatgagagaatggcaacagggacaaagaggagttactctatcatgttctatgatattttacactttatcaactatttagaatagtgcctttctttgttccattattatattccattaacagagatgagactataccagtccggatgatggtaaaagaatccttaaaaaggaaaatataattaatttcggttatcgattctggtatgaaattggcacccagaaaagaaagcccaaagtaaatttaaatgtctaattcccggattgatagcacagaatttaaaatatatacataggctcggtggggcagctcacgcctgtaatcccagcactttgggaggccgagatgtgatcacctgaggtcaggagttcgagactagcctggccaacatgctaaaacccagtctctactaaaaatacaaaaattagccaggtttggtggcaggcacctgttaacagtgagccaagatcatgccactcactccagcctgggtgaaagagcaaaataaaaagatatatatacacacacacacacacacacacacatatatatgcatgtttcttatcaaaataatacattttttaatcaaaagagcaccattaaaacacagtcatgcactgcataatgacattttgatcagtgaccaaccgctcataccatggtggtctcataacagtataatggagaatatacagaaacctgatatatggcactggataccggcaatgcagatcaagtagatgaaatgactgatattcagtaatggtgctgggacatttggttttccatatgaaaaaaatatataaacaaatatacacataccatctaggtttgtgtaagtacactctataatattcgcacaaggactaagtcatctgacaaaacatatcccagaacatattcccgacgctgactgtatatacttcttgtaaagcagcaagtgcttatattcattatttacctgcttctgtttatggcaatctctttactcgaccttttctcaatttgacatagaacattataaaagatacacagaagaagagccagtattttggtgtgatctcagaactaatttacaaattcaattaatatttgtatcgaatgcagatttttaaggcatttgggaagttcaaactcaatatggtaaatttttaaactggacaaaaaccatacaacagaaaagtcccattaagtaaagcctattcatgccttttcatctctgtaggagagaaagcctggtgtattgggaaatgattgagattttccttaccctgatttctacattccttgatttcaagttaaagcgtatctgaagtcccaaatgttccacaataggagtaaatatcttcatccagttttctttcaatggtgtgtatctgttagctgggactggaattttccttgtttcttctttcccactctgtaaataaaagaacacacaactcagaaggctatggagggacggtgatggagtttaaaatgacatctgatccacaaagggcctcctttaactgaactagttacacttcaaagaatcacttctctctgagcatcacggcagaacagccccaccgcagcttcaacattctccagaggccatcggcttgatccgcgtctggcccttgcctcgttgctgtcctagggtcccagccacataccaggagcccgtccccacagaggggtgggaagacgggcctcttcgccggcctggcctcctctgtgtccatgcggcccgcatccccgccctctcctgctgcggacagctgttcagcctgtcgtttcttcgcccgtcggccacccttgcgggtgacctgggtaaagccctcctctgccctggcgctctgcgtttccatttcggattccatccccggaaatcttaaagcgctgccggctgaaacacgtgcgcagctgcaccacgcagaagccagcctcagccaaccacccctgcagctccgcccctttcctaaaacgtcacaggccggggacctgcaggatttggggccggtgggggggaaaacggggttaggctgtcctaagatatgcctgatggtcttgggctcactccagccgcgcaactcccagcccaagtattttgtaatctctagtatgtatgtgtgcgaaaggcagtgggtaaaggcgataaacaaattcgtgctgttgtgaaggaacattctgtgcgatcgcaggagcgcatctggcattatccggggataactacagccaacatgccagggcatctggggcagaatacggaaagcgggagggacaaattgccaatgtttggagtctggtttccaggttgccgtttttgggggctctgggtgtggcggttgccgtagctgaaattggctgcaccatgtcggccttcgagaagcctcagatcatcgcccatatccagaagggcttcaactacacggtgtttgactgtaagtgggtgccctgcagcgccaaatttgtgaccatgggcaacttcgcacggggcaccggcgtcattcagctgtacgagatccagcacggggacctgaagctgcttcgggaggtgggtgccgggtcgaggatccggactgccgttgggggcgagtgcggatcctggggtctgcattcctctttgccagagccttcgcccagcgtcccccaaagcatggcttgagccgcgcgagaccagagaagctgaccgccgactgaggaatgtttcctatttaaaacctttcttctcatccgcggggtagttcctccgcgcccaaccgtcctgccacccccagtgcagtccagccaaagcgggcaccaggatgcctgcagtgtggttggaagaggcaacctaacacattcgacaggcatcagctgagtgcctggtattcccagggatgtgaatggtaatgtcccccatctcatggagtttattttctagtgggagagatactcagttcaataatcaaagcaacgatacataaatacaaaccgagatgagttgtctcacacaaaggaacacggttacggttcaatgagagtgaaaacagatttgggatgaatgaaaacagattttggtatgtgcagaagctaactaggtcaaactaggagtaaaggacaaggtttccagggcttctgcacatgcagaagctcagtgatgggaagaagtttatctccttaagaaactagagggataagcaggaaccagacattgcaagatctgtaggacattcaaaggatttatgccttttttctaagaaaaaacggacacaactgaaaggatttaagcagggtgtggaaagattaggtttgcaaggtttttttgaagattactagtgaaagaattagagaataatgatagtaactagcattttatagctgtttatagtttttaaaaagtgttgattttgttacctgaaaaaatgatcagtcattatcagatcagggttgtaatagactacaagtgcagggtaggttaactctggggatcaaaacctatggagagaatctgcttggaggaggtagggattaaactggtagataaaggatgaatacaatttggactgttaagcctagaatagaaagtatgtaagaccccatcccgctttaagtttccctgaatgacaaacatgaaacatggcttatttttttctacctttccttcgttccttgtattgttcatcacttagcttctggtaaccagtggcttttttttttttttttttttttttgagacagggtctcaatctgtcacccagcccggagtgctgtggtgcaaacacagctcactgcaacctccgcctccccacctcagcctcccaagtagctgggactacaggtgtgtgccaccacacctaactaatttttttgtactttttatttttttattttttattttggtagagatggggtttcaccgtgttgcctaggctggtctccaactcctgggctcaagcagtc

SEQ ID NO: 3536 - DNA, 4001 bp, Homo sapiens
agtttcactcttatcacccaggctggagtgcaatggcacgatctctgccactgcaacctctgcctcctgggttcaaccgattctcctgcctcagcctcccaggtaaatggaattacaggtgcttgccaccacgcccagctaattttgtatttttagtaaagacggggtttcaccattgtagccaggctggtctcgaactcctgacctcaggagatccacccacctcagcctcccaaagtgctcggattacaggtgttagccactgtgctcggccgttttttaaaatatttctaaagggtttgtaaacacatacacacagtgtgtaccccaaaaagcctaatatatatattatctggtcctttatagaaaagtttgcagacccttgatggaatccactctccacactttgcacaagaaaatggtgaattaacctgttcaatgtcaactacttatcaaagttagagtgcgagacctggattcaaaatgatttttttgctttttgtatgaactggggtccaaattttttcaaagtacacgtaaaaaatttagatatatgaagtttgcattagcaattccatttattctaagaacgattaaagcaaactttttttttaaaaagcggtcccctaaaaaaaagtatgggctttgtaagcaaaaaacagaaattcaaaaaccacctagtcccataatactaacttttttatagactcttagaaagttatctaaccttttttgagcctctgtagtcttaactataaaatgagggtaatagtacctttacgacaggtttaaaaagattgcgaggatcatataactggcgttcaaaaaactgacttttccttttcctcctaacccagggtcatagtggtcacactttaggcaatcaattagattggatgacatgatatcttgtactcctaacttcaagtcatccttccgtcttagcctcccaaagtgctgggattacaggtgtgagcgcctgaccttttgccatctctttgcatcgatctttgcttttgtttctctctgtgtgtctccttgcctctctccctgtcactgtctctctctctcccctgcctccctcttggtctcttttttttgctgtctctttctgatgaccttgttcccatctctgtgcgtgtgtggctctctccctgtccatctcttaccatctctgccttcctctcccaggtcttaaacgaatatttccacaatgtctgtgaactggacctggtgttcaacttctacaaggtaggctcctggtgaagaggaggctgaaggagcccgaggagtgggacgtgggggacccgtggtgcactagccacccggagcctctgctgaggtctgtgtcccagctcgaggggcatcagagccccagcttccagggtccgggccagcatcccggggggcctcgtctcacccacgtcaactcgttattcctaggtggaatgtttcccacttaagagcccagtggtcccggaaagtaaagagatcggaagtcaggtggacggacagagtcggatggagcaaagaagcccggcacacaccaacagagagaacgacatagcgcgggaaggagggtccgaggagacacattccaaacccggaaagggaaatttggaatttaggtttagggtaaggagagattaaatagagctgggataccgggtttctaccctgggagatgaatacgctcaagctggctggacaagacaccttatgacaatacagtgaacgcacgtcactccttacctgttgcctaagtccacggccacagctcgagaccctgcgctactccatagtgctcgcacttgcaactgggtgagtgcccgatcccgccgtggcagaaggaaaggaccatcgctcaggggccggagccggaggcacgagcagcagtacctgcaggccgccatgacacccggcacgcggtcaacgcaggctgtgccctgattggctcactccgcagaccgtggggcggagcctgatggagtttcgtttccgcggtgcccgagggacgccggggtaacggaaaccttggccaccttctacgaagactagagagggtcaaacctatcagaacgcgattatgttgcaaacgatctttgtctttatgtgccaacgaaaggcaattagataaataaggtttttgtgtgtgtactatcgtaatttaaaggagaagtcctagaataatgtaaatgtttaatatgcagagtaaatttatatttacttttaatactagaagtcatagaacaacacattattattatttggatctgtgaactaagaattagaatttgggtggtgggccttggaaagagatctccttctccccttctccgccctggtttttattttaaaaatttcacatagcagatatgttactacagcgatttgtgttaaccaatttacagtaaattcatttttcatcgacttgtaattttagaaatctttattgtcacttctgattcattttcatttccattgctaataattagcaatttatatttctgtcccttttggtcgaactcttaaatgcaaaatgccagctactgtttgaagtaaatattttgtaaaatgaaaaaaaaaagtttttgggatttgaaaaatttttagagaatggataaatttcttccaccccattaatccattctgttagaaattctttatgtttttccttgaatgaaccaatgggcattttcatattatgatgtaaattttttgtgtaaggtgataaccgccttaccccaaagaaaaccaaacaacaaaaacccaacactcattcaaacacagttttaagaattaaaaacgttggctggacgctgtggctcacgcctgtaatcccagcactttgggaggccgaggcgggcggatcacctgagttcgagaccagcctgaccaacacagagaaaccccgtctctactaaaaatacaaaactagccgggcatggtggcttatgcctgtaatcccagctactcgggaggctgaggcaggggaatcgcttgaacccgggaggcggaggttgcagtgagccgagatcgcgtcattgcaacaagagtgaaactcggtctcaaaaaaaaaaaaaaaaaaaaaaaaaaaaaaagtccgggcgcagtggctcatgcctgtaatcccagcacgctgggaggcagaggcgggtggatcacgaggtcaagagacccagggcatcctggccaacatgctgaaaccgcgtctctactaaaaatacaaaaattagctcggtgtggtggcgcgtgcctgtaatcccagctactccagaggctgaggcatgagaatcgcttgaatccaggaggcggaggttgcagtgagccgagatcgcgccactgcactccagaccgagactccatctaaaaaaaaaaaaaaaaaaaaaaaaaattaaaaatgttgatccgtgatgatttaaaaaagaaaaaagaatgatgagctctaaacagacaaatgatttgctggcaaagcagttttctgacaccttgctttcatgagctattattactgatttgggatttccattccaatagagggattaccattaactttgtttacagatttttagtgttaaagcagtttttgcgtctcctcccttttactttaccttgagttgccacagagttttccagaccaatctattgaaatctctcatgaagataaatctctcagaaaacctacttgccacaattgaacatgacttttgatttatagagtaagaatacaaaatcatctttttgttaatatacttaattactatgtaatcattttcatttgggcagtattgcctaatagtttagagcatagacttggagttagtcccagctggttccaatcttgtctctgttaattaccagttgtgtgactctagctctctgagcctcagtttccccataaaaacagatagtaatatgaatctaatagggtttttgtaaggattaaaagtgtcggccgggcgcggtggctcacgcctgtaatcctagcactttgggaggcc

SEQ ID NO: 3537 - DNA, 4001 bp, Homo sapiens
tcaaatattttcttttttaatgacaaaatttagttagtacacaagttaatccatgactcctaaaaatacagacaagtacaagtcttattgcagcaaaataatcacttcacacagattgttgaagaaaaaagaacaagcggtgaccctttaaatgttaacaattgtttctgatctgtaacatgatgagggggggcaagcctgacatttagggatggcgatcaaagtaggaatcgaactttcgaattcatctaactccactgggatctttatattccctcctatttctttatggttagcaattttcaggtagaaattttaattccccaagggagaaaactgaacctcactaggtttagcaagttacttttttctatcctaatagcaagtgcggagaattatccctacacaaacaagaagcaggcatccgttttatgagattttgaatttcacatcaacatgcaaaagacaggcggaaatgattgcccactgagagggaactcaccttccagaaaagcaaattcatccacagcttctattgcattatctgaaacacaaggaaaagagacacctgactaacttcagccatgctgacctcagtcagaaaacagcacaatctgcagtgaagggcatgaggctttgggcaaatgagggcatttataagatgcgtcccttgctgccttgagatccatatctactctaccagcaactcttatatatattagctgtctccctagaagagttaagaaaagcataggcaaataccattcaacgcgggggttgggggcctcctaaattacccctaaattatttattcgctttgctcttaaagttgtcagagaagaacgtggcaatagacgcagggcgcatgagaatacggtatacgaaatcttacccaggtgagggttcccagccagacaagagtcagaaatcaaatccccagttgctaggtgaaaaagaaatatctttttctggtgcaatttggcagaaggtatgaagggatccagtccgctacggcaaccccagacaccttcacacactgccccgccaccccaagcagacagcctctacaggtagggcttcctggcactgtggccaacagaaaccatcctggggagagacgctgtggcacctctcagatcagagtgacgtcttctcaacctgcacaaggggaaaccagcccagccctcccttgtctgtccccagacactgcagtgccactctacccaagtctctcctctgaagggttttcctttttccctgctgagcgcaacagtaggcatcttttgcaatggtctccacaaacagttcctgtgaagtaaaaaagcaaagttttagtaatgggttctaacacactgaggaggtgagggctccggtttgtgggtgggggcagaaagggagaagaaaggctcggggcaagaaaatgttctggaagctaagattgtcctggacttcatgaagatccattccgctaccctcttcccagtattctccctcattcactaaagactcctacaagttctgtacgaggccctggagatacaaattaaagtcactcactatccaggtcctcaacaagagggaggagtgttaacaaaactcgcacaggtccccggcccctttcctccgccttccgggtccacgcccacatctcaaaacccgggccacgccgccctaagccccgcccgcgggaggccccgaggccccgccccacactccacctcccccactcccgcatgccctcgcgctgcaggcgcaccgcggctcgtgccagaatgaagatggcttcctgtcccgctagcgtcacgtcgggatctgccttcaccaaggccttcactcgcgccagaggcaacctcgagagacgagccccaggcacactcgttggggcctggggctgcgaggccgctgcctccccagcaggtccctcctcctctcggggcgtcccgcttcctgccgccgccgccgccgccatcccggccttgagcgtgctgcgcgcggccgccgactgtgcgcgcgcatgcggcgcaggccctttcccgcgcgggctggaggccacaccctgtgtaggcgcgcggctccgcccctacgcggcagtgcgctgccaggaaaccgggtgggcgggggtcgggctccggctcttcccacgcgcctagccacccgtgggctgtcgtgcacttggttgacgctaccggcgaccctctggccccgacgggcctgtggagcccaggcacctcccattggtgcctgtgcctggctggtgaggggagaaatctagaccaggctcgcaagagagtctccgtcaaaacagagtgtgcatattccaaggctaacgagggcacgtgtccgagggaggcccggccctggagggcccagcatcgtggaagagggtgccaaggaggcagcgaaatctggaccaaattcaaggataaccagttatagatgctcttgaaggaggggtagggcttttggcaggcagaaatgaagaaattcagcccagccagaggaaacaagaaaaagtcatggaggctagaaaagatgaaattgtggtggtgaggcatccacgtttgttcaaaaagaggttgcatcacagctttggttctcaaatttgacctcaagatccctttacggtcttaaagattgttaaagagcccagggagcttttgtttctgtcagttatatcaatacttactatattagaattaaagttttaaaatattgatttaaaattactaatgcgttaccagctaacaaacaacatttttatgacaagtaattttttttaaatctagtaagaaaagtctctaatgtctgatttcatgtgagaactggattctctagctgcttctgttgctaacgttagcacttctcaggtagctcttaaaaaactactacatcttgagagaatgtgaatgaaaaaggcaacctcatagtagtattaagaaaataattttggcctcatggactcctgaaaagggtctccagaaaattcccacccccatgaatccccacaccacacttggaggtctgatagcgtagaggaacagttaatatttaaaataggtttaatctaagtcaatcataataatagtgaacacctttaaacatttactatgtgcatgattcaaagtgttttagatttatgtaaatcataacttctgtaattttcacaataccctattgaggtaaatattataaccttctttttcaaaccttatttgaaaaaattgaggtgcagagtggttactgagtcgcatacacagggcagaatgtggtgaagccaagatgaagctgaattaaacacatctgaaatcactcagttccaaaattatgtagtaaactctgactggtgtaggagtggaaaggtgtgaaacctttctttacccattttaagggtcacagctgacactcctataacacacacaaaaagcctaacaagtctaatcaaagttttacatgacatgagagtccaaaaatgcagaccatgagacctagaggaaactatttttatgcttaggttatatgaagaagggatcgctgtgtagaaatgtgattagaggcctggtacggtgggtcacacttgtaatcccaacactttgggaagccaaggcaggaggaccgcctgagcccaggagtttgagaccagcctgggcaacagatggagaccccatttctacacacacacacacacacacacacacacacacacacacacacacaaattagctgggtattgtgatcctatagtcctagctacttgggaggctgaggtgggagagttgcttgagcccaggagttcaaggttacagtgagcaatgattgcaccactgcactccagcctgggcgacagagagagaccctgtgtcttaaaaagaaaaagaaatgggattggacaaaaagggaatgataatagtctaatggtaatagactgaatggggaaacccagcaaggcctgtctgttcatattcttcttggcctccctgtgtagcattccttctggtattagg

SEQ ID NO: 3538 - DNA, 4001 bp, Homo sapiens
taattttgacagcagtgtggagcatgcacttgagaggtgtaaggggagggtggaaggaaaagacaattcaaatatgagataagggccagaggcaacacagtagcaattgggagaaaaaggagactaagaacaaatagacatgtaggtgacacaaagtaagagcccaataaataagttatatgtcaggagagatctagaataattttccagtttctagtgactattttgcactacgtacaccattttggaggggtaagtaacccctccctttgaagagggatgccgtgttgagtttttttttttttttttttgagacagagtattgctctgtcgccaggctggagtgcagtggcacaatctcggctcactgcaacctccgcctcctgggttcaagcgattctcctgcctcagcctcccgagtaactgggactacaggtgcccgccaccacgcccagctaatttttgtatttttagtagagacggggtttcaccatgttggccagggatggtctcgatctcccgacctcgtgatccgccggcctcggcctcccaaagtgctgggattacaggcgtgagccaccgtgcccggccatgttgagtttctgatatgcatttaggccatgttgagtttttgatatgcatttaagatctctgtgtgaaattcaattaaagatgtacagacagctgaacaaatgggtctgaaaatcagggaaataaatttgcgttggggatttaaatttgagactataaatcatgaaagtggtgagattgtctagggacaatatttaccatgaagaaaacattactagaatagaatcttgaagaacatcaacatttaaggagtaaaatgaggtacagaccttgctcaccaatgtgtcattaacgcctagcttggtgcctggaaaaaactggatgctcaataaatgtttgtgaggttatagatcgatagaggaagagagggaggtagaagtatttgtcataaaaataggagaacttgaagacaaataaggttctggaagaaaggaaagtttcaagagagtgcattggagaatgtcaaatgctaccttgatcaaaatgaagactaaagagagttcccttgatttaacaaccagaccgagaatatagcagggtcctagcaaagagaagttaacgcctgaactgacacttgaaggacaatcattttacaaacaagaggaaacttactacgtgcctaattaaccatgtcaggtacactatggttaattccacaaatgcttgttagttaacgaggagactggcagatgataacgctgcagaccaggaccctccccacccttatattcccctacctcagcgcaaactctttcccccagcaccaccggcctcttatccaggcagtccacgccggcccaggaacgttcccagaactacggctcccagcaggacaagcgccagacaagcctggactcaagaggatagactgggcaaaagcgcttctgggaatcgtagtttagggcgccgacctcaagatccaggctgggcacgctacccgaccaactccttacttgagctcttcagccgaatacatcccgaaggaaatgccctgcagccgccgccagggcatgttcttggagatcaacatcctccaggtccgttttgaattccgacaccccaagagacgttccactcaccacctgactattcttaattcaacctcaagcccggagtcaccacgcgattcaacgtgcgcttgcgcgcggaagcggtcgcaggaacgacatttacgtggatgagatcacttctacatggggggggaacaaatagttgtacgactctctgctcgctcttttgttttgaaaacaatcaaagatatataagacatcaaaataatcatttaggaaaattcctccgaggcaaatcgggtgtatagagcttttagcttccgtgacgaagtctttcaaaccatgagcttgcaacctcccattttatgattgctttcgtcttcttccgcttcagccaatagcggagctgttccctgctccccgcccactgcgccccaccttcctgaaggtcgaggcacgctttcccaacatgctctgcagagaaatcaaagatggcggttgtatctgctgttcgctggctgggcctccgcagcaggcttggccagccgctgacgggtcggcgggcgggtttgtgtgaacaggcacgcagctgcaggtaagagacgcttagggtatccgcgaagaagaccgcggagtcaccttagtcctatgtttcccagctggctgtggaagtaggcacgatgaaatggtttgctcatgcgcgcccttaacggtcgcgtgcccttaagaccaggtacgcggaggtggccctttgaaataggattcgcaacgcatttattcattagagaaatacttattggttgcttgcaatattctgtagttaacaccatccgcaaagctaggaccctgctctcatgaagcttgcgttccagtgagtgtggctattagcaacactaccccaaattaaaaattatccgccattactcattttaacccaatcaggaggagcgaggagaacgtacaagatcttcccaaataaaaggcagtctctggtcgccaccgtggggactttggctaaagaagttatcaggttttcgtaaaagcagaaaagtctaaaagatctgactatgcccttttgatctgtgatagttatagcttggaacatgtatgacctatctgtgtaatttttttttcactcagtacaaacagtggcattgtgggaatatgagaggcagtaatttgtagtgaaaacttgctaaaagcctaattttaggtttagtgtttgccattcacttaattggatgataatagacagatttcctcatctgcagactagagttggtaataaccatccgaaaagtttgtgaggtataagtggggtatgtaatttacaatatgtttttatatgtactctcccttagttcccctcaagaaagagaaaccactccatctgatactgcagaaacctttgtgctgccattcaatgccagtcctccgtttcctggtagccatcgttagcatttttctactcattttctttgcctgaagcagaatctcttcctcagcatccgttctcaaaataactgtgatctctgttttaaggtcatgagaaacaaatagtgtgacttgaaagagttgatctcagaaacttgaaagagttgatctctttctgaaatgtccttaacgtagaggggtattcttgttttaaatgatacctgaaaccagatactactggaggaagtatctgtctgtgcaatcacatcttgacaattttctgaatgttactgatgccatttagtaaggggaaacacaagataatactaaccgtcacattatctgtggtgtgttgactgtgtttttagtgtgatcagaacacttaaacagaacacttaaaaactcagtcatgggccaatgattctatattttggtttaaaaaggatttcatattgaacctctgaaaatagaaaatatcagcaattccaagtctaaatcaggccttatgtatttggtacattcttgattgttgaaagaagtggaatgagaagccatgggtcatcttccctatgttgtaattgctttaagtgaggtagtcctttctgatcagggcagtatctgtatagaagcaagagctcactgaattgttcttttaaacatcatagtgttttgggttcctgaagttgaaagttcttcatttcaaaccagattgttcaagtgctattaaaaactttcctccctctctgccatttatgtaatgagattgcttgcttccaaaacttttgtctagccgggcatggtggcatatgcctgtagtcctagttactcaggaggctgaagcaggagggtcacttgagcccaggagttcaagggttcagtgagctataattgcactacttcactaaaggctaggcaatggagcaagaccctgtctctaaaaaaaaaaaaaaaaaagttttgacagtc

SEQ ID NO: 3539 - DNA, 4001 bp, Homo sapiens
gatggggtttcactatgttatccaagctggtcttgaaatcctgggctcaagtcatccttctgccttggcctcccaaagtcctggattacaggtgtgagccactgcacccagcccgattaacttttaattaggaattttttctcacagacatgatactgtaacaatccaggcacaatacaaataacccccacccctctagtctttctaaacaataaatcttaatggctcccatattatttgccgaatagagttcaagaatcagactggcaatcaaagctctccacattatctgtatccctatctcccacaacacaaatcttacccaacaaaaccacaggtagggtccccgaagcatgtgactctgctctactcttcccctggacgaaatgcacgtttctcacttcttgaactcatctaatcctgccctttctcaaactcctggattagttgcgccgcccataggctcccgcagtagcccacacaatcccttggcagagcagttctcaagaacattggcatgcactgctttcattatcttcaccccttcaacccccaaacacgacagggagcacttaaatgcatgaactgtctcgtacacgggactgcctcctccacatcctctgagcctagtgcctggagacactggggatgcttactaaacgaagctttcccccaccatactcacttgaattctgctaccattactctacgctaataatgcaattacacttttcgattcaatcttgctttcatgactcatttataccttcctcggcacctgcttaattcataacaaatgacgagtagtttctctctttaaagctctaagagaaggaaactgaaggataaccttgaacattacactgtacctacaaatacgttcgggatctttcgaggtacgttttggagaggtaagtcttcaagtgatataaagccgtgtgcattgtgaagcacatccccagataagccacttcctcactctcacagcaccccgaaactgtccaaactacggttcacaatcacttttcactccagaatcacgaatacatctcttaagacgcctcgactccaagtctcacgaaggccagtaccgcgtcctgtttaacatgttgtgctctcccgcttacccaccaagcctgtcaggatcaaggagcacatgcatctggggtcatactgtgacctcccagccacctccctgggattggcctcgccgcggcaagggcgccggcggacgccgcgctcacctgcaccgcgaggccgagaccctcgtgcacagcgtagttgaaggactccacgtgcgcccgcgtcagctcctgcaacgctgccttttgctgttcccgcgggattccataagaggggtcagtcaagtgctttaggctaggcccgctgggcaggttccgccaccggctgccaggatccatgtggccacctgcacaccggacgccagtctctcggtacacgccggacgccagtctctcggtacacgccggaagtagtggccgcagtcccgtttccgcagcctgctgggaaatgtagttccctctcgttccacccgccctaggccctgcggtttcggtttctcggggtcaacgtagaaccaaaaacgtcgagtgaacgggccgattaaggccgtgtccagccagagcgtggcgggccctccctttctcccatattccgccccactcatctccccgctcgcgaaagatgccgcaggtggaaacccgctccccgcccagttgagcatgtgacctctttggctctcattggctcagtcaattaggatcggaggagagcggtcttctcaggctctcttctgtttcccttcacctgttcccagtcccacgctgatgccgaccctggggagtcatccggccaaagtcgttgcttcaacgaaaaagcggatgccgggccccgggctgactctctacccaactcctaactcgcgaggctcacccctgggaagccaaggagtggtcgggccccgctaacctcgtcgcatcttccggactggaggcctgggggaggcctggggaaggaggtgggagaggagtcgggcggtcccggatggaggggatggggcagcggggcgtccaactggatttacagcctgaatttcttttgcgttcctgtgagccccttacctccccagaatactgattaatcagggaatgcctgctggtttttcaactttattgtgtttgtgtttaacagctatattgcgttataactggcatacaataaaccacacatttaaagtgtacgcgttaagttttgacctatgtatacaaccatgcagccatcaccacaattaaaacaatgaattaaaccaccactacccagtatcctcctgcccctgatagtccctccttactgtcaacttcccctttcctagttcagctggtacttttcattcctatatcactttttataaaaaattcgagccgggagtctgttgcacaggctggtcttgaacttccggcctctagtgatcctctcgccttgcctccctaaatgctgggattacaggcatgagccaccgcgcgcgcccggccaactgagtagttgtagttctttatatagcctatactagtccttgtcagatccatgatttgcaaatatttttctcccattctgtgggtttttactttcttgctggtgtcctttgaagcaaaacgttttaattttgaagtgtagtttttttcttttgttgcctgtctttttatatcatatctaagacatcattgtgtaatccaaggtcatgaggatttaaaaaaaaatttatgggtacataattagcatatttatgaggtatatgagatgttttcatataggcatacgatgtaatcatcacaggagggtagatggggtttccatcacctcaagcattcatcatttctgtcatgaacattccaattgtacttcctcagttatttttgaaggtacaacaaattattgctgactgcagtcaccctgttgtgctatcaaatactagatatttttcaatcatggggattttcacctatattttctactaagagttttgtagtttcaactcttacatttaagtctttgactcattctgagctaatttttgtatatggtgtgagaaaggcatatcactttattcctttgcatgtggatatccagttgtcctaacaccatttgttaaaaagactattctttccctcatcaaattgtcttggcctccttgtcgaaaatcagttcactatagatgcaagggtttatttttgactctcagttctattctcttgatctgtatgtctatctacatttatctgtatatctgtctacaaactacacagatttgattaatacagctttgtaataaattttgaaatcaggaagtgcacatcctccaactttgttcttctttctccagatttatttgatcctttgtatttcaatatggattttagcgtcagcttagcttgtcaatttctttctcttttttttttttttttgttttttgtttttttgagacagagttttgctcttgttgctgaggatggagtgcagtggcatgatcttggctcactgcaacctctacctcctgcctcagcctcccaaatagctgagattacaggcatgcaccaccatgcctggctaattttgtatttttaatagagacagggttttaccatgttggccaagctggtcttgaattcctgacctcaagtaatccatctgccttggccgcccaaagtgctgggattacaggtgtgagccaccacacccggcccagcttgtcaatttctgcaaagaaggctgagattcttgatcaggattgtgttcaattggtagatcaatttggggcctattttcatcctaacaataattatctcccaatccataaacatgggatgtctttccatttatttaggtgttctttaatttctttcagagatgttttgtagtatttggtgtagaaatgaacttttgttaaatttattcctaagtatttcattctttttggtgttgat

SEQ ID NO: 3540 - DNA, 4001 bp, Homo sapiens
gctcattgcagcctcaaattcctgggttcaacttatcctcccacctcagcctcccgagtagctgggaccagctacttgggtgcgcaccaccatgccccactaatttttaaatttttgtggagatggggtttcactatgttatccaagctggtcttgaaatcctgggctcaagtcatccttctgccttggcctcccaaagtcctggattacaggtgtgagccactgcacccagcccgattaacttttaattaggaattttttctcacagacatgatactgtaacaatccaggcacaatacaaataacccccacccctctagtctttctaaacaataaatcttaatggctcccatattatttgccgaatagagttcaagaatcagactggcaatcaaagctctccacattatctgtatccctatctcccacaacacaaatcttacccaacaaaaccacaggtagggtccccgaagcatgtgactctgctctactcttcccctggacgaaatgcacgtttctcacttcttgaactcatctaatcctgccctttctcaaactcctggattagttgcgccgcccataggctcccgcagtagcccacacaatcccttggcagagcagttctcaagaacattggcatgcactgctttcattatcttcaccccttcaacccccaaacacgacagggagcacttaaatgcatgaactgtctcgtacacgggactgcctcctccacatcctctgagcctagtgcctggagacactggggatgcttactaaacgaagctttcccccaccatactcacttgaattctgctaccattactctacgctaataatgcaattacacttttcgattcaatcttgctttcatgactcatttataccttcctcggcacctgcttaattcataacaaatgacgagtagtttctctctttaaagctctaagagaaggaaactgaaggataaccttgaacattacactgtacctacaaatacgttcgggatctttcgaggtacgttttggagaggtaagtcttcaagtgatataaagccgtgtgcattgtgaagcacatccccagataagccacttcctcactctcacagcaccccgaaactgtccaaactacggttcacaatcacttttcactccagaatcacgaatacatctcttaagacgcctcgactccaagtctcacgaaggccagtaccgcgtcctgtttaacatgttgtgctctcccgcttacccaccaagcctgtcaggatcaaggagcacatgcatctggggtcatactgtgacctcccagccacctccctgggattggcctcgccgcggcaagggcgccggcggacgccgcgctcacctgcaccgcgaggccgagaccctcgtgcacagcgtagttgaaggactccacgtgcgcccgcgtcagctcctgcaacgctgccttttgctgttcccgcgggattccataagaggggtcagtcaagtgctttaggctaggcccgctgggcaggttccgccaccggctgccaggatccatgtggccacctgcacaccggacgccagtctctcggtacacgccggacgccagtctctcggtacacgccggaagtagtggccgcagtcccgtttccgcagcctgctgggaaatgtagttccctctcgttccacccgccctaggccctgcggtttcggtttctcggggtcaacgtagaaccaaaaacgtcgagtgaacgggccgattaaggccgtgtccagccagagcgtggcgggccctccctttctcccatattccgccccactcatctccccgctcgcgaaagatgccgcaggtggaaacccgctccccgcccagttgagcatgtgacctctttggctctcattggctcagtcaattaggatcggaggagagcggtcttctcaggctctcttctgtttcccttcacctgttcccagtcccacgctgatgccgaccctggggagtcatccggccaaagtcgttgcttcaacgaaaaagcggatgccgggccccgggctgactctctacccaactcctaactcgcgaggctcacccctgggaagccaaggagtggtcgggccccgctaacctcgtcgcatcttccggactggaggcctgggggaggcctggggaaggaggtgggagaggagtcgggcggtcccggatggaggggatggggcagcggggcgtccaactggatttacagcctgaatttcttttgcgttcctgtgagccccttacctccccagaatactgattaatcagggaatgcctgctggtttttcaactttattgtgtttgtgtttaacagctatattgcgttataactggcatacaataaaccacacatttaaagtgtacgcgttaagttttgacctatgtatacaaccatgcagccatcaccacaattaaaacaatgaattaaaccaccactacccagtatcctcctgcccctgatagtccctccttactgtcaacttcccctttcctagttcagctggtacttttcattcctatatcactttttataaaaaattcgagccgggagtctgttgcacaggctggtcttgaacttccggcctctagtgatcctctcgccttgcctccctaaatgctgggattacaggcatgagccaccgcgcgcgcccggccaactgagtagttgtagttctttatatagcctatactagtccttgtcagatccatgatttgcaaatatttttctcccattctgtgggtttttactttcttgctggtgtcctttgaagcaaaacgttttaattttgaagtgtagtttttttcttttgttgcctgtctttttatatcatatctaagacatcattgtgtaatccaaggtcatgaggatttaaaaaaaaatttatgggtacataattagcatatttatgaggtatatgagatgttttcatataggcatacgatgtaatcatcacaggagggtagatggggtttccatcacctcaagcattcatcatttctgtcatgaacattccaattgtacttcctcagttatttttgaaggtacaacaaattattgctgactgcagtcaccctgttgtgctatcaaatactagatatttttcaatcatggggattttcacctatattttctactaagagttttgtagtttcaactcttacatttaagtctttgactcattctgagctaatttttgtatatggtgtgagaaaggcatatcactttattcctttgcatgtggatatccagttgtcctaacaccatttgttaaaaagactattctttccctcatcaaattgtcttggcctccttgtcgaaaatcagttcactatagatgcaagggtttatttttgactctcagttctattctcttgatctgtatgtctatctacatttatctgtatatctgtctacaaactacacagatttgattaatacagctttgtaataaattttgaaatcaggaagtgcacatcctccaactttgttcttctttctccagatttatttgatcctttgtatttcaatatggattttagcgtcagcttagcttgtcaatttctttctcttttttttttttttttgttttttgtttttttgagacagagttttgctcttgttgctgaggatggagtgcagtggcatgatcttggctcactgcaacctctacctcctgcctcagcctcccaaatagctgagattacaggcatgcaccaccatgcctggctaattttgtatttttaatagagacagggttttaccatgttggccaagctggtcttgaattcctgacctcaagtaatccatctgccttggccgcccaaagtgctgggattacaggtgtgagccaccacacccggcccagcttgtcaatttctgcaaagaaggctgagattcttgatcaggattgtgttcaattggtagatcaatttggggcctattttcatcctaacaataattatctcccaatccataaacatgg

SEQ ID NO: 3541 - DNA, 4001 bp, Homo sapiens
cacttgtagtcccaagtattccagaggctgaagtgaggtgagaggataacctgagcctagggaaggttgaggctgcagtgagctgtgatcacaccactgcactccaacctaggtagcagaatgagatcccgtctcaaaaaaaaaaaaaaaaaaaggcagggtgaggtggctcacacctgtaatctcagcactgggaggccaaggtgggtggatcacttgaggtcaggagttcgagaccagcctggccaacatggtgaaacaccgtccctactaaaaacacaaaaattagctgggcatggtggcaggcgcctgtagtcccagctacttgggaggctgaggcaggatggcttgaaactaggaggggtaggttgcagtgagccgagatcacatcactgcactccagcctgggtgacagagtgaaaccctatctcaaaataaaattaaaaaaaaaattaaaaaaaataaattaacaactaaaatagtaagttctaacgtattaaaccataaaatacaaaaaacacataataaacattttttcatttttatattttttatttcttagagggtagtatttccgttttaattttaaatttattattttgccaggcaatggctcacatcagtaatcccagcactctgggaggccgagctgggtggatcacctgaggtcacgagttcgagaacaggctggccaacatggtgaaaccccagctctactgaaaatacaaaaattagccgggtgtggtggtgggcacctgtaatcccagctactcgggaggctgaggcaggataatcacttgagcccaggagacggaggttgcagtgagccgagttcgtaccactgcaccccagcctgggcaacagagtgagactctgtctctaaataagtaaatgaatgaatgaataaaagaataagataggtcaggtgccgtgattaacttaagcccaggagtttgagaccagcctgggcgacatagtgagaccctgtctttacgaaaaaaatttttttaatgggccaggtatgggggcgtgcatctgtggtctcagctacttgggaggctgaggtgggaggatagcttgagcggttgagaggttgaggttgcagtgggctctgatcatgccactatactccagcctcaacaagagggcgagaccctatctcaatcaataaatcaataaatcaataaagtgtaagacagctgtatacattttcaagtttttgagctgaagacctcatccctaggaataccctccccaaccacttaaagtgcgtgcgtgagaaaactcaaggctgccaaaataatttgttccagccaacagctgaagataggactctgtctctctgcctctgtgggagggtaggggcctaacttcgacaggtgcgccagtcaacaaaccaagctgcgttcacacggaccaatcctcctcttcccgcttttttacatttctcacttccccgactcccccgagctcccgctcaccacatccttattccctaattctccgttaaaacgcccagaggttctgtactaatcgaagttgagttcggttcacgctgggctcttttccctagtgcaacagtatattactgtttaaaaatctgtccttaccacctgagtgtccggctttgtttatctttgacacaggtccccggaacttcgcagtttatcacataaaataacccagttgcccaggcggtccctcccaaggccatggtccctcccaaggccatgttccctccccagccccacgccgcgctggggcttgcccaagccgccgctgaggcagggccttgggcgaagcgcgcataacgccaggcctgcggcgaccacgcgaagtggcgcgggggagtctggcagccccgagcccaacctttaggaaagatgagctgtgaggcgtcctcctctacgtcgccagcccgcggatcgctgccacccgccgccatcgccgcgccgcgccgcgcgccaccaccagcgccgccggaagcagaagcgcggagcaacggccgcggaaggggcgtggtctcgggaggggccccgaggggtgggcggggccgggagtgcgagccggacggggcgcagcgaggggaccggttggtgaggtcctggaggctccccgccaccgaggggcgccctgcactccctctcttctcccatgctcctcgccgcgcagacgtcctggggcaggtccctacgcctttctggacggaggaggtcagatgagatgcaggaacgcctgctgatggagagcagggcagccggctccgaaagtaccgggtccaatttccttcaccgacttaaacttctaaaattttattgatttgtggtggattatctgatacttctgagtacgcggacaatgatattcagaggcttttaccacacgtctgttggaacatttgggtgatgcgtagaaaattaagcaaatgacggccgggcgcagtggctcacgcctgtaatcccagcactttgggaggccgaggcgaggggatcacctgaggtcaggagtttgaaaccagcctgggcaacatagtgaaaccctatctctactaaaaatacaaaaattagccgggcatggtggtgggcgcttgtgatcccagctactggggaggctgaggcaggagaatcgcttgaacccgggaggcggaagttgcagggagctgagatcgcgccactgcacaccagcctggacgacagagtaagactccgtctcaaaaaatatattaaaaaaaaaaaaaaagcaaataaaaaatgatgctgttttcgacactggagaaaacaaaaggttgtacaataaggtaaataatcatagcttattagtcaacaatatcttagctcattagtcaacaatgtttagatggtcatattgtaaactctgttgatttaataaaaaatgaattgtgccgggcacggtggctcacgcctgtaatcccagcactttgggaggccgaggctggaggatcgctttagctccggagttgaagaccagcctagacaacatagtgagacctcgtctctaaaaaatacaaaaattagccgggcgttgtggcgcgtgcctgtagtcacagggatcggggaggccgaggcgggtggatcgcttgagggatgcagtgaactatgattgcctcactgcactccagcctgggcaacagagaccctgccaaaaaaaaaaaaaaggcaaagtccaggcgcgggggctcacgcctgtaatcccagtactttgggaggccggtgggggtggggggggcagatcacctgaggtcaggagttcgaaagcagcctggccaacatggtgaaatcacgtctctacagaaaaaaaaaaaaaaaaaaaaagccggggcgtggtggcgggcgcctttaatcccagctactcgggaggctgaggcggaggttgcagtgagccgagatcgcgccactgcattccagcctgggcgacagcgacagagtgagactctgtctcaaataataatttttaaaaagacttaaaaaattaaaaagtaaaaattttaaaactaaagaaaaagaaaacctttagaaggcagtcctgggaatcctgtctggcctgtgcagcctgatctcctgcgagggctcgtccacagcgtcttgctgtcttgcagtgccggcaatgtggtctcccaccacctgagaagttccctcctccagggcatgctctttgcttcagcactgcttctctaaggaacctgcccagacctgaagggctggccacgccccctttcacgtgctcagagaagctgaaggttccggagggtttgatgcttgccggtgttcccttgtacacccagcactgagtgacaggccagataaccacagctgcccagccactgcaccatgtgctggggtctgggcaaaacatttactatttttactttttacctatgacttctctaaggtcaggttactttggagattcacagtcctgtcacaaagtaggaaatgccttataaatggcaggaccaagatttgcgcttaggcctgtgggac

SEQ ID NO: 3542 - DNA, 4001 bp, Homo sapiens
gtacaatgtggtaacatattcactcccaccctctcagagcttatattctgttgctaaactggttagatggctgctattgctaaaacttcagattcttccctgaaagatggtcttgtgtttgtattgtatattttgcttatgtgtatgtgtatttgcttatgtgtattttcagttctctacaatgaacaaatagtaccttttgtgtcatttttaaagcaacaaattattggggaaatatcaaatgttgtgcttttttaagtagggaaagtattataatccaaaaatggaaagctctggaaaaatagaaacttgaaatttgctcatcctgagattaactttatagtagaactacacttattagaacttcataggtgtgaggggctctctatgagctcaacaaatcattttgcttgttactgtaaaactgcacgctggccatgaccttttgtaaagattagaggagcacaggggccgagttttgtccttacaccatgacatacatgcatcgagtcctataacaaaagcatcaaaggaacagtaagtcattaaagtggccataatctgtgcagagtttataaactgacacacacacaaaaaaaatccacacacacttttattttccttggctccttccagccattctgtaagaaccctccctgccccatttaaacatgaagaatttggggaatccaaatgccaagtggactgtctctccttcgctggaaacgccccttacctgagccttgatcattccaaatggctgcccgtgccctcaacccaggatctgcgccataaaccgtccaccccggttctgttgagggcatccgaaactagacagtgcgtttcaggatctaggacagctcccgccccggccacctgtttttaaccccagctaggtcttggagagaagagacccaactattctgcattgtaattgacccagttatcatgtaattatcatagcgcggccacctcgggtgcgctaaggtgggcaaggaaacaaggattcaggggtctgaatccgaaaaaatccggaaggcagggcgttcattatgacttttatccttttctctgctgccccgtttccaacattaatttgcgatagcgtgtatggaatttgactttcaagatgtgacacctatcctggaaactgggagcaagagatactaaaagaccgggctggccgggggcggtggctcgcgcctgtaatgccagaactttggggggccaaggcgggcggatcacctgttgtcgggagtttgagaccagcctgaccaacatggagaaactccgtctctactaaaaatacaaaaattagccgggcgtggtggcgcatgcctgtaatcccagctactcgggaggctgaagcaggagaatcgcttgaacccgggaggcgaaggttgcggtgagcagagatcacccctttgctctccagcatgggcaacaagagcgaaactccgtctcaaaaaaaaaaaaaaagaccgggttgtcccaagacctcctagcaagctctcggagcctccggaccgccgcgagcccctgggggagaggaggccgccggctccctggagacagcgcctgcagcttcgcggccgtccgcccaggggccggacgtgggccctccagctcagctactggcggcttctcatgccgcagtcggcgcagaaagtttgtcgagaactcgggaccgcggagagccagaggcgcccaggtccgccttcggagccggagccggccgactgcatcgcgaggacggggacaggggatcccggggaaagagcacgggtcccccacgctgcgcccttacctgtctcgggaggctgctctctgagggcggggacgctcggcggcctctctcggtcgcggctcttcttcccctccttcgccgccgcttggtcccgcgctcctctgtccttatatacttgccgagctctcctggtgggcgcgggactttgaccttcccggcagcacaaggagcagctccccgggccaggggaaggggggccgcggggcgtgggaggggggcttccagacgggggacgagcgcggggagacgcgctggaaaggggctggaattagcactgtcctgccgaaggcgcacctggccgctcgccctcaggaagaacttaattatggatggcgttgggtctccgcttagaacgggcgggaggcttagcacccccgtgtggggcaggccgggcagcctctgaggtcgttgaggcgagggtgaagttacctgcgtgcgtgctggggctggcatctgcctggttcgcatttggcggtaaatatcaccgtctgcacacggggaggcctccgatttccccattgtttggaaactgtgatgtggaagtcgtggggaatcatattctctctgttccactttggggaggggaggagggagcagaagtcaggagccgtcttgtgggtgtgaaggtgagttgcactgctcccctggggcctgctctccaagggcctggtttaggggaggctcccttccgtgtcccaagcctcaaggaaaaagtcctgttaacctaaaccattaaatggggagagggtgatgctgtgaagagcagctgaagtgctttccctgtggcctctgatccctccctttgccatgagctggcagggtggtctggggactcagacaattttcaacatcccccttggccctggagttctggcttggctttagttccaaatatcagaccagagagaagagtacagcactcaaaccaagctaagagactctaccttaacctggagtaaataaacaaaaccaaattgtgcgatgtggtgggtgtgggagggagtattgggactaaactggacttcaaatcaagacacttgcttaatctgccaaatgccagaactttcctgattccccatgagatgctcttttggactccaggactctcttgtggattcagcttttctggtgacattggctttacattcagcaatcctttccctttggaccacaagagagatccaagctccgtcacagtagacaaggtgcttcatcacccggctttggcccctttccagggccatttcccagttctccaccttgcatcctggcacttcagcatccacaacattcacactgctagaacatggctttcttgggtctccattgtccaagctgttcccccaactagaacatccttcctctctccagccatccaggagcttgactcacatcaagatgtagcccatccatcagcccctgttctctgaagccctctttggccacttttcctaccaggggcatgaggcatgacctcctctgccttccacagaagtccatccccatcttgtcagtgcaagtggcttgcactaattcacttctgtccccatttttttaatcttccatccaccccacgaccaccatcaggtttgtaaactctttcaagcagatggtggttttgccttattttactttgtgttatttttgtaacttcaggaggctgctggtggcagcagataaaacaaaccaggaaaaatccaaatggacccaacttctttaactgggttccttctttcttttcttctctctctctctcattctgtttgtttgtttttgaattagggtctcactctgttgcccaggctggaatgcagcagtgtgaacactgctcactgcagcctccacctcctgggctcaagtgatcctcatgcttcagcctcctgagtacctggaaccacagatgcatgccaccatgcccagctaattttgggttttggttttttgttttgtttttgtttttgtttttggtagagacagggtttcactatgttgcctaggctggtctcaagctcctgggctcaagtaatccacatcagtatcctgaagtgctgggattacaggtgttagccaccacacccagcccagtttcttaatttaatgcagcagaacctgctttggcctccatgaactgaaaggccattgaactgcatttagaatcactgggtaggcggggcacagtggctcacgcctgtaa

SEQ ID NO: 3543 - DNA, 4001 bp, Homo sapiens
ggcgcctgtaatcccagctactcagtaggctgaagcagagaattgcttgaacctaggaggcagaggttgcagtgagccgagatcgcactactgcactccagccggggcagcagagtcagactccatccaaaaaaaagtatatatataaatatatatctgcatatataaataggcatttgtatgtttctcttctggtatgtttctctttttgtatatttaaaatttttaatctatactcttatttttgtgacataaaaatctagctagttttctccaaacatgaattatgaacaatccatctttttcaaataataaaaaacaccaccattatcaagcgctaaattcttaacatatatttgggtatttctaaatttcctattctgttgtattcattgatgtcttttcagctgttagtaaacaatttgtggaaataaataacatgcacattttgatatctggaaaagcagactttttccattctgttacaaaaaattaatttatcacaataataaaagacagcatgtgtaatttaaaaacgctaaaactttgctatttttatttggcttaggtaaaagtgataaatagaaaaagctcccatcttttttttttttttttgaaagggagtctcgctctgtcgcccaggctggagtgcggtggcactatctctgctcactgcaagctccacctcccgggttcacgccattctcctgcctcagcctcctgagtagctgggactacaggcgtctacgaccgcacccagctaattttttttatattttttagtagagacggggtttcaccgtgttagccaggatggtctcgatctcctgacctcgtgatccgcccgcctcccaaagtgctgggattacaggcgtgagccaccgcgcccagccaaaaagctcacatcttaagaaaattcaatcttcctgttcaagcacaggaaccatcttcccatttcagtttccttctaaggttcctcagtaaagaacatatttacatactgtacattgatataaaatccatactggattttatttgaagaatatttagccctgaagttgatgtgttatggggctttgttcttagttctcaatatacacttttctataatgtatagaacattgttttaaaatctgtagattaaaaataatctgctgcattgacttaattaattttgcaagttaaatcactttaaaacagtctattagtgttctatgagggaaattatgattggaaatcagctaaagttttgtttttgtgttgctgttcataaagggccctgtaccctgacctctctgaggtttccacatccagggtggtgtgaggcctgcggaggcgagaaagccaggtccccctcctcccccgccaggagggtatgtccccatcatccccccacgtcccacctcctcccagcccaggcctggttacctcttttgcttgtccttcttgttcacgtcagtgtccctgagcatgacgatgagatcctttctggggactttaccccaccaggcagctctgtggagcttgtccagatcttctccacggacgtggtacctgggctccatgaaggcgctgtcatcgtagtctccccaagcgcccaccttgctcttgccgctccccctgcagcaggggaagcagtggcagcaccacttccccatcttgttcctgagtgtcttcatagcagagtcgtcgtggtctccagaagcgcccacgttgctcttgccactccccctgcagcaggggaagcagtggtggcaccacttgcccatcttgctcctgagtgtcttcatagcagagtcgtcgtggtctccagaagtgcccacgttgctcttgccgctctccctgtagcaggggaagcaacggcagcaccacttgcccatcttgctcctgagaccaaatggcttcttcacagaagaggcagccggcatggaatcaacctcaaccaccatctgcttttaacagccaggagaagccagtagtagccaacagatcgcgtctaccaaccagtttcaccaactagcaggtaactccgggtttccaatctgtttgaagagaaatgtcaatcccagccaaaacctgccaaccccagcaggggattccagcccagcccaccccacccagggaaaacccacacccacccgaggaaagcccacgccccccctgggcgaccccacgcccaccccagaaagggccaaccccagaaagggccaacccccgcccccaagaaaacacccagcccacccaagggaatgccaaacccagcagagaaaaggtcaagcccagcaaaggaacacgagagagaaaacgtcaatccaagcaggaaacgtcaatccaagctaccaacgccaagccaagccaagaacgcaaagccaagccaagccgctacaggccagccaagccgttaaagcgcgtgcagcatgcgcgtgcaagccattacaggccagccaagccgttacgcgcgtgcggcgtgcgcgtgcaagccgttacaggccggccaaaccgttatgcgcgtgcggcgtgcgcgtgcaagccgttacaagccagcaagctgctgccgggcgtgcgcgtgcgcgtgcggcgtgcgcgtgcggcgtgcggcgtgcggcgtgcttatctcaggtggcgtcagggcacgtggcacagacactggccgatgcatgcaacgcgcctgcttaagtcttggcgccacgaatgtcactgacagccttgagttccggcaaacttcgtgggagtcagctgagctttcaagccactgagaagcctctggtgaaaaaaaaaaaagcctcttaaaggaggactggggctaagcgtctggaacttgaggatgctgacagcctcctttgaaaaaagcccccaggacactcctggcggtgctgttgtgcatggcagcagctgcagctgggagctcgggctgacggagctggctgcaaatggcctcaaaatcgcggagcacaagacgcccaccgagcccagggcctgcctgaggtgccttcaacacctgctcctctttgctccgcacccagaacacgaggccatcagcaagggggcatttggggccacaggattgcagccagctcctgccccggtgcagtgtatacagtgtatactgcacaggtgttgggtgcaccaaaatctcctgaatcacctctaaagaacttactcatataatcaaacaccaccttttccccaaaaccctaggaaataaaatgaagaactttttgtttatgcataccacatattttttaacttttttcacaggttcattgagatacaatttatatattatttaattcactcatttaaagtataaaattcagttttttaagtgtattaactagttaaacaatcaccacgattttagaacatttttatgctccttaaaagaaactttgcacccattagcaatctttccctattttccccattcttcctttaaacctctcccagccctaggcaatcatccatctacttcctaagaatttgcctattctggaaggatttgcctattctggacatttcatgtaagtggaatcataataatatagttacgtgtgacttactactttcatttatcatgttttcaatgttcatcctttttggagcatgtattaatatgtttttctttttcattgccaagtaatattttattttatggacagaccacattttattaatccactccaaaattcatggacatttctgttgtttcctactttttgttgctataaatacctttatgtgtaaggcatttgttttaatttatttttggtgtatacataggagtgaatttactgagtcatgtggtaattctgtatttaacctttgaagaacggcttcatttttctgcatgtggcttgccaattataccagcagcatatgttgaatagggtgtcctttcccattttcttgtttgctttgtcaaagattaggtagtctgatgcctccaggtttgttctttttgctaaagattgctttggtttttcagcatcttttgtggttcc

SEQ ID NO: 3544 - DNA, 4001 bp, Homo sapiens
gctgaggcaggaggatggtgtgaacccaggaagcagagcttgcagtgagccgagatcacaccacggcactccagcctgggcaaaagagcgagactctgtctcaaaaaaaaaaaaaaaaaaaaaaaaaaagccacacacacacacacacagtcaccccctaaattttgttaagaatgagacaatgctgccactcatgcctggctcagaaggaggccaccctccagagattgcaagagaagggggaggactcctttccctaagtgcacctccaccactgccaccgaggcccatggtacagcaccagcaggttcgtccccaccccaggtcggactgggccctgcagtgctcctactcccccttcccagtccccagactttctgccactaccaccactagcaccaatgccaatacaattgctgtcgccatcaatgcagcagcccaccctacaaggttcctaccaccttgcccccgcgggcaccctcctaccactcctgtcgagctgcagtctccgtggctgccatcagtcacacgaggcgagctgcagagtcacgccacatgcaggctccagcgtaccacaggtgattccttctcctcctcctccagcctggcttggagcagctagacgggcaaagccagaaaagcctagaatgggatgcagggagtggtaacgttagagcctcaccttgtcatgctggccactgggtggcagggaccagcttcagctaaggcactcagacccacccaccgaagtccagcctctctttctggcaaaaggtggccaggaactggggcgggtgtgagtgcctatgctgaaaccacccccatccaggtgcaactggccagaaattgctgggcccaccagggctgcactccttggggagcaggagtaggagaaactcagacccagccagccctccccactcaactgctggttcccattcctgacacctccacccacagtgccctgttcccacagtcccccgcgatgcccactaatccccacccggtagtcccaggtggtctccccaacacagagcatggggtgtgggcgggaggtgcaggccggagaaccgcagtgggtgtgggggccctgccctgctcaagattgcaccaggaggaactctggagtctggaaaagagaagagtcacccgaaggagcaaggagaccatggctgttgctgtccccaccacctctgcagccgaccaacaccactggcagtatagcccccatagcaaccctaacctgacccctgccgccggcagtgtagcccccggacagcacacccaccacaccctgtgccagttgcaggcagtgtaaccccaataccccccccaaccaccccctccacaggcagtgtagcacccgatagtgcccacaacctgacccagccacaggtgttgctgcacaagacaatgcctcaaaatcgccgcccccaccccaccacaggtagcgcagctcctgatagcgcaccctgagtaagggcagtgcagcacccgacaacactcctaaaccaccccccgctgccagcattgtagctccaaataaccaccaaaaccactccctgccccgggcagtgcagcagaaaatagtgcccctaacccctcccccgccaccggcagtacacgttagtgcacacaacctgcctcccccccatcacccccgccaccacgggcagtgtagccccggacagccagccaaaaccgcccccctccaccgccagcaatgcaacctcggagagtgcccccaaccagccccctgacacaggcagtgcagcctcgggtagtgagccccaataggacacccaacccctgcccccacaggcgggcagtacatccccggataactcacctacaccaggacatttctaccactctggccgagctgcagtgtcccacgtcaccaccaaacacagcaaggcgagccccaggggctcaggctccagcctccagcatgccgctcccttctactcgtcttcctgcctggcaggagaagctcccgctactggttgccctcctaccactgtcgacaccaccaactgcagtgagccagtgtccgaggctccagccagaaacaggtagcagccatgccggataccaaacgcccacacttaagagcctgaaatgacctgacgccacctccgcatgctttacctactgaggttacgcacatgtggttcccagactacatgttctgattggatgagagaaaaacctctaggcctactctgattggactttattttcatgctgtgattggttgtcttaagactggctctcatccaatcagaacatgataataaagtccaatccaagtaaccctggagggtttttctcatccaatcagaacatgcagtcaggaatcctcctgtatataatctcggtatatgactgctgctgaagggaagtcaggctcttccacgttcccgtattttcctgtggagctgctcagtgcccggcttagaggaccaggaatgggtaatcaccagccgtacgctggaggctggagccgctacaccgtggctcgcctcgctgcgactggtggtaaccgcgaccgagacggcagtgcggcggaagcggtaagaggaggaaaagagttttgggatagatggagggggtaaagagggtggttagtgccaaagggaaaagaggatagtgagcaggagagcgcgttgcaaaaaggcggtggggaaaagatagtgggaaaaaaagtttttgggtagatggagggagaaaaacggggtggggagcgggagggagggaaggttttgcagaaagatggtgggtaaaatgtttatgggtagatggaggaggaaaagagggtggcaagggaggaggaaagagagggtggtgggggggagaaacagcgttgagcagtagggagagaaggttttgtgaaaagacagtggggagaaaaggttttgggtagatagagggggaaaagagggtaacaggtgggggaagggaaaagggtagccagcgggaggaagacaaggttttgcaaaaagatagtgggcaggaaagaaagacggtggagaaagaaaagacagtgggtaaaaagtgtttgggtagatggtggggggaaagagggtaacgaggaggaggaaagagggtgacgagagggagcagggaaagagagttgggaaaaaaatgggaaaatagtttggggtagatggaaggcaaaaaagagagtggcaagcaggatagggcaaagaagaggacgagtgggaaggggggaagactgtgaaaagacagtagggaatattctggggggtggatggagggggaaaaggggaggtgagcaggagtggggagaaggctttgcgaaaagactatggtgaaatgtttttgggtagagaagggaaagagggtggcaaggaggagcgggggaaaagacgatgaggaaaacagttttcgggtagatgaagggcgaaaaagtggtgagcagcaggagtgaggagaagggtttgggaaaagacgggagaaaatgtttttgcttagatgaaggagcaaaagagggtgatgagagtgggatgggggaaaagaaggtggccagggagaaagggaaaagacggtgggaaaaacagtggggaaagtgggtaagtggatggggaaaagggtggtgagtgagagagcagagaaggctttgcgaaatgacggtggggaaaaatggtggggaaaaagttttggggtagatggaggaagaaaacaggtggcgagggggaggaggccaaaggcggtcgggaaaagaaggtgggaaaataatggtgggagacaaagatttggggtagatttttttttaatcagattatttgtatttttgcttttgagtagttatttatatattttgtgtattagccccttggctgatgcatagtttgcaaatactttcttccattctctgggttgtttcttcgttctactgatttcttcctgtgctttgcagaagcttttaagttttatgtaattacatctttgcttttgttgcttgtgcttttgacaag

SEQ ID NO: 3545 - DNA, 4001 bp, Homo sapiens
cttgggctacagagtgagactccaccaaaaaaaaaaggatatatatatatatatatatatatatatatatatatatatatatacacacacacacacacacacatatatatgtatatatatacacacacatatatatgtatatatacatatgtatatatatgtatatatgtgtatatatatgtatatatatatatatctgcgtatataaataggcatttatattttttctggtatgtttctccttttgtatgtttaaaatttttaatctatactcttatttttgtgacataaaaatctagctagttttctccaaaaatgaattatgaacaatccatcttttttaaataatacaaaacatcaccattatcaagtgctaaattcttacatatatttgggtatttctaaatttcctattctgttctattcattgatgtcttttcagctgttagtaaacaatttgtggaaataaataacacatgcacattttgatatctggaaaagcaagcctttttccattctgttacaaaaaattaatttatcacaataataaaagacagcatgtgtaatttaaaaacgctaaaactttgctatttttatttggcttatgtaaaagtgataaatagaaaaagctcacatctttttttttttttttttttttgagacggaatctcgctctgtctcccaggctggagtgcggtggcactatcttggctcactgcaagctccgcctcccgagttcacgccattctcctgcctcagcctcctgagtagctgggactacaggcacctgccaccgtgcccggctaattttttttataatttttagtagagacagggtttcaccgtgttagccaggatggtctcgatctcctgacctcgtgatccgcccgcctccccaaagtgctgggattacaggcatgagccaccgcgcccagccaaaaagctcacatcttaagaaaattcaatcttcctattcaagcacaggaaccatcttcccatttcagtttccttctaaggttcctcagtaaagaacgtatttacatagggtacattgatataaaatccatactggattttatttgaagaatatttagccctgaagttgatgtgttatggggcttcattcttagttctcaatatacacttttctataatgtatagaacattgttttaaaatctgtagattaaaaataatctgctgcattgacttaattaattttgcaagttaaatcactttaaaacagtctattagtgttctacgagggaaattataatttgattggaaatcagctaaagttttttttgtgtgtgttgctgttcataaaggggcctgtgccctgacctctctgaggtttccacaaccagggtgctgtgaggcctgcggaggtgagaaagccaggtccccctcctcccccgccaggagggtatgtccccatcatcccccgacctcccacctcctcccagcccaggcctggttacctcttttgcttgtcctgcttgttcacgtcagtgtccctgagcatgacgatcagatcctttctggcgactttaccccaccaggcagctctgtggagcttgtccagatcttctcgacggacgtggtatctcggctccacgaaggcgctgtcgtcgtagtctccccaagcacccacgttgctcttgccgctccccctgcagcaggggaagcagtggcagcaccacttgcccatcttgctcctgagcgtcttcatagcggagtcgtcgtggtctccagaagtgcccacgttgctcttgccactccccctgcagcaggggaagcagtggcagcaccacttgcccatcttgctcctgagtgtcttcatagtggagtcgtcctggtctccagaagtgcccacgttgctcttgccgctccccctgcagcaggggaagcagtggcggcaccacttgcccatcttgctcctgagaacaaatggcttcttcacagaagaggcagccggcattgaatcaacctcagctaccatctgcttttaacagcctggggaggccggtagtagcgagcagatcacgtctaccaaccagtttcaccaactagcaggtaactccgggtttccaatctgtttgaagagaaaagtcaatcccagccaaaacctgccaaccccagcaggtaagcccaacccaccccacccagggaaaacccacacccacccggggaaagcccacgcccacccgaggaagggccaacccccccccccaagaaaacacccagcccacccaagggaatgccaaacccagcagagaaaaggtcaagcctagcaagggaacgcgagagaggaaacgccaatccaaggaggaaacgtcaatccaaggaggaacaccaggccaagcgaccaacaccaagccaagcaaagaacgcaaagccaagccaagccgctacaggccagccaagcagttacccgcgtgcagcatgcgcgtgcaagccgttacaggccagccaagccattacgcgcgtgcggcgtgcgcgtgcaagccgttacaggccagccaaaccgctatgcgcgtgtggcgtgcgcgtgcaagccattacaagccagccaagccgctgccgcgtgcgcgtgcggcgtgcgcgtgcggcgtgcagcgtgtgcatctcaggtggcgtcagtgcatgtggcacagacagtggccaatgcgtgcaaccgcgtgtttaaatcttggcgccacgaatgtcaccgacagccttatgttcctggcaaacttcatgggactcagctgagctttcaggccattgagaagcctctggtgaaaaaaaagcctcttgaagcaggactggggctaagcggctggaacttgaggatgctgacagcctcctctgaagaaagcccccaggacactcctggcggtgctgttgtgcgtggcagcgtctgcagctcggagctggggctggaggagctggctgcaaatggcctcaaaatcccggagcacaagatgcccactgagcccagcgcctgcctgaggtgcctttgacacctggtcctctttgctctgcacccagaacacgaggccatcagcgagggggcatttggggccacaggatcgcggccagctcctgccccggtgccccctgcccggtgtccaagccagggccaacagctatagggcttctggcctggggggctctgctccactggcatgcaatagggtcaaggtgcagaccgctgtgtccacgccggcaagagggggcttggaggagcagtcacaggacagtactctcccctcctgtggatgactccttcctgccctttcctctctctgctaaagcctccaacgttctctgtcccatccatatgctccacttatgcccctgcttttgctttgattttctcattaaaataaatctgcaggctggctgggtgcagtggctcatgcctgtaatcccagcactttgggagaccgaggcaggtggatcacctgaggtcgggagttcgagaccagcctgaccaacatggagaaaccttgtctctactaaaaatacaaaattagccaggcgtggtggtgcacgcctgtaatcccagctacttgggaggctgaggcaggagaatcgcttgatcccgagaggcggaggttgcggtgagccaagatactgccattgcactccagcctgggcaacaagagcaaaagtccatctcataaataaataaataaataaataaataaataaataaataaataaataaaatagatctgcaggctgccccctcacggcaacgtgtcttccctgcattactgcagaaggatggccacacccctgccctggcggactagacctcttaaggacacctctgccttccacctcactcctgaatcacccacttcttcctctctagtcagttggacaaacgtgctttttcctggcccatctttaaaacatcctcttcatgcttcgctctccagctgcatcccatttctctgttcccctgtagagcaaaatggctccaaagcgtggtctcgtcttaccttgaaca

SEQ ID NO: 3546 - DNA, 4001 bp, Homo sapiens
agctactcagtaggctgaagcagagaattgcttgaacctaggaggcagaggttgcagtgagccgagatcacaccactgcactccagcttgggctacagagtgagactccaccaaaaaaaaaagtatatatatatatatatatatatatacacacacacacacatatatatgtatatatatacacacacatatatatgtatatatacatatgtatatatatgtatatatacatatgtatatatatgtatatatacatatgtatatatatgtatatatgtgtatatatatgtatatatatgtatatatatctgcgtatataaataggcatttatattttttctggtatgtttctccttttgtatgtttaaaatttttaatctatactcttatttttgtgacataaaaatctagctagttttctccaaaaatgaattatgaacaatccatcttttttaaataatacaaaacatcaccattatcaagtgctaaattcttacatatatttgggtatttctaaatttcctattctgttctattcattgatgtcttttcagctgttagtaaacaatttgtggaaataaataacacatgcacattttgatatctggaaaagcaagcctttttccattctgttacaaaaaattaatttatcacaataataaaagacagcatgtgtaatttaaaaacgctaaaactttgctatttttatttggcttatgtaaaagtgataaatagaaaaagctcacatcttttttttttttttttttttttgagacggaatctcgctctgtctcccaggctggagtgcggtggcactatcttggctcactgcaagctccgcctcccgagttcacgccattctcctgcctcagcctcctgagtagctgggactacaggcacctgccaccgtgcccggctaattttttttataatttttagtagagacagggtttcaccgtgttagccaggatggtctcgatctcctgacctcgtgatccgcccgcctcccaaagtgctgggattacaggcatgagccaccgcgcccagccaaaaagctcacatcttaagaaaattcaatcttcctattcaagcacaggaaccatcttcccatttcagtttccttctaaggttcctcagtaaagaacgtatttacatagggtacattgatataaaatccatactggattttatttgaagaatatttagccctgaagttgatgtgttatggggcttcattcttagttctcaatatacacttttctataatgtatagaacattgttttaaaatctgtagattaaaaataatctgctgcattgacttaattaattttgcaagttaaatcactttaaaacagtctattagtgttctacgagggaaattataatttgattggaaatcagctaaagttttttttgtgtgtgttgctgttcataaaggggcctgtgccctgacctctctgaggtttccacaaccagggtggtgtgaggcctgcggaggtgagaaagccaggtccccctcctcccccgccaggagggtatgtccccatcatcccccgacctcccacctcctcccagcccaggcctggttacctcttttgcttgtcctgcttgttcacgtcagtgtccctgagcatgacgatcagatcctttctggcgactttaccccaccaggcagctctgtggagcttgtccagatcttctcgacggacgtggtatctcggctccacgaaggcgctgtcgtcgtagtctccccaagcacccacgttgctcttgccgctccccctgcagcaggggaagcagtggcagcaccacttgcccatcttgctcctgagtgtcttcatagtggagtcgtcctggtctccagaagtgcccacgttgctcttgccgctccccctgcagcaggggaagcagtggcggcaccacttgcccatcttgctcctgagaacaaatggcttcttcacagaagaggcagccggcattgaatcaacctcagctaccatctgcttttaacagcctggggaggccggtagtagcgagcagatcacgtctaccaaccagtttcaccaactagcaggtaactccgggtttccaatctgtttgaagagaaaagtcaatcccagccaaaacctgccaaccccagcaggtaagcccaacccaccccacccagggaaaacccacacccacccggggaaagcccacgcccacccgaggaagggccaacccccccccccccaagaaaacacccagcccacccaagggaatgccaaacccagcagagaaaaggtcaagcctagcaagggaacgcgagagaggaaacgccaatccaaggaggaaacgtcaatccaaggaggaacaccaggccaagcgaccaacaccaagccaagcaaagaacgcaaagccaagccaagccgctacaggccagccaagcagttacccgcgtgcagcatgcgcgtgcaagccgttacaggccagccaagccattacgcgcgtgcggcgtgcgcgtgcaagccgttacaggccagccaaaccgctatgcgcgtgtggcgtgcgcgtgcaagccattacaagccagccaagccgctgccgcgtgcgcgtgcggcgtgcgcgtgcggcgtgcgcgtgcggcgtgcagcgtgtgcatctcaggtggcgtcagtgcatgtggcacagacagtggccaatgcgtgcaaccgcgtgtttaaatcttggcgccacgaatgtcaccgacagccttatgttcctggcaaacttcatgggagtcagctgagctttcaggccattgagaagcctctggtgaaaaaaaagcctcttgaagcaggactggggctaagcggctggaacttgaggatgctgacagcctcctctgaagaaagcccccgggacactcctggcggtgctgttgtgcgtggcagcgtctgcagctcggagctggggctggaggagctggctgcaaatggcctcaaaatcccggagcacaagatgcccactgagcccagcgcctgcctgaggtgcctttgacacctggtcctctttgctctgcacccagaacacgaggccatcagcgagggggcatttggggccacaggatcgcggccagctcctgccccggtgccccctgcccggtgtccaagccagggccaacagctatagggcttctggcctggggggctctgctccactggcatgcaatagggtcaaggtgcagaccgctgtgtccacgccggcaagagggggcttggaggagcagtcacaggacagtactctcccctcctgtggatgactccttcctgccctttcctctctctgctaaagcctccaacgttctctgtcccatccatatgctccacttatgcccctgcttttgctttgattttctcattaaaataaatctgcaggctggctgggtgcagtggctcatgcctgtaatcccagaactttgggagaccgaggcaggtggatcacctgaggtcgggagttcgagaccagcctgaccaacatggagaaaccttgtctctactaaaaatacaaaattagccaggcgtggtggtgcacgcctgtaatcccagctacttgggaggctgaggcaggagaatcgcttgatcccgagaggcggaggttgcggtgagccaagatactgccattgcactccagcctgggcaacaagagcaaaagtccatctcataaataaataaataaataaataaataaataaataaataaataaaatagatctgcaggctgccccctcacggcaacgtgtcttccctgcattactgcagaaggatggccacacccctgccctggcggactagacctcttaaggacacctctgccttccacctcactcctgaatcacccacttcttcctctctagtcagttgtacaaacgtgctttttcctggcccatctttaaaacatcctcttcatgcttcgctctccagctgcatcccatttctctgttcccctgtagagcaaaatggctccaaagcgtggtctcgtc

SEQ ID NO: 3547 - DNA, 4001 bp, Homo sapiens
gaggcaggtgctgtccaccgctgccgtgtaggtcatctcagggtggaaaaacctcacgagtgcagttttcgtgcgtcaggcatcttcacccttctttaaaaacaaaaacaaaaacgaaacaccaccacagtatgaacgagatctcatgatcgccccctttttctcttccggttttgtttgttatatatgtatacaaaacagtctgggtgtttattatgctttttattttttggcccctccttccttggactgcaaaaatgcctccttggtccgtttctcccgcgttttctcctccaagggcgggcatgcctgtctctgggtggaggggagggcggcggatgggcctgggctggagcccggagcggcccaggtgcagggtcggcgcggcggcggcagcggcggcggcggcggcggcggcggcggcaggggcggcggcggtgctgacggcggctgcggaggcggcggcggcggcggccctcttcgctctgcgccctggcttcactgaacgctcgtctgcagcccgtggtgaggcggcggcgtgtcggcgctcacggtgcccacctgcgagtagacgtcgtcgggcgtctgctgttggatcccgggcggcgtcatgcgcttctccttttggcgccgattgcagaaccagacccgcaccacctccttctcgagctgcaggctgtcggccaggttggtgatctcctgcgcggagggcttggggcacttgaggaagtggctctccagcgcgcccttgacgctcacctcgatagaggtccgcttcttgcgcttgcggccctgcgccgcgatcttgtcgatgcttgtggggctgccggtgcttgagtccgcctcctccagccacttgttcagcagcggcttgagcttgcacatgttcttgaagctcagctgcagggcctcgaagcggcagatggtggtctgcgagaacacgttgccgtagagtgtgcccagcgccaaccccacgtcggcctgcgtgaagcccagcttgatgcgccgctgcttgaactgcttggcgaactgctccaggtcgtccgacgtcggcgtgtcctcgtccgagtgcgggtcgtggctgttgagtccaggccccgcgccgccgccgccgccgccgtggtgcgggggtccctgcgcgtggtgcgggtgcggcgggtgaggatgcgcgtggtggtggtggtggtggtggtgctcggccagctctggcgtgtccccgcgcaccagccccgggtgcaccaagctctgggctccaccgcccgcgccgccgccgccgccgccgggccccggtggcgcgctcagcatgccgttcaccgtgaagcctccgggctgcgagtagagcagactctgcggcggcggctgctggcccccggccatggacgggaggtgcgcggcggcggcggcggcggcggctgcggctgcggcagcggcggccgccccccagcccccagggtggccctggtgtgggggcggcggcgggggtccgaggtgcggcggcccgcggtggtgcagcgctgtgcccgcgtgcaggtcgtcgcgcccggcgccgcccttcacgtcggggccctgcggcggtggcggcggcggctgcggtggctgctgggggctgccagccatgcccacggcgctgcccgaccacggcgagctcgcctccacggcggcggcggcggcagcggcggcggcggcggcggcgtggggcagggctgtgacccactggtgcgcgtggctcagcatatggccgccgttgctggcggccatggccccctgcatgaagtcgctctggaccatcttgacagaggacgggtccccccggtaggcgcccgaggtcacggcggcgctgcccggctgcatgccgccgcccccgccccctgcgccgcccccgccgccgccgccgccgccacccccgccgccgccagcccctgccgcgtccgagtgcacaatagagccggccgcgagcaggctgttccccggcaggtaggggttagaagccgccgtggccatgccgctccgctcccgccaccccaccgccgccaccaccgccgccgccgccgcagcagcagccgcggccgccgccgccgccgccgccgccgcgccccccgcctcccgcctcctccccccctccttccccgcccccgccccgggcccccgccggccccgccgccttcgccgcctcctcctccgccgccgcctccgcccccgccgccgccgccgccgccgcggcccccggctgcagctgcaaggccgctcggcagggcgcgggggtcgccggccggccttggtcaccagcagcagcagcagccgcaggagcagcgctctggggaggggggctcgcttctcggggtgcgctccgtggccacccccttcagggggggtcgtggccgccccccagccccggcgcgctgggctcgctccagcggggctcgccgggcggggcggggacctgcactcggggcgctctcccgggacgcgcgggctcccgctcctcctcctgtcctcgggcgagcccggactctgcccggtcgcggggctccgtccacctgctaagtgaaggtttcacgggagataacaaagaaagaagctgctcctttcttccttagccaaattacggatgaccagcaaccggcccgctccttctcttgtccgctctctcctctcctctcctctcctcctcaggaacacatttcactcgttttcccttagagtagtaaaactttttcgtccttgaaggcgtggtgctgctggctgctcgcgagtgcggagaggggaggctggctcctgctctccccctctggtcctctcgtttcaagttttgttctgtcctaggaaaacttcttgcgatggtgcatttctctgaagttgctattgccggagctcttggttgcctctgaaacaagagtcctttttcattctcctcgcaacagtcacagtctgatgcgacatctttccttttgggcagaaattaggaaacaaatataacaaggaaaaaattgaacaggaaaaaaaatgatgtcgaatcgctctgttaccttgttgctgacggttggggttggtgttttatttttttcccagcagttgtctggagaaggaggaggaagaagagtgcattggtggaggtggaggtgtgtgtgtgcatataggggatcgatccttgatacacaacaactccagtgggcacgctgcacggctcgtagagtgcaccgacggcgggcgctggcgctggccgtgctggagcagagttgcagcaggagctcgctctgcgccctcgttcgcgctctctttccctctctcacttttcctctccctccctctctctctctccctctctcgggcgcccgctctcgctccgatctgacagttcgctctctgtccctccctctcagagcggggactgtcgaatgtttaccctccgccgcgagcgcgcacccaccaccacactttcccaaatacaaggaagtcgagcaccagggcccccgctgattggctacccgctgggtgattggcaggctcggaatgactggctcaggacgcgaggccccccttccggccgttccgattggttgctttttaatttaggcagagcgtcgtagaagctggaaatctgtcgtcctccagcctccctccccctcaccactttcccctccccgcccctcccccgccgccccctccgccacatcttaactcttagtgtccggcccagacgttggcgttccctcggcggctctgggcgttcgcaataggtctgggcggggggaagaaaggggagataaaagggagggagggacgagaggggggaagagaatcagaaggaaaacgaagggggaaacatgaaaaatagcaacctgcccaccccacctagtacgcgtcgggttgctcacccccttacccccgccccgccagagatttgtaaagcgcgcggcacggatgtaccattcaagctaatacctatagacagatgtgtccccagtggtttcaaagtttcctcttcccttcaccagccggcc

SEQ ID NO: 3548 - DNA, 4001 bp, Homo sapiens
caaatttttctaacctaagaagtttacatacttatacactcctgacagcaggagcactcctgacaactgactgcctagaaaagccttaaaaaggaaaccaacaattcaaatgcgcagaatcctactacaagaccctataggatctcagagcatcaataattctgaatcataaagaaatagtcaaacaatgtacaatgaactcttgtttaagacacagaaccatgtaatttgttacagaaataattctgtcccaactcgttaacataaaaaaaaggggagtgctaaaacgggtaaattttcaggatatattaaaaacaggagagaagcagccattctaaatgtatcttttctggattttatagcacgatttcaaaatttataaaatgttcacccccccacccgtcattgttacaaagtagcaattaccggccatcctgttaccaaatgggaatacacaaagacaaaaacgtgtgtgtgaccgacacacacacacactcactcttttttcctggttttaactactgaaagttaatatcaggcccccctaatttctaaaacatctaattgttctttggacaactatgttagtaccaaactataaaagcaaatacttttgtatttgtgttcactactgcaaaatgttggttacacacagaaagggctatcgtggaaagaaattaaaatcaatgcacaaaatggtgcttttatagcatttccaaaacgattgtgcatactccttgccagcacatctagactttgctccttaagactaaacatgagctggccgtgcgcggtggctctcgcctgtaatcccagcactttgggaggccgaggtgggcggatcacgaggtcaggagatcgaccatcctggctaacacggtgaaaacccgtctctactaaaaacacaaaaaattagccgggcatggtggcacgtgcctgtagtcccagctacttgggaggctgaggcagaagaatcacttgaacccaggaggcggaggttgcagtgagccaagatcgcgccactgcattccagcctaggcgacagagcgagactccgtctcaaaaaaaaagactaaccaagaaccaaattagcatacttccccttcaggcatactgagccccgaaatcatcatcttcctcctaaagagtaattatctcctcctaaaaggcctgcgcagctcacagctcctccgaaacacgggggaacttcgcgagagctcaagaccctggacttgagttttagaaaaatgcttaacaaagtggcctctgccacttaactgcacgacagccactgtgctgtgagaggaaaaggtcgaaagaggaggaaagctagtcttcaattttaatccctgtgattcaggctcttcgcccgtcactctccaaccctagcctgacaggacgtcaggctgtctcccccttccccaccagtcccgccacctaccccgcaacagtgctgagtcttaggattttgaagctttaaaaatcaacccggctccctagagttcaggccgcagtcgctgccgccatgttacagcttgtgcggcaaaatgcgtcagtgagggaggtgtgcgcctgagtggggagggcgggggctggcagaggaaggaccgtccccaggccccggggctcgactgcaagccttctccttctgcaacagcggcaaaggcactgctgcggtcctcagggacttcctctgggcccaagcagccccgatacctcgagggaaagacggtaaacccaacccggtcagccgcgccggctccgcccctcttcccaggcccttcccgctttcgtacgcagggactgctgaaatgacgccgccagaacaacttgagcctcataccacttacctgcaccggtagagttttcctcttctctgggtccggtcctttgaagcgcttcaaatctaccgccgccagaaaaggcgctaaagcccgctaaccgcctccctcccccacaactcagtcctggcatggagagacagcgtcgcaccggaagcgcgtcaggagtgggttgtcagcatcggccagcgttcacctgcttgcgtcaccacgccctcctaggacttctaggattttggtgccttttaaattcctagtttataggtggcctaatgctttgtggatgcgttgactgggaacgcttgtaaccgttaaaatgccatatcctttgtgaagtaaagtgcctcatttaataaacatttattgatcttacgctaggttatcagaaaggaaggcctaccttcatggagcttccagttaagcttccacttaacgctaggatataagttctaaaaacgcagtaatgagcaaagtgttatttgaggaaagaggaagaaattacaaagagctttgatgttctttgttgttttacagataaagaaattgaggctcagggaagataaacgcctcctcctcaaacacactgttcttgaatgccaaagcaagtcttttgatgccaaatctagtgccttctagagaaaatatggcatatattatttaattattttaaggggcaagggtccccggattatgttagaaataaataaccattgctgtttgggcgggggggtggggggggatgggcagtgattctggtagggatgtggggtgtgttttaaaggaactagctaactagaggacttaaattgttctgtcgtttaaaggcaacgtaaattatgatcatttaaatttttcactcacttgcatcaggtaaattaattatcaacaacagttaggcatgtggtggtgcttctaaggggcgtgaccagttttacacagcagtaaaacagaggacatttctgcctctccacccccacctcttttaagtcattgccctttattgcaggagagcagcagcatattcatctttagatagttcagagattaaacggatttacacttcgctgtgtgtggaggggacaattctgcaataccttaaaacaggggtccccaacccctgggccacagactggcctggctaattttttgtatttttagtagagacagggtttctccatgtaggtcaggctggtctcaaactcccaacctcaggtgatccgtcctccttggcctcccaaagtgccgggattacaggtgtgagccaccacgcccggccaacgcttttcgaaagaagacatacttgcagccaacaatcataatgaaaaagctcaacaccaccaatcatcagaaaaatgcaaatcaaaaccgcagtgagatactatctcataccagtcagaatggctattattaaaaagtcaaaaaataacaggtgctggtgaggttgtggagaaaaaggaacattttacagtgctggtgggagtttaaatgaattcaactattgtggaagacagcgtggcgattcctcaaagacctagaggcagaaataccatttgacccagcaatcacattactgggtatatacccaaaggaatataagttgttctgttataaagacatacacatatgtatgttcattgccacactattcacaatagcgaagacatggagtcaacctaaatgtccatcaatggtagacttgataaagaaaatgtggtacatatactccatggaatactatgcagccatgaaaaagaatgatctcatgcccttcgcaggaacatggatggagctggagaccattatccttagcaaactaatgcagaaacagaaaaccaagtaccacatgttctcacttataagtgggagctaaatgatgagaacacatgaagacatagaggggcacaatacacactggggcctatcagagtgtagacagtgggaggagggagaggatcaggaaaaataactaatgggtcctagacttaatacctaggtgatgaaatattctgtacaacaaacccccattacacaagtttacctctgtaacaaacctgcatatgtaccccacaacttaaataaaaataaataaatggaaggatactgtatgtatagtgtatataataaacaacatttgttatcctatagtttccttatatatat

SEQ ID NO: 3549 - DNA, 4001 bp, Homo sapiens
gtaattccaacactttgggaggtcaaggcaggcagatcacctgaggtcaggagttcgagaccagtctgcccaaaatggcgaaaccccatctctactaaaaatacaaaaaattagctgggcgtggtggcaggcgcgtgtaatctcagctaccggggaggctaaggcaggagaatcgcttgaacccaggggcagaggctgcagtgagccgagattacaccactgcactccagcctgggagacaagagtgaaactcaaaaaaaaaaaaaaaaaaaaaggtaaattctgtgcattttaagtgacaacattaaagaattttaaagcaattttgtgtattttttaaaagaattattccatattaagtgcttctatattatacaatttctccatcttgccactgcaatttccatgaacttttattgcccttgactgaatttctaaaaattacttataatgaaagacattagataaaaattgctcaaaacttaccatttttcctcttagtggtttcaggaaggactacgtgatttctcagtcttacagcgagctcaaaaataagtctctagtcccaaaagaaaaaaagaattaggctcattttcctgtcttaactcacacacgctcatctttactgaacattttaaataaaaacctcgccgggcgtggtggctcacgcctataatcctaacactttgggaggccgaggcgggtggatcacttgaggtcaggagttcgagaccagcctggccaacatggcgaaaccccgtctctactaaaaacacaaaaattagccgggtgtggtggcaggcgcctgtagtcctagctactcagcaggctgcggcaggagaatcacttgaacccaggaggcggaggctgcagtgagctgagatcgcgccactgcactccagcctgggtgacagcgcgagactccgtcaaaaaaaaaaaaaaaaaaaatcctctaatggcatcccctaggtaataaaaacccggctatagaagatatcctacccgattcaagcctcccaatctcctacttgcccggcttgctcttcttcaagagcctccttgcaagtcccccaataacccagataccttcccttagggtccaggcattgggtgtcccttttgcctggaattcttatactcagacatctctacggctaatttcctcacctccaaatttctgcttaaatgtcaagtttaactgacctgacaatcctacacagaactgctttagcccttcagccctaggacattcctatttccttctcccacagcacttatcactaatatactatgaaattcgctttttttttttttcaccacagcacttatactaatatactatgaacttttttttttccaccacagcacttatcactaatatactatgaacttctctttttttttcattttgagacggagtctcgctatgtcgccaggctggagtgcagtgcggcaggatctcggctcactgcaacctccgcctccgcctcccgggttcaagtgattgtcgtgtctcagcctcccgagtaggtgggactacaggcgcgcgctaccatgcacgactaatttttgtatttttagtagagacggggtttcgccgtgttggccaggctggtctcgaactcctgacttcaggtgatccgcccgcctcggcctcccgaagtgctgggaggccgccgtgcagggtccttcttttactctgacgttgcaacaacagcctcgccgcccactgttcactcgcagtatcccaagaactaaaccagtagcaacacagaactcagcaagcattcgaataagtgaatgaaagaattaatgacgttactccatacttgggcttcaccacttcgtctagcacagccgttgttaaaacaggaaaaatgcaatcgcagatgccagcagaggtctgttggttcaaaattatagtttctttgggccagcggaagttgggcgcgggacccaagagagagaacgccccttaccgcctcacctccttcctcccctcatcttcctatctcaaaccaaaacgacaatgcaatttatccccaaccggaaatttgacagtgaaagggagctctactaataattgcactgggacaagaagtgtaaggcgaaactacctgggcaacctcaagcaatgctttacactcggctgccaaacggaaaggaccacttccgcccagctctcccgctacggggagccaagtgccacagcatccggagcgccgacgcgggaccggaagtgacgcagagaagtttccgggactggtgagtagtgggcgatttaaaaacccgcgagtgtagttgtgaccttcgcggtaggtgccggttggggccggctgtgattgttatcttggtgctgcagaggacagcagaagaggagattgggtcagaaaactgccctgccgcaccagagcacagcgcactagtgggacaggggtcctgactcagacttaactggctgtgtctcgtggtttttcactgtcctggaaaaggcctgaagtggcactgaaatgaggcatagatgaggtaacgtcgagggagcggtttgcaggttgcaaaggggccctactgatgctgcttaatagtaaacagtgcttactctaggacgggagttgtttccagctttacgtgtaaatctcgcgatattgtggcctgggcactatttccattaaggaggaaactgcacaggataagtcatttacctgctgttgcacagctctggctctaggattcaggctggcttcagagtcggtgctcttaaccgccatactatgttgccttctgttgtcgttgttgactgtggccatgtagcttcgcagtttcctcatctgtaacagtaaataactcaaaacctgcatgatggcccactagggtttcactttcgagcttgccagatgtagaaaatgctggagaatggagtactatgaggaccattagaagatctttcaaggccggacgcagtggctcacccctgtaatcccggtactcttggaggccgaggcaggtggatcacttgagcgcaggagtttgagaccagcctgggcaacatggcgaatccccatctctactaaaaatacaaaaattagccaggtgtggtgtttagcgcctgtagtcccagctgctcaggaggctgaggtgggaggatctgcttgagctcaggaagtcgaggctgcagtgagctgagatcacgccactgcactccagcctaggcgcctagtgaaaccctgtgtcaaaaagaaaaaaacaaaaacaaacttccaagacctcgagtggtttttggagaccctgtatcacttcaaataatgtgttaaacaagcatcttcatctcattaaatagaaatgttgaaaaattgcttttggaataattgacttatggatatttcatcaaatttacagttggctatgctttcttattgtgcatactatgaaatgtttttcttcaaaaagtgtttataagtggtaagtttaagaatggggttgacagcattatcttttgtggttatttgattaaacatttactaattgtgcatattttggagccagcagtttttttctacctttccattgccctcccaccttccctctgttgccaaccttttcagttccttgttggatgtagatacttagaaggcttacaggctgtctgggaaaagtaccctataccttatcccctcccacctcttgagcctggcctttgtgtagcaaatgttgcttaaggggcagtggcttctcccttcttctgccttgaccctgcccatttatagagtgacctgcctatgtattccttgatttttgattctgataaagcacttgacattttaaacattctttttttttttttttttctttttgagacggagtgttgctctctcgccaggctggagtgctgtggcatgatcttggctcactgcaacctccgcctcccaggttcaagtgattctcctgcgtcagcctcccgagtagctgggactacaggtgcacaccaccatgcccagctaatt

SEQ ID NO: 3550 - DNA, 4001 bp, Homo sapiens
ccttaaaaaattaccattacttcaactatatttttaaaaggcctgtacacttggaaaagactatcataataattagaataacttgtctcactatttacttagaaatgccccatttaaaagtaggccaacaataggaactttgctattgcacaacagagaaagtaaatgaaataacatctattaacattcagcgtccatggcatgtttctccatctcctagaacatactgtgacttacactgtctactctgaacaatttaccacttcttcatccatgcagtagctcaaataaagacagttcctgtgttaatcccacagtaagcctcagtaattctcacatcaccgtagttgtaaacgtttgttaacagaaaaagaatgtttttcctaaaatagctacataacactaagactactcaaattcctaaataatccttttacaacatgcctgccaactttattttgatacattaaacatgtggagcctattttaaaagctctttaactgtgactatcaaaacaacttcccagttattaacgtctctttttaaaaaagttttcaagttgttcttagaagaaattgaatattgatgaatttgggctgctatcaaacgcctaagaagcactttttttgccgaataagatgggcaaacgtcccagatctgctaaatctgatatgagaggtcatgcaagtttaaaaaatgaagaaataactatttccaacactcactgagtccttcatttaaaaaattattttcggtgttattttcacactttacgtttaataatacaattttttcaaggttgttaggcttaaactatgaaaaactgatttaccacatatggctagtcagtctatactcttaatggggctccggtagatttggggtactgacaataagtggcagtttcaattaagaacttcactgttaggaatgacatccgaaaaggatggtgctagggaagacaggcaagagatgccggggtacgaagaaaagagaaacacacaatttaaagccactaaggagggaaggcgagggtagaacgcatagacagcagagaaagacgatttaacaaggaagtgaagtggagcgcagagtagggcagaagctgatgaggaaacgaatggtaaaagatagtgttttcaaacagggcatgcaccaggaagagaagcgccaaggcttggggtagccccagtgctttcgtgtgaaagagatgcttgcagactgaagcggagggaagagagaatcagtcagcttccaggcgttccagcaaactcccattctctccctgcgcctctcccagacctcagcccagcggaggcggcggccggggaaggggcctatacccgagagccaggcccggcgttcccctgcctaggctccgcggcagcagggaaagcagcgaggattcggaaggacagaggccccggccgcggctcggcagcaccgcgaaaacctgcccagggcccggggcctcggcggcgcggccggtcagccgcttcccctccggcggggtgccgggcggccttacctgaggcaagggagggagaagatgtctagggcgcctcgctcgcgcccgccgcggtactcagcccaagtttccaacggaggcgcgaccctgactcagccgccgcttccccctcggggtctcgaccgccgcctccggggctgtttacaccgcccggcccctcacgccgccgccgccgccgatgccgccttctctccaccctagcgccgttgccgattcggccgccgccacctcctccgccgcagcctcgtctctctggagcatcttccaaccaccgaaccctgagaatcagagactccagccgcgccggcaggaaactcccccgcaactgctaggggaacgaggccgtcagagcaccggcggcttttccgccattgagcagaagccgctcggctccttttgcaaccccctccccgcaccctagtccttccccgcccctcagggtgccccgcctccagctgccacccactgggatgccgcgcgccctctcacggcccccggtttgctgggagtcttgtcaatcaccgctccccctccccgtgctgctccctcggcacctccgtacttcgtttaccccgcccacccggccccgcctctgggtttctaatttcccattgggcatcagtggctactttcaataggcaaggtcagctgtccatcaaacaccgcccactaagtgagacccaaccctttattaccatttactttattcggccccgcctccgctaggtcctacctcccgaacgtcagggaccagcccccgctaccagccataagtagagccctccgtcaatcaaataacgcccacctgcgctcctcctagcaaagccccggccccagcgattgtcttttcttattggtccaactcgtgatccgaacccccagtcactggctttcttgcgggtcagtcactgagccaatttccaagtccgtcacaccggcttttttcaaatgaacgcgcaaaaggcggggaagtatctggaaagcgattggttcgtcctagaaaacggtcaaacccggagagtctgtacggatcctttccgttctgtgaggaccgtgcccccttgtatttgacctctaagcctcgcgtaaaagaagcgccataagggaccaacgagcagtccagctataggtgtggacgcctggtcccacccggaattgcaggggcttggctactgattggctaagaaagtcctcctaggccctcattggaggatctaaacgcctctcttcggcgtggagacgggaagggacgactcagacgaggacaagaagtgggcaggggagaggcggttgttttgcttcagccgcgggtggggcgcaggcgagagtgggaaactgggaaggccgggctctggggaggtgttgcggggaggggaaaggcccggatgttccctaacaatgaaatcatcgccgacctatcagagccgccgagctgggatacctgcctgacctgtaccccggagggagaagagtgggcgggaaattggggtgtcggaagaacctggaaagcaacgtgagaaagtgggacaggtgttcccttcaggaggattttgtgctattagagattatttttataccagcccttgacatttccgtattttgtttctcagtcggcattgatattaaaactcccagcctagtctcttgacatggacttgttcatttcgcagttattgagcgcctactgtttgccaggtactgtatgtagaactggagatacaaaaataaattaggcaatcgcagtacaagatgataggtactacaattgaaacatgcacaagggctggtgacgacataaagggtcttccttgtgcataggtttaccaagaaaggcttcacaaagacacaggatgagtcaagaatgaatgataggggtttaacaggccgatggggaaagtggacatgactcctccagctatcaaattagacgatgctgccatgttaattctccaaacgagaaacaaaagtgtaatagaggtattctaatacttaccttaggatatatatatatatatatattttttttttaatccgaatgtcctaaaagaacttaaacctatttcctactttggtgtaaaatggtttgggcagacaatttaagcttagacccaacagagtgctattcaggttaggggctgtcaatgttttatagaaaagggcaaatttagtaataggacaattgtccaggccgtcataaggacggcagaaacaaagacttaattgcaattcgggtttttttgttttttgagcaagcatattttactttttaataagacaaatctgaaaaagcaaacgcggtccaaaaagcatgtgattcggtaagagagattttaaaaaaccaaaaaaccgtatcttcttttcaccccagatcttattaactgtgtgttttcctcttcgagaacttgtatcgtcaataacgtcatcgtgaaccagactagcagtgtggatcatttctgcaattaaggctatggc

SEQ ID NO: 3551 - DNA, 4001 bp, Homo sapiens
gatctgatcctacaaattctttccaccaaaacagtgtcctaacctttctgggcctcaatttcttagctataaaatgtgggagccgcagggtgtggtggttcatgcctgtaatcctagcactttgggagaccgaggcaggcagatcacctaagtcaggagttcaacaccagcctgacccacatgaagaaaccctgtctctactaaaaatacaaaataagccaggcgtggtggcacatgcctgtaatcccaactactagggaggctgaggcaggagaattgctcgaacctgggaggcggaggttgcggtgagccgagatcgcgccattgcattccagcctgggcaacaagagcgaaattctgtctcaaaaaaaaaaaaagggagccaaagcagatgagatgaactataggatacactccaatcctgaaattttatacctaattataaaattgttattaaggtcagttatgaatataaaatttgaatcggaaaacaaaacatttaagttcatactgtcattccagagctaaccacagggaggagcgagggatctgaaacaattcccaagggagacagtatttcgctgttacctgaagcccacccggtaggtggagaaaccctcaataccagacagagtatttccctggcccttttgcctagacttcagaatgctcttcacaaagccacggttaacccgtcttcctccctttcctccctaccgcagttttccctcttctcttttgtagtttcacatcaagttttacctaatactactactttccccccaatatttttcttttccccttttgtccagagtaaaattttctagaaaagccctttgtaggtaggttgtgatgaaaaaaattgatgaaatgacttacaatcaaagaaactataaactacaattacaggcaaatgagaattactgattaagttttagagaaatcctaagagagaaagaaaacgaagcataataaaaaggaaaacctagggactgacataattcaagttttccgaagttagtaaaaggccctgaaaagagtgcaaatgagtgacaactcctggaggtcgggtccagcctctgaaattaacatgcaagagcccaaggccaggcaaccaaaatgtgaaacagactctgcccggggttcctttcactgtcaaactcctagccaaaagaggcttcccacatcagatattttaaatattaaaatttaaaaagttattcacatctattcacctctcccttgaaaaacaaatgaataaatagcccctatttgcgtctttactcccacactaaacctcacaccgttgatgagcctggagggctaggttggcacgagaggatggcgccaaagctcggggagagggcggtcagtgggcggaaggtgcctcttcccacatggccgagccctcgccgccactggccaccggcacacggtccccaagcatcgggagctccctctcggccctgaccccgcggtctctgtcgccccgcaaacggccgctgcggccgcaggctcccaattgggacccttcccaggggaggaccccatcccccgctctctttctccgtcagattcccgccccgcagcggccagcctatgggcccctgcctcctcacctccatggagacgcgccagccttgcatggcggagaagccgtagggcagcggcaggcgcggggcgccgaccccgtccccggagcacttcaccgtgttgggctgggagaggtaggcacccatggcggcggctggccggcggcctcaggtgcaggaaagctgggcgcgacccgtgccggagccgaagccccgggggtgcgcgcggcaggagcaggccccgcggcgcgaccgacgcaaggtgccggtgaaaggcgcgaggccggccaggaggcggtaacgggacgggagctgtgagggagcggaagcggaaacggcgccgctccagaccccgcccggcctgcgcggcggggccaggcgctgcgggcagtcatttccttagcaactcgccccgcccgcagggacaacggcccgcccaacggccgctcccgcgagactagcgcgaccacgcccaccaacggccgccgtcctactccgcttcctcgcgcaggtggcaggtcgcctctggcagaacctcttccttcgttcccagtccccagcctcttggcgttttgtctgacgcctcttttgtgtcggactcgacgctttcagcccgtcctccagtgttttcatccccctctccccaacgttgcactctcagactccgcaaaccccgcccgatttggttcaattaaagttgaccagtatttgttccgagcttaggaagtacttggccaggccatgcgaggcctatatgagaagaatgtgagtcttttctgaaagcgaagacctcgatctgtgatataattcgagttaatacaatgtagaaatgtttggtacagcctattctgggtgggaaaagctcaaggatgggaggaggagctgtttcttggaggattgaaaggatgtaggctctcagagaggatgcctctggattgcattatgccacaggaaaagggaataatgttataaggtttggaggagtgagggaagaatgtgaactgcatttggggaggatttctgaggaagctggctggactcggagaatgattgtaagtggtaatattaactagctagcttgataaaaagaagcgccaagatgagtgacttggacttcattgtcgtcctggtgtaacctttggcatcgtttgtctagtctttgtatgcagtgtacattggagggagagagtctggggcactgttgtgttgttgttttttgtttgtttttgagacagagtctcgctctgtcgcccaggctacaagctccgcctcccgggttcacgccattctcctgcctcagcctcccgagtagctgggactacaggcgcccgccaccacgcctggctaattttttgtatttttagtagagacgaggtttcaccgtgttagccaggatggtctccatctcctgacctcgtgatccgcccgcctcggcctcccaaagtgttgggattacaggcgtgagccaccgcaccccgcctactattgttttttttttaagacagagtttcgctcttgttgcccaggctgcagtgcagtggcgctatcttggctcactgcaacctccgcctcccaggttcaagcgattctcctgcctcagcctcccgagtagctaggattccacgcctggctaatttttgtatttttagtagagacggggtttcaccatgttggccaggctggtctcgaactcctgacctcgtgatctacccgcctcagcctcccaaagtgctgggattacaggcgtgagccaccgcgcctggcctggggcactgctactagttagagagctcttactctaagcaggagatgagaagagctgggagtaaggtggtaccacgcagggtggcaatgggaatccagatgaaaggacaaattagacaataacaaataagacagatttggtaataaattgcattcaagggatggagagaaaaggagaaattctccaaactatgacaaaattgattcttttcagccgggcacagtggctcacacttgtaatcccagcactttgggaggccaagggggggtggtggatcacttgaggccagaagttcgagaccagcctggccaacatgtgaaacccgtctctactaaaaatacaaaaattagccaggcgtagtggtgcgctcctgtaatcccagctacttgggaggctaaggcaggcgaatagcttgaaccccagaggcggaggttgcagtgaaccaagatggcgccactgcactccaccctgggtgacagagcaactccgtctcaaaaaaaaaaaaaagattctttaaaaagataaaactaatcatggcttcttcatgctcttccgatagtccaaattccttatagtttacaagacccttcatgctaatcatccagattcacgtatgcctctctttaactctccatttctcctac

SEQ ID NO: 3552 - DNA, 4001 bp, Homo sapiens
ctccgtctcaaaaaataaaaataaaaaaaaaataaaaaggagtaggcctctacttcccaaatgtaaacaagacatacacatttttaaattaactgtatttccctcataaaacagttacaaaatacaattattttcaaagcaaatttctcaaagacccagcaagatgttcacatctgaaacaaagtcttaggtagtgaacactgactgcaggcaccagggggcctcccaggaataacttgatagtaaaggaaaaggtaaataagagttcctggtaaaacttttgcttcctattcagtcttaagactgctggatggctttcacatctggagcaaatacacagtatttagttacagaacaggtactcacagaacttgggtttgagataccgacacatactttgagaaaaaggaattacccctcccccattacaatattctttgatgattttccaaatataagtacatactgcttcactctagcaattatcttaaggtaatttgaaagcaaacagtacatatgcaatcgctggacggcggctaacaaagaggcctctaaattgtttaaaaaggattaaaggcttttctacacactcacaaaacaattattgatgacgaaaactttagggtagagggactgtttggcagaagactgcatttaactttgaataatatcctgcaatgaatcaatacatttaactcccggctagtccacctcttcgttttccccccttgccttcccaccaacataaaactattcaataagaacacttgagcccggaaagttcaaatgctgcgtagacctacaaatacctttcgaatacaagacaggctttaaaaatagattttcactaagtttgtgcagaaattaagctctgctcaaatcaaatgcaaaagccaatcccttcagcaaacccatctacatacatcacatttcttaggtgcatcttcaacctgatcaaatatcttgtcttacaatttttttaggccaagtaacaaacggtagattaattcccgctaattttatcctctctttaagaagaatccattctatatagcattgtgtaaaaatgcagagcagacgaagcagtcctgttaaggacaggtttatatatatatacgtaaaattcactcccggaacgacaatcggaggcagccaagggcaatgcacaaagagaacagagaagaacagtgattccacggacgcacaaagcccagtggcaggcatcctctccccatcctcgggtcaccggaggcgagcaccacggcgcgcggagcccggcggcctttccgaaaggctgtctcccgcagacccgctccgcacagccttcggccggcgggcctggcccccgagggtccgcgggaacggccccctctcccccgatctcccctgaccgcgctcccagaggccgctcccccgcgcccagagcctcctcgccccctcctcggttcgtccgccgcgccgcgctcccagagactcgtctcggggcgggaaaggggtcccctcgcgttccggcggcagacggggacgcaggggtcggcggcggtgcccgacctccctctgtcccgcggccaggcgcgcactcaccctccagcagccgggtgatgaggctgtccacgttcagctccccgtccgccatcttgtcggcacagactctccttcccagcagcgggaacaagggcttctcggcggcggaggctgcggcgacggctcggcgttctctcacctacaagtcacgcggcgtttcgaccccggctccaactcccccttttcccgggccctccccccaccccctccccgccgggtagcgagagcgcgcgcacactcggaggcacccacggaaaataaataaataaacaagagaggccccctcgaacagggccgcgtcagacccaggccgccacctcctcctcctcggcaccgcccagctccgcaaagctcaccagcgccgccgacggccccacccgcagcgccactcactccgcacgtcccttgcgcgccgccgcgtcacgcagctctccgcgcaggcgcgcggtgcgctccccgccgaggctcccctcgacgcctgggccgccgcgcaaccgcactggagcggcttctcccgctgccgtcttcgcgcaggtgcgtcgccctctctccacgtccacggcgccgagtctcgccacggtggcgcaggcgccagggaggttccccggctttgccgcgcggaggaagtcccggttacgcagagcgcgctggggcagggctgaccttcccctttctctacttcactggcctcctccagacgtggtggttgcgccctttcggcctcgctttccgttttttggcttcatcccctagatctgcaaacagttcctcgtgtttcttccgttagccgggaaacgcgaactgcagcgtttgggacccgggtttgcgcgtgtggaaagcaaaaggggttactctgctggagttcgacattgcaaataaaggtctttatccccggcggttctacaaaattagttctgcagggattctggttgaaagaagcgttaaagtgggccttgtaggagtcagcaataatccaattttacatgggtgcaggtggctgcctgtgtctagcgctttcacacatctcatatcttcatccacgccgtgggtattttttttccacggtgtgtttctgttgctgcctccagtatattgcttaatcatcctacctggtaattatttatgcatttttctcctactctcgactcagctcctagggaataaaaacacattaacttatctttgtgcccacagcacccaccaagtatttccatcacgtaatactgcctctagaaaggcaggaggagaagcagtcacgctaaggatctaggcaagccagatcttttgtccggttttaggaggtggccagcccttacttattccacaagtgtttttccagaaactcagacttgatattgcctcaagtccaaggcagtgtgcttcccccactcacatatcactaatagtagctaacatttgttcagatccctgtatgtactctgccactgttttaaatgttacacccgggttacctcatttaatccttacaactgccctgtgaggtaggtactattattatctctactttgtagatgggattcaccgaggcacagacggttaaaaaacctagcccaaataacacaaataaacagcagagcatgcagtgctagagtctgcattcttaacaattgctatattctccctctccgtgaatgtgggctgagatgctgaaacaggcatgtgctgtgggggagaaaaagctttgtccaaccaagtgctttctaatgtccagatgacatagagctaggatttcctaatgtcttttttcccctatttttctctccatttcagggttgagtttgtgcatcgattgtgaacacaacaggcagcaggctataatggtggtcctggctggagtagttttcacagacttcagtaatctgtggagatgaacgggcagttctctgtagttttcacagatcactgccagttcgttttgaggccttcaggagtgaagacctggctcatcatcactctttgttgttttgttaaatttatttacaccctactttattccagaggaaaggatttaacgtagtttacataaatgtgtacatcagggtaaattaaaaataagtacagagaaaaataggacaaaagaaaaccgtgagtgtgaaagataagattaagccagcagttttgtatgcaaaatgcatggtgtaaggtcctattggtttgctggaggtaggccacacatatgactctcagttttctagcaaccaagaaaaagatcagttgcaatcggagtaggtgttttggctaagctggaactaggacttgaatatagcagcttgtagagttataccacttgcccaaatctcttccatgagcctctttaagtgtaacagaatgcctgggagcacgtaaatgctcctacttagatgcctacttagcctctaattttcatggggcccatg

SEQ ID NO: 3553 - DNA, 4001 bp, Homo sapiens
aaataaaaataaaaaaaaaataaaaaggagtaggcctctacttcccaaatgtaaacaagacatacacatttttaaattaactgtatttccctcataaaacagttacaaaatacaattattttcaaagcaaatttctcaaagacccagcaagatgttcacatctgaaacaaagtcttaggtagtgaacactgactgcaggcaccagggggcctcccaggaataacttgatagtaaaggaaaaggtaaataagagttcctggtaaaacttttgcttcctattcagtcttaagactgctggatggctttcacatctggagcaaatacacagtatttagttacagaacaggtactcacagaacttgggtttgagataccgacacatactttgagaaaaaggaattacccctcccccattacaatattctttgatgattttccaaatataagtacatactgcttcactctagcaattatcttaaggtaatttgaaagcaaacagtacatatgcaatcgctggacggcggctaacaaagaggcctctaaattgtttaaaaaggattaaaggcttttctacacactcacaaaacaattattgatgacgaaaactttagggtagagggactgtttggcagaagactgcatttaactttgaataatatcctgcaatgaatcaatacatttaactcccggctagtccacctcttcgttttccccccttgccttcccaccaacataaaactattcaataagaacacttgagcccggaaagttcaaatgctgcgtagacctacaaatacctttcgaatacaagacaggctttaaaaatagattttcactaagtttgtgcagaaattaagctctgctcaaatcaaatgcaaaagccaatcccttcagcaaacccatctacatacatcacatttcttaggtgcatcttcaacctgatcaaatatcttgtcttacaatttttttaggccaagtaacaaacggtagattaattcccgctaattttatcctctctttaagaagaatccattctatatagcattgtgtaaaaatgcagagcagacgaagcagtcctgttaaggacaggtttatatatatatacgtaaaattcactcccggaacgacaatcggaggcagccaagggcaatgcacaaagagaacagagaagaacagtgattccacggacgcacaaagcccagtggcaggcatcctctccccatcctcgggtcaccggaggcgagcaccacggcgcgcggagcccggcggcctttccgaaaggctgtctcccgcagacccgctccgcacagccttcggccggcgggcctggcccccgagggtccgcgggaacggccccctctcccccgatctcccctgaccgcgctcccagaggccgctcccccgcgcccagagcctcctcgccccctcctcggttcgtccgccgcgccgcgctcccagagactcgtctcggggcgggaaaggggtcccctcgcgttccggcggcagacggggacgcaggggtcggcggcggtgcccgacctccctctgtcccgcggccaggcgcgcactcaccctccagcagccgggtgatgaggctgtccacgttcagctccccgtccgccatcttgtcggcacagactctccttcccagcagcgggaacaagggcttctcggcggcggaggctgcggcgacggctcggcgttctctcacctacaagtcacgcggcgtttcgaccccggctccaactcccccttttcccgggccctccccccaccccctccccgccgggtagcgagagcgcgcgcacactcggaggcacccacggaaaataaataaataaacaagagaggccccctcgaacagggccgcgtcagacccaggccgccacctcctcctcctcggcaccgcccagctccgcaaagctcaccagcgccgccgacggccccacccgcagcgccactcactccgcacgtcccttgcgcgccgccgcgtcacgcagctctccgcgcaggcgcgcggtgcgctccccgccgaggctcccctcgacgcctgggccgccgcgcaaccgcactggagcggcttctcccgctgccgtcttcgcgcaggtgcgtcgccctctctccacgtccacggcgccgagtctcgccacggtggcgcaggcgccagggaggttccccggctttgccgcgcggaggaagtcccggttacgcagagcgcgctggggcagggctgaccttcccctttctctacttcactggcctcctccagacgtggtggttgcgccctttcggcctcgctttccgttttttggcttcatcccctagatctgcaaacagttcctcgtgtttcttccgttagccgggaaacgcgaactgcagcgtttgggacccgggtttgcgcgtgtggaaagcaaaaggggttactctgctggagttcgacattgcaaataaaggtctttatccccggcggttctacaaaattagttctgcagggattctggttgaaagaagcgttaaagtgggccttgtaggagtcagcaataatccaattttacatgggtgcaggtggctgcctgtgtctagcgctttcacacatctcatatcttcatccacgccgtgggtattttttttccacggtgtgtttctgttgctgcctccagtatattgcttaatcatcctacctggtaattatttatgcatttttctcctactctcgactcagctcctagggaataaaaacacattaacttatctttgtgcccacagcacccaccaagtatttccatcacgtaatactgcctctagaaaggcaggaggagaagcagtcacgctaaggatctaggcaagccagatcttttgtccggttttaggaggtggccagcccttacttattccacaagtgtttttccagaaactcagacttgatattgcctcaagtccaaggcagtgtgcttcccccactcacatatcactaatagtagctaacatttgttcagatccctgtatgtactctgccactgttttaaatgttacacccgggttacctcatttaatccttacaactgccctgtgaggtaggtactattattatctctactttgtagatgggattcaccgaggcacagacggttaaaaaacctagcccaaataacacaaataaacagcagagcatgcagtgctagagtctgcattcttaacaattgctatattctccctctccgtgaatgtgggctgagatgctgaaacaggcatgtgctgtgggggagaaaaagctttgtccaaccaagtgctttctaatgtccagatgacatagagctaggatttcctaatgtcttttttcccctatttttctctccatttcagggttgagtttgtgcatcgattgtgaacacaacaggcagcaggctataatggtggtcctggctggagtagttttcacagacttcagtaatctgtggagatgaacgggcagttctctgtagttttcacagatcactgccagttcgttttgaggccttcaggagtgaagacctggctcatcatcactctttgttgttttgttaaatttatttacaccctactttattccagaggaaaggatttaacgtagtttacataaatgtgtacatcagggtaaattaaaaataagtacagagaaaaataggacaaaagaaaaccgtgagtgtgaaagataagattaagccagcagttttgtatgcaaaatgcatggtgtaaggtcctattggtttgctggaggtaggccacacatatgactctcagttttctagcaaccaagaaaaagatcagttgcaatcggagtaggtgttttggctaagctggaactaggacttgaatatagcagcttgtagagttataccacttgcccaaatctcttccatgagcctctttaagtgtaacagaatgcctgggagcacgtaaatgctcctacttagatgcctacttagcctctaattttcatggggcccatgaatcccatgaaa

SEQ ID NO: 3554 - DNA, 4001 bp, Homo sapiens
agcccagctaatatcagtgagtattagacactgctccaggttactctgcagcttgcaaagctgtctcaccctcatcttttccccacatgcaaaagcaaatttctggaggacacatggaaggtgctcactaattttattttgaaataatagaaagccacagaattgaactgtctgatagaagtatcaccctctttgaccaaaaagctacatttccacggaaaagaaataattatatacaactgaatgatacaacagaaaattaatttacaatgaaggtacagggttgacctgataatgttagtggcttgcttggagcctcataacattggtggtgctttcaagattcattacccttatttttaaacaggataaggaagagcttggaaacctatttctagcaggtaccagagttaaatcaacagcataagctttgaatttcaattaattttgttaacttttttattttctagtataatatttagaacaaataaacaaatgaagaataaatatggatcttatgagaatatgcaacttattacaaactctaaagtttttttttttcattttaagagttacaggagcatagtattgtcagaatcccttgaatataatatcctttatttgtttattatattcatttatgggtaaatacccaaagtaagtgtcagtaggatagataataaaatttatcaatgacatcctgtccaagatagaagcaacatcccattcagcatggatagacacatgttcaaggatacatttatctggcctgagtctaggtgcatctacctcagatttcaaaacatcctgaaacactatgagtcacggattaaataattatttttaagactttatatcaaatacttggaaaaggattcaagaataatttaagttttaagaaatgaatggattaggttgatgtcctcataaatttctttgcttttgcctcctcacagttgcagttctaagagatgccattgcatcaagaatctaagtaaatctgaatatgaaaggtgatacagatgtaaaccaatattagacatggacaaagaatctaggaaatgttaaaacactgtttgtaatgtctgaacaaaacgattttaaaactgtacaaaaagctacaaatcctagctgtaatatattatataaacttataatcattgttttgtgtccacaataataaaacatatgaaaataaagtattaggcctatagtctcaaactattgcaggatttaatgattttattgctaaatcaatcattttattttataaaaaatgaaataaaatgttgctcattttgataatttttaaaagttgctctaaatgttgaaactgttattttaatgagcaaaaatgaacagatttatgaatccatatctgaattgcttacagagccattttcccctcagaggtgctaattttgtatcaaatgaagtgttacattttagacaatagttctcccaatgcaatttaaatacaagtatgtgtaaaaaccaacttatttcttgtttacattatcttgaaagtcagagttagcaaaatcaaaaggtaaagaacctttcaattaataaccagaatgcatgttcatattaccttatgtacaggaatggttctccatgcaatttcacatacctgctctgctgcttcaggtgcaatctgactctggaatacaggcacggcaaactgtatctttttgggactgttgggctccatggtaatgatgataattagtcagagatgtgaagagctcagaaagactaaccctaagtggtgtccgggatgtgtttcctcagacacactccactaagccacacagagtgcttcgtaataaatagctgtaattccagatcgagcaagtgaagatgccgaggtttgagtaacccccttcttcaacatccacggtgatgcctggcttgcctgttcccccaccaatcccttggatcctctcagcacaatacagaaaggaacaatacgctaattgtgtgcctcttcactaatacacatgccaagcattcactcagcagctaattgaaaatgcaatgctagccttgaaggacccactgccctgggatttgaaagaaaggctctatccactgtacattactaaccggctgctcaaaagtgcaatgtaagctccctctgagtattgcagggatgggccattcattattgatgaacatcaagcaggaagtttttagagttgggggcagggtttaggtatggaatcatttctctcagcaacttataagtcagatacctttgctatttcacattcagccacgaaacagttgaatggccatggagggtaagccacaaccaataatatcagctatgtttatgctataagatctggttagtttaaactcatcctaggaggcagagcatctgtggtgtagtgagggcagcattactgcagggctgagcagatcttagttcgagttccatcttcataattaacaagctctgtggcctccagaaaattactggctacgtctaggcctccacacttccatcagaaaaatgaggggattggactcaatgacctttaaagtcccatcctgttccaacattctaaaattgcagttcacagttttcattagagtggaaagtattgtgctgctaaatttagcaaacagcttggaagtcactgctgcttcaatgacctctattttatttcctggtggagccagttacattctctgacttggaagaatatgactggaaaacattagtagaaacctaatggtagtcaacattatggcttgttgtcaacagtagaaatgtatgtaaagataaggacttgaaaaaagcatgaagtgggtaatgttcagagggttgatattggctagtggtcagggaacagtgggacactagcctgattgccacattagttaatgttaaaggggaggtagtaacatagccagatggccttcatgcattcgaatacttttatgaaggaagtgtgaaaatgaaactgcttgagatctctgctttcttgagaggcattatgtgatgaatactagatttgtaaatatgtttttggatgtacttaatatatttagacatcgactatgattccaggtatttacaattgaagtttttattttttaaattttgattctgtactaggaatccatcttaatgatttaaataggcaacattctgttgaaggaatatagaaaggaatatgcattattgaagtagttttctatattcactaggggaaaaagcaaagatgtggatgtgaaagcacttttagtggagaacagtgctgactagcaagaaatcttgtgatgagtttatccgtgtagtgtcgaagggaaatttataaattacattttatgtaacagtttacaaaagtctccagaaataaaatctaaattgatatcattaatgaagttatttctttgaatatatcttcaaattatataaaaggaaagcaagacaagacagtatttttagtgaggagttaatacaaaacttcacataatgtaataattaagaacatgcacttggcaaccttgagttcaagctctagctctgctacttaccaagtttatcagtttgggcagtaggagaactttcttcttgtgaggtttagattactcaattcctgaaaagagctcattacaaggccagcacggaatcactcaataaaagatagctattatttttctttcagccagatttttcaaaaggcttcaacatacacattttcaaccagaatcactaagaatatctatctacttggaataatttgattccacttagaataataggtgataaagtgaaatttcatatatgtgtttggtataaataccaataaaatggttctcattaactaattgccctattttgaataggttgatcagagacaatattgtaaatgggctatctagaccctttaagcttcttgttttttatgaggccaactcctgtgtgtccattaagattcagttaagtatcattgcttctaggaagcctttgtagatttactgtt

SEQ ID NO: 3555 - DNA, 4001 bp, Homo sapiens
taatcttaatgagctttcataccagcaaacatggactgttccctttgcctggaaagctactactccttcatttcctcttctctaatccccagtataacctcaacgcttatccaatgtcttcggtagtcccactgaactaacacttgtcgtactatatcataactatgtactacgttagaatattccattaaaggtgacttgttaagctgaaccctgcctcactcaacagaccctggcagactgctcaaagggggcacatattgtctgctaaacaagcttacatatccaaaaacttttcagtttttattactttgggaggctatacagttatttcagcaatgtagtccctactcaaaacattttggaactcccctcttgccatttgtaatggccttctgagcttgctggctttctggagaagaaaatcagtccccttgctttatactcacgaaacattttcttatttttttcttcttttcacaggtgttgatcatgaaacattttcaaccaaaaatagtagagccaaatttgagcattgccaacctccacccacctcccttcatcacatggatttgttccaaacaacttctggcccttcaagcaaggaaacactccttcaaaagatgaacacttgccatcactaacattgtgccacaggctcttaagacaatttcaaatggaaatgcaacgaagttttgctaatggtagcatcactgaaataagtgtagtgtctcaaaagactcctatgtgatggtgaagaattaagtgtgtatgtttaggcacaagttttatttttcaaagaatatttcatcttgctatttgtcgaatgaaatcttaaggaataaaatgtgtctcagtttctccaaattgcaaaaaggaattaccatcttcccactgactccatgaatgccaaagtcactgaaaactaagcttaatgactgttgaatcaatttccaaagatgtaaaattctgctttaataacttcattaaaatattcttaaactagaaacaccctacccagaaactgcagcatccttttccaaggaaagggttatatcatttaaaagactgatgccataaacacgagaaaggggcaggtccccatgttgcttaatgtgtattgagcacccgctgggtgtctgccccattctaggtgaccgagggacaagagaaagaaaaggatagagccgtagcactcaagctttcaaaatcattcctgacaacctcttgccaaagcagtgaatacattcataaccacccatccctagtgaagcagtttacccgaatgtctctatttaccctctcgaattgattcgggggaagataaatctctttaacctcatatcatccctgtgggaggggagaagggttgatcttccccatccctaggctgagaaaattgaggaagcagcgaggtgaggagtggtccacacctttcccttcccttctcagccagcattagaggcaagaagccagaatttctgacatcccagtcccaagcccgctacttcagtgaaaaggaagaatcaaactccagcttctccctgcaaaaacgctcacggacgcagacaccgcccggccccatctcctgggagctgcaggtggaggcaccgtaatggtggacggagacggctgaggggaaaggtggggcgcgctcgcgtgcccctcccgcagtacccctaggtcccgacaagtcgctgccacggcaacctgaggccgcagggcgggggaccccctactcccagaccacgatgggtaccttcgagtactcctgagccagcttctggtacttcccctgcaactcagccgaggccatggcctcccccgccccgtacaggccaggccgcccaggcggctcagcctgtctcccgcccccaaacccagacacgctcccgggaacgggtcaggcagtatctgcctgcttggccaccgcagccgccgccgccgccgccgccgcgcctcctcctccacttccgggttcccggggtgggaggaaggtggagtggggccgggggcggagcgaccacagagggcggggcgacgtctggcgtcagtgccccacccttcgcgcccgaatacgtgcgtgcgtagcctcgctagcgtgcctgggctgtgcccctgggaccagggggcgccatcttgactcatggtccaagatggcgacctggaacgctgagcgagagaatcaagacgggaagagactcatgagagcctatagaatgggcgggggacctaggagagggacgataattgcgaagaccagagggccggaagaagaaacattctaagcgcatcaagaattctggccgactccccacagccccgggttcccatggcaaccgcctggcgcttgatggttacatctttcagcacaagcgtggaaagatttgtgtattcggctattttgtcatccgcatatgatagcacaggacatgctctgcactgtaaactctcagaccttcccgatatttgtaactttggctgctgccactggccccggctccaaaccttcagtgtcctgtattttgacatttctttgtgtccgtctctacccacttcattctcccactcctacccctttacacacaccacatcagagcttttttgtggggactgagtaaaagacctttaggaaatttcaggtatcgattccttctatgcatgcagagtagatatgaacagcaaaaataaaaaataaaaaaattgaagcagaaatagtctgcctgagagattttatgtggatactgcttgaattaaaagcctgcctcattcatttaaattttctaaagatattcttctaggtattgtatgcattgcaacattaaaatgttcattaatagagaaatgaataaatacagggcatatgtttgccataaattacaatatggcagttaaaattaataacctagatctatatatgtatatataaacatggcaaaaacatgttgaatgtaaaaagcaaattgcagtatgctacagtatgaaatgatacatttttaaaatataaagtaacatttttattgttcatggacacatgtactaaaaatacagaaacaagaactagaagggaatacatcaaattctggatagtagttgcctttagtgagaaaaagggaaaggagatgaaactggagaggacaaaggggcataaactttctccttatttctttaattttttacagtaagtataacaagattttaacatttattaggtaataggtacaggaatgttatattggcactttagaatgcttgcaaatttccatgattaaaaaagtattagtgctatttttatttgactattagccaggaattttatagtgaagggctgagtctatgtgcattttcagccactgtagtgtgtaagagaattacaaactttttttgaatattcatagttttcagtttgctcatagatcccactgtccagcaaactttcagaacaataatttttaaaattattactcttagttttctatggcaccaccgagaggcagaattaaatattgtaagtgtatctcaatgctatgtaaaataatggaattttttattatttaaaaaattgccggccgggcgctgtggctcacgcctgtaatcccagaactttgggaggctgaggcaggcggatcacctgaggtcgagagttaaagaccagcctggccaacatggtgaaatcccatctctactaaaaatacaaaaaatgagcctggcgtggtggcgggtgcctgtaatcccagctacttgggaggctgtggcaggagaattgtttgaacccaggaggtggaggttgcttgaacccaggaggtggatggtgccactgcactccagcctggatgacacagcaagactctgtctcaaaaaaaaaaaaaaattgccatcccagaaatgacattccgaggaaagaatgtgcagtgttagccagagagcctgtataagttcattttactgaatttagaattttattttgcactagtgaatccagttgctgtatcagatgcatt

SEQ ID NO: 3556 - DNA, 4001 bp, Homo sapiens
tgaagaggcgcttcttaaaaagactcaaagggtatgaagtccaagacccttaacactaccgcccccatccccaccacatacgatttggtcaaactctcctccacaccttttgacagcagttttctccgtcttgagtgattcttgctcttttccctcaccctatccccaacctcgttgccttcgagttattcttcaggctccagctcagagctcgccctgcttctgcagctgtcaccactccctaacatgtcaggccttcctgctgcacccgccctccttccccagctccacattcctcttccctacccctttcacataaggcagtgactgctcttctgggaggtctgtacccctcaccaaaccatgggacccaaaagtacttaagctgatgacacaactgattccccagttgctaagtgggtgtgtgcacgcatttttacacacatactgtacgtgcacgtatatgactgtacctacagatatgcagaaaattataaacacatgtgtacgtataacatatacatatatgcatgtggtttttttttccaacaaagtgaatgaggaggaagaaagttgaattcagactttttggaactatgacagctttgaaaacaggtatcaccttgtgtaactcaatcttccggttccttgttaccccttcccaacagtccattcgatttcaagagaagacccttctccaccctcaccacgtgaaccaaggagcagactctggtagatcccagcgcctcagtttcctcgtcagctgaccgaggaggctcccccgcccgtcaatctcagaggctcggggcgaggctccaactggactgaatggagccaccgcgtcccattcagccccacccccggcctggcctcgcgccgccgctctccccctagctctgggtccttcccggccgctgccgcccccgggccggggctcccccgaggtccagcgcctcccccgctcccccgggtccggctgtcagctgtcagggggccgcgcggcggcggccagaggcaggacgtggagtttctctcaggcacggagcagttccagcccgcagctccccccgcccgctgggcccttgggccgccgcccgcaggggccgctcaccctccatcatctcctgcgactgttgctgccccgcgccgcgttccgccgccatgttggctgctcttcccctttccggaatctgtcgcctcagacccctcagccaatcagggctcccgcctcagagccggccctgccaatgggattccggcgcggcgacttcagccgcgccgcgcctgcgtgggcccagcgcctcatgggagttgtagttccgtcatgaggccgcgcgccgcgcctcccccagagcaggtaatttcaggcggcggagccggaacagtctggaggcgagaagctgggaaggaaagcagagggagtcgaagcgggacgcacagagccgtagctgcaggcagacggagtggacgtctaggcagagtggagagacgccctgggcttgagagttgacttatgtcactgtctcgacctcggaggcgtggaggggccgcgggccaggcggatctttccgtggctgcaaggtgcgggccagtcctacgtgcatccctgacctctgcgagcctcgctggctgcgtctgtacaatgggccgaacggcaagagcaacaacattctcccggcgtccccgcgcggattttacccatgcgaaatgccgccttctcttgacgctcggagcaggcgggcaggtgcggggcacttgcgctggtggggccgctagccagctggctggctccggggcgccagctgggctccccttgcaagtcgttcccagcccagtgcggacgctgcagccttcgtctaccctgcggagccacccggcccatgaacgagccgccccgcgtcctccgccttcagaaagaggcctccaagaggcgagctctgcgctactcacccattttgatcgcgagtcgggaggaaaccgcatctgcccggcccgggggcggaggcgcccattattcctttggctcctccgaagcgccgtaggggtgtttggtgcgtccctagcaacccttagcgcgggcttctagactctggctagcttagtcccgcccatacgcgcaagtggctggtccgtggagcttgtcaatcggtgctagtcgctgtgcgattggtcggtgggataaaagcgcggaagggctcctttccgtggtgtgtagccggcttggcgtgaccctcgcctgatccaggtgagatacctgcgctcgggagagcgggccgggctccgccatctccccagggcggctgtggggcctgcgcggctccgcgcccctggcccaggaggatccgccgcccgactcttagaccagcccgaccccgggtctcccgcccctgcgcccgtcgcccttcgcgcaccgccgagcccgcgtcctctccgtgcccaaatcgcggcggggttgcggccgttggccctgggccccgcgcccccagcgtcttcggggtgcccttcagtgtagcctgcccggtgggcgccgaggccccgcgcctcgggtcgcctcgggaccctgcgctctcttcaccgcagccggccctgcggggcgagctccaggagaaccagcccggatcccgccagcctcctgcactgggcgtgtgggtccctgcgggctcagccggcgccgcggggtcgggggcgcgcgccgccggcgctcgtggttacagcaaagacctggacttgagccttaattttttcactaatttttctttcccagagtacggcaggggcctgcgctgccgtcttgaggcctttctcgtccttaccttccgcatctcagtaccattcgatgtccatttttctcttaggggttccctctcttcatctttctgctgctaccttaatttaagactttataatttcttgcctggattactgtagcctttctcctgctttccagccttgcaccgacatggtccctggagtaatctttgtaaaatgcatatctggccatgttactcctaagcattgaatccttaaaagttcattttggggataaaattaagactttgggcaggcataggaggctctgggctcatgcttggcccttccaggcccacgtccacctactcttctgggtactgaactcctctctgggaggctttgcctctgaaagacttcttcactctgcttggtagggcccggctctgcaggtgcctcctccaggactgacatccttgctgtgttctactgcactgttcaccttgttggcctcatcctgaaactggttctcctttttgttgtacagctgtgctgacagcaatgggagctgtttgcttcttagcttatgttctggtgggagggggacagttgcttctagaagttcgccgagatgctccctgcaaagttgtccttgcttctgtttggtctgaggtggggtcacttgtgtcttctggaatcaaaactagcaatgggaatatggttactcggtggcaccattaggtgctgtctgctgggtttgggttcccgtgtctgcagctcacagtggatacaaaggacaattttaaaaatttgggcctggacgtgcaggtatttctggttaacgtctgagtcaaaatttagtgatctaaggtcatgtgaagccagactctgttctttcttgaggccaggctgtggctgtggagtgcacgggaggctccaggggcctatgctgttcagtgacaaactggcccacgtggacttcagatgcccaggaggcacagcgggaaaaaggatgcatctttcctgctgtcctccccgctcccgcagagggtcccatcagtttccctcctggataggcttgtaactctcagtaacctaattaaacttccacaactttagttggtatttatttactttctcccatgaaggacaaaaaattgcatgcccttaccctccctttgctttttttccccctttccatttcatgttagttacttttacaaagaaacttctgtaacatttacaatatattc

SEQ ID NO: 3557 - DNA, 4001 bp, Homo sapiens
tggtcaaactctcctccacaccttttgacagcagttttctccgtcttgagtgattcttgctcttttccctcaccctatccccaacctcgttgccttcgagttattcttcaggctccagctcagagctcgccctgcttctgcagctgtcaccactccctaacatgtcaggccttcctgctgcacccgccctccttccccagctccacattcctcttccctacccctttcacataaggcagtgactgctcttctgggaggtctgtacccctcaccaaaccatgggacccaaaagtacttaagctgatgacacaactgattccccagttgctaagtgggtgtgtgcacgcatttttacacacatactgtacgtgcacgtatatgactgtacctacagatatgcagaaaattataaacacatgtgtacgtataacatatacatatatgcatgtggtttttttttccaacaaagtgaatgaggaggaagaaagttgaattcagactttttggaactatgacagctttgaaaacaggtatcaccttgtgtaactcaatcttccggttccttgttaccccttcccaacagtccattcgatttcaagagaagacccttctccaccctcaccacgtgaaccaaggagcagactctggtagatcccagcgcctcagtttcctcgtcagctgaccgaggaggctcccccgcccgtcaatctcagaggctcggggcgaggctccaactggactgaatggagccaccgcgtcccattcagccccacccccggcctggcctcgcgccgccgctctccccctagctctgggtccttcccggccgctgccgcccccgggccggggctcccccgaggtccagcgcctcccccgctcccccgggtccggctgtcagctgtcagggggccgcgcggcggcggccagaggcaggacgtggagtttctctcaggcacggagcagttccagcccgcagctccccccgcccgctgggcccttgggccgccgcccgcaggggccgctcaccctccatcatctcctgcgactgttgctgccccgcgccgcgttccgccgccatgttggctgctcttcccctttccggaatctgtcgcctcagacccctcagccaatcagggctcccgcctcagagccggccctgccaatgggattccggcgcggcgacttcagccgcgccgcgcctgcgtgggcccagcgcctcatgggagttgtagttccgtcatgaggccgcgcgccgcgcctcccccagagcaggtaatttcaggcggcggagccggaacagtctggaggcgagaagctgggaaggaaagcagagggagtcgaagcgggacgcacagagccgtagctgcaggcagacggagtggacgtctaggcagagtggagagacgccctgggcttgagagttgacttatgtcactgtctcgacctcggaggcgtggaggggccgcgggccaggcggatctttccgtggctgcaaggtgcgggccagtcctacgtgcatccctgacctctgcgagcctcgctggctgcgtctgtacaatgggccgaacggcaagagcaacaacattctcccggcgtccccgcgcggattttacccatgcgaaatgccgccttctcttgacgctcggagcaggcgggcaggtgcggggcacttgcgctggtggggccgctagccagctggctggctccggggcgccagctgggctccccttgcaagtcgttcccagcccagtgcggacgctgcagccttcgtctaccctgcggagccacccggcccatgaacgagccgccccgcgtcctccgccttcagaaagaggcctccaagaggcgagctctgcgctactcacccattttgatcgcgagtcgggaggaaaccgcatctgcccggcccgggggcggaggcgcccattattcctttggctcctccgaagcgccgtaggggtgtttggtgcgtccctagcaacccttagcgcgggcttctagactctggctagcttagtcccgcccatacgcgcaagtggctggtccgtggagcttgtcaatcggtgctagtcgctgtgcgattggtcggtgggataaaagcgcggaagggctcctttccgtggtgtgtagccggcttggcgtgaccctcgcctgatccaggtgagatacctgcgctcgggagagcgggccgggctccgccatctccccagggcggctgtggggcctgcgcggctccgcgcccctggcccaggaggatccgccgcccgactcttagaccagcccgaccccgggtctcccgcccctgcgcccgtcgcccttcgcgcaccgccgagcccgcgtcctctccgtgcccaaatcgcggcggggttgcggccgttggccctgggccccgcgcccccagcgtcttcggggtgcccttcagtgtagcctgcccggtgggcgccgaggccccgcgcctcgggtcgcctcgggaccctgcgctctcttcaccgcagccggccctgcggggcgagctccaggagaaccagcccggatcccgccagcctcctgcactgggcgtgtgggtccctgcgggctcagccggcgccgcggggtcgggggcgcgcgccgccggcgctcgtggttacagcaaagacctggacttgagccttaattttttcactaatttttctttcccagagtacggcaggggcctgcgctgccgtcttgaggcctttctcgtccttaccttccgcatctcagtaccattcgatgtccatttttctcttaggggttccctctcttcatctttctgctgctaccttaatttaagactttataatttcttgcctggattactgtagcctttctcctgctttccagccttgcaccgacatggtccctggagtaatctttgtaaaatgcatatctggccatgttactcctaagcattgaatccttaaaagttcattttggggataaaattaagactttgggcaggcataggaggctctgggctcatgcttggcccttccaggcccacgtccacctactcttctgggtactgaactcctctctgggaggctttgcctctgaaagacttcttcactctgcttggtagggcccggctctgcaggtgcctcctccaggactgacatccttgctgtgttctactgcactgttcaccttgttggcctcatcctgaaactggttctcctttttgttgtacagctgtgctgacagcaatgggagctgtttgcttcttagcttatgttctggtgggagggggacagttgcttctagaagttcgccgagatgctccctgcaaagttgtccttgcttctgtttggtctgaggtggggtcacttgtgtcttctggaatcaaaactagcaatgggaatatggttactcggtggcaccattaggtgctgtctgctgggtttgggttcccgtgtctgcagctcacagtggatacaaaggacaattttaaaaatttgggcctggacgtgcaggtatttctggttaacgtctgagtcaaaatttagtgatctaaggtcatgtgaagccagactctgttctttcttgaggccaggctgtggctgtggagtgcacgggaggctccaggggcctatgctgttcagtgacaaactggcccacgtggacttcagatgcccaggaggcacagcgggaaaaaggatgcatctttcctgctgtcctccccgctcccgcagagggtcccatcagtttccctcctggataggcttgtaactctcagtaacctaattaaacttccacaactttagttggtatttatttactttctcccatgaaggacaaaaaattgcatgcccttaccctccctttgctttttttccccctttccatttcatgttagttacttttacaaagaaacttctgtaacatttacaatatattctgaatagttatattacttttttattattttattttttgagacagggtcttgctctgtggcccaggctggagtgcagtggtgctgt

SEQ ID NO: 3558 - DNA, 4001 bp, Homo sapiens
accttcaagtaaagcatgtgcataaggaaattctattaaagcactgaaatgcaattcttcacttcaaaagactatgccaacaaaaagattatatgatgaatggctatgatcttcctaaattgttttgtgactttcaggtgccaaagttgcctctctgagctgcctcgcaagttggcaaggaaaaactttctctacacatcaaaatcggcaatcatttaagtctgctcttaatctgggttttaagtgcaccagtaagcacttactcatttgccctatattttaaataaaagctgacttacctgaatattctaatttcacgttcttcccttaaaatcgatttcaccaaatcgattttaagttgtaagcaacagcattcctcccttcagtaatccaccacgtacactgaagcacttaaattctacatacagggtgggataccatacagtggaaaagatgcgagaaattacccaccgtcaaccagtttaagtcttctgacaactgttcaaagacttttagagaaagcctaataactgaatcgcatgatggagtatctgatatacgcggaatagcactctgaactttctctactgtgtatacaactcttgattacaaagaggaaactaacgactagggcttccccgagcgagagaaccggtaaggtaacaggctaaaagggcgtcgttgatttcttggctgcagcgacagaggcgggagacacacccctagcgtcggtctgaaacactacagcagcgaattctacctagggattaatgtgagggtaaggaaagacaaattaaaatcgccatgattcaaaaacaaccactccaagagagagacacaagaaggtaccaaagaaaatgaaaaaacccttggtagtaacggaagcatgaaaaattaagcgcccccatttctcccaaaccaagttcgcgtatgttttcgtgaacaaacaccttggatctttccggttcgccagggcagcgagcaaagcagcagcgaacggaaaccccgcagggctgcgcaccgcagctaaaccgacgctcgcaggagaggggaagtgagtggcagggttccctgccaagactcactgctgggaaacaggcagtgagtggaagcagcagcagctctggagagtaagtgggtcttatgtaaagtgccatttgccacatattgttatttccaaaggatttcagaataccctcgaactcgaaaaacagagtgagtgtggaggggaggggggtgctccacgtggaggagggtcgcgagaaggagagtgcgccgggctgatggtcagcggtgcccgcgggggtcgatgccgggcgggaccggcggcgcgggggtggggcgacggcggggcggcggccgagcagcagaggggcgccccgcagaggccgggggcgggcgcgggggccccgccgccgtcctgtcagcagccgccccgccgccctctccggctcgcccgcaaccgccgcgggacccgccgggcccgggtctctggaattttccacgggggacagccgaccgggggcgtcggggctcgcccccgcacccgacccggacggcggcagtagggggagggatggtgcatcgaggaagccaaggtctcaccattttgctcggcgggtcggcggctcgctggctcgctggctcggagaagtgttgcgctcaggctggctcgcaggaaacggcggcggcggcccagctgcggccctcgggtcgccggcggggagggggcgcgcgtgggggaggggaggcggcgccgcggggcccgcgccggccgggcgattgggcacgcgagggagcgggcagggtagggggaaataaattaaggtcgagattcagagccggagagcgcgggaggagcagcggcgagaggcaggagaggcagagaagaagaaaggagggggagagggggcgaagacggccgggaaactcgggggctgcagcctcgcgctcgcgccggagccgtgacggactcactgcagcggctcgcgctgacccgcaacctcaaggcacgaaaaaaggggagggcggagagggaggggaaagcggagtgctgcagcgcgcggggcgggggcggggcttccgcgagcgccgcacatccgggaacctgcgcgccccgctgggcggcgagtgccgcggcgctctggcgagctctggttggggaacgctgagcgcgcggaccacgttcgcccctcagccggccgccccttgcgtgcagggtggggggaggccaggggcgggggcgcggacgtcggtgacgtcgcgtggcggagcccttccggtcatgtggctggaggcgggcggggaagaaggcaaggctgggaggggaaggaggaaatgcgagggttccccggcgggaggaagcgcgaggggtgcgcgagtgctagcgaaagggggacaggggccctggagtggaagccttgcgggagaggaggagcagaggagcagtcttagggtgtcagaaccacccggatgccgcaccaaaaaacaggaaaaatccaagtcctgcgagaggcagtcaaaggtatctgtgcatccgtgtaccgacttggatccactacagaattgcacggcccatcaggactgctgtcaccccggtgcagcacccgcaggcccatctgtaatatgaattggcagagtcaggaaccaggttgcaaagacagagaagcgagccaaagctggccgcagcccgaggcgtggggagaacctgggcaaacgaggagaagggatacttcccactcgcagaaagactttccacccagctctgcattcccataaaccgtccagactcccctttggcggagtccatcagtttttgtttaaaaaaagaaaaaaactcgaatgtagattgcccgcttatccttttagtagagctatatccactcctgtggcaattatcttcccagaaaattcagattacaataggaaattacatccagaaaagcataaggaggaaatttatgttcgagagaagaaataaagctgtcaggagaggtgtgatgaggataacgaagaaaacattttgcaactattttaaccagttattcctttacaagccttgataatcgcccgcactcgtgtgtgtttgagagtgtgtgtgtgtgtgtgtgtgtgtgtgagagagagagagaggatgttttctgagtgatcggaaactccttattgataaagcctttgagtcattttataaaaagccattgtgttgtttttttttaaaaaagtcttaatgatccttacatgagaactttattctttttatgtgctaattatttttccatatgatgagcatgcatttttttctaataaacgctcagcgatttgccctaggactaaatggttcctgtctctctttctctctgtctttctctctctgtcaatccccccctccccgcccctccatccctccccttcccccttcaggagctactttgcttctgtgtcaggatgaataaggaaaagaacttagacataacaagctgtgtcacacagtgaatgtatcaaggaaaggccaagaagggacactttcttccacaagtttcttgatttaaatatgttgctatttgatactaacatattacagaacaagaaaaagtccctagggtatatgtgtaacgttttctaggtatactatttaaaattagttttttatcataaaaagacgtgctttttaagaaaaagtactgtatgcaaaattcttcctctctccacttaccagaggtaatcatgctaactgcatttgtttgtgtcccttggacattttcagtgaaaatcaaattattttaactaaggggtatgcactaagaaggaattcgagctatttggaatacagtggatttaaaataacccataattttgttgtgttggaggcaatttatactagtctgaattcagtaagataagtaaatccaaaatgcacctttaataggtttttcatcaaaaggctgaggggaaaagtatggtaagtagtcattctcctttttgtctctttccattaaattttg

SEQ ID NO: 3559 - DNA, 4001 bp, Homo sapiens
ctggtgcaccagccccgacagagccccctttacctgcacgtgatcaactgcaagacccttagacaggccagcagggatggcagcaagctgctgccccacccaacccttgagctcccatgcccaggaagatccttccactgccagaggtctagctttcactaaggtgagctgggagaggtgacagctggcagatctaataggagccctcacctgcgtatctctgagggtttgcatttttcaagcaatgctgcaaaagtggtggaaatgcaggcctaggggctggcggcaggagggaatctatagactctacagacagcctggcttcttttccttcatgggtccagcttcagcttccccagctcagggacctagcaaggggccgaggccaaatcccactcctggctttcatgcccttgtcccctctcccacctgaacagtcaccacagccacttccagcctgtgtcctttgccacaacctcatcgctccagcctctctgctcccagcctggtggtggcaccaacctgaaacgcatgctgcccacctcccctgggtgcctctcaaccctgccatccagcctgggacccccccctccccaccccgcagggtagagtcactcacaagcctggaagaggtcacagtccctcccactgcaagcctttcccaaaaatttcccctcaaagccccctattggatgactgtgcccagggccgggctccatagggccggcgcggggtccaaagcctgagtgggacccctcaccctcccacacctgaggtctcctctttctcccccgcaccccttggcttcttcccatcctgtatgccgcaccccccaccccgcccaccaggaaggcttgtgtggaggaccaggcttcagaccccactgggtgatggcggggggcaaaggggaaggcctggcctggccagggggaaggggcgagaccactaggttgaggtatgtgttttcctattgttggggctcaaaaatgataccccaaaagtttggcgctctggcatgatgaatactttgaataggaaagccttagaagctgcctcagaatcaaggatttaacgacctttccgtcaccccttcccaactgcagagactctccaacttccttacagatgactaaggaaacttctttctacaagaaatgcaattgtcttaagaccctctcccaaggaatctcattaaataaccaggaaagattccccaccaatcaccgggagaagagaagagattcatacattcttagttcaaccccttatttcacaggtgaggaaaccgaggcccgagaacgaggttgacggtgcgtggtgagtttagggacaatgaatatgacagcctcgaggtgcaaatggccttgctcagggccagcaggttttgtcactagcgcaccaagggctgcctccgctgggtctgttttctcatctgtaaaatgggcgtgcgcaatcaattcgtgccacgcggggcttggtgagaaacaatgtacgcgggtggcgggtggccgtgggaagagcaccccgagcccctaggctccctagttcaccctcggccgcccagctgcgacgccggcgcgcggggatcatccccgccctacttcgagccgaggctctcctgggctcccagccggcagcagctgcgagggggcaggaggcagccccggccgccccgggccttaccctgccagctccagaagtaaactcggaaggctgaggccccgcgcgctgcgcgccgctagcacagcggagatctgcggcagcttcagcgcggcgcacacgcccagcgtgctccagttacacagccccagcagcgccgcctccatagcgccacgggcgcgggcacctgggcggccgcagcgagaagggaccgctcagcctcggcggcgcagctctgccgaagccttccgccttcccgggatccgcccgggaccacccggccagggcccgcccctccgcgcgccgccaggccccggacccgcctcgctccgcccctcccctggacgcaccccgcccccgggcccgccccgcccctcccgcccgggcccgccccgccccgcccctcccgcccgggcccgccccgccccctggccagcctcatctcgcctcgcctacgggcccgcccgggctcgctcagtcctcggactaccctcatctcgccccgcccccagattcgccccctcccggtcggcctcacctagcccaatcccgtggccaacctcgcctcgccccgcccctcctcgccccgcccctcccctcctagccccgccccgggcgacagtcccaccctggcctgcgggctccaccagcagctgcttcgcatttccgcgttcttgccacccgatagtttagccgccgccgggagccgccctggaagtccggcttttccacgggttgggtggaccgagaggcaaatggccccgggggatgggccattctgccgggatttttccctccctgcaagtgttttagtttctctcactaagcatttcaggagttaaagcctcctgcttaagggctgagtgcaccctcccgacttacaggtggggaaccaggctggagagactttctgggaccagagccccagggtcgcctcatttgtgccctttcagagcacgcggcctgtctccagcctgggactgaaggcttccctcctagcggcgtgggccctgaggggccaccggaagccttgaacttgagcacttcacagtgaaactgtttcttaaggatttctcctgataaagtaacttggacgtggccgtctaagccacaaactgagggaaagggaaggacgcattttccaacctctgaaaatcgcctgtgtattagggcctggttatgaagcaggcaaaaaagcaccaaaatgcaatgccagaatccacgatccctggttttgtgccataaatctcagccgggaagtgtgagggacgggagctgggtcagcttcggagttcggaattctggccgaggctctttctctccagcctcaccggcccatcacctccgcctatggaaaaaaaaaaacaggtgctgagtcctgcctcccaagtctaaatgagaaaaggatgttcagaagggaacccttaaaggaaacggcttggacctgccctggctagatcgatactgatcgttattgaccccgcgaagcgggaagattgcttgaggccaggagttcaagaccagcctgagcaacatagggaaacccccgcctctactaaaaatacaaaaattagccgagcgtggtggcgcgtgcctgtggtcccagctactcgggaggctgagacaggaggatggcttgaacccaggaggcggaggttgcagtgagtcgagatcgcgccacttcactctagcctgggagacagagccagaccctgtctcaaaaataaataaataatatgtatataaattttttgaagaagaaaatagagaagagcttttttttttttttgagacggagtttcactcttgtcgcccaggctggagtgcagtggcacgatctctgctcactgcgacctccacctccggggttcaagtgattctcctgcctctgcctcccaagtagctggaattacaggcatgtgccaccactcccggctaatttttgtatttttagtacagacggggtttcgaactcctgacctcaggtgatccacctgccttggcctcccaaagtgctgggattacaggcatgagccaccgcgcccagcgtaaagagctttttaacaagcatcagcagcaatgactataggaacatctagaacctgttgagtgcctcctgcgtgccaggtgttttactttcatcatgccatgtgataggtcccttgatgcaaggaggtggtcctggttggaagtgcctggttcctgccacatggcagtggaatccccctccctcctcttccccttctgccccagcctttattccaggggttggccaggatctgggcccccaggactagccttaggagggaactgctcccacctggggtcagcctgcgctagca

SEQ ID NO: 3560 - DNA, 4001 bp, Homo sapiens
cctgcctcagcctccggagtagctgggactacaggcgcccgccaccacgcccggagaattttttgtatttttagtagagacggggtttcaccgtgttagccaggatggtctctatctcctgacctcgtgatccacccgcctgggccttccaaagtgctgggattacaggcgtgagccaccgcgcccggcctctttttcttttttttgagacagggtctcactttatcacccaggctggagtgcagtggcgccatctcgcctcacagcaacctccacctcccaggctcaagcgattctcatgcctcagcctcccaaatagctgggactacaggcgtgcgccaccatgcctggctaatttttttttgtattttttagtagagagggtttcgccatgttgaccaggctgatttttttttttcattttttaaataggaatggggtctcgccttgttgccagggcttgtgatcctcccaccttggcttaccaaagtcctgggattacaggcgtgagccaccgcacctgccctggattcataatttttaaatatctgcctcttccactttgtaacttcattcagtgaagagtcaccagtgtcttgcacagtggctacaatatagggatagccctataaactttcctgaatgggtgaacaactatatctagctccacagcaccgatgaagagaatttccagaccactagatttttctggggcatgggatcttctcctcagcaccaaagtttaatgttgtacctggacttgagtccctggtttccttaacccagagagactgcggaatgttgaaagataaaaactgctgtcatgggcgggcgcggtggctcacgcctgtaatcccagcactttgggaggccgaggcgggcagatcacgaggtcaggagatcgagaccatcctggctaacacggtgaaacccccgtctctactaaaaatacaaaaaaattagccgggcgtggtggtgggcgcctgtagtcccagctacttgggaggctgaggcaggagaatggcgtgaacccgggaggcggagcttgcagtgagccgagatcgggccactgcactgcaacctgggcgacagagcaagactccgtctcaaaaaaaaaaaaaagaaaaaaagaaaactgctgtcacaagtctgttagtctatcaacaaactaccaagtcactactgtgtaccaaggatggcattaaggctttagctgtctttgtttactgcccaaatcacagccatcagttagagctcccatggcttggcactgggctatacagtcctgggagtggggactccctctcggatacaaatacacccccagaaagccttcctggactagcgtcaaactcactccctcctccccaacccttgcttgcctttgtgtgtgcttatttgtgtaagttgtgggtatacgtatgtgctcacttatgtgcatagatgtatacatttatgtgcttgtgtaggtgtaaacggtttgtgcgtgtgtgcccacgtgtaggaatgtgtgctcctgtgtacatgtgaatgctcacatacatatctccagcctgtagtatccttccttagctgtcccttctggtcgcaccctaagtcacctgggtcggcgctagtgggcggggaggggcgagtggggagatctgctttgtcgtgggaaggtgaggagtcagagcttcagcctcaggctgcgcccactttatgtccttggaccaccacccacttattccggccgcccgctcccagacctgtcctgctctgaactcgcagggtccccaaggtgacccttggcccccaacccgagacgcgcgcaagctggacggccagccccgccctgcaacgcagtcccacccgttgccgctcaccgtgggccgcgacgcacgcggggagccagagcacgagacaacaccagcccgcggcgccggggaccatctccagggccgggcccggcccggcgccgcgtttcctctcgccgccccgccgcgcgtcgctcgcaggacttcagcctgacagctgctccggcctcccgcccacatacccgctctcgccgcgggctggacgacgggaacgaggctcaaggctgattggctctgacgcctgctcatgtagccacactttccgcctctgcgccttagcctacttcctattggtcgagagaagtggagccgggggctgattggcttaaactcttaacagctacaaccggccttcgcctcagccccgccccagcatactctccgggtcctcgctggcggtgggcgggccagggaggacaagcactggaggtgtgcccgtagccggacttgcttcagctgtcgatagtcgaggccgttaacccttgcggtctcggtcctgtccactccaaggccgcctcgattgacgacgattagccttctcccagctgcgcttccctcctcccagctgcgcttccctcctccccacgccttcacgggaaggcactcgtcttgcgccagggggtcttccgcccagtgccaccaacgcttgcgcgctcaccgtggataggcgctggggccgcggcctggcgcacgccatccacgaggagcctctggccagtgcaaagccagaaaacgggcattgggggcagcttcccacgctcgtcccgttgacactgactatgtaactgtgacactggacaccttgacctctcagcctcctttctgtcatcagtaaaatggccttaataggaccaacgcaatagggttgtgaggattaaatgagatcgctcacgtaaagtgctttggcaccagcctatcccacactttgcgtcccacacttttgcctttattgcattccttggtctggcgtccggggatggaggagggtggaattaagttagtaggtgatgcgggccgagcaaagaccctccgtgctctaagaagcacgaccgaaatgcggcgacccctctttaatgaacgcccctcactagagagtccccgaagcccagcctcaggtccttctagccgcaccgagtcggtggtaacgaaccatagagtagcggaagtggtccgttctcttcctctcccggcccaagcttctgggtatttctattgcgcgaggcattgtgggttgctgggcggcccggtctcggagaagaggggagagtggcgggccgctgaataagcttccaaaatgatggtgagtggcgtctcgcgcatccgtcgccatcagctgccatctggccggtggccggcgccgctcggcctgggcttgctctgtaggaccctcttttgcttgccgcctctgtcctcgcccagatccccagcttaggggcgaccccagccagccgcggcctggctcggcccgagcacggcgctggagccgttggcgagggctgcgtggggctttagaggagtctctgggctggccggttggggactacaagtcccagggtgcttcgggcccgcgaacccacgtcggggacctcttttttagccccgcatgatcgggacttgcgtgaaacgagtgcaggtcggccgtggttacgcggtcggcagctagacttggaagctggggctgctctgagatttgcgggctgtaaagacgtgtgcttcttggaaccggcacaggcacattggggacctcatattgtgcccgcctagggactcactatgttcactcgctgaccctcaccgcagcgtgcagagaagcagacgccttccctagtacttttaattcattcactcattcgctcagtcattaaataaacgcgtctttagtgcctactgaatgtaccaggccctggtggttgctgggggttgcagcctctcagccaggagaacgggaaaggtagatggagacactgtatcggaggtgggaagacccaggctcggactctggtgacataagaaaggcttttctagttggctacctaactctgggtctcgttttcttgaaatttggggcgagggagttgctgtgagtcctggagccacctaaagtgctccttgtagccctacttcccacacttcttttctctgtct

SEQ ID NO: 3561 - DNA, 4001 bp, Homo sapiens
agctgatccttctgccacacagaggccttaaggtcccggcccacggttaccaactagttaggaataaagattccaaggatggacagttaggggatccacttactgggcaagcagcataagcacctcctctctcctttctccatcctcctcccacccccagcccctcaccttgccatcaggccctaaagccaggtcttcaatctccccttcgtgggctttgaactccagaaccttctccaggctgggcacctgtagccaaacaaccaccatggttaactcaggtgtccagcaagtacactgtgactgatgcccacgccaccccttctaatggcccctcaatgcaagcttcattcacaagtttcccagatgccacgttcaacttctcacaattttgatcctgttgctactgacattcaccctccctaaccctgcaaacccacaccttccagacacggacgtagccatctgttcctccagtggcaagcagggtattatcgtggttgaagcacacaactttctgcagtggatcggagctaaagtctgtctgcaccgcctgcaaattctctaccctgagttctagcccctcgtgctgggtttccgctccacatttcttctctgctggggctgctcccttcctttgtcgaggcccctgctccttggaacctgtaacacaaacacttggccaggttccaggcttctacagtaaggagtactggcccctctctccatggcaggtgcccatacaacttctagcttgctaccaaaaccctacttccagacccacttctttagagacaccaagagtgaccttactcgttcaaccctttccccaagggggtagagagggagctcctcaccggccttctctgccttgttgccctgctgttgatgtgcctggaagcgcaggagctgacagtgggcatcctgccctgcagcaaggatgtcaccagccagtgccaagttcatggtggcccgtgtctctgtgtcatgggagtgcagcaaggaggcactcaagcgcccattaatcagctctagctgcagaaagtgctgtgggagggggaacccggatgagcaagttcaggggtgcccagagagcacgtttagggaagagtctgatgtcttacccctttgctttctgcacgttctagttcacaagggtttctcgagtcttttttctctcatttgggcctcacaaatctacacagtgagcaggactgggattattacctctattttacagaacagggtgaagctcaggagagggaaggaacttagcctaaacccaaatgcaccactctcgccgctgctagagggcaggcaagacctcccggaaaaggccagtataagacccctggagctgctctgaggcggagctgaagcgttcctggcgactctgcagctgtgtgcagttttcactttaccttaaaagcctctcctccgcccgctgagttctcgactgaaattcgcccctgggcgtcaggcaagcgggtcttcccaacagaagtgggcagggcccgaagctggagtgtggcccgccccgcgaccccccggccaccctggaatcgccgccagcccgcagcaagacccagccccagtggccctgcgctctcaccacgccattctttatgcctgtcttggcggcgcctcctccgcccgcagcgatgagcagcccagtgctggggtcgacctgaagcgcgtacaacgggaacggagcccggtacagctctggcgcccggcgccggcccatcccgcccggcgcgcgttcactgcccgcaccgcggcacccaggacatgccgcgccgggccttcgactactgccccggcggctggtgaactcggccccgtcgccgccgggagcactccctacccctctcacaccggggagttgccaaaaccctgaccatcagcaggaagccgagcctcagctcggctccgtccaagtcggtctcgcagacgcgcactgcgcatgcgcacctgtctcgcggctccctccgcgcaggcgcaggagcgccgacacgcgtcagcactagccggccgcggggccgcgtttcccggggcggggcttcggttctccacccctggcgcggaggcagagtcgcccagcaccgacttcgccatttttgtgcggggcgcggggcgcgggcggaggaggtggagccaatggaggttgatgaaggtcaacctttaataaagaaatccgactcgcgcctgtaatcccagcactttgtgagtcctaggcgggcggatcaggagttcgagaccagcctgaccaacatggagaaaccccgtctctaccaaaaatacaaagggcgtggtggcgtgcgcctgtaatcccagctactcgggagcctgaggcaggagaatcacttgaacctgggaagtagaggttgcagtgagccgagatcgcgccattgccattgctcttcagcctgggcaacaagcaacaagagtgaaactccgtctcaaaaaaaaaaaaatcctctgccaggcacggtggttcatgcctgtaatcctcctgtaatcccaacactttcggaaagtccgagagaggaggatggcttgagcccaggctttcgagacagcctgggcaacatggggatccgtccctacgaaatatttaaaaattagccaaacatcgtggcacctgtgggcccaggtgcccaggaggctcaggcgggaggatcacttgagactgggaggtcgaggctgcgctggaccaccagtgatgtcaccactgcactccagcccctgggcaacagagctagaccctgtctctcacacacataaaatcctcaaataaggactgttcccatctgaggagtgatatgccaactcctaggagcacaggcctttgcatcttacctcagagaggaagtgatttgcccgagggcacacaccagaaaccaccggagtctcttgcttcttaacggaggcagcatgaacttaaaaataaacctgacttcaaatgctgaatccattgcttcctcgtatgaggacacgtctgtcatccttaacgcctatcgcccacttttggcaggggtggtgtctgccattccctttctcaaggcttcacactcctgggctggtggcttggtgggtggccagctgctttgctggcctcagagggggcagtttggctcccgggcaggtatcttctgcgcctgacactccattctccctcgggtttctgatctgatgaggacctttgtgcactcctgagagcgagcacaagggatgtccttccctgcaaagagacgccctctcctgcattctcattaacctaaggtgcacccagaggaatagcgcagtggcttcatctttggggatgccaatatctgtcccacagagttgaattagatgtgtgaagggcctggccaagctctctgcatatctcaagtccccaggccttgtgggtcccttgtcctccttggatacatggcacctgctctttctggcctctccgtttcctttgacaccaccctccagggtcttttttattttttgagacggagtctcgctctgttgcccagtctggagtgcagtggcctgatctcagctcactgcaccctccacctcccaggttgaagtgattctcctgcctcagcctcctgagtagctggaactacaggcacccgccaccacacccagctaatttttgtatttttagtagagatggagtttcaccatgttggccaggctggtctcgtaactcctgaccttaaatgatatgcccaccttggcctcccaaagtgctgggattataggcatgagcaaccacaccatgccctcttttttttttttttttttttgagatagggtctctgtcacccaggctggagtgcaatggcatgatatagctcattgcaaccttgaactcctggactcaagtgatcctcccactttagcctcttgagtagctggtagtacaggcacgcgccaccatactcagctaatttttttatatttttgtttttggagagacagggtcttgctatgttgcc

SEQ ID NO: 3562 - DNA, 4001 bp, Homo sapiens
gacaaaatgttctaaacacaatgcaaaataaaataacctaaaggtccaaaatttagttcaataggtgaaattaaaaattttatctttctgaagtaggaaagatgtacaaaaaacacaaaaatgaaataaaaagaagttataaagaatttctaaatgagtaaagaaagtactaaactaaggcaagacactacaaaaaggaaaagaatttcaaagactaaaacataaacagtaaaagtctaggaagactagggggctaacatataaaatgttaaaagcaaaagagacacacacaacacctaaataggtatcagctaagatagcggcaaaaattgaacaaaaactagaaaaactgagaaaaattagattgaaaagatagtttctaaaatgagaagaatctgcccaagtgtccatcaattacaggaatggataaacaaaatgtggtttatacatacaaaggaatattattcaactataaaaagaaatgaagttatgatacatgcatacaacacagatgaactttgaaagccactgaattgcatactttaaaatggatcaagtggaaaactttgttatacatatattttacccgaagaaaggaggaagccaaaacagactaaaagaaaaatcagtatgcgacaaaaccagaaattaaaataaaaaaaatattaaaatcataaatttgtgaaactattgcaagaataccacccccaaatatcattaaggaacctaaggaacataagaagtaaaaggtaggagagggatgtcaaagcagcagcagcacaaatagatcatttaatcctacttactgtaggatgaccatataatttaccattctaaccaggacacttttgagaggaaaggggacactattaataattacacagggacaacaggtgtaggctggagctgtgccaggcaaaagtggttatgtggttactctctatataagggcaatcaggtccttaaggttgagttcacgcccacagcttggggtctggcagaagtacaatactctgacagtgtcttcctgaatgactcaagtggtcaaaaacgcaagattatttttcatttttttacagagaaataaaatacaattcatggcctttactgaagtttactgatttgtgattcataaaacaattagcgtatcattagattttattaagagctataatttagtgttctaggaaatttagaaggccgaattatactttgaaatgcactggcaggcatactaaggaagtcctgaggtgaatcattttttataaacctacatttttatatattacattagagccctataaatatatgtatacactttttttttttttttttttttcagacagagtctccctgtcacccaggctggagtgctgtggtgcgatctcagctcaccgcaacctctgcctcctgggttcaagagattctctgcctcagcctcccaagtagctgggattacaggtgggtgccatgacgcctagctaacttttgtatttttagtagagacagggttttaccatgttggccaggctggtctcgaactcctgacctcaggtgatctgcctgcctcgatgtatatactcttttatacttacttttgactagagacaattgagacttgaaaattagaaaaatcaagttagaattactgagaaaattagtagctctgatattctacccattctttatttttaaattaaaattaatcttaatgacctacaaataggttaacttaaacagtccataccttacatgagaagctccgacttgggatgtttcttgctaactctgatatcttgggtttattctgaagacacttggttaggtgatattttttcaattttattctattgtaacaatgatcagcgaagttatagtgattcaaatgctgtttctgcatgcattttccaaggtgaggaatactatacttcaaagcttggagaaataatttggtcttctgctgcatgatatcaaagtccctggtttatgctccttttggggctgccagcacacgaatgattttataggtatgattacagagtagtgggttctcagagtaactaagatcagcagttctcatccctccttttcagggccatgccccacttaggttatgaataacttcagacagctgataacttaggctaactaaatctaaaaacctgtgtaagttaaagtttcattcaaatcataattcttggcagatgtgacttaaatgtctcatttgtaaagttaatcctatcaggctcaaactatgcagcactgactctggcacacataggggttaaactaaaacaaaaaacaaaacaagaaacaaaatataaatttgcaaataagtacacagacttaatggggtatctcaggaactcagggctgtaaaaggtaaaaagccctttggtcttacataattatgaacgtatctttggtatatatgtggaagataaactggaaaagcctaattatttaataaaggtgggggagggaagattaattattgttgagtgttaactaactgccaggtgcttttatcttgtttgtctaatttaaattttatatggacttaataaagtagatattaccatgcacattttacaggttgccaaactgtggctgtgggaggttctaagcaactgttccaggtcacttgtacagtaagctgtatagcaaaaaatccaatttggttcggttccaaatactggacatactcaacttcggatttttaatgttaaaaaggtatttagcgctttaattaaaaacaacaaaaaacccctgcaagatgcacaaataaaatgtaaggccatctctggtttgtcaggaggtagcttttattaaccttgattgctaataagtagttaagagtcagagagacctgggttgaggtcttagctcctacacttaactgtgtctccgggcctcagtttcttcatctgcaaaaatgaaatgacaccatttaccttctagggttgttgttgtaaagacaaaatgagacagcttaacattaagaccatacagtgcctggcacatagtgaccactcaataaatggcagttgctattatttacgacaggaataatctaggtatgttgcacaccgctgaatgtcattatggaagtcttccacaaaatgccccctggtatcaaaggtagaatgctgcgtcaaatttaccatagatcagatgcgctacgacgcccccgccccccttaatccctttccatgtcgcagcaaaataatgggcgattgggggtaggggagcaacactagtttactagccgacactagtaaaaaaaggggaaaaaagacccgaataacaaggacctgcaaaggtcctacatcaccacgttcccacagcctttatccatccatctttcatccccaagaagacagtatgcaaggctaggatgggggtggggtagataaatgggtgttctcaggagaacctattcgtttaccccgtgcaactctccaccccagggatgaggcgatctgaatgcaacagggagagggaccaggtgacacgcacgcagtgccgggacattagtcaaaaagcgaggacctggggactgaggggtgggtggctgggcggggggagaaaggggagaaggaaagagaccagcacaccccccatacatacgcaaattgagagaatcagtccggctctggacacaaaccagtgaaggcaggccggagaacctgaagctctcagaggggagcaggtgtcaccgcaggcaagtccagccgaagtctgcgttccgcagcccacagaacgacaacttacccagagccgcctagagctggtttgcagcacgccaatctacgtaacctcaatctagcacgagcaacaggcagatttcgccatctttgttgtggtcaaggagtcttcttgggttcctgggttctttagtctcgaaatatataagacttttcgttcttcgctagtcttctgagctcgagatgaagcacagaaggctaaaacaatgagggacagcgttccagtagccctgc

SEQ ID NO: 3563 - DNA, 4001 bp, Homo sapiens
atgaataacttcagacagctgataacttaggctaactaaatctaaaaacctgtgtaagttaaagtttcattcaaatcataattcttggcagatgtgacttaaatgtctcatttgtaaagttaatcctatcaggctcaaactatgcagcactgactctggcacacataggggttaaactaaaacaaaaaacaaaacaagaaacaaaatataaatttgcaaataagtacacagacttaatggggtatctcaggaactcagggctgtaaaaggtaaaaagccctttggtcttacataattatgaacgtatctttggtatatatgtggaagataaactggaaaagcctaattatttaataaaggtgggggagggaagattaattattgttgagtgttaactaactgccaggtgcttttatcttgtttgtctaatttaaattttatatggacttaataaagtagatattaccatgcacattttacaggttgccaaactgtggctgtgggaggttctaagcaactgttccaggtcacttgtacagtaagctgtatagcaaaaaatccaatttggttcggttccaaatactggacatactcaacttcggatttttaatgttaaaaaggtatttagcgctttaattaaaaacaacaaaaaacccctgcaagatgcacaaataaaatgtaaggccatctctggtttgtcaggaggtagcttttattaaccttgattgctaataagtagttaagagtcagagagacctgggttgaggtcttagctcctacacttaactgtgtctccgggcctcagtttcttcatctgcaaaaatgaaatgacaccatttaccttctagggttgttgttgtaaagacaaaatgagacagcttaacattaagaccatacagtgcctggcacatagtgaccactcaataaatggcagttgctattatttacgacaggaataatctaggtatgttgcacaccgctgaatgtcattatggaagtcttccacaaaatgccccctggtatcaaaggtagaatgctgcgtcaaatttaccatagatcagatgcgctacgacgcccccgccccccttaatccctttccatgtcgcagcaaaataatgggcgattgggggtaggggagcaacactagtttactagccgacactagtaaaaaaaggggaaaaaagacccgaataacaaggacctgcaaaggtcctacatcaccacgttcccacagcctttatccatccatctttcatccccaagaagacagtatgcaaggctaggatgggggtggggtagataaatgggtgttctcaggagaacctattcgtttaccccgtgcaactctccaccccagggatgaggcgatctgaatgcaacagggagagggaccaggtgacacgcacgcagtgccgggacattagtcaaaaagcgaggacctggggactgaggggtgggtggctgggcggggggagaaaggggagaaggaaagagaccagcacaccccccatacatacgcaaattgagagaatcagtccggctctggacacaaaccagtgaaggcaggccggagaacctgaagctctcagaggggagcaggtgtcaccgcaggcaagtccagccgaagtctgcgttccgcagcccacagaacgacaacttacccagagccgcctagagctggtttgcagcacgccaatctacgtaacctcaatctagcacgagcaacaggcagatttcgccatctttgttgtggtcaaggagtcttcttgggttcctgggttctttagtctcgaaatatataagacttttcgttcttcgctagtcttctgagctcgagatgaagcacagaaggctaaaacaatgagggacagcgttccagtagccctgccacagctctctcatcctctggtccgccctcactcaagatggctaccagcaagaatggtgcaatggcgtgacagctcggccctggttgccaaggagatgcgagtaccggaaatgcggaattcggggagagcgcgcatgcctggtccggtggagggagggtgccgggcgtcacaggtcctgacagggaagaagttggcaggtcctggcaggggacgagctgcggcggtggcacctccgggtgtggaaggctccagtgagatggagtcgcgagtcgcggacgctgggaccggcgagaccgcgcgagcagcgggcgggagtccggcagttggctgcaccactcgggggcccgtagtctcggcgcccctgggagccgcccggtggaagctcctgcggcaggtaagggagaacctgctcgcctcacctttgcctctggtcactcctctctcacgtaccgggggagcgactgttcgcagttctttcctcttggcagctctgggagacccttctcagtttgccgggagccacctgcgaagctccccctcgcttcacctaagcgtcccatccaagaggaggaatcatgtggggttgggtggggagcgggacagccaaggctgagctcctgggaaactcagatcgaagtagaagaaccccttctagacatttttgtgcgtctgggggacttttccccttctcgccagtctctggtgcgcccgccgctccccactgctcttttcctgcttctgttttgcctccttccccagtttcttctagcttaactcccagcctggttcgagttaccgatattcgtctgcaccctctggccccgtcttttgcccagcgtggttgactatgccgggactgagacacggcatgcgttccctcggcatcttccgtacagcggagcgtgcaaggagtaggaaaagctgataccctctctcactgaggtctcaaagttaaatgattatcttgtagtttgtagtgatcagcgagattctccgtgtccaaggtgggctagtcaaagtgtgttcgtttttgaatgatggtatcttctggtacttcaaagtttctgctgttacttacaactccactcgtgcaagcttgacggaagttctgatttatgatcactcacattcttcgctcacttcttgaagtgaagtctggttattgtttttgcatagcagtgttatgcctctgcctgaagttttctgccgaaaactttactcaggaggacatttttccatttctgacagttgtgtttggaaaagagtttcccagctattgccactttacttgagattgtgcttttagtattttggggatcactttgtttgcagttgccttgagtcaccttttcatacagtggtcttttagtgcttttagagttatgagttaagtagatcatcagagttaattaagatttatttgctgatacattgacagtctttccagaccagtaatgatctggttttgctattgttacaaatggtattacaggataagaaaatgcatgtcctcacagatcatcataggaagtatctataataaagtaaatatctaattttttttaatagtgaccactgaaatgagatctggcgtgagctggggagagtggactcaaccccccttcccccctcctttttttttgaaatggagtttccctcttgttgcccaggctggactgcaatggctgccatctccgctcaccacaacctccgcctctagggttcaaatgattctccttcctcagtctccccagtagctgggattacaggcatgcaccaccacgcctggctaattttttttttttttaagtagagacggggtttctccatgtttgtcaagctggtctcgaactccccacctcaggtgatccacccacctcggcttcccaaagtactgggattacaggcatgagccaccgtgcccggcaacccccttcttttttttttttttttttcgatacagagccttactgtgttgcccagacgtgagtgcaatggcgcaatctcggctcactgcagcctccgcctccctggttcaagcaattctcccgtactcagccttccgaatagctgggattacaggtgctcgccattacgcccagctaatttttg

SEQ ID NO: 3564 - DNA, 4001 bp, Homo sapiens
gacacttggttaggtgatattttttcaattttattctattgtaacaatgatcagcgaagttatagtgattcaaatgctgtttctgcatgcattttccaaggtgaggaatactatacttcaaagcttggagaaataatttggtcttctgctgcatgatatcaaagtccctggtttatgctccttttggggctgccagcacacgaatgattttataggtatgattacagagtagtgggttctcagagtaactaagatcagcagttctcatccctccttttcagggccatgccccacttaggttatgaataacttcagacagctgataacttaggctaactaaatctaaaaacctgtgtaagttaaagtttcattcaaatcataattcttggcagatgtgacttaaatgtctcatttgtaaagttaatcctatcaggctcaaactatgcagcactgactctggcacacataggggttaaactaaaacaaaaaacaaaacaagaaacaaaatataaatttgcaaataagtacacagacttaatggggtatctcaggaactcagggctgtaaaaggtaaaaagccctttggtcttacataattatgaacgtatctttggtatatatgtggaagataaactggaaaagcctaattatttaataaaggtgggggagggaagattaattattgttgagtgttaactaactgccaggtgcttttatcttgtttgtctaatttaaattttatatggacttaataaagtagatattaccatgcacattttacaggttgccaaactgtggctgtgggaggttctaagcaactgttccaggtcacttgtacagtaagctgtatagcaaaaaatccaatttggttcggttccaaatactggacatactcaacttcggatttttaatgttaaaaaggtatttagcgctttaattaaaaacaacaaaaaacccctgcaagatgcacaaataaaatgtaaggccatctctggtttgtcaggaggtagcttttattaaccttgattgctaataagtagttaagagtcagagagacctgggttgaggtcttagctcctacacttaactgtgtctccgggcctcagtttcttcatctgcaaaaatgaaatgacaccatttaccttctagggttgttgttgtaaagacaaaatgagacagcttaacattaagaccatacagtgcctggcacatagtgaccactcaataaatggcagttgctattatttacgacaggaataatctaggtatgttgcacaccgctgaatgtcattatggaagtcttccacaaaatgccccctggtatcaaaggtagaatgctgcgtcaaatttaccatagatcagatgcgctacgacgcccccgccccccttaatccctttccatgtcgcagcaaaataatgggcgattgggggtaggggagcaacactagtttactagccgacactagtaaaaaaaggggaaaaaagacccgaataacaaggacctgcaaaggtcctacatcaccacgttcccacagcctttatccatccatctttcatccccaagaagacagtatgcaaggctaggatgggggtggggtagataaatgggtgttctcaggagaacctattcgtttaccccgtgcaactctccaccccagggatgaggcgatctgaatgcaacagggagagggaccaggtgacacgcacgcagtgccgggacattagtcaaaaagcgaggacctggggactgaggggtgggtggctgggcggggggagaaaggggagaaggaaagagaccagcacaccccccatacatacgcaaattgagagaatcagtccggctctggacacaaaccagtgaaggcaggccggagaacctgaagctctcagaggggagcaggtgtcaccgcaggcaagtccagccgaagtctgcgttccgcagcccacagaacgacaacttacccagagccgcctagagctggtttgcagcacgccaatctacgtaacctcaatctagcacgagcaacaggcagatttcgccatctttgttgtggtcaaggagtcttcttgggttcctgggttctttagtctcgaaatatataagacttttcgttcttcgctagtcttctgagctcgagatgaagcacagaaggctaaaacaatgagggacagcgttccagtagccctgccacagctctctcatcctctggtccgccctcactcaagatggctaccagcaagaatggtgcaatggcgtgacagctcggccctggttgccaaggagatgcgagtaccggaaatgcggaattcggggagagcgcgcatgcctggtccggtggagggagggtgccgggcgtcacaggtcctgacagggaagaagttggcaggtcctggcaggggacgagctgcggcggtggcacctccgggtgtggaaggctccagtgagatggagtcgcgagtcgcggacgctgggaccggcgagaccgcgcgagcagcgggcgggagtccggcagttggctgcaccactcgggggcccgtagtctcggcgcccctgggagccgcccggtggaagctcctgcggcaggtaagggagaacctgctcgcctcacctttgcctctggtcactcctctctcacgtaccgggggagcgactgttcgcagttctttcctcttggcagctctgggagacccttctcagtttgccgggagccacctgcgaagctccccctcgcttcacctaagcgtcccatccaagaggaggaatcatgtggggttgggtggggagcgggacagccaaggctgagctcctgggaaactcagatcgaagtagaagaaccccttctagacatttttgtgcgtctgggggacttttccccttctcgccagtctctggtgcgcccgccgctccccactgctcttttcctgcttctgttttgcctccttccccagtttcttctagcttaactcccagcctggttcgagttaccgatattcgtctgcaccctctggccccgtcttttgcccagcgtggttgactatgccgggactgagacacggcatgcgttccctcggcatcttccgtacagcggagcgtgcaaggagtaggaaaagctgataccctctctcactgaggtctcaaagttaaatgattatcttgtagtttgtagtgatcagcgagattctccgtgtccaaggtgggctagtcaaagtgtgttcgtttttgaatgatggtatcttctggtacttcaaagtttctgctgttacttacaactccactcgtgcaagcttgacggaagttctgatttatgatcactcacattcttcgctcacttcttgaagtgaagtctggttattgtttttgcatagcagtgttatgcctctgcctgaagttttctgccgaaaactttactcaggaggacatttttccatttctgacagttgtgtttggaaaagagtttcccagctattgccactttacttgagattgtgcttttagtattttggggatcactttgtttgcagttgccttgagtcaccttttcatacagtggtcttttagtgcttttagagttatgagttaagtagatcatcagagttaattaagatttatttgctgatacattgacagtctttccagaccagtaatgatctggttttgctattgttacaaatggtattacaggataagaaaatgcatgtcctcacagatcatcataggaagtatctataataaagtaaatatctaattttttttaatagtgaccactgaaatgagatctggcgtgagctggggagagtggactcaaccccccttcccccctcctttttttttgaaatggagtttccctcttgttgcccaggctggactgcaatggctgccatctccgctcaccacaacctccgcctctagggttcaaatgattctccttcctcagtctccccagtagctgggattacaggcatgcaccaccacgcctggctaattttttttttttttaagt

SEQ ID NO: 3565 - DNA, 4001 bp, Homo sapiens
ttatgtggttactctctatataagggcaatcaggtccttaaggttgagttcacgcccacagcttggggtctggcagaagtacaatactctgacagtgtcttcctgaatgactcaagtggtcaaaaacgcaagattatttttcatttttttacagagaaataaaatacaattcatggcctttactgaagtttactgatttgtgattcataaaacaattagcgtatcattagattttattaagagctataatttagtgttctaggaaatttagaaggccgaattatactttgaaatgcactggcaggcatactaaggaagtcctgaggtgaatcattttttataaacctacatttttatatattacattagagccctataaatatatgtatacactttttttttttttttttttttcagacagagtctccctgtcacccaggctggagtgctgtggtgcgatctcagctcaccgcaacctctgcctcctgggttcaagagattctctgcctcagcctcccaagtagctgggattacaggtgggtgccatgacgcctagctaacttttgtatttttagtagagacagggttttaccatgttggccaggctggtctcgaactcctgacctcaggtgatctgcctgcctcgatgtatatactcttttatacttacttttgactagagacaattgagacttgaaaattagaaaaatcaagttagaattactgagaaaattagtagctctgatattctacccattctttatttttaaattaaaattaatcttaatgacctacaaataggttaacttaaacagtccataccttacatgagaagctccgacttgggatgtttcttgctaactctgatatcttgggtttattctgaagacacttggttaggtgatattttttcaattttattctattgtaacaatgatcagcgaagttatagtgattcaaatgctgtttctgcatgcattttccaaggtgaggaatactatacttcaaagcttggagaaataatttggtcttctgctgcatgatatcaaagtccctggtttatgctccttttggggctgccagcacacgaatgattttataggtatgattacagagtagtgggttctcagagtaactaagatcagcagttctcatccctccttttcagggccatgccccacttaggttatgaataacttcagacagctgataacttaggctaactaaatctaaaaacctgtgtaagttaaagtttcattcaaatcataattcttggcagatgtgacttaaatgtctcatttgtaaagttaatcctatcaggctcaaactatgcagcactgactctggcacacataggggttaaactaaaacaaaaaacaaaacaagaaacaaaatataaatttgcaaataagtacacagacttaatggggtatctcaggaactcagggctgtaaaaggtaaaaagccctttggtcttacataattatgaacgtatctttggtatatatgtggaagataaactggaaaagcctaattatttaataaaggtgggggagggaagattaattattgttgagtgttaactaactgccaggtgcttttatcttgtttgtctaatttaaattttatatggacttaataaagtagatattaccatgcacattttacaggttgccaaactgtggctgtgggaggttctaagcaactgttccaggtcacttgtacagtaagctgtatagcaaaaaatccaatttggttcggttccaaatactggacatactcaacttcggatttttaatgttaaaaaggtatttagcgctttaattaaaaacaacaaaaaacccctgcaagatgcacaaataaaatgtaaggccatctctggtttgtcaggaggtagcttttattaaccttgattgctaataagtagttaagagtcagagagacctgggttgaggtcttagctcctacacttaactgtgtctccgggcctcagtttcttcatctgcaaaaatgaaatgacaccatttaccttctagggttgttgttgtaaagacaaaatgagacagcttaacattaagaccatacagtgcctggcacatagtgaccactcaataaatggcagttgctattatttacgacaggaataatctaggtatgttgcacaccgctgaatgtcattatggaagtcttccacaaaatgccccctggtatcaaaggtagaatgctgcgtcaaatttaccatagatcagatgcgctacgacgcccccgccccccttaatccctttccatgtcgcagcaaaataatgggcgattgggggtaggggagcaacactagtttactagccgacactagtaaaaaaaggggaaaaaagacccgaataacaaggacctgcaaaggtcctacatcaccacgttcccacagcctttatccatccatctttcatccccaagaagacagtatgcaaggctaggatgggggtggggtagataaatgggtgttctcaggagaacctattcgtttaccccgtgcaactctccaccccagggatgaggcgatctgaatgcaacagggagagggaccaggtgacacgcacgcagtgccgggacattagtcaaaaagcgaggacctggggactgaggggtgggtggctgggcggggggagaaaggggagaaggaaagagaccagcacaccccccatacatacgcaaattgagagaatcagtccggctctggacacaaaccagtgaaggcaggccggagaacctgaagctctcagaggggagcaggtgtcaccgcaggcaagtccagccgaagtctgcgttccgcagcccacagaacgacaacttacccagagccgcctagagctggtttgcagcacgccaatctacgtaacctcaatctagcacgagcaacaggcagatttcgccatctttgttgtggtcaaggagtcttcttgggttcctgggttctttagtctcgaaatatataagacttttcgttcttcgctagtcttctgagctcgagatgaagcacagaaggctaaaacaatgagggacagcgttccagtagccctgccacagctctctcatcctctggtccgccctcactcaagatggctaccagcaagaatggtgcaatggcgtgacagctcggccctggttgccaaggagatgcgagtaccggaaatgcggaattcggggagagcgcgcatgcctggtccggtggagggagggtgccgggcgtcacaggtcctgacagggaagaagttggcaggtcctggcaggggacgagctgcggcggtggcacctccgggtgtggaaggctccagtgagatggagtcgcgagtcgcggacgctgggaccggcgagaccgcgcgagcagcgggcgggagtccggcagttggctgcaccactcgggggcccgtagtctcggcgcccctgggagccgcccggtggaagctcctgcggcaggtaagggagaacctgctcgcctcacctttgcctctggtcactcctctctcacgtaccgggggagcgactgttcgcagttctttcctcttggcagctctgggagacccttctcagtttgccgggagccacctgcgaagctccccctcgcttcacctaagcgtcccatccaagaggaggaatcatgtggggttgggtggggagcgggacagccaaggctgagctcctgggaaactcagatcgaagtagaagaaccccttctagacatttttgtgcgtctgggggacttttccccttctcgccagtctctggtgcgcccgccgctccccactgctcttttcctgcttctgttttgcctccttccccagtttcttctagcttaactcccagcctggttcgagttaccgatattcgtctgcaccctctggccccgtcttttgcccagcgtggttgactatgccgggactgagacacggcatgcgttccctcggcatcttccgtacagcggagcgtgcaaggagtaggaaaagctg

SEQ ID NO: 3566 - DNA, 4001 bp, Homo sapiens
attacgtgtgctaacagagagtagaagctgtccctcccccaactggcctccatagtgctaagaaggagtcctttcagggggcttgcaggggcacctggctcagcagggcatcctgcagggtgggagtggcggctgcagcaccgtgtggatggagagtgagtacaggttgggcagagccgtggcctcacctccagcatggtgtcgaagatgactagcttggagctagttgccatggcatcgtagcaggtgtgctcctgcatgaagcgcatgtagatctgggcgccgggtttccgcagttcgtcatcccagcccagcttgggaaatggggcctgcggggacaggcacagggcaggcctctcttccagcaggccttctagctcacactcccaggcctctgtggctgggaactccgtggccagctccacatcatctgtgctggagcctgcagctgaggctgtacagtcagaggggaggcagtcccaccctgttggtggagtgcccaccccggcaggatcagcttgagccaagggtgtggtcttggggaatgtggcctccagcccggtggactcagcagctggcctggaccggggacctgtttgggggaggaggggaagaggacagtaactccatcttccaaagcacgttctcatctgctgtcgccattcatctcacagcagcagtgggaagcctggatgctgtggccctatttgcaggtgaggggctgacctgagagtcgccccaggtagtggctctgtcccatctttctgagttggccatgctggcctctggcactgcagtgccttgttctctactatgtagggagactgaggccacaagatgaaggttgggtccaactctgtgttatggagggacctgaggtagagaccagacccaggctcctctgggatttcccactcccctggctcccacctccccagaactggccttggcctcaccttccccctgacctggtggctccccttcctccaccgacttctgccttgtccatctcaaggctttggccctccgtttcccacggattctttctgagctgctggtcacagctggtgatggccatgagctgctgttttcttgctctaggaagctcatctctggaaggggaatggggcctgtttggttaatagggagtaatgcatcaaaatcaattcaaatgttattcataatctttaggatttgcaagcttccaatgggcttttctccaacatatttctcatttaaaacttacagcagccttataaagcaggcattattatcatccctattttgctagtgagggaccagaaattcagagaggttaagcaatttgctgcaaatcacacagcaagtaagtgggaaagtcacttctgaaaagaggaaattggaggtgagggaaacacacctggggaaaggaggaagaacaatgaggaagaaagaccaaaaggaggaagataaaagccaggctgggagggaattggggtcccagaaaagtgggggacaaggaggtgggggaagaggttaggccccagggagggggcattctccctaccttgatgctcagaacccccaaggctgctccaggaaggggtctgtggggagaagagtttctgaaggagtggggaaagtgccttacattcccaaaccccttctccctgaacacacgcctacacacccatgcacaccaatacacacgctcagacacacgccatacacagacatgcagccatacacaaacacacacagaaacacacacatccaaacactcccaggcacacagaaccacacacactcacaatacatatgcccaaacatgcacatgcccatattcacgagaaaatccagaccaaacacacaccagaagacacacacgcccacacacacattcacagcccgtgcgctcaatcttctggcctcagctgccccggctccggctcccctgggacccccataccctgcgcagtgcgtgctccagcccgggctccatgtggccagccccagaccaactgagagcaagtgtgcgacactgtggctgggctgcactattctgggcccggccccgggcaccctgccctgccaggatcggtttctctctgattgggtgtcaggcaatgagagggaggggcccccatttgctcagctgctacagccctgaaggctgggggttgctgggagggaaggggcgcaccggataatctgggtacttggtcctcagctgcctcctgggtcactgaggacaagctagagggaccctttttgaggggatgtggcttggagcatgtgggaacatggtcattgagcagagttgggctctcagagtcctgagcccctattccaagagcctccctcatctttatcaggcaccaaagaagggaacatggaggcagatcagcataactttcttccttgttctaatttcagtagagggtggtgctggagttagaaagggcaagttgcagccagctcagaggctggagatgaggcaaggggtttgtgggtagtccaggagagcagctagtgtatgtccagatgtccagatttgagtccctggagtgtgtccctctctcaggtgaaggagatggagtgggtgtttcaggcaggtgaagagctgtgagaatcacctcgaaggcgtggggagcactcagagctccccgcaggggaagagacatctgtttccacctgtggttgggagatatgcctgggtgtgcaggtgtcccagcccccaaccctctgtgagtgctgtgcctacatccctggtgccaacaggatcccagcctggctccagtagctgccaccctcttccttggcattcccggagcctgagtcaatgtccggattgggaatgctgacccagctgctccggctttcctctctctgcccctccctttctctcctccttccagcctcttccatcccagccctggccctggagtggacactcaacaacagactggtgaatttctgtctgagtttattacatgtgttttccatcaaccctcaatgttcctactctgccaatggggagggtggaggagaatggagttgggaggacagccttggccagggctgttcctgtggtccccagcctttctcaaggacatctgctcactggacagtgggaactggctcagaggacagagatcagtgtaagagaatttccttcacaccaagcatgttttttcaaatggactcaagatagccaccaccagtttgagagaaaggagagtaggaagaacaccaagtccagagtgttcaagcataaaaataaggtctacatgaggccattggctgtggttactcaaacatggagccactcagaaggcttctaagattgtgagggtgttgtattggcaaagaaaccataagcctgatcagcaaagcctggtttgacaccccttcccttgccttattcccagccctccaaatccgcaccagcaggaagagggctgtgaaggctggaaggactgcagaaagcacaagtttgccagtgtgggacaaaggatattggataaacaacagcttcccagcaggaaaagccagaggctacataggagagtggaaaggggagatcttcccagagagcagaaccaggggtggtcaaatgtgctgaccaagaacttactccactgccaggaaagggcttagccattcctgcccaaccagatttgataattaagatccagcagctgctgggtgtttgccattctttcagttgcaagtggatttttttttttgagacagtgtctcactatgttgtccacgctagtctcaaactcctgggctcaatgatcctcctatctcagtagctgggactataggcgcgtagcagtgtgctcagcatgagtcagtgttttaattgagcttaccctcttcttcctccactgttgtctgtggggagtaggaggtgcaaatcacctgcctgttagtttttaggtcaccagaccatagggtgtccatctacctggaagaaggaactgcccacccctcagatagcctggactctcagc

SEQ ID NO: 3567 - DNA, 4001 bp, Homo sapiens
ctgaaggaagcagagatgagggacatctgtgaagtagaatagaatggcatggagttctctgggattccataaaggtttgcctgctttccaaagtgcaaaccacaaatctagagttctacgcatgtggcttgttggagcttccctgtgaaaccgtaaccatggtttcaggcagactacatcacagccatgagcacaaaaacaacaggctctctcttatttttccctaaaactccgtgtccttgaaaaaaatatgtaaggtgatatgccaaagtgatccatgtgcaacctctgacctctaggacattcatgaagttagctggttttcaatagaaagcaattgctctacaccacttttgaggcttagatagctctctcactttttgtgtagaccaaagaaccctgaaaacatatacctccagaggaacgcttgtacttgctggaaacatgtaacaaacctgaaaacacaaaaatccacatcctaaattaataccttccttccaagaagagagaaaaaaaaaaaaaaaaaaaaaaaaacaacccaaaaacaaacacaaaaagcaaaatgaaggtttgcttctctctgcttgtccaagtgccaagactggatgcatttggtttatagtagattgagacaagacctctttccaaatccttaatagtttaataatggaatcaattaacaactcaatctcatacttagaaatcgtcttttattgcacagtatcttgacaatcaaaacagagaaacaatataactttaaataagattcaaagcactgacttccaattacccacaagcagaacccttcttaaaatgcaacattcattctgcatggatgggcaatgaattggacaaaacaagctcgactgatgtttctgggaccatagaggagacatcctggaggagaacacattttttctacttgtatgtcagaagatgagctaaccaccatgcaagagaatagaaacaagccagcttcctctcggagggaaaaataaagcaactcctcgctcggctaagcaggacaaagccaggacgtgcaagaagccttcagtcaaaggctccacgtgcctttccaaggacggagggacccacccacacacaatcacacacagccagcccaccacgcgcctgcggaagaaagccgggtcctcggccaaccttcagcaccagtggcccaggctctcccagtttgcaaacctcccgcagcacccaccaactggagggcacagagggagcagagggccacatcctctttccaagtctcatcttcctcgccaatgcctgtttctccccaactatgaagtgaagtgtacctccccaaggaaactgagacttacaggcacacacaccccagtcgtcaataagtcccggagccctacgatcaagaccagcgagtctttccccgggaccccacaaccgggttcccggaatgacggggaggcgccgcactcacccagtcctcgaagtggcggctcccgttctgcagcagctcctcaaactggatggtgcagttggccacgaagtcgtcgtagcctatgggggcatcgtgaaagacagccagctcgatcttgcgtccgttgcacacatcggtgacgaactcgtcgtgccaggccgggctgttggtcttctgcttggtggccgtttggccgatgcgcgagtcgtccacattgagggcaatgtaggggtcgagaaggaaagtctgcggccggggtcccaccgcatggcgcagcgaccaggctgtgggcttcaagctcacggcctcgcagattttgatcttaagaaggccattgaacactaccatggtcggggcggggagtgggggccggggtcactccgtctgccccgagggcaggaatgaagaaccgacggcccggcactccgagccacagggactcttgggtcccctttcgccccaccccgcacactccctacaccttgtggcgttgcgccctggcgcgggcgattctcagccagtgcatgtatttcctcgccgggttcctaacggaaaacagggaggggggagagctgggggatgtccgtgtttggagcaagtctctccccccgaccaccagctgcacctccagaagagaagacgagctgtcggctccgctgcaagccgcgggggctgcctcgccgcctcgctggctctccggctccggactgcgggaaagcgggcgccgcgcccggcgcttacctacctttccgaaacataatcccgggaaatttcgactccgggagggggatggggcggtgggacggggcggggacgagaaccgggggcgcagatttcaacccggatcctcttcgcacactcagcgcctgcctctgaccgcgcggggcgggggggtgaacggagggatgttcagtctatccggagggatgcatgtcgagaggaaatggtcctcctcggagccaaatttttaaaaatccacaagccccacggccagccggggccgccgcctcctgggcgaagcagcgccgcgccggagccggcgatcgggaggcgccaggagcccggaatctcacatccgcgcgggctcggagtccgggcggccgccgatccggctcgggggcgcaggccagcaccgggcggtgcgcagcgcggcggcggggcagggactgcgactcagcgcggccccacctcctgggcgccggcgcccgccctccgcgctccccgcgtccccgctctcggctgccgctcgctcgccgcccgccagcccgcgctcccccgcggtctcctctccctctgtcggtgtgcgagcgagtctccctccctctaatgcaggaaatgcgcaaaagacgtcagtgtgtgtgagtgtgtgtgtgtgagtgtgtgtgtgtgcacgcgcgcgcgcgcacggcagtgtttggggaaatagaaagttttgccggttgggggagcaatacggaaaaagtgagccgaggagacaacggtggagagctggcgaggctgcccggggtcgcagcggcgggcgggtcagccggggggcggggaccccgcgcgggaccccggggtgcggcggcgctgggctggatgcgcgtgccgggggccgtggatggccatggatgggccccgccgggccgcgtatctctcggggaccctgcggccaacactgtcttttagagccggggatgggggagtggagggggccctgttgccctagaggcctcgggacccttcccttgcccacccccactcgggccgcggcgggcaggagcagtctgcggagttctggcccatctgtcactctgtcccgggacgctgtgatccacggcggtgggggagggggaagggggagggacaagcatggctcgggtgaagttttaaactctgttcttctctcttgcctttctttggggacattctcccctttgggatctgtcctggacttcgcaggctgcgagaacttgttgacaagtgaaagctcggtagagccccggcttggtttgtggtctgcttattttttgcaaagtgactgttcctgtttgcgctggtccttatcggtgcccctttgggggacttcggcactgatcagcgcgctgacagccgccgtccgggctgcgggaaaatggggcgcgccctccggggggcgagtggctgtgtccttgctaatttcctccgtaacctttaaactctcgctggaagctaccgccgcggctggtcacgtgaggagagccctgggctgctggggaaaaatttcctcggctgggagccgggaccgggccggcggccggcgagggactgccccgcgcccgagactgggaacctgggagggcagggccggagcgctgggccccggggcgcggcccagctgggacacccgcgaagacggcggcggtgaagaggtcggctccgctgccggggagctggggattatgcaaatggggaaagaaaacctccgccctcgcccttctgccaagtcaagtctgggaatttgtaggtattgtggtaagctgagtgttcatctggcgggtctggttagtgtaaaccaaaattt

SEQ ID NO: 3568 - DNA, 4001 bp, Homo sapiens
gaagagcatgaattcccagagagagatgatttttgcaaatagaaagtttacaatttgtttgaaacaaatctgaaacatgcttgaaaattcattaaaatctactaaaaataaaatataaccaattcatacaacccatataaactcttttgataacacagaaaacatactagcctcatccatcaaatcgggattattaaagatatttagctaaagttccttaagaaaacggcacggtacagggaaggagggtgaatgagaaacaacataaaaccaccctgaattttcaaatattttgtcgtatattcaaaattaatttacctattttttaaaagacagaaagcatggtcctatattaaatggcagtttatttttcaggacgttcagaatcttcctaaacaagatctaaagagaaggaaatggataaaaaaaagaggggccagaacacagggtacctagagataacaaggtatggagatgggactcagctgctagctactgtgtcccagggggccttgtgccctctacctcctgttttctctgaaaacaaatgagatttcttatgctgccttgactctatacagattttcctgctcttgagagacaaacagaagagtgatactttaaagctaaaataaatgcattttatttatgttttcagactgagtctcactctgttgccgtgccaggctggagtgcagtggcgctatctcagctcactgcaacctccgccgcctgccctgctccccacgattctcctgtctcagcctcatgagtagcttggactacaggtgcctgccaccatgtttggctaatttttgtatttttagtagagatggcgtttcaacatgttggccaggctggtctcgaactcctgacctcaggtgatctgcctgcctcagcctcccaaagtgctgggattacaggcgtgagccactacgcccagccaaataaatgtattttaaatctgggatatatgttccaattagctagactctgaaatttcagtctttagcctcagaggtcattagaactcttccaaaaatgcacagaataaactactgatggatcagtatgtcttaactcactggtacacgtataatttatagaaaaacatcagtaacaatattatttactactgataatagcacacacagtaccttttgataaactatggagcacacaagatccttgacagcagataaagacagttcctgggcttcaatggtaacactctcccgtgtgaggccaatttgcagtagaaatgaaactgtatgcactgagcctctggagttggtgagtgatggtgcactgaagcttccattagagagtcgggcagagagtcccgtcttaggacttgaacacggagaagcagctggaagcacagcaggaatagctgtgggtaatacagacttctgggctgatggaggggaattatttgcagacatctgcctttctttaatcttttaaaatagttgtcgattctttttcaatggttatgaagaggtttttaaaataacagcagtaaagaaaatgaccgcacttttggatttagttgaaaacttctttatttcctctgttaagccactcatgccgatacttttaagttttatcaaggagttgaatgccccaaaggtcctatttctcttaatatcagtcccatcaaaaagcagtcttgtctgtaggaagacaaccagggatttgtaaaggatttaacatcactgagctatcctcagcaggatagagttgacgtagcttatttacgaatctattttcctttcagtctgtacttgtctctttaatttcaggaaatacatattgaataaaagttgtttttctgtcaaggtgaaatcctcttcgtttaaaaaacagtaagtgttttggattaatctattcagtacttttcctttggtttactaatttgataggacaccttctcaaatgtccacaccttaaatcaccttctcaaatgtcctcattttcattctggggggatgaacttttctatgacgaaatacaaagctttttaaaatagtacaggcatatttcattagatgaatgggtccatcgagaaaagctgatgctttctgacatatagttagcctggaaggaaattttttaaaggtttttaatactttatattcattcgacattaatttaaaaataagaacataacttttttaaatgacaatttttggtcatatgcttataattcactaataaatcctaatgggtagcaatttttggctagttagcaaagactttttttactataagtataatttcagggagaggctcgaaaaatatccttggcactctacactgatacctaaaacttaaacattaaacattttttaaaatttacctcatttttaatcaatgaagaccaaacacttctatgttacaattacatgactgagttatatcaaaaacagaagggacaaaaaacagtaaaactgacattttcatagacatacaatacatgccaccccaccacacaaaagatgtacaatactttcctaatacaagagtattctttttttaatattacaatactaattctgccgaaacatgactcttgacttgctttgttgaaacattcctttcagaaggctaaggaagcaggaggggatatactgaacagttaaatgatcaataagtgtgaaagctgacatacttatcacaggaacataagagaaagggatctcaccataagggatttctcctatccaggtcctaactaggcccaacaatgcttagcttccaagatcagacaagatcaggcacatttggggtggtgtggctgtagaccacaaagcatttctaacagtaagaaagagaacagtaggtatagttaaatatgtatcataatttctaggaaagcacaggtcaaaaagttaaaaaaaaaaaaaggtatgacccaacccctccacatggcttaggcgtgaaacagctcataattgatggttctttctaagttccatctatatacccataaataattccaatgaagagaaagagtaaatcatccaatgtggctgcagagtaactctctgcagagtagttaatgggttaaattaggaagaacgtgacagaagggcaaaagcacacaactatagtattaggaatgggaaagctcaggaaaaaactgagactttaaaaaaaactgaagatgaaagctttcatagctactttcaagtaaatgatcattattccatcttatataatgtacaacacttgatagtttacaaatgtttcacatactttacctcataactctttgaaagttgacagggtagaaatcatttttgtagacaagaaaattgaagcacaaggcgataacgcaacttgcccagcagcacatggttattaataggtggagcgggaattagaagccaggttttgtactttcttaccagtgctgtctccacaagaacacactatttctcgaagagaacaaggaactaagaatcactgctcagaggatgttgctaaggttgagaaatcgcacagaaagacagactgctcaacttgtattttgcttatcttctccacagttttaaactaaaactgcagaaaggcattgagaactgaaacctgagacaaatgactaagactataacaactttacatgagtttgagtctctgggtccagatgcagtccattccatactactaaagcaattcacaaatgtaatcacaaagctgactcctgcaatcttggagaaagagctcaaaaagacagatataatcatggcctggagatttgtagagcggtttcaagttctggcggctggagaagcaggaaagcaaatttcagaaattacaaacataaaaaataatgaagcaaatggtttgtgaataactagagaagaatataatgatcactagaagtcaaccacatttacatcttggaaaataatgattattaggcttcttagctggaaaaaaataacaatagcttacatttattaagctcttactatctgtcagatactgttcta

SEQ ID NO: 3569 - DNA, 4001 bp, Homo sapiens
tagtggattattaaacgccaatggatagagtttaataacagactggacaagagggagaaagacgggaagtagttaggaagacaaaagcctacatttctactgaactaggtgattgtggagcctttacatagaaagggaatgcaagaagaatgggtttgagggaaaagatggattcagtttgggacaatgagaggcttgaggggcctctgtgtcatccaggcaaagatgctcagcaagcacagactgatacactattctgtaactgggcttgggatgtagacagacatttcagaatattagtctttagacagtatcagaagccatggaggcagataagcttgcacaggaagccatggtagtgtgagaagagggcgtaggcagaacggttgccataggttgttaatttggggtctaaaacacattgagagggaaaaaccctcccttttcttgaattcttcctatctagaaatagactagctaaagtaagtaatgcagtgttgactctatggttcccatggggacccttccggccagcacctacaatctaactgcctcacacaaaaagttttaaacttttcttaaagtggcatcaattaaaataaaagactccaaacttccagggacacaaacaaatgctgtcttcagattttccagatggtagaacttgagccttcctactaaatttttttcttggcattcttccaaattaaatttagcatccaatgttttctgtgtttgcaattaaatagatacataagaaaaataatgtccacatttacaaatgagcaactttagttatcatttgctcaagctcacagaccaaaagaaagcatgaactttaaaatttcattgctttgtgacttcattgctatacgcatgttacttataatctctctgaacctgtttcttcttgtttaaaaagtggataatatacaaaatatctgttcagtttcaaaaactagaagttattatgtaatatatgaggaccttctccccttcctcattttgtttggatacagaatcaaaagtagcacaatggacctaaagtgccaaatgagtccatacagagaggagagacgctcagaaaattctggggtcatgcctcctggcatccgctataatctatgaaacttcacagtacctactgacccagctatgactgctccaagaacctttcctgcttccctctaattctaagaagaaccctaggaggatcctagggtatgagaagagccatgcaggatccagccatccggctgggtaactttttagtttctaagcttccttggtatgtggggaagagaaaattaggaagagaatcagatgcagctgaaaagccctaacgacctgagatgagaggtctcagtttcagagcctgttcctcacagctgtctggcaaaaagagaacttttccgaactgaaaagcaacaccaagtattgactgccaacccactcggtcatccaggttaactgtgtatacagacctgtgcaggttatgtcaccaacggttactctgaaggtgaaagtgggcacgtgtatttgcacatcagatctttcacattcataaactgggatgttcttggtcttcatgccgtattcgtgtaatacctgaatcggtgttttccctggcttagctgttatcatcttccccaaactgcaaaaaccacaaaaaggtgtgctttgcatgccaaattggagattgaagcagaagcgtagaggccagttttaaccgccaccgacggtgacgagggaggcgccgagttccccggaggccagggccagagctggcgaggctggggcgcacctgtcttccggccccgctgcggcagtcactccgcaggagcaggcggggtgagcgaggtctttagagagagcacttgaatgcgggtaggagagattctcaacagaacagggctggcagcagcgccgcagcctctcagggaaaacctgacgatcccttcccgggcgcgccgaccgagcgtcacctccgcccgccccgcgcgccgccagggaccacgagaggggcggggcccggccgcagaccccaaccctcgccgccgagagggcggggccgagcacccacagccgcggaggcgtgggcgccgggcacggctttacccagaatgcctctggagggccggctccccgcgccccggccctgccgcccaacgctcccggccctggggccctgactgcccgcacgctgacctgaaggtcccactgtcctcgcgctccagcggcggggcctcggcgcggtgcctgctctgggacatggcgagaagggacggctcagcggctggaggaagagcggtgcggagcgacgtgctcgctccccgggtcgctggtccccgggaggagctccagcgccgccacctcctccgactcccccgcctcctgcttgcgttgctccagcgagggggcaggcagggtgggggcggagccttggtgccgtagctccggctacgccccctcgctgctcctctgcgggcctccgtcccggcccaactccgcccctgtcccttccagggtccgcccccttcccgcccggctccgccccgctcccgcgtgggcacaggcattgggctcccgggggttctccgcgcccgcccctgccggccctgaccagcctgtagtaactggcccctaggccgcagttctttgtccttagcaggaggccgtttcttgccgggagagagggattagagggattgtccggcgtgggtctagggtcgttgaggcctaaagttaagcctttgtggggaggacggattgggggctgggtcactttaagaaaaagattctaaaattacgaaggcagaattccagggagtctcccgggcctggtcctgaagcttgagaccccggatatatacgctccagggggctgcggtgcgctcttcgggtccccgagccctgtgtttaggaacacgcggggacgtccaaacacccgctcctctcccgccgggcgggctcctttgtcttctgggctttcgtcgcgagatggaacgctgggtcagtgcatcccagcaaaacacgttaggagtaaacgaaggcctttccggggacctgggtagtcggttgtaatggcgtttgcctgggatgcagcacctttggtgggccattagatgacgtgtcgcttctccaggggcttgctaggcactagcagaaatgctcccctgtgcttactcggtgttatggaagattgcttgcacaatgctattcgtacgaaaggatattattaaaagtgatttatgggcgggcgcggtggctcacgcctgtaatcccagcactttaggaggccgaggctggcggatcgcctgaagtaagcagttcgagaccagcctggccaacatggtgaaaccctgtctctactaaaaatacaaaaattagccgggcgtggtggcatgcgcctgtaatcccagctactcgggaggctaaagcaggagaatcgcttgaacccgggaggcaaatgttgcagtgagccgagatcgcgccactgcactccagcctgggcgacagagtcagactccctctcaaaaaaaaaaaaaaaaaaaaaagcgatttgttgttttgttagcatgtaagccctggatgcttgaaacaagtgaaagatgttcagaatctaatcaaattatatcatctgatgctttaattagagcctattctctcttcctctccgtctatatatgtatgtatatagattactatccatcactgttttaatggatatcttattggaagggctacatagtcagtatttcacaatatatgaactccgcataacacctatggcaaaacatttcagcactcaggtaaaattcattttttgccacaaaattacttaaaaacaggccagaactttatatagctcttgttaaaggttaagtagctgggataataatgaaacaaaaagatgcagcaggactccatttcaaagagagagagtctgtgtgcccaacttcagagtaagaaaccactaggtaatagtttatatagttact

SEQ ID NO: 3570 - DNA, 4001 bp, Homo sapiens
aaggacatcacaagactagaaggtaaacgtgtagctacaagactgcagctacaatccaagtgagagatgatggtggcctaggcagtagcaatggccagaagagagaagccgacagattcaatggatagttagtggattattaaacgccaatggatagagtttaataacagactggacaagagggagaaagacgggaagtagttaggaagacaaaagcctacatttctactgaactaggtgattgtggagcctttacatagaaagggaatgcaagaagaatgggtttgagggaaaagatggattcagtttgggacaatgagaggcttgaggggcctctgtgtcatccaggcaaagatgctcagcaagcacagactgatacactattctgtaactgggcttgggatgtagacagacatttcagaatattagtctttagacagtatcagaagccatggaggcagataagcttgcacaggaagccatggtagtgtgagaagagggcgtaggcagaacggttgccataggttgttaatttggggtctaaaacacattgagagggaaaaaccctcccttttcttgaattcttcctatctagaaatagactagctaaagtaagtaatgcagtgttgactctatggttcccatggggacccttccggccagcacctacaatctaactgcctcacacaaaaagttttaaacttttcttaaagtggcatcaattaaaataaaagactccaaacttccagggacacaaacaaatgctgtcttcagattttccagatggtagaacttgagccttcctactaaatttttttcttggcattcttccaaattaaatttagcatccaatgttttctgtgtttgcaattaaatagatacataagaaaaataatgtccacatttacaaatgagcaactttagttatcatttgctcaagctcacagaccaaaagaaagcatgaactttaaaatttcattgctttgtgacttcattgctatacgcatgttacttataatctctctgaacctgtttcttcttgtttaaaaagtggataatatacaaaatatctgttcagtttcaaaaactagaagttattatgtaatatatgaggaccttctccccttcctcattttgtttggatacagaatcaaaagtagcacaatggacctaaagtgccaaatgagtccatacagagaggagagacgctcagaaaattctggggtcatgcctcctggcatccgctataatctatgaaacttcacagtacctactgacccagctatgactgctccaagaacctttcctgcttccctctaattctaagaagaaccctaggaggatcctagggtatgagaagagccatgcaggatccagccatccggctgggtaactttttagtttctaagcttccttggtatgtggggaagagaaaattaggaagagaatcagatgcagctgaaaagccctaacgacctgagatgagaggtctcagtttcagagcctgttcctcacagctgtctggcaaaaagagaacttttccgaactgaaaagcaacaccaagtattgactgccaacccactcggtcatccaggttaactgtgtatacagacctgtgcaggttatgtcaccaacggttactctgaaggtgaaagtgggcacgtgtatttgcacatcagatctttcacattcataaactgggatgttcttggtcttcatgccgtattcgtgtaatacctgaatcggtgttttccctggcttagctgttatcatcttccccaaactgcaaaaaccacaaaaaggtgtgctttgcatgccaaattggagattgaagcagaagcgtagaggccagttttaaccgccaccgacggtgacgagggaggcgccgagttccccggaggccagggccagagctggcgaggctggggcgcacctgtcttccggccccgctgcggcagtcactccgcaggagcaggcggggtgagcgaggtctttagagagagcacttgaatgcgggtaggagagattctcaacagaacagggctggcagcagcgccgcagcctctcagggaaaacctgacgatcccttcccgggcgcgccgaccgagcgtcacctccgcccgccccgcgcgccgccagggaccacgagaggggcggggcccggccgcagaccccaaccctcgccgccgagagggcggggccgagcacccacagccgcggaggcgtgggcgccgggcacggctttacccagaatgcctctggagggccggctccccgcgccccggccctgccgcccaacgctcccggccctggggccctgactgcccgcacgctgacctgaaggtcccactgtcctcgcgctccagcggcggggcctcggcgcggtgcctgctctgggacatggcgagaagggacggctcagcggctggaggaagagcggtgcggagcgacgtgctcgctccccgggtcgctggtccccgggaggagctccagcgccgccacctcctccgactcccccgcctcctgcttgcgttgctccagcgagggggcaggcagggtgggggcggagccttggtgccgtagctccggctacgccccctcgctgctcctctgcgggcctccgtcccggcccaactccgcccctgtcccttccagggtccgcccccttcccgcccggctccgccccgctcccgcgtgggcacaggcattgggctcccgggggttctccgcgcccgcccctgccggccctgaccagcctgtagtaactggcccctaggccgcagttctttgtccttagcaggaggccgtttcttgccgggagagagggattagagggattgtccggcgtgggtctagggtcgttgaggcctaaagttaagcctttgtggggaggacggattgggggctgggtcactttaagaaaaagattctaaaattacgaaggcagaattccagggagtctcccgggcctggtcctgaagcttgagaccccggatatatacgctccagggggctgcggtgcgctcttcgggtccccgagccctgtgtttaggaacacgcggggacgtccaaacacccgctcctctcccgccgggcgggctcctttgtcttctgggctttcgtcgcgagatggaacgctgggtcagtgcatcccagcaaaacacgttaggagtaaacgaaggcctttccggggacctgggtagtcggttgtaatggcgtttgcctgggatgcagcacctttggtgggccattagatgacgtgtcgcttctccaggggcttgctaggcactagcagaaatgctcccctgtgcttactcggtgttatggaagattgcttgcacaatgctattcgtacgaaaggatattattaaaagtgatttatgggcgggcgcggtggctcacgcctgtaatcccagcactttaggaggccgaggctggcggatcgcctgaagtaagcagttcgagaccagcctggccaacatggtgaaaccctgtctctactaaaaatacaaaaattagccgggcgtggtggcatgcgcctgtaatcccagctactcgggaggctaaagcaggagaatcgcttgaacccgggaggcaaatgttgcagtgagccgagatcgcgccactgcactccagcctgggcgacagagtcagactccctctcaaaaaaaaaaaaaaaaaaaaaagcgatttgttgttttgttagcatgtaagccctggatgcttgaaacaagtgaaagatgttcagaatctaatcaaattatatcatctgatgctttaattagagcctattctctcttcctctccgtctatatatgtatgtatatagattactatccatcactgttttaatggatatcttattggaagggctacatagtcagtatttcacaatatatgaactccgcataacacctatggcaaaacatttcagcactcaggtaaaattcattttttgccacaaaattacttaaaaacaggccagaactttatatagctct

SEQ ID NO: 3571 - DNA, 4001 bp, Homo sapiens
tagctaaagtaagtaatgcagtgttgactctatggttcccatggggacccttccggccagcacctacaatctaactgcctcacacaaaaagttttaaacttttcttaaagtggcatcaattaaaataaaagactccaaacttccagggacacaaacaaatgctgtcttcagattttccagatggtagaacttgagccttcctactaaatttttttcttggcattcttccaaattaaatttagcatccaatgttttctgtgtttgcaattaaatagatacataagaaaaataatgtccacatttacaaatgagcaactttagttatcatttgctcaagctcacagaccaaaagaaagcatgaactttaaaatttcattgctttgtgacttcattgctatacgcatgttacttataatctctctgaacctgtttcttcttgtttaaaaagtggataatatacaaaatatctgttcagtttcaaaaactagaagttattatgtaatatatgaggaccttctccccttcctcattttgtttggatacagaatcaaaagtagcacaatggacctaaagtgccaaatgagtccatacagagaggagagacgctcagaaaattctggggtcatgcctcctggcatccgctataatctatgaaacttcacagtacctactgacccagctatgactgctccaagaacctttcctgcttccctctaattctaagaagaaccctaggaggatcctagggtatgagaagagccatgcaggatccagccatccggctgggtaactttttagtttctaagcttccttggtatgtggggaagagaaaattaggaagagaatcagatgcagctgaaaagccctaacgacctgagatgagaggtctcagtttcagagcctgttcctcacagctgtctggcaaaaagagaacttttccgaactgaaaagcaacaccaagtattgactgccaacccactcggtcatccaggttaactgtgtatacagacctgtgcaggttatgtcaccaacggttactctgaaggtgaaagtgggcacgtgtatttgcacatcagatctttcacattcataaactgggatgttcttggtcttcatgccgtattcgtgtaatacctgaatcggtgttttccctggcttagctgttatcatcttccccaaactgcaaaaaccacaaaaaggtgtgctttgcatgccaaattggagattgaagcagaagcgtagaggccagttttaaccgccaccgacggtgacgagggaggcgccgagttccccggaggccagggccagagctggcgaggctggggcgcacctgtcttccggccccgctgcggcagtcactccgcaggagcaggcggggtgagcgaggtctttagagagagcacttgaatgcgggtaggagagattctcaacagaacagggctggcagcagcgccgcagcctctcagggaaaacctgacgatcccttcccgggcgcgccgaccgagcgtcacctccgcccgccccgcgcgccgccagggaccacgagaggggcggggcccggccgcagaccccaaccctcgccgccgagagggcggggccgagcacccacagccgcggaggcgtgggcgccgggcacggctttacccagaatgcctctggagggccggctccccgcgccccggccctgccgcccaacgctcccggccctggggccctgactgcccgcacgctgacctgaaggtcccactgtcctcgcgctccagcggcggggcctcggcgcggtgcctgctctgggacatggcgagaagggacggctcagcggctggaggaagagcggtgcggagcgacgtgctcgctccccgggtcgctggtccccgggaggagctccagcgccgccacctcctccgactcccccgcctcctgcttgcgttgctccagcgagggggcaggcagggtgggggcggagccttggtgccgtagctccggctacgccccctcgctgctcctctgcgggcctccgtcccggcccaactccgcccctgtcccttccagggtccgcccccttcccgcccggctccgccccgctcccgcgtgggcacaggcattgggctcccgggggttctccgcgcccgcccctgccggccctgaccagcctgtagtaactggcccctaggccgcagttctttgtccttagcaggaggccgtttcttgccgggagagagggattagagggattgtccggcgtgggtctagggtcgttgaggcctaaagttaagcctttgtggggaggacggattgggggctgggtcactttaagaaaaagattctaaaattacgaaggcagaattccagggagtctcccgggcctggtcctgaagcttgagaccccggatatatacgctccagggggctgcggtgcgctcttcgggtccccgagccctgtgtttaggaacacgcggggacgtccaaacacccgctcctctcccgccgggcgggctcctttgtcttctgggctttcgtcgcgagatggaacgctgggtcagtgcatcccagcaaaacacgttaggagtaaacgaaggcctttccggggacctgggtagtcggttgtaatggcgtttgcctgggatgcagcacctttggtgggccattagatgacgtgtcgcttctccaggggcttgctaggcactagcagaaatgctcccctgtgcttactcggtgttatggaagattgcttgcacaatgctattcgtacgaaaggatattattaaaagtgatttatgggcgggcgcggtggctcacgcctgtaatcccagcactttaggaggccgaggctggcggatcgcctgaagtaagcagttcgagaccagcctggccaacatggtgaaaccctgtctctactaaaaatacaaaaattagccgggcgtggtggcatgcgcctgtaatcccagctactcgggaggctaaagcaggagaatcgcttgaacccgggaggcaaatgttgcagtgagccgagatcgcgccactgcactccagcctgggcgacagagtcagactccctctcaaaaaaaaaaaaaaaaaaaaaagcgatttgttgttttgttagcatgtaagccctggatgcttgaaacaagtgaaagatgttcagaatctaatcaaattatatcatctgatgctttaattagagcctattctctcttcctctccgtctatatatgtatgtatatagattactatccatcactgttttaatggatatcttattggaagggctacatagtcagtatttcacaatatatgaactccgcataacacctatggcaaaacatttcagcactcaggtaaaattcattttttgccacaaaattacttaaaaacaggccagaactttatatagctcttgttaaaggttaagtagctgggataataatgaaacaaaaagatgcagcaggactccatttcaaagagagagagtctgtgtgcccaacttcagagtaagaaaccactaggtaatagtttatatagttacttatatgtaatgtggctttattttttaaataaagatttgcatataattgtttatatctgtgaatttatatttaatattaaacacagttttgtaagcatataagatggaaaatgaatgaaatgctcaatcaatgagctgtatgccatgaggattcaaaacagcactttggtgttgccaaaattccggtggtggacttgtgaaggaattccctttggactaggtccactgtagattgtatccgggactatcgttagtgcctaaattgcattgcttcccacagcactatatgcttcccttaaaattggcccattgccagtggcaaatcactatctactgtgatccttatcatagacattggtcatatttttacgttattagttttctgtgtatattttagtgctatagcctgccattccaagttaaacatgctcttagcatatcattttacaccgttgatctataattcattacctga

SEQ ID NO: 3572 - DNA, 4001 bp, Homo sapiens
aggctcactctaccctggcgaggtggctcagggctggaggggctcccctgtagctggggaggtgcagtcaccccaactcagccccgtgtaggtggtctgggccttgccactggcccctctgagcatggatggccaagagggctgtggtcaggatgggctcctgagatcagcatctgcaggcagggtccagcaagagtccaggccaagctttgggttggagggagctggtgaagcctgttacatggctgggtggaggatgggccttggggaaggggcttgcactcacagagcacccaccctgtgccggcaggcgtgcaggtgccacgcccacggagctgaggaatgaggtaagcgttgctgttctgtggcatgcagttgtggaaactgaggctcagtgattcacgggatgaactcagtctcccaggtggtgcaagtgtgcccccaatgccaacctaagctacacctgaggcaggatgtggagacatccccgtgtgatttgaaagggacgcacgtggcgtgggagcaatctaggttcaagtctccctgccatgggtcagaaacaatccatgatgcatcttccctgagtaagagggaggcaagacagactgcaatgagaggactagcagttgtaggggttgcggggtgcagggatgagtagggggagcccagaggacttctaggacagttaaacgactctgcgtgatgccacatcgtgttgttgtacatttgtgcaaacccacaggacgcacagcgtggagagtgggctctgacatacgctggttggggatggggatgtgtcagtgtgggttcctcgactgggacaaaagcaccctcggtgggggtgttgatcatgggggaggctgtgcggatgtgggggaagggggtggatgggaactttctgtaccttctactcaattttgctgtgaacctaaagctgctctgaaaaatagtctaaataaaaaggactgaagttgaggggctgcccagggctcaggctgggggctgtgctaccgtcctatggggacagtgtcctgcagagtatgacgcgtggcacctcctggccttctgcagtggacagcctgggcagccactcagggcagcttgggtgtgggggtggctgtgggctgccggtgaccaagggtagacccagcgccccaactcagtgccaagtgccctctgccaagtcacaaagccttttcttccaaagaagttgctgggctctgaggttctttctagtctaatgtcccaggagggaacaacttcagagtcaccaccacacagtcgtgaatgtgtaactgaagaccagagcttttattaggattgaagggaaaggagcccgaaggagaggagagggtggggtgggggaggctccagagtgagtttcttgacaagctggctgtcagccatcctgggacgacatagcaccgccttccagggggaagcaggtcagccggggtcgcaggccaggcttggggacgtcccccagggttgccctcctccgaccgaagcggcccacaggcctgatcccgcgactggcgtaccaggcaggattgatgtcaggggctggaaaggaaagagctggagcagaccatgggcacgtgtccccagggtgtgctgtgctcccagaggcagcggggcagagtgcacaggcagggcctctcagcccagtcgccaggccatgctgggagccacccgaggaacaggcacccagaggttctggcgaggccatttctgggcgtgggctggctttgggaagcaggagttcaaaaaagcaccaagactgacttccctttcctcccgcgcaccccgttcctgccaggttctcgagcgaccaggctgcactaggttctggggtgaggcagggtggggtaagggaggctgacaggggtccaggcactcactgcggatctccatggagtgccgatgggtacgacttgcagctccccgcagggccaggcccagcatcagcaggcacaggagccaggccctcagcaccttcatcccttggctcctccgaggaggccccgctggaggggagatccaaatgaggaggacacggcctgggggagaaggggcaggagcagcgtcacacaggcatcagggtgcgtgtgcacggagctgggaccttgggtagagtgagcactgtgtgtgagagagaagtatgtgcatgagcctgtgtgcatgtgagtgcacagctgtgtatgtatatgtgtacaagagggtgtggtgtgtgcacatgggtgcctgtgtgtgtgtatgtgtgcagatatgtgtgtgtatgtgtgtagatgtgtgtatgtgtgcaggtgtgtgtgtatgtgtgtagatgtgtgtgtatgtgtgcagatgtgtgtgagtgtatgtgtgtagatgtgtgtatgtgtgcagatgtgtgtatgtgtgtagatgtgtgtgtatgtgtgtagatgtgtctgtgtgtattgtgtagatgcgtgtgtatgtgtgcagatgtgtctgtgtgtagatgtgtgtatgtgtgtaggtttgtgtgtatgtgtgtagatgtgtgtgtatgtgtgcagatgtgtgtgagtgtgtgatgtgtgtatgtgtgcagatgtgtgtgtgtgtagatgtgtgtgtatgtgtgtagtgtgtctgtgtgtattgggtagatgcgtgtgtatgtgtgcagatgtgtctgtgtgtagatgtgtgtatgtgtgtaggtttgtgtgtatgtgtgtagatgtgtgtgtgtagatgtgtgtatgtgtaggtgtgtgtagttgtgtgtgagtgtatgtatgtgtgtggatgtgtgtgtagttgtgtgagtatgtgtgtagatgtgtgtgtatgtgtagatgtgtgtgtagctgtgtgtgtgtgtatgtgtgtagatgtgtgtatgtgtgtagatatgtgtgtagatgtgtgtgtgtcgatgtgtgtgtgagtgtgtgtagatgtgtatgtgtgtaggtgtgtgagtgtacatgtgtagatgtgtgtgtgagtgtatgtgtgtatgagtgtaggtgtgtgagtgtatgtgtgtagatgtgtgtatgtatgtgtgtagatgtgtatgtgtgtagatgtgtgtgtagatgtgtgtgtgtacgtgtgtagatgtgtgtgagtgtgtgtagatgtgtatgagtgtagatgtgtgtgtatgtgtgtagatgtgtgtgtagttgtgtgtgagtgtatgtatgtgtgtagatgtgtgtgagtgtgtagatgtgtatgtatgtgtgtagatgtgcgcgtgcacatagccacatagatctccacgtgttcctctgatctgtgctgaggtgggaataagcacagaaacagcagttaaacctggctctctgcatggtcccccacccgcctgtgaccccattctctcctctgcgcaatgaggtgttaagtgagatgcttctgtgcgcgtcagcctctaacgggatcggtcacatgtacattgatgctcatgatcagaaagccctcaggaggtgtgagctacgcgttataaaggggggctgtcatggaacagccttgggtccgtctgtccgcctgtgttaagggatcagaaggtgcagcaggcctctgcacggctgtgcatgttgcacacccaggacagcaggtttgtggggaggtgcccagggagctgcacaggtggaggcagccccttgctcaacctcagacatggttggggagctggggagtgccaagcctggaccaggctcaggggctggaatccggtgcacggccccttcccacattcatctcagcgcctcctaatgcctggttccagcctgccagcccagccctgctggggaatgtcagccgacagctgcgtgtcgtagaatgagtctgcatcctctgccctaagtaagcccactcacccttgccatgacgctagatccagtcttctgaggctccaaggtaagcctgtagcatctgggacctcttctcacaaggcagggccacttcctatcggtgatgggaggagggggctgccgtggatgacaccaggtgcatggaaa

SEQ ID NO: 3573 - DNA, 4001 bp, Homo sapiens
aaggggttggggcagggcagccatgaggccagtgtgcatttgagtaggggaggctgtgctggatagtgtggacggtagcctgggcctggggtcttcacagttgagggagtgagtgggtggagagggaaggcccaggggactctgtgaccatccccgtgtggaggagggagctttaggaggtcatcgcggggctccctgccatcacgcatgcctgccctggcagcccctgtgtggcactctggcagctggcctacctgggacttgtcagttgattcctgccattcccatctgcccctcacctcacccagggctcagagagatggtggaagctgtgaaggcctgggcagatgcccaccagggccttgtagaggccacaagggtcccggggtaggggtggggtggccttaccaagaggagctggtgtgccggaaattccccaggtggccacgaacagcaggaggcttgtgagctgccacattctggaggcactggcacctgtctgaggaggacttctgagctccgggcagtgcctacccccgctgctgctctgcctgcacccccaggtggaagcggaatgaaagggctgtccctgtgtgctggccgtcagggcggaagctgggattgagggtccttgttcgctagagacatagcctcagaaggcctcggctgcccgctctacgtggggctgagctcacactgcctgcctagaaagcagctccagaatgcagtggagagggtgccaggatgtttgtgtcctccctggggacagtggggtggctgcctctgccggtctgatgactgggctgagaatattagctaacgttgattggacactcatggtgtctttcaaacaatttttacaggattcacagggcaggccatgaagccagactgcacggtgcaaattccagctccagcacttactggagggcaatgttgggcaagatgcttaactgctccatgcctcagtttcctcatttgtaaaatggatggaataacgtggtgtatctgtgccttaaagggtgttgtgagaattaaaggagttagtccacataaagctctcaaaacaggctttgcacatagctcatgctcagtaaacatgagatattatgacttcagttaaggctcacaaccacccaagaggtagttattaatgctgtcaaccccatttcatagagggggaaactgagactcggaggagttaagtggtttattaaaaatccaacccttgctggtctccgttgattgcacagggaagtcaccaacccaggggatcgatcagattctgtcccccatcctccaggagtagggtctcacaccatcagtacactgcaggcaccagactcggaagactgaggcaaggtcctgggtctccatgtttacatccatgcattactcgcagagccaggactcaaggccaggcctgtgtggttttaggcctggaaattcaacccctgccccaaaccaccaggtgctccaaaaggccacagagatagccctggtggccagagatcaaggaaccctccccagtggataggccacgtggccctctgcacaccctaccggaccctgctctccattcttgccgactccctctgaggccacttctgagatttgttcaaatccgacacccccaaaggtggaagtggggtggggagaatggagggtcctgggctccaaactgtctgttggaatggccctgggccctggggacccttggcctggaaagagggaggcgcatggcaaagggacctgagactgtggctgccaggcctggcctgtggagggccttgtgtcctttcaccccaagctcaggcttgttgagcaccctggctggaggattcagccctcatcaccacctagctctcttctcccgggggcagccctccctccacacccctcatagacctgcctggagggggactcacaggggcgggtcgtggagatactgcaagttcgccgtcctgccgccatgacagcctggagttcgagttaatccataaccacaaatatttgcttggccctcagcactgaggcctccctctccatagacaaacagtggcactagcactcctggtcctagctcagcacggcttgttctgcccgaagcccacctctgcccaccaaggatgccgtccagcagggagggaggtgagggcaaaacccttgacagatgtggtctcattttagccccatagtggctggctgagggaggaacgttgtccctgtttttcagatggggacatttttgcccagagatattatagtttgcccaagatcagcacaacaggtaatattccatatttcgtcaaatctaaaataccattaattataagacacatgtatttatgtgccaccatacaagaaaaaagacgctgtcccaatgacatgccatcccaatttctgatacataaaatcatgagaagatgctcctttttgggtccccagtgcataggtgctgggcactgggctccaccctcacctccaattgctcacaaatcacccccaatccccacccccaacacacacacacaatggcacatagcatccctctaacctctatttttcaggtaaggacactcaagttttgtgttactcgcccagattcactgagctggtagttggcagatttaatttgaactcaggtcttgctgcttccatttggccccttttgtggaccagtaagaaaaatgaacgggattccagaaaggctgcagcaatttcctggccggggtgccagaagggagaagggcagaaataaagggtccagctcagcacctttgcctgtgtcctgcagtctatcagcatttattaagcgtcttcctgctccgaaccgggctgcaccagagatgcccccctttcctccctgccctacctgttcctgggaagacttgcccacgttccttctccaagtctgcacctctaaacggggcatgtgaccctgcctcgctggcttccattgattgcacagggaagtcaccaacccaggggattgatcagaggagtagggtctcacactgtcagtacaccataagtaccagactcggaagattgaggccaggtcctgggcatccatgtttacgcttaaagcagaggaagctgatgagaaggaagatgcaggtgtgcagagggggactgaggccacggacacctagagagtcccagggagcagcggaaggaggcccctgcctccttatgattggtggcacatcctggcttcgggtgcaggagggtccccatgccctcctaaaaccctattcctcctgaagtttctttaaattggctggaacagcttgtgttgattgtaaccagatgcctcctgctgaggcaccacaccatgctgggctgtggtggtaccaggccctcctagaggaacagggtaaaactctaacactctaacaagtcaggcccaccttgcccaggggcaggtacacataggaaatgcttacagaattcagaggagagggcaatcagtacaagctggcatagccaggggaggctgcctgtaggaggtgacacttcagctggacatcaaagagcagacaggaggaaagacatcccccccaaccccaccccaggttgggagacagtggggagacacagaacacaagcagtcaggaggtgctaggaggggtggaggtggagaggaggtggagggtgaggcaatggattttgaaatcgagactatgagaagtggagaaccaggagctgtttgtgacaggctgtggcagctgcctagaaaagcagagacaagcttctgggaactcagacaggaagcatgaagaccccatgcacaaccacagaaggcaccagcttgtatgtccctgtttgcttcaggcgtcgcccccgcaagtctgcagagatcactgccctctgctttgccttccaggtgcaagatgttgtgggtattcttttggcgccgcttcccttccccaccaacttctcgccctctactcctccccaccccagcacaggcagccgctccagggcaagtctatgca

SEQ ID NO: 3574 - DNA, 4001 bp, Homo sapiens
tgaaaagctgcagggctctgtgattcagtggagggaatttggccaagaagaagtagcactctgcaaggatctacggggacagaccaagggctatgtaagctgctaacttcctgatgtccttccctagagaagggaggcagagtttccacccctcagcggttttatagacagaggttccttggtaacccccttttttcaggttatccttttcggtcatcccacccctggtcgccctgcctacggtctcagaaaacaagctctcttagctgtgctcctccctagaacactgtcctgactgtgagggccaggtcaaaccccctcagatccttgaggccagagaacagggagagcatgtatgcctcaggctctctgggttaaaggagagagacaggctgttcagatccaagtacacagaagcctgatttgatcctcaggataattgtctctagactgtaaccaggtgctttgtaatgacagtccagctgtgggcagaggagctagcaaagattgtcccccgaggaacaaagaccagcctggcccattagcacaagtttacactaaaggaagagactaagttgaagaaagatatgcagaggctgctcttactgattttatttgcgatcaccagaaacaggtcttctgcactatctgtgcaaatggactaaaaggtgcaaagtgattaatgcaacaacaaaaagtaaataaacatatgttcccttttttttcaaaacaaatccctcaatctttttatttttatttatttatttattttttagagacaaggtctccctctgtcacccaggctggagcacagtggcatgaacatagctcactgcagcctggaattcctgggctcaagtgatcctcctgcctcagcctctcaactagctaggactacaggcacacaccaccacgctcagctaattttttaattttttcaaaaggtgaggtctggatatgttgcccatgctggtctcgaactcctggcctcaaatgctcctcctatctcggcctcccaaattgctgggattataggcttgaactgtttaccacagccagtcataaatccttgaatcttatttaaaaacagatgatgctagaaggtcatattttagtagaggaagtcttgatgagatagaaacctccttcaagatttccacattgactcaagaggtaactgcctgacgcttaaagtttccctcgatatctcctcttacctgtctactctagaccttgaaaggtgtaatatctaggaaaacatccatagcaagggagatcaaaagcttcccatcacccaactctagagggctctgctgtcttctgtctgaacaaagctggaaaaggagaactcttctcactgtcagtcaatgggcaagcttttgagtcccccatgcaaccacatctagggggaatagagacacctctcatcaatctgcaactgcagtacaggagggggcaattccaatgccccttcctccctgaccgcctttgttgtccccactgctgctgcactcacctgtcaatggcgatggccagcagggcattggtggagacatagagagagacagtgcgcaggtagttgacagaggtgcacaggacgtggccgtgctcccaggagagctggcgcaccacatagtagtccatctcaaaggggcagcagacaatggccaccaggaagtcagagatggccaggttggcgatgagcaggttggtgaggttgcgcagtttcttgtagcggaccagggcagcgataaagatgaagtttccaatgccgcagaccagcatgatgcccaccagggccatcccaatgacaatcttggcagcaaagaacgtcctggaattggtcacatcctcatcttcatccaaaggcatatcatagtcgctgtagctgaagttgaatgggaaggaagtggcatgggctccatgagggttgagcacagaaaggaagctggtggaagtgttggtggcattgtcatccatgaaccccatggtggtctccatctggccaggtggtgctgtgagcaacactgctcagaattccccagggcaatgtctgcaaggctgatgtcacccctctctgctatcagccagctctcccttaatgagtcagaatgtctctgccagcatctttggggtatggtatctgagctccattctaaacctttgaaagacatacaaacagttggctatatgttgcagtaaagctggccaaattcaaaaccaccctgtaacctaagcagacctattagctccctgcccagagtgaacatagggtgatggagtggaaataaaggaaccaatgagagaaaatgaatgaaaaccacatactcaattagggaagggtggattgctatagagacaatcaagcactggctcagtttatttctgttccactgaagactcagaagtgttgcaccttttctcaaggacaaaagttgggagtgtggggaggctgaagagaaagaaatttctttaaatgctatttaagagggagggctttcagacaagcctgtctgctctccttgctcttctggcagaacatggctctaaaatcacagagccatagagcagccaccttcctcactatttgctggacttcctgttcccacattagaacctgctatgaccctagaagctgggaacagcatttatgaaggcctgtccccagacagaggctgtagggtaaagtcacagcctgtgactaaccaagtgatgagaatggggacgctagagcaaaatttttccttggctggttgagtgtccaggggtaaatagcttaaacactcagaggttcaacttctgccaggcaggagatcaataatgtctgcacagcctggagctccctggaggagagtgttacaccctagaactgcaaggagttactactgcgctctcaggcctcctctgtcagctgcaaggaaggggagcgaaatcctgatacagggactccaccacaccacataatggggctggggtgaggggtctaggggggtgtcagctgccctggtggggacagggaggcagccagagtccccctgtcccctgctctctccctgcagtccctcccaaaccctgaagacatcagaccagggagtgggacgtagaaggagggctgaggtctggagagcaccctaaaacaaatgtcaggagaacagagggaagaatgcaagccagagttttcctgggaaaggaagatgaggaagatgcccaggaccccacctccccacccccaggaaagcctgctctccatattcctccgaggcaaaacatctggagcctgtcttcttggggccaagtttaaagtccctctgcgccccagtgaggctcagccccattgctgcctctctgtcctaactccttaccctgattttttccttcctccgagctctcaattctgtctggctcagcccttgccctctgcccactcagggaggagaggcagaactcagctgaaaagaaggaggggggcaggcttggaacccaggcgggacaagccccactccttgcaggtcccgtgggtcgcagaggcatgccactcctggaggggtacccctacaagcatgctacctgaagggtcaaagtagtgtttaaaagcaaagaatacagaagcttcgggggtggagaggagggcgtcacgagattaaggatgattgtccagaggtcttttctcctttattctcaccgttcagaggggaaccccaatcctacccccacctggtgacctctcgatcgctagaagcctctctcacaaacccctgctggcaagtcccccgcctgctcccaactttctccctggagcctgggcagcttcccctaaggacagaggaggggaagcctggctctcctgaagaaactcacaggagtgaatccctggcaaagtcccctcttcactcagaagccgccgcaccccacggccgcagccagtgcagcgcggggtccctggagcatcctccccgggagggcgcgctctgtacctgcggcatcgcggagcccggcaggca

SEQ ID NO: 3575 - DNA, 4001 bp, Homo sapiens
gctttcagatgcgctggttatgggccatcgagggcccactcggctctgtcctgcccgggcccagtgctcacaggggcacatgagggtgaggggtaacagtgctcacttgggggacatcagagaccaggccccagaggctgagcagggtctcaggcatggcctcgatgctggggcccatctgttcatgcgtgcgctggttggtgacaaaggcacagaccacaccaatcctgtgggaatggagggaggaggaaggtgcttgctgggtaagagggagcctgggggccacagcccgccctacccgggccctgggcagcgccttacagcagcaagagggtggtcagcagcaggaagaccatgagggccgcgcgctcacaggccagcgccttgtgctctgtcttcactcgtcccccgcagcgccggtggcagcggcagcagcagaagcaaagcccggcagtgggcaccagcagcaggtagaggcccgcgatcacagcgcataccacgtagcccgcctcgtaccgcaccacctgggcaggcagcagggcatgaggggtgacccgacccccactgcccagccctggcttctgcctgagtccagagggaaaccagaaggggcgggagtgccgtcaggggcatggcctgcatctcatggaacccgtcccagaggtgaccgcattcttactgctcatcaccatcttacacaggaggaagctgaagttcaggaagttccagctccctgcaaacctcactgccagtaaatggcagagctgtggtttgcacccaggtctacggactgcagcgcccacagaggaggggagaggatgcctgagcccctgcctagtggacacccagcgaggtgggctaaggggagccaaggcttttctgctcccaccctgctgctcaccccagaactccctcccccagcacctttccccagcttgctcacctcattcaccttcacggaggccagctcattcagtagggcctttaccaactctatgggaaagagccaagctgaggatttggggacagccactgccctgcccctgtgtccctcctctccccactgccagggcaaagtggctctgaggcagggctcctgccaccaccatggcaccctcgcagaaggctgcatcaccgcagccctgtgccatcctgccctgacctcagcactgctacaggagggcgagcagagaggaggctgcagacctctcctcctggaccctacaggtcagtcctgagcctgggcaaaggcagagaaggggtctggcctggcagttcttcccctcaagcagcaagggacaggactgggagggtccttcagacactcctggaccacccaacccaagcaccgatagactaagaggatgtctgagtcaggtctaatgtatttccaatgtaacctcctcactttacagacagagcacctgaggctcagagaggaagtgaggcttacccacagtcacacagcaggttctggagccctccccagatcctccgccttctaccccaggaagatggcaagtgcctgcttgtaggttgggcacatcccatggtagagtgggacagaggaagccgggctggggacccaaatgctgaggccctcatgggggaggggcacactcacctgaagggaaaggattgagctgcaccaccgagaggaagcggcgcacggtgccatagagggagtccaggagtcctggcgcacgaactcgaggggccagccaccgggccctggctgctggggtgaatgtcaggtgctctgccgggccaaggaacttgcagtctgtggcccctgcagccagctgactcagggccagccccaggcccaggcccagcaggggagccagcagagccagtgtgtgcttcatggggtcaggaaggtaaggggctcaggctcaggagggaacagacaagcccagggcaggccatacatccttctccagcctctgtccctctctccacagctctcaaaacctgcccgacaggtttgggttcctgagctacctggcctcccgcctccctgcctgccttggagcataggaagggcaggggtggaggcacagggtagggggcagggccaggctgggaccgcccttggtggcctcgggtggaagcctgggctccccaccacctagatccttgcaggcaacggctgccaccagctgggtccgaaaggcacctcagcagcttgggatcacctagaatggccccatttcaaatattctgttccatgcccagccccagcagcccagtctaggagctgggaaaacagctgcttggtgaagccctggtcaaaatggtcataaaaccagagacacagggccaggacccaggcttgctctccctgcttcatctggaacctgctctgtccctgcaggtcatgcccggtgcccactgccaggccaatcctgaacagaggcccaccctgacacgcacaggcctttgggagggcaaatcccagaggtatgccctttggcctggccatacctcatccagtcagcagttgaaagaactgataggatatgaccagaaacgtgtctgcacaggtctctgttttgtgaacagctgtatgcccaatgcccagaaagtcgcctgtagctgagcaggtcatggggaaattcactgaagggctggaggatatcagaaacagtcctgaaagccaccactgaggaaccagcaaaatgagcctcttacatcacacactgggcagttgctaaagaacatgccgtggaaatgtctcttgtgactgaaaaatattcacatgcactcataagtgcaaatagcagattacagactagcacacgcagtgaaggtgtaaaacggtgatcatttccgccaatagcagattacagaccagcacacgcagcgaaggtgtaaaatggtgatcatttcctcaaacagaagattactccgtctctactaaaaatacaaaaaaaaaaatgagccgggcgtggtggcgagcgcctgtagtcccagctactggggaggctgaggcaggagaatggcatgaacccgggaggcggagcttgcagtgagctgagatcgtgccactgcactccagcctgggtgacagagcgagaatctgtctcaaaaaaaaaaaaagaagattacagatcagtacacacagtgaaggtgtaaaacagcaatcattttgcagtggagttgccggcaatttttcattctcctttgctcacgtgtacttcctcatttctgtgcactaaacgcgtgttactcgtatttaaataagtaatcaaagtttgtgagattccatggcagctccctgcccctgactgggagccttggagagaagggctggctccatggctcccaggacccccaagctcagcccagggcagtagttcaggatggtctgcagggtgggtgagaggctcagggatgtcctgctgtccctggtagggttatcaggcaattagggccttacgtgtgaatcagggctgggcccacagtagagctcttaccctccccattgctgcctctgtgactttctcagagccaggggatgagagaacacaatggtagaaggcatagtccagttacagtggggtgagacaggaagtggggcttcatcaaagggtgattcagagatgaggatcagggatgcagtgaagaatagtctaggggtgtcctggcaccctaggtctggtgggagctggccatggaccccagggagggtccagggccagctcctcctgtaggggtccaaccccagggtgtgcagagaggcccctagccacactgcctatgactgtgttgtgaagctcagtgcaggctgtgcctaggccctcccacagcccttcctcccgactcacctgaacccagcatctatgttgggggctcctggttccacagaggctgcattgaggaagggctggtctctccagggcctcactgcttctcccttctccttctccctccaatttaggctgttagaaagaatgccttcccctgggatggctttctaaccaccccatcagcagcaa

SEQ ID NO: 3576 - DNA, 4001 bp, Homo sapiens
cactgtcctatgaagaatcagaattatagagcacaaactccccaccctccctcaccctcctccaacacacaaagaggaagatatttcaggaataaaattcgctctaaaccaaaacaatagctattttcagattctatttatttacatggtctaccaaaatcagttatgttgctgtatcagataatatttacttagaccatcaacttcaattggcattcttgaaaaaataatcattaaaaataaaagcctggatccacactttacttttaaataataaagaaaaaaattcttagttttgaggtcatcagtaaatttctcagaagactttttcattatttaaatttctcagaagacttttccattattcaaatttccgttacagtcatgatttaacatttggcttatttgaaattattcgggcataaactaatcattaaacagctataactactgacctagattctgaaatcttgatagaatacctgaggcaaaaacaaataaataaatgcaaaataaaacaaaaacagtcttacttgtcccattggtggccctcccatagggggcatcatctgcggcatcattccatgaggtacaggaggcatattcgctctctgacccatagggtgcattcccattggggcataatgcatgccagggtgccccatctgaaaaacagtgaacatttttaaatgagcaaataatactaaatgcttctcaaaaatctcatttcaacagatcagttatctgaagcgacataatattaagcttatgtgtaataacatcattggattagtctataccttgtttcaaacaaaacgcattctgctagtatttaaaacgagcttgcaaattccgtaaaaaaatgggaaaagttaagatgaatcctggaccgctggatcataggttttctctctcttttttttaagcactgacttaaccagctactaattggcttgctaagcttggaggatacacattgaatactaattttaaaactgttatggtgaaaacaacaactctcctatttcatgcagatataaaagatagccagctattgttattttataacactactgattttaaactttaaaatgctctatccaattaactcaggtgagagtcggtcttacaaaacacaaacagtatggctacccaggcacaattcactcctaacaaacttatttcctaacataacctttaagacaggtaaaattccttctgccaaaaatacattttcaaagactgaggttctgtcactcacggacactaaatgcaaacaactaattcatcctttttaacgcagtttaaaaagacaactactttctttaccgatgagtccattgttctatgttttaaattaaaaccacctaattatctcctgccaattgtcccaacagttccccctgcagaccaccccgacgactaatgaaaacaaattttggcagccgctgttaaagtcttacagtatcaagcccctgcctccccctcccagctaaaatcgggcctaaagctccaagacgctcaccccgcccaagagccagcaccttcaccacgcatctgtctaggccaagcccacggggaacttccagggtctcacatccttctctttgtgcatttccaccctccacttctctccctcagaacatatcccaccatctcgagttcttccttcgtccactcttatcttcttctcctttcggagaaagcttcctgtttctcactccgtttttcattgtgccgccttccccctgccccactgatcccttaccgagggccgtctcctcaggaagccgtcagcagagacccaagagccggagcagaggcttgagccggacaatctccgctccccgtccccaggaccctgcgagggaggatggctctccatttcactcaccatgaggcctccacgctcagctcccgtccccggcctcatcgtcgggctcagactgctccgccggcggccactgccgctacacataccaacaagaagcgatctgagtggctggcgcccactggggctaaaggttaaaggctgccctgcgctacggggcgggatcagcggggccaacaggctgacgggcttccccgctgtccaatcagaatgcgccgccgacacgcagctctgcggcgattcgcccccagcctcagcctcactcggcgtcgcctgcatgggggggggggaggaggaggacggaggaagtttctgcgccgagtcctccgtcgggaaaactctaccaacttccccaggggaagggaagacaacagtgtcccagcttcccgagcttagaccgcctcaccccgtagggggtggggcagtgggggtctgccaccttcaccctccccgcccgagttacgtacgccccacaaacctgaggccgccaggggtagggtggagggggcgggggtaagcagcctgtagtgttagcggtggctgggaccgaatgcgcgcgcgcggtgctcgaggcggaggggaggaggcggggaaggcgaaaggaggggttcggaggagagggttcgatctccgtacgcaccaggtggagagcgcgcgcctggggaaggaggcgtgtcgagtagcgggagggaagttgtagtacgggtggggagaaccacactaaagggagatgggggtgagcagttaaggaaccgcgagagcgccaggtagagaggtgcccttaatgggggaacctggagaagagtgtgagcgtagtggggaagaagggagaagacaaataggttcgggaatgtgtctccgagggcgcgagcgggcgctaggacccggcgtcgaaaagatgaggctttggggctgtcggggcgcgcgctcccgttggtgacgcgggggtggcggaggtctccggccgggacgaagccccgcagggagtggatactcgacagccttcggcctccgctcgcttctccctgcgcgctttcctgctcccctttccggctacagccctggggtcgagctctggtcgaagcgcattccgcctctcctttggccctgcggcttcctttgcaacccgccgcccacccttgctctccgtggtttacccctgggctctgaggcctggtggtagcggccactgccgcggattggctgttgcggacccggggcggggcaggtgggagaggctcgttctccgcgggtttcgttgtgtttcgcgccatgtcgtttgctgagagcgggtggcggtcggctctgcggcgccgcggtcccggcaccccgggccctgtggctcggccatcgtattcctcctttactcagggggacagctggggtgaaggcgaagtcgacgaggaggagggatgcgaccaagtggcccgcgacctgcgggcggagttctcggctggggcgtggtcagagcccagaaagcgctcggtgctcccgccggacgggaacgggtcgcccgttctgcccgataagcgcaatggtatctttcccgcggccgcgggcagcagagcccagcctcggcggtggccggtccaggtcctctctattctctgctcgctgctcttcgccattcttctcgccttcctcctcgccatcgcctacttgatcgttaaaggtattgaagccgacgccttgaaagtctgtccagagtaaagttgagccagggtgtggctctcgtctccacccatctccctttccctcgcgctaagccctcaggctggcagctgctttcacccagagtcctcatttgcatcttactttgctctcccgccctttgccttttctaagtggagcgtcctgatccatgatcaggagacgtatttttaaaaaggatcgtttgattaaatgggtactcttgaagaaatatcttcaagtccttgaacactggggatgaaatattgtgaagattaaacaaaatgcgaaacacccaccattaaaaggagacagtgaaaagtgcatataattaaaataggccatgttcaatggccttcatccacaaataaagatgtgctgtccaccaattcctctacacagaatcttgagggacaaagat

SEQ ID NO: 3577 - DNA, 4001 bp, Homo sapiens
agagcccttcctccaaataaggcagggacatggggtctgactcagcaggccaagtcggggtggagacccagatgatcaaatgcacatgaaggaggcaaacccaaggtcatgacacccaggagacccaggagggaggtcctgactgtggatggcaggaagtctcagcgctcactctgtaccaactgagagggcgccagagacttagaggagagcagtggactctggaaaggacatgagctggaggtggacagtcagtggacagtggtgcttctgtgcaacaacgtgggtgtccagcagcagcctaggggttggcagatgtggaagagacaagtgggttttaatggggtggacacaggctctgcaaatggatccaaactcagtcagaatgagtacagaagaggaaaagcaacttttccataactcagatacagatacaggcagattttagaccttcatcatttcccagtgttgggacgtacagtggtggctgaagcaccgctgtgcaaccttcctgcccagacagctgctccaagccaactgggttcccaggggtccgagtgtcccttcccctggcgagtgagagcagacctgggcgcctgggagccagcagggaactgtctggtccagaggaggagtgggcttcagggccctgtgcagcctgaggatgcacgactgactacaaaacagtttctatattaaaaccagactcacaaggccaattctagagtgggctgaagcttacagtatgagctgaagaagcttttcttggttgtctctggttcaaaaatgtgcagaggactgaatggatgccagagttgataaagatagacttagtaagagattattagaaagtacatgttagaaacaagaagacaggtgttgaaggtggccctggcagacagcagcaagacattgccctgctgtgagaagcccaccaggcaagagctgtggctgaagaggcgtagatgaagagacttggatgaagaggcatggatgaagggccgtgggtgaagagacgtggatgaagaggcatggacgaagggccgtgggtgaagaggcatggacgaagggccgtgggtgaagaggcatggacgaagggccgtgggtgaagaggcatggacgaagggccgtgggtgaagaggcatggaggaagggccgtgggtgaagaggcatggacgaagggccgtgggtgaagaggcatggaggaagggccgtgggtgaagaggcatggacgaagggccgtgggtgaagaggcatggacgaagggccgtgggtgaagaggcatggacgaagggccgtgggtgaagaggcatggaggaagggccgtgggtgaagaggcatggaggaagggccgtgggtgaagaggcatggacgaagggccgtgggtgaagaggcatggacgaagggccgtgggtgaagaggcatggacgaagggccgtgggtgaagaggcatggacgaagggccgtgggtgaagaggcatggaggaagggccgtgggtgaagaggcatggaggaagggccgtgggtgaagaggcatggaggaagggccgtgggtgaagaggcatggaggaagggccgtgggtgaagaggcatggaggaagggccgtgggtgaagaggcatggacgaagggccgtgggtgaagaggcatggacgaagggccgtgggtgaagaggcatggacgaagggccgtgggtgaagaggcatggacgaagggccgtgggtgaagaggcatggatgaaggactgtgggtgaagagccgtggatgaagggacatgggtgaagagccgtgggtgaagggacatgggtgaagagccgtggatgaagggccgtgggtgaagagccgtggatgaagggccatgggtgaagagccgtggatgaagggccatgggtgaagagccgtggatgagccgtgggggaagagctgttgaagaaaagttgtgaatgaaaagccgtggatgaagggccgtggatgaagagctgtggatgaacaggcatgcatgtggccaaggcaccaccaggcttcactgggagcaagccaaacccaagcccgatgccctctcctgctcaacccactgagaggcaggctctaaattcctgaccccaagtcagcttgatcccttaaatcagaccccacaaagccctttgctaccccatcctgccctcccattaaatcccatgtctcctctggccttggaagaacctcttcacctggatctgatttctacccatttgataggaattacccctttgcctactgtaagatcaggtgcgatcagttccgactctctgggggcctctgtggcagttacagcccaaacccactccctcagccttcaacagccttcactcatctgcacatcctccttcagctctggcgtctactcggtccctaacaggtatctggatgcattcctcagttccttcctattcccactctaaccccaaatgctgatttgaacacttacatagctctcaaatgggcccggccactgcatccaaatcctgcatccactgctcaacccagggtagtgctcatccctcacgtgcacaatcccagcagcctccctcacagcctccttgcctcccacggggtcccctctccatctgtcacacacctgccaaatagacggtccaaggcaggaaactgaacgtacctctacccccaccttaattgccagacgagtccatgctgcctgccacacctgtgagccctcgggtcctgatctgcctgccacgcctgggagctctcgggtcctgacctgcccgccacgcctgggagctctcgggtcctgatctgcccgccacacctgttagctctgggggtcctgatccgcctgccatgcaggaagctctcggggctctgatctgcctgccacgcctgggagctctgggggtcctgatctgcccaccatgcctgggagctctcgggtcctgatctgcccgccacacctgggagctctcggggctctgatgttacccaccatacatgtgagctcttggggctctgtcctctttttgtctcaagtctcccctttggtgaacaccaggctcctatgaggctgcgtctttgagctctgcacagctccatgctgcttcctgcctctgaggctttgctatcattgaaattgcctggaacacccttccttttccaccctttaaattgaataacctctattcctgttttaaggtgtagatatcatgccatccaggtggccctcttccactcctccctgcagcccccacctgggtttgctttctctcttcttgcactgttgatcccctacacgtcccacccagcccatacccagcctctttctcctgcatgcccatcgggcaccagatgctctgctgggctgccaggtccaacagtgaataggacagaggtggccctgcctgcctgggcatctgtgtgtatttaggtgctgggctgccaggtccaacagtgaataggacagaggtggccctgcctgcctgggcatctgtgtgtatttaggtgctgggctgccaggtccaacagtgaataggacagaggtggccctgcctgcctgggcatctgcgtatatttaggttcaatcagaatcgactcatgcaataataaaacaatttttattttctcagcagctgactgggcatgcagtaggggtttatttaggaaaaaggcagagggggcatccacccaagacaatcagagaacattcgttgggtataaaacagaaggctacatgcccttacttttcccagacacattttgcttcagggacacctggagctcattttgccacatggttaaatatttagtactttaacacaccgcaatttattggggactttaaaatctcagatgatctggcatgttttgctgctttctgaaatgtgcatggtaattttaaaggcgaggaaaattcattaagctttactaactacagctttgctcatctacaaaaacaagaaagtactggtattacaacaccaacaacaatacctatgctattaacctcaa

SEQ ID NO: 3578 - DNA, 4001 bp, Homo sapiens
attcctggccctgcacacagggcagtagttgagggaaagcaagcagccggggtccagtcctgtacctggggagggggcaggaggggctgcggggccggaggcacaccaggcatataggatactccacgactggggcctggccggttctgcctagccacaggtgctgcaaaagcagtagccgcaggtcgtgtgcgatgcggcggtgccccagctggaccaccagggcctgggccagggcccctgggtccctgaactgtgcaggatccttctcgcttggcacgcatctctccaccactccaggggacccggacccagtgtccctgtactgatgccagcgccatgtctgcctgttagagtggagcctatgagaaggtgggctggggcctggggaagtgagtgtggagctatgcagttcctcggggtgggaaggggactggcaaggtgagtggggaagggaggagttctgaggctgggagggagaaaaggaaggggtcagagggggagaggggtacagccagtggttggagggagaggatgcacgtggacgggggagagagaggtagttctggtgaaagaaagtaggggaacttgggagagagggagaatagggatgtggagcaaagtcagaatttgagtcacaagagccgaattggaagccaggagagggggatgctggtggaggggaggagggacgacgggactgagtggaagagaacggtggttgagagggagggaggccctgatggggagagagaggctgtaggttgtgaggagaggagtccacaagttgtgagaagccccaagtggggcgcccagggagcactgaggtctgtggcagcacctggtccttgttttgaggcaacatcgccttgaatccagaaggaactggggcaacaagactagggataagagacctggcagagtcaggaccagtatctctgaggtcagctgtgcctgagaaatcaaggccaccttctgtgcgcagagcgtggctccagcctggtgtgggtgcaggtgctggtggcaggccaaggggatacccagccctccagcaccaggctctcagggtgttcaggcatgagcatgaatctaagcttggcttctcacttctttgcagtcaaccattgatgagggatgtgtggggatggagaatcacagctgcatcttgggagtggaggggcagcagcgattatctgggtggggcagagaggaagacaaagcccataggacctggagagaaaagagagaacccaagacattgggagaattggtccatttctggctctgcctcatatccccagttccaagctgaactcaccaagactttaaatccatgtcacctttgggatcaaaagaactggcaaaatgctccagggaaggtgagaagtggggaggagaggaataaggaggaagggagggtaggatggagttggaggaggggttcgggggataagggctgagatgggaacaggaattgagggtgttctggtgctgagcgctcttaccaatgagaactcctctgggctgtgtttcacaggcacttcagcgttgagaggacctgggagagaggagcagggtcaccaaatggtggatacacctttctctgtccccagcgtctaacactaagtgcactctgacccgggtttctgtctgagccctgagttttgccctcagtcctcctttagccaggcggaggcctgtggtacagatttttattctcctaatcctgattcgggggttctgcaagcatcccagtgtcctgccactctggttcctctgaccccttattgcccctagtgctgatgtcctctagctcaccctggcccagacagagataccttattatacccagcagcagaaggaatggggccagctggtaaaagcctctgggagactgggactttgtctaaggggtggcaccaggttcgccgaccccaatgggagctgggggccccattccctgagttcagttcccccctggcagcatgtgcctatgtcacaaaggtcaggtgctgacatcatagaatctcctcctcgaagctctgggaccttcttcaagagaccatccaaaggctggcccttgataacgctgtgaagcaggcagaattcttcagtgcactcagtttctccttcaagacccagcccccacctctactcttggcctatacactttacagctccaaccacctccttcatccattgctctccccactaacacagcctgtctgggctgagttcatgcaccacaactttctcccccttgggatatacctattatatgttttaataactattttcttaactgctttattgggatataattcacataccatacaatctacccatttaaagtgtaccattcgatgtcttctagtttattcacagggttgtagaaccatctccacaatctagttttagaacatttttgtccccccaaaaatcctgtacccattagcagttggtccccactcttcccccagcctctggaaaccaccagtctactctgtttctataggtttgcatattctagacatttcatataagtggaattatacaatatatggtcttttgtatctgacttcttttacttcgcatgtttgcaaggttcattcatgttgtagcatgtgtcatcgctttattcctttttattgccagataatattcctttgtgtggatatgccatattttgtttatccattcattaattgatggacattttggttctttctactttttttttttttgagatgaattctcactctgttgctcaagctggggcgcagtggcacaatcttggcttactgcaacctccacctcccgggttcaagcagttctcctgcctcagcctcctgagtagctgggactacaggcgcgggccactatgcctggctaatttttgtatttttagtagagatagggtttcgccatgttggccaggctggtctcgaactcccaacctcaggtgatccacccacctcggcctcccaaagtgctgggattacaggcgtgagccaccgtgcctggcatggttcttcctactttttagcaattatgaatagtgctatgaacattcttgtacaagttttatgtgaacatatggtttcatttatctttagatacatagaagcagacttgctgggttacacggtgaatctatatttaacattttgagtaactaccaaactgtcttccaagttggctgtaccaattttcaatcccatcagcgaggtataagggttccaatgtttctttatccttaccaacacatgttgttgcctgtcttttttattttagcaaccctagtgggtgtgaaatggtatgatattgtggtttttatttacattttcctaatgactaatgatgttgagcatcttttcatgtgctaagggatatttgtttatcttctttgaagaattgtatattcaaatccttagcctatctttttaaaagccagtcaaatttagcagtggggtgttgtataccaactttagtgacctttttttttgaggggctgatggaatctcgctctgtcgcccaggctggagtgcagtggcgcgatctcggctcactgcaacctctgcctcctgggttcaagcaattctcctgcctcagcctcccgagtagctgggattacaggcgtgcaccaccatgcccagctaatttttttgtatttttagtagagatggggtttcaccatattggccaggctggtctcaaactcctgaccttgtgatccacccgcctcagcctcccaaagtgctgggattacaggcatgaaccaccacgcccggccggctgtgggttttctattctttttcttttcttttttttttttttttgagacagggtctcactctattgcccaggctggagtgcagtggcacaatcaaggctcactgcagtcttgacctcctaggatcaagccgtcctcccacctcagccccaccagatagctgggaccacaggcacacgccaccatgcctggctaatttttgtatttt

SEQ ID NO: 3579 - DNA, 4001 bp, Homo sapiens
aggcccctcggagaccctgcccctccgcccgcatgccgggctttctccacctgggggcacggagggcgggccggggaggggtcccgtcccagagggggcgaactcgcccggccgtgccaccccctccgggctggcatcctggcggggcgggcgcggcgccttgagatggggaagcccggggccggccgccgccagggggcagcagagaccacctttcccgcgcgtcgcccgccggacaacccggcaggtgcggggcccagcgccggggaccccagctgggcaaggcctgggggtcctacttaccctacaaagcagtgcgctgccgtgagcacccaggaggccgctaccaggacgccgccgcacagaggctgcccgccgagctgcagcctcaccagccagggccaggccccgggcggcgccgcgctgccccccacgatgcggccgtgggcccgcgtcacattggcagtgctcggacgcctctcgccgcacggccctagaaaggggcaaggggtgtcacgagggacatgttctggccatcctcgccttcgaggcccacccggctctcaggcctgccccctcgagccttttcaacctcacctggctcaggtgggtcctggaggagagcttgaggcctggggcgcccagatcctgcagagaaacagacctttgagtctcactgctgccctctcgcctgtcctcaccccaggctgggccgagcctctctctccccatctctcctttcgcgctcagccctccagcccacacgggttctatttcagcaaccatgaacttctcctggtcaccacaggagcccagagtgtttccgcctccctgcctttgcacaggccatgccccaagcctagcgtgtcctttccactcggagagacagaccttcacaaacgtagtctaggttgcggcccaacacagtctctgcccccaagaggagagtgaagactgaagggaagggacagaggcagcagaatgggcccagggtaggcagcaagctcactggggcacggggggcagggtgggcacctcggcactcgtgcgatctgtgctggatctccatcgccactcggtttattgcccactgggcgctcctctgggctgcctgcaacgcctgagtcccctgggccgacagaactgctgggacagggggcacacaatcatgcgtggttggggaagagcctcagcctcatcctcctggccccagccctgagccctgcctcgggagacccaccagcctgggacagaatgaggaggcaagtgagccccggggacgctgggcccagcactcagagcccgtgctcccaggttctcagcccaagatgtctccctaattcaactgagctggactgggatctttgaaaggtgcttttccttaacaattttttttaaagacaccaccccaaagatacagacatcgcagaactcagctttattgactgaaagtagctgtgtttgagtggcccaccttcggccgggacagccaagggcagggtgctgccccgggccgtttctctctgcttcttggggccttctctccattcctttcggcatgctcaacagctccccttccctttcccgccacacccctcctctcccacctatatctcagttcttggccccttctcgcagcagggtgggcagaaggagccaaaggtccttatgagtgggggtgacaagctcttctgtccccgcccgcccagggtcccacttcctctacattcctcccaaccccgcggctctcgggccagcctggacttaccttgcagggcgctggggggcaggcgtgtgtacagtgggtgcccgtgggcaaaccatgagcttgggaggggtagcagcagcagcacagccagcagcatggtgaccaggagctggggtgagagacccctgtcctctctcctcctcggagtccaccttccgggtgcctatcctttggtgcccgccttctgctgcctttcggcccccgggcactgaattcttgtccctcaaatcatctgaccccgttctcttacatcaaaattacccgcctccctggtcagccctcacctggcccttaactcctaggagcccacaggggaatggggctgcagggtctttatagaggacagcctgggggaggggtgcacgggagggtggccaagactgggggaggagtggggtagtgggcttgaccttcacctctgaagtctcatcatcccagctccgagccccccttctgtcaaaggagcccttgtttctgcggctccatcaaaggggccaagacagggaagaagggctgacggttgggctgcaggccaggcagaggggggctgctgggtgggggcgggccctggctccagggctgggatggggggggatccccatctgcctctaccccctgaggagcttacagctatgacggggcagacactcctggagggaggagggcagggggtgtctggggtttctcagcagccccaccccctgaggaagccctggagctccccacccctctgcccctaattgcttggcagagtccctccccaatgtggccatttctaaagatgatcaaagcagcctaattagcgccgtaattgccgcactgggggtggtggggtgggaaggggcagaggcaggcagccgcaggagtggcgcggaaagggaggcgggagatgaaaggcccacagtggcccagttccgggaggacaggccctagcagcttctgacgctctcccagaccccctggccctgcacagtgcccgctctgcctgtccggcattgttctgtgaccctgatctggcagtgggattcttctggagtcctctggagtctcatgggcagggccacacagctctcctgggactgagttaccacctggggtaggatagtgcccgtctgcgctgcccaggctccccaattcatgtgaggtgaactggtgggaatatttatcagcaaatgctatgacccggggctctttccccctggagagccagctgttccacagtgaccagcacaccatgctaaggagccctttccccagttaccaccgcacctcgccatgacaatacctctacttcaggaatgctctgaaaatactgtctgcggatgattctggtgagtgaatttggtgaagttggaaaggactctattcaccagagtatctgtccatcttgcagggtatctttttatccatgacctccacaatcttggtagataaggcattagctcaacacagcttgaattttagcataaacagagacagtgtccaaaggaagatcgcctgcggttcccagtaagagccaccaaagcaggggacccaggagcagagaaggtgggtgggaaatcctcacaggcctctgtgaggattcgacagagcttcaacagagcttctgccctgcaggttactgcatccaagctgaggggatagggatggagccagccacccaggcagctctatggacgcttcccctagggcatgcctccaggaaggtatgtcctgcccattcttgccgagtcacgcaggccaggccacagcaagcccacacagagcccctgggcctccctcctgcctctggtcttcaggtgggaggcagggtgagaatccagccactgccaaagaaaatggagggaactttctgcgtggactgcaattctgcttaaccccattctcctgttctctgattcctgtgcccacagctgggtcccgagccctctcctctcttctgtatggacccacccaaccaagtctggctcaatttcatccgctcgcacaggttacctcttagaagccacattaaaatcccacctcataacattactttgtttattattgtttaagcgtgcactcactccctgtctgcttcctccattggaatgtgatggagagacttccaggcctctatccctgcagtctcattctctgtaacacaaccgtcttctattttctttatttttctttctttctttctttatatttgaggcagggtctcactctgtcacccaggctggagtgcagt

SEQ ID NO: 3580 - DNA, 4001 bp, Homo sapiens
actccacctggttccttttctgtaaaataaggaaccaagacccaataaagctatacttcacaggtttgttgtaaagttggaatgggtctgagtgctgggcctggcccttggtgggtgctcaggaaataccgtgtcctgctcagtttaattttgttgttttgctgtccatttagagaagccaaaattaacaaaaacaaacaaatagccctcctggtcaggctcagctctcagcctcctcaaggagtcagccctgaaccttcatccggagggtgcctgtctctgtttccctttttgagcttccagactcagcaagcaaacgctccctccttttaccctggaaatgttttccctcctatggaaaaggtatgaaggcttctggccggtccaaggacttaggaggtgacctgtcctgtccctctgcagcccgagaagctgccgaattacagatgttgctgcaggcaggaaccatgagtggaactccctggcctggagctgcaggacagaggcctctgtctgaacctggggtctgaagcaccgtgagagaaatgactcgagaaggccccacatcctgcccacacagaaagagccatcatgcaaatttgcacgcacacacacacacacagagagagagagagagagagaagacagtgctactgaaggcctgtggtgaggccagcagaggctcaggaagggagcagaggatggcggtctgaggtaggcagagagtatccaggggagagatcacgggggtagggacagaatgacaaaggggacccagtacagctgctgcctggggaggacaaagacccctagggggctggggccaggctgggcctctcctccctgggtcctctcaccccacatccctcaccccttctgtgggtctctcccccttccccaacaaagagctcagcagcctgtgttctgatccccatgctaggcggttccttgtctgtaggaggagggggccacgggatgctctagagtcctaggcagctgggagacaggcctgcttggggaccactttttaaagctggtccaaggtccaatgaacggaggagtatttatcatcagctaatgacaggccacccttccctgcattctagcagaggagtgacttcaactgtggaattttaggccctggaataaggggggaatggcagtgtcaggggactttccctccatgcagctaccttcactataacaataatgactacagtgggccttagtttcctacacaggcacactttgagagttcagtggttcctgttgcccatcaggacaacaggcctaagccagagctaaaccagtaaggagggtccccttacctctcctcgagcttctccaggatggtcctggaaggcaagatgaagctgggagccccctgatggccaagttgactctgagctcctgcagcaaccacacccagagccacccccaccccaaacccaggccttccagactccctctctccagagtctagggtcgagaatcacttgggacctttggccacaaaagcccccactgggtactcagccagagcagtcactggggacgcagtgacactcacaagaggattagcaaggagcttccttcacccttcactattgcagacctccagaggctctgcggggagccagggaagggaaacaacagaggtccgtggggccagggcagggaatcagagaagggtcagatgaggaggggtaggctgagggaggagggggacgggacacagagcaggaagggggaaggaggggcctagcctagcccaggctcatggcaggtgcacacggcactgccagagccctcgcctctcccctgcccacctgccccagcccctgccacaaggacccacatgtgactctccacattccctgctcccacaggttccaccagccccaacctaggcagacccacttagctcacctccaaaggacccaagaatggatggcttggcctgggctccccaagagcacttcctggctcacagtcggcttgcccagtgaatgtggctgtgacggctggagcttccgacttccgctcctcctcaccacaacacacacccctcctgctccccgccgcctccccagggttccctagctgctcaacacctcacacttcctgcccacaagataagagcctctcttcctaggcccagcgcctgcagcccctttccccatgcccctgctccttggaggcccccaccctgcacaccagcctagaaagaacctgccatggtggaactggcctctccctgccatgcaggggcctgggattgaaaggggaaggggccgaggcctggttggtaagcaggccccacctccttcctccctgcgcttctgccccaggttctcagtcttgctctggctcttggtcccctgcagggcacccagtgagagacaggagggccctaagttgggcaatttctggttttaaaacaaatgacatttcaatttttgtgtgactatgtctcatgtcactggtaataatgcaaatgatacaattgccttttagttacaaagtttctcccaatagtacctcaatccctcctcacacctactttatgaagcattaataaccccatcatacagatccggatctggaggcaagctcagagatgctaagccactgcccagggttgcacagctggaaaattacaaagctggggttagaatacagagcctgtgactatatgaaccaagggacctccattccccgtggctgaattcccaacacacgtcctcaggacaccggccgcagtgtccacaagtgtaagtgaggctggtggggagcgcaaacaccatgccattctcctccctccacacaatctacttcctcaacatcaatgaccgtcaacttctctgctgaggctccaccactcccaccctccctgaactctcgtcttcatgattccagctgacccagagactccctcacttgcatgtccacacagcagtggggaccagccaccctgacccagagttgagagggtcgggctctagctcacctacagccgcacccctccctgcagggtacagagtccacaggaacataccaacatggagcccgtgcaccctgcttctccaccacactctgcgtgccccagatcccgagactctccacttctggggcccaaatggcctcctccccatgtgggcacacagcaccgctgccctatgcagcctgagactgggtgaagcgctggcaagagtcctgatagcagagacgggagcaggtagagagagctcaaacctttgggcaggtcacccacccacatgcacgtgtgatacagagcagggtggggaagagaaagggaggtggagctgtggcgtgggccaaaggctggggtgggctgtgctgtggcagcaacattcagaggcggctaagaatcctccttcaaacctggagctccaggccatgatgaaagtgggaggtaggagaattaggagaatagacactttttttttttttgagaccaagtttcgctcttgttgcccaggctggagtacagtgatgccatctaggctcaccacaacctccacctcccaggttcaagtgattctcctgcctcagactcccaagtagctgggattacaggcatgcgccaccacgcccgactaattttgtatttttagtagagacggggtttctccatgttggcgaggctggtctcgaactcccaacctcaggtgatccgcccgcctcggcctcccatagtgctagattacaggcgtgagccaccgcacccggcaggacacattttatatgacagtttgtgagctttagtcttaactttcatgtatttggacatatcagatggggtcctccactctccacttcccagggctggcaaatgttggggacatgcttatctcaccagcacttcaaactcaatgtttataaggcaaacctggttccttctcttctccaagctcttcttcctcatatatttcaggttttacaactctctctctccatcaagctgggtaagtcagaaa

SEQ ID NO: 3581 - DNA, 4001 bp, Homo sapiens
ataacatttgagttgagacaaaagattgagaagctaagggaaaatctgaggaagagaagactagaaaggaacagaatgtgccagggccccgagataggagagaaactgacatatccaaggaacaaaaagtccagtgtgattaggatgtattgagtgaagacagtactacaagacaaggcgggaatcagatcatgtgggtccttggttaagagtctggattttactgtatgccaggggtgtccaaccttttggctcccctgggccacaatggaagaagtatcttggggcatacataaaatacactaacactaatgatagctaatgagcttaaaaaaaaaaaaaaaggtttgtatataattttcacgatgtccgaccaccacagtaagaaaaaaagtcctcgaattcaaagggttggacacggctgctctaaacacaatgtaagcactggtggattgtaagcaaagaagtattatgtgattaaagttttaaaaagcatagtccacaagaaaaacgggctgtacggaggtaatggtcgaaaacaaagccttaaggctgatatagtaacccagacaagagatgaaggtggtttgggccgagttagaagaaacattggtaatggatggatttgaaatagaatgaggcctataggtggcaagaaactgagtgtttatttgatctttacaaagctctgactggaaaaacttcctgatactgaactaaaattcatctcgcgatcacttgtatctcttggggacaaaaagtcttatttcaggtacaagtgacagctcttcaaatgtttgaaagtaactacgtctcccagtatctccaacgatctccttaaccaatcctcataaaaataaagttttgatcgccttaccattcagattactgtcttctgctcaccagtttgtttacaataaaatgctttctttgtgggtcaaacacagagtaagaaaatgagaaaagggtatgtaaataggcaacggaaaaaagcaccaaggctctggacagctatatgcaagtcaatctgtaacggggagcttaagtctccaattgaaacttgatctctgtaacttactccattgcaaatgtcactacgtgaatctacctatgcaatggtttgcgcgtatgaaacctgctccgcagatccatccattctttcttgaatgtacagtcaacagactgagcacataacctcgaaagggtataagtaggctctcagtataaaggtatctccagggcgtctttagggtcttcgccgaacccaaaagttctctgggtgttttgaatgaacacccttggatcggacccagaaatgacccacctcaaacctaatttcgggtttcattctaaggcgaatggagctcggccacgtccagaaacacttctgtagcagttaggctgcccgatcaggggggtttgccttactgttcaatggcacaggggcccatcccaccccggccccctgcgggcaagaactggggctggacgacctcacacggccaagaatgggaggcacagaaaaaaggtaagcccttctggggtcaggggaaggcccaggaagcccctcgggtcctggcgctggggtgtgattggggagggatgccgaggcggtcgacccggctcgattccctcaagccagagaagcacgcagtgacctgatcagactcccagccccccggcccgggggtgggccctgggcagcaagaagctgcccaggccggcgttccgccgggaggcgcccagtcaccggccctgactcagctaaaagccggcgcggcggcggctcctccctccaggcgctggctacgggccgcactcaccggccgaggtgatcatggctgcgcccctcactcgcccgtcggctcgctcgccgttccagctgcgcagtgtatctgtcagctcaggggccgctcagttcaccgcgcctccttgctccccgggtgcgctgctcagtcagtcgcctcctcaggccgccggctcgcttctcgccaggaccccgcccgcccaggggctgcccgccaccccgcctgccgcccggcgcgaattctcccctggcctgcgtcttctgcgcggcggtatactccccagccctcgcggaagggtacacagagaacaccattgttttctctaaacctcctcgaggtcaggagtcccgcgcaacggaacactggtctgcacctgaggtcaggcattagaatggccagccctgcaaagagaggacccccaccatcacccgccattgctgagagaaagggtgttgaggggaggtgcgagcattgcgcgcagtgccacctactggtgggaggtctcgctgcaacacatctcccaccagataatgcttagggaattggggctgccgcaaacagcgtttttttttgttttttgttttttttcccagaaaagtggctttcaattgttttctaaagcaaaacctatcataaaaaaaagaaaatccccatagaagtgctttattatcataatgaatccacaagtaatcattggcttattataaagttgaacaatgaaggtttttacttacttttggaaaaatgtccagtgttgtcaatatattaaaatgtgcagtagttatatggcgaaagcctttccaagggagaaaaaatgtcttccattctttccttctatctgcccaggtcctctttcccccgacggcagtgggttcttcgtttctaatacatcttcagaaatttgaaatggcagttgcaatggccatttgcagtcttatgctagcttcaagaagtcaatttatttcaagagtcagtactgagaaagtcttgacaaggaatagggcaaacggtagcatttttttcagccaccggccttgcactatcaagctaaactcttcaatcgcacagcgatggcgagttcatttctacggccttctacgtaacctaggggcacaatcaatgtcttgtggttgccagtgaattaaatgtgcttgataacacattttgttgtatctgtgactttttttgtttaaattagaattcttaaactgtggttgtttaaaatatattaaatataattattgaacatttttgaagagcctgtggctcagattgaaaggcagggctcgagaagatgtgcatgcaaagtaaacagattacttggggtgtcattctacagaggtacttctttttttttttttttgagatggagtgtccctctgccacccaggctgtagggcaatggcgcgatctcggctcactgcaacctccgcctcctgggttcaagcgattctcctgctcagtctcccaagtagctgggactacaggtgtatgccaccacacccggctaatttttgtatttttagtagagacagggtttcaccatgttagctaggatggtctcgatctcctgacctcatgatccgcccgcctcggcctcccaaaatgctgggattaaagatgtgagtcactgcacctggctctacagaggcacttctaccaagccctcacatgaagacagttgtattccccaaacccctagaggagtcacaaacaaatgccaacaggtaatgaaaatgagtaaagcaggaccagcgaaagaaaatacaagctccacaggatggtgaatggcaactaacagtgtcaaggaggcactagggggtggtggggacagtgatgaagagtgaattcctggccgggcgcggtggcttacacctgtaatcccagcactttgggaggccgaggtgggcggatcacctgaggtcaggagttcgagaccaaagcctggccaacatgatgaaaccccgtctctactaaaaacaaaaattagccaggtgtggtggcgggcactcgtagtcccagctactcagaaggctgaggcagaagaatcgcttgaacccaggaggtggaggttgcagtgagccaagatcacaccattgcactccagcctggcgacagagtgagactccgtctaaaaagaaaaaaaaaaaaagtgagtgccccatctaaagagagcaactgctaaacagagca

SEQ ID NO: 3582 - DNA, 4001 bp, Homo sapiens
ttattgactttcatacatatggttcacaaactatatattaacaagcacatggtttacatggccagtatgaaaataagatgaacccatgtcaaacagattaaaattcagctttttctcttttttttgagacaaagtctcactctgttgcccaagctggagtgcagttgcgcgatcttggctcactgcaacctccacctcccaggttccacctccagcctcctgaggtagctgggaatacaggcacgtgccaccatgcccggctgatttttttatacttttagtagagacgggttttcactatgttagccaggctagtcttggccaggctggatcatctcatgatctgcccacctcagcctcccaaagtgctgggattacaggtgtgagccaccgcacccggcctaaattaaaatggcaatgtattatttaccaagcactttaggctgaaaaaaaaacaaaaaaccaaaaactcccaaagtcaacaggtgaagcatcaataaaagatcatcacttgaaaactttcttcccttggcaagatttagggacaaattcaagacaacatttagcctttttcactaaatagcacttcactaaacacaccttaactgtagttaattcagaaccactatatatcttaacctctaaacttcaaatgagtcagctggtaggtagccttacgtgacaggaaggccaccattatattaatcatctccactaaaactgtgttcatgtttttgttatttctacagtatcagtgcatgtcttgctgcttttctcaaacacattaagtcagaagcactaaaaaaacacttgtgaccagtggaacaaaatcactttcacactataactctattttatgctcatttttaaaccctttcccctgcctttccataatattttatcaacttatattaccatttattttctcgagaatttttccttcagtcactaggtttatagactcaaaagtttacattctttttcttttgacagacacagagctacatccccaggaaaattaagttgcaagatgtaacatacggtagcagatttctactttacttaaaacgagaaatgtaatcaatttaccaacaattactcaattagtatgatattgaaagtaagttaacagccatagtagcacactttgtttttaagatattcaaggtccaaaagcagtgtatctgcaggacttttgtttactttttggagggagctgaaaacctaacactaacagaaaaagggttaaggcttacaggaaggacaagagataaaacaaacgtattcaatgggaaagttaattctactctctctcccttgttttcccggtctgctttgaaaaacttcaaagcagaccggttaacaactatggatagagcacagacaaacaggccataaacaaggattctctctatatagatggaagaggttcccatgatgtgaattcggccaaacagaaaagaatggagaaaggaggcgacatccagacctgaccctgccagagagccctgagagcaggcgaagagaatgaaggaggccgggctcctccctcgcggcccaggcctcctgtggcaactcagctgggcaacgtgactcaggaaagcacggggctggcggcggcctagcacggctgcctccccagacctcccaggcctgccttctgggtcttacctgaagacgggcgggagccggatgccgcgatatggacccttgtcttgcctctgtggtgacgcgaagacagaggcaacagcagcagcggcgcacacccgacgcggctctgtctgcaaaccggcgatgaatcagcccgattccattcaaaagagttgcccgggcctccgccgcgaagcacttccgggttcactagtttgcttcggcttccgttccccgacggccaattggagacgacggagagtcaagcggatgtccaggaggagctcttgggacagacggcgcgggcggcccggcgtctcctgtctctggcaggactgtgaggcggcacttagcgccctggtcgctcgcgccccgccgacgcctcctttttctctccctacctctgcgctctgcggccgccgctgagatctgggacggcggcacatccagcccgggagacgactggctaggaaatagaactgttagtattttgaagcccagatcccctttcgttttggtgttcactactattattgccctcctcaaaaactaaaaggttcatttgagctagatttaacttggttatctgagaagaaaatttttttaaaagaggggggatggtgtgattagaggggaccggtaagacgcccttttctgtaagtccgctttatccacctcttgtcattattgctttgcaaggattggatttcagggaaaactaaggtttcccaaatgttcaaaccacctattttaagccgagtttagtttacagggtttaaagagtcatttattcacatttctccatgtaattatcggcaatcacattttactcatgatctactttgtgctaggctttcaaaaagcaaagttgcagaagatatacttgacaagttgatattacactctaggtctaggtacagtctctgtttaaggcagcttgtttgccacgttcctgtcactttctcaaatatgttccaaataacaagcatctttaaagcattcctaaatcgagaatggtgatgaatctactggacagagggtgaggaaagattacagcgcctggatccaaactgtgatttgagtagcacaattgctttaagatattaatacctttaaaaacacaaagattattttactcataggtaatatttggatccacatctttatgcttcccccccaaacctatgcctctctattcattttttatgggaggagggggtgagtagccccgtcctccaaataattttcctaatcagaaacttaagagtatgaacacttgcctctttttcatctctccccactgtagaaaccatgaaatgtgtaatctccataacagcttttccaatccaccacttccccttctaaatactccccactttggccttaactcagaccttcctcacttcttttttattttattttattttatatgtatttatttattaatgcatttttgagttagggtcttgctttgtcacgcaggctggagtgcagtggcgccatctgggctcactgcaacatcccgtccccgggctcaggcaaccctcccacttcagcctcctaggtagctagggctacaggcgcttgccaccatgcccagttaatttttatttatgtttttatttattttatttttttagtagagacaggatttcaccatgttccccaggctacttttttagaatgctctttgatctttccgccttcggtctgattccttttaatccattctccacctcactggtaaaaatttttgtgctatatgtagtcatgctccttctttatttaaaattccactagtggctccccataacattcattataaaggtcaaaaaaaaaaaaaacccttaaactttgtttggagcaccttttgctccagccatactaaagtatttagctggggaataagatgtccatagggctttgaaaaacgctaacatattcctgagactgtagaaggtgcttagggtgtgcatatgtctagggttatgtgaacactcaagataggcctgagaaggccctgagctctaacctctgggtgaccttgaggcactacagaagcaagaagtgaaggctaaggcagaattatttggttggttggtgcaaaaaattgcggttttgtcatttcaacgaaattactttggtaccaacctaatgtaaagtgcttggctgattgttgaaggcttgtcccaacgtaagtactaaacccctcaggaaagactgggagattttttggttgaaggtgtttaagaaaacctgtctctctaatcattagttgaccactaagctaactgagcagaaacctgagtggtcacacacaataaacaatgcagactttaaagaattcattc

SEQ ID NO: 3583 - DNA, 4001 bp, Homo sapiens
gtgctaatttaccaaacttgttaacaataaatactttagaaaacaatgcttaactatgccttggtagattctaggtttataaatccaaagcagatatgccttcacaccatggcatatttatataatgtacactaaaaaaagctgtttgcgtccccaaaaatggtaggtattctctggcaagtctaatccaagtgattaaaatggggaattactgtaacaaagtgactatttttactgtgcctgagcaacacaaaaacctaggagtctcacttgaaaaagcatttggattttaactatttataaaatattcttttttgactaaacgtggttctccctgttgcattcctgcttctgccgcccctcacctccattctcctaaggatcctaacacgaaaaacttcattatactctagtcaaggggagagctgttaaccttgacattttatgatcactctctgaagagggcaaattacatgttttagttttgcttctttttaattaaaaaggtcccacccacccctcaagtggaaatgagaaatttgtcagaggccccttaataattggcagatgagaatcatccagtgaatatacacaaaactattacaaaaccctgagtcatcactcagttcaatcagcagctttgggtaaacactgaatgagtgagttatgtcttgtgtgttcacccgtccatacccacatgcgtgaacataccatgttactagattttatgtacagttaaccaaacaagatacagcaaaattctttcttaaaaagctcttcggacacagtaaagatgcccatccagcaagtaaatgtaaccttttttcccccactgtattttcactcgttttttttttttttttcctaatttcagtgacactatagtttgaagctagtttacaaacagaactcctgaaactgatttaggtaatctcttaatctgagtaactcaaaaaattaacacaagcctgatactaatatcgccctggacatcctgacagtgctcttccctactttcctcagtatcttaaatgtctctccaaaagaaatgtcacaacaggagcaacacacaatccaaaacaacactgtccacataagacgttaagctcaagaatgaggtctgactttaaacgacccttttcgatcaactccgccaggtctgagagggcccccaaaaagcaaaacccttaagtttccctatggtcttctctccattcagaaagttactagacgccaacggagatgcgaagaggcggggatcgtaggggaaggaagaaccggaggaagcaaggagacaagtcaaggaactcccccaaagacaaattctctttgccccgcctctcccatgcgcaaaagtccacggaggacccttgagaaaggctcacctctctccctcggggccggggcccttgggctacccagggccccccaggtgggaagacaacaacccgaacacttcgggagaagcagatgcggaggacgtagagggatggtaaagacccgggaagtcccgtaggaaagtggcagggaggacggcttgagtacttcacaggctctgtcacgaccctgggatcaccgctcggggacagctccagcgaggacagagctaagggtccagccctctggacaaagagcaaccatccccgacacctctcactgagcctttccccccggcccggcccgcaggcccgggcacacttacgtggagagtttcctggtccagaagaggcccccgggccacagctcttggagctgcacggcccggcccaggttgcatttgatctgggccagctgcaagtcggactcggcgtctagccgctccgcgtagggcagcagcttgttgtagacgatctccttctgcgggacgaagccccgcgggcccggctcgggacgcccgcccggctccgggggctctccgactcccgcccgctcggccggctccatgagcccagggacaccccccccaccccctcccacccgaaccctccccggcccccacccctctccgggctccgcctcctccgcgtcttcgtcgccctgcggccgctggcggcccgtcgccctcggaccgatcgctaggcccccttccctggccggcgtgctgctgggccccacgcggctctcagttcgttggcggcggcagcggccgctctgcccgccccgcaccggctctgctggtgacgctgcagccgccgggcccagaggttccggaccggcctcaagtcacttccggggcggggcggggcggagcgacggcgtcgggggaggcggtggtggcggcagctggagcccaacgggctgcgccttcttcgccgtgggcccggctcggagcccccaccccaggcctcaccggcccagcgcgaggctgcctcaccggaaacacgaggccgaattccaagctattgtcctgcttcgccgggggtcgcgcactccaagcggcagcccactggagtcccagtcgccacgacaggcggcagccaggtcggcctggtccccctagccgagcagccccggcttctgggttagaggggtttatggaaaagcctacgtacccacttgctccttatagatttatttactccatcccgcttgttccttatagatttaatttttctgtcccctttaagtccccatctttctggtattctggccgccatcattccaaagaagaaaatagttactcgctgaacaaatgctatttgaacagctgttttgtgtgtaaggcgctcagtttaggctattgagatagaaagtttaacctggtttccgccctcccaaggacttagtctagcagagataaagacgtgaattacaagataatgctcttaattgctagataagtacaagaatccttaggaactctacaaagaagttgaaactagggggtttgagagggtgtcattttcctagaagtgatacttaatttaagctatgaaggttgagtgcaaagttggttagaaaaaggagggaggaggacacgtatttcagctgagagaacagctttgacgctgcaagcatgtattctaaaaattcaaagttcaaaatagcgtaagagaggggacggagaaatgagactgagaaggcaatcctaaggaattcagagctttatcctagagacaaacttccaaaagattttaagcatagcagtgggatgatataatttacattttttaagaattactctggcggccgggcgcagtggctcacgcctgtaatcccagcactttgggaggccgaggcgggcggatcacgaggtcaggagttcgagaccagtctggccaacatggtgaaaccccgtctctactaaaaatacaaaaaagttagccgggcgtggtggcggacgcctgtaatcccagctactcgggaggctgaggcaggagaatcgcttgaaaccggaaggcggaggttgcagtgagccaagatcgcgccagggcactccagcctgggcaacaagagcgaaactccgtctcaaaaaataaaagggccaggcgcgtggtggctcacgcctgtaatcccagcactttgggaggccgaggcgggtggatcacggggtcaggagatggagaccatcctggctaacatggtgaaaccccgtctctactaaaaatacaaaaaaattagccgggcatggtggcgggcgcctgtagtcccagctactcgggaggctgaggcaggagaatggcgtgaatccgggagatggagcttgcagtgagccgagatcgtgccacagcactccagcctgggtggcagagcgagactccgtctcaaaaaaaaaaaagagtcactctggcttcgtctggaaaatgggttggaactgacaagattgggaactggaggaccctttaaggtgtgacataatcatggcctggatgtcagttgaaattgagagctacttcagcagaatggcttgggcttagtagttgactgaaagtgaaaaattaaaaaggaaagagacaagacgacgctgggtagataggtgaagtccttcactgagataaaga

SEQ ID NO: 3584 - DNA, 4001 bp, Homo sapiens
aaggaatggatacaagatatggacaagactgtcaaaacttttttttttttttttttagagacagggtcttgctccattgcctagcctttagtgaagtagtgcaattatagctcactgaacccttgaactcctgggctcaagtgaccctcctgcttcagcctcctgagtaactaggactacaggcatatgccaccatgcccggctagacaaaagttttggaagcaagcaatctcattacataaatggcagagagggaggaaagtttttaatagcacttgaacaatctggtttgaaatgaagaactttcaacttcaggaacccaaaacactatgatgtttaaaagaacaattcagtgagctcttgcttctatacagatactgccctgatcagaaaggactacctcacttaaagcaattacaacatagggaagatgacccatggcttctcattccacttctttcaacaatcaagaatgtaccaaatacataaggcctgatttagacttggaattgctgatattttctattttcagaggttcaatatgaaatcctttttaaaccaaaatatagaatcattggcccatgactgagtttttaagtgttctgtttaagtgttctgatcacactaaaaacacagtcaacacaccacagataatgtgacggttagtattatcttgtgtttccccttactaaatggcatcagtaacattcagaaaattgtcaagatgtgattgcacagacagatacttcctccagtagtatctggtttcaggtatcatttaaaacaagaatacccctctacgttaaggacatttcagaaagagatcaactctttcaagtttctgagatcaactctttcaagtcacactatttgtttctcatgaccttaaaacagagatcacagttattttgagaacggatgctgaggaagagattctgcttcaggcaaagaaaatgagtagaaaaatgctaacgatggctaccaggaaacggaggactggcattgaatggcagcacaaaggtttctgcagtatcagatggagtggtttctctttcttgaggggaactaagggagagtacatataaaaacatattgtaaattacataccccacttatacctcacaaacttttcggatggttattaccaactctagtctgcagatgaggaaatctgtctattatcatccaattaagtgaatggcaaacactaaacctaaaattaggcttttagcaagttttcactacaaattactgcctctcatattcccacaatgccactgtttgtactgagtgaaaaaaaaattacacagataggtcatacatgttccaagctataactatcacagatcaaaagggcatagtcagatcttttagacttttctgcttttacgaaaacctgataacttctttagccaaagtccccacggtggcgaccagagactgccttttatttgggaagatcttgtacgttctcctcgctcctcctgattgggttaaaatgagtaatggcggataatttttaatttggggtagtgttgctaatagccacactcactggaacgcaagcttcatgagagcagggtcctagctttgcggatggtgttaactacagaatattgcaagcaaccaataagtatttctctaatgaataaatgcgttgcgaatcctatttcaaagggccacctccgcgtacctggtcttaagggcacgcgaccgttaagggcgcgcatgagcaaaccatttcatcgtgcctacttccacagccagctgggaaacataggactaaggtgactccgcggtcttcttcgcggataccctaagcgtctcttacctgcagctgcgtgcctgttcacacaaacccgcccgccgacccgtcagcggctggccaagcctgctgcggaggcccagccagcgaacagcagatacaaccgccatctttgatttctctgcagagcatgttgggaaagcgtgcctcgaccttcaggaaggtggggcgcagtgggcggggagcagggaacagctccgctattggctgaagcggaagaagacgaaagcaatcataaaatgggaggttgcaagctcatggtttgaaagacttcgtcacggaagctaaaagctctatacacccgatttgcctcggaggaattttcctaaatgattattttgatgtcttatatatctttgattgttttcaaaacaaaagagcgagcagagagtcgtacaactatttgttccccccccatgtagaagtgatctcatccacgtaaatgtcgttcctgcgaccgcttccgcgcgcaagcgcacgttgaatcgcgtggtgactccgggcttgaggttgaattaagaatagtcaggtggtgagtggaacgtctcttggggtgtcggaattcaaaacggacctggaggatgttgatctccaagaacatgccctggcggcggctgcagggcatttccttcgggatgtattcggctgaagagctcaagtaaggagttggtcgggtagcgtgcccagcctggatcttgaggtcggcgccctaaactacgattcccagaagcgcttttgcccagtctatcctcttgagtccaggcttgtctggcgcttgtcctgctgggagccgtagttctgggaacgttcctgggccggcgtggactgcctggataagaggccggtggtgctgggggaaagagtttgcgctgaggtaggggaatataagggtggggagggtcctggtctgcagcgttatcatctgccagtctcctcgttaactaacaagcatttgtggaattaaccatagtgtacctgacatggttaattaggcacgtagtaagtttcctcttgtttgtaaaatgattgtccttcaagtgtcagttcaggcgttaacttctctttgctaggaccctgctatattctcggtctggttgttaaatcaagggaactctctttagtcttcattttgatcaaggtagcatttgacattctccaatgcactctcttgaaactttcctttcttccagaaccttatttgtcttcaagttctcctatttttatgacaaatacttctacctccctctcttcctctatcgatctataacctcacaaacatttattgagcatccagttttttccaggcaccaagctaggcgttaatgacacattggtgagcaaggtctgtacctcattttactccttaaatgttgatgttcttcaagattctattctagtaatgttttcttcatggtaaatattgtccctagacaatctcaccactttcatgatttatagtctcaaatttaaatccccaacgcaaatttatttccctgattttcagacccatttgttcagctgtctgtacatctttaattgaatttcacacagagatcttaaatgcatatcaaaaactcaacatggcctaaatgcatatcagaaactcaacatggccgggcacggtggctcacgcctgtaatcccagcactttgggaggccgaggccggcggatcacgaggtcgggagatcgagaccatccctggccaacatggtgaaaccccgtctctactaaaaatacaaaaattagctgggcgtggtggcgggcacctgtagtcccagttactcgggaggctgaggcaggagaatcgcttgaacccaggaggcggaggttgcagtgagccgagattgtgccactgcactccagcctggcgacagagcaatactctgtctcaaaaaaaaaaaaaaaaaaactcaacacggcatccctcttcaaagggaggggttacttacccctccaaaatggtgtacgtagtgcaaaatagtcactagaaactggaaaattattctagatctctcctgacatataacttatttattgggctcttactttgtgtcacctacatgtctatttgttcttagtctcctttttctcccaattgctactgtgttgcctctggcccttatctcatatttgaattgtcttttccttccaccctccccttacacctctcaagtg

SEQ ID NO: 3585 - DNA, 4001 bp, Homo sapiens
gttttattgaaagcaaaagaaaatattctgcccacaatcccatggtgatttatttattatttatttctctctctctctctctctctctctttctctctctctctctctttcctttcttctctttcttttctttctttccttccttcaagacagggtctcactttgttgccaggctggagtgcagtggcatgatcatagctcagagcagccccgaactcctgggctcaagagatcctcccgtctcccaaagttctgggattacaggcgtgagccaccacaccaagccttttttttttcttattgtactaaataatacctccccatttccttacaaaaagtaatctagaacactaaataaaataaacggttagagttcagttgcctcttgtatataagatgccatttttaagcatattatccaaatatcttatgagataaaaatgtaggaagtatagtagagattaccagagttctataacgatcatggaaatttatcaccaaatttttttccatgcattcatattccttctggtaacttgatgaattttttcaggtttaagtgtatcttactttcagctatccattgctaatattattagtcaatgtatgacacacaaattgtttagtttattaacaaaatttatttattaacaaaataaatctacatgaaacatcttggtcatgttaagtaaagcccacttttagcgtggcacctagcctagaaatcccctttaagttttaatgtctctggttatgactttaacagataggttttttaaactgcacttttagaataattgaaatttaaactagtcatctgaaagccgagaacatagtattaagtttagacagtatcaacacataaatcactgctttgaattctcacggtgaaataattttttattgggccttcatttgacggtctaggtgcaccccctaccgaaccggagagaaataccttgattcggtttaaattcacagggctcttgaactgcataacatccaccactacacgcatctctctagctcatctgaaaagctgactgtaaaccctacatttgatttgactcaaaaaaaaaagtgcgtatgaattgtgccttgcacattaaagaggcttcattgtgaaagatcgcccagaaaatctctaaatgatattagcagtacaaaagtgacagccaccgcttaacattaacaaatgagctgtattttggtatttttattctgtctcctaacttgaatgtatgtgattctgtatcacagacagccaattattctttcagatagtggtcacaatcgatcctgtaaatttaaattctcaaaagcgatggtaaattaccagcagacaaaagtcatttcgattaattaaatggggaccacggagtttaagagtaagaaaagttccttcaccttcccagcctcacactcttgatccacgactccgctgttcggaaatatccccttactttgcggatgccaggatgctggtctaaacagtgccggccccaggacatcactccactaaagcagatctttgaagctccctccactaattgcctgccagcacctgccgggtacgcctcggtgcgtgccggggcgtttgtggacgtgtgaacatgaatgagctctcgcgcgcacctggcctccgtgtcgctaaagctgagtccccgccggaggctccgcgaaaacaggtgtcgcggagcactggctcttacctgggctctggccaggaggcagctgccgagcattagccaaccccagacgtggagcgacgcccccagcccggccatgcccggaacggctgtaggaagaagcagggaccctcctccagagcccgggagaagcttccaagttgccaacttggctggcccagagcaaacttgtggccagtaacgacgcgcagctggggtggtcgggcccgggccaccggccgagggtgcttggggtcttgtcgccggagccacgcgcttctcagaacccgcgtgctgctgcgccgcggcgcgaggttggtcttgtcttccggagagactggcccgagtcctggacttgactcgcagccccgcgccgcctgcggcgggaagggggcggctcccgccccaggcggatccgggtgcgccccgcgcggctgcgctcgcgctcctcctcgaagtcactgggtcccgcagcccagggggcggagggcaaaggatctcatgtcgctgctgccgccacccccgattcgcaatgtttctgcttccctccactctgtcccgggttccagggccctgtctctaggggcgccctgggtcttccaggagtgatccagaagtttcttcctgtcctgcgtgcgctgaccatcggccccgaggacagcgataagatggctaaaggctcccgaggccaggtaggccctgcgtctgggctgttcgctggacagtcctaaagctctctaaaatgctctgattcattttctcctaaccattataataatactcggtgtgtgttaagtagaaataatgtatatatttcttgtgggtcaaaagttctttgtgtggtattgtgctttgaatcctggcattaaaaaaagacaactaatattctttttttttagtttatttttaagtttgactattttagacattcattggccaattgtattacaaccttttaaaatctcttgttcttgcctcttgaaggaagaaagcctttgaattctggctctgccatgtgctagctgcataaccctgagcaaattacatactggcctctctttgtcttaatctcctcaattgtaagatgggagaaatgcgagaacctcctttaatcagctctggatgctataacaaaataccataaactgggtggcttataaacatcagagatttatttctcacagtctggaggctgggaagtccaagatcaaagtgctggcagattcagtgtctgataaaagcccgcttcctcattgaccactgctgtcttctcattgcaacctcacatggcagaagggatgagggatttttctgaggtctcttttataagggcactgatctcagagccctcatgaccaaatcacctctcaaagtccatgcctaataagccatcaccttaaggactagaacttcaacatatgtattttgggggaacataaacattcagcccactgctgtccctcaaaattttgttggaaaagttaagtgagtaaacaaacataaagtccaaggaaatgctcaataagtattagctagtatcgttagcattgtttggtgatgatgaatattattattattattgtgatcatagtctgtgaatgggcaaagggctgtggtaagtttgagtattccctatttatgtagaaaagcactgtctatgtttacaatataaaatatttttctgacataaataccaaaatgtttttcaactttgtttttggcctaatttataatatcttgatcagtgcggagggttttttaaatttatgtatctaaatctagcagtcttttcttttataatttcttccttagcttttatgcgagaaaggaattgcatactaaaaattagaaaatcttttcatcagatcttttttctagttcttttctaccgtttcataattttactgtttcaaacattaaataaataatttaatgttttaaagtatcaattttttaggtaatgtaacaatttctccaagtacctaaccagttaatgcaacatcacttattaaagaatccatctttttaatgggaaagatattttgaagggaggtggaggacaaaagtttgctaatgcctctgaaatcacaactttagctccatgtaaggctgctctgatagaagaggcttagaaatcaaagtagggtttgcaatcaattaaatagagcatctctccagtttatccagggtggaataccattcatcaaactcagatgtgaaacacctccatcaaatggttggcagtcttttctctgagtgcctgactgttaaatttggaaagaacttagccctctgaagctcagtcctgagggc

SEQ ID NO: 3586 - DNA, 4001 bp, Homo sapiens
ggccacctgtcggccctctcagtccggcccgccccgctccgctccgcggaccccggctccgcccgctctcgccccctggcggccgaagccccggggagcagtgggggcagggaggtcgcggcgcgcaggcgcgcatcccccgcccggcgggctttgcgcgcgggcctcggcacgcaccgcgcgcagggagcacgtggcccggggccgccgagtgcgtcccttgccttggagactcccggccggcaggcagagcttgcagtggcacgcgcgcgggtcgcgcgtcggtcggccgggctctcgactcgacgccccactgccgccaccccggcaggcccgaatgtctgcattcggcgggccaagtcccacgggaggtcgccccaaagtccaccgggctgcgtaggtccgagactgtcggggatgcgcctctcgggctactactcatcgccctcgcgggaagtcaccttttggtgcttcggagaaaatcgaacagccaggccccgcactggggacggtgttctcaccccacaaactcattcccggactgagtccagaaggggtcactgagagcccctgtggagatccgggccccgagctccgctctgccaagaagtcgcccctgggagagtcagagatgacgccagggacacaagggttaaggagacgccaaggtgactcgcgccaatccctgcaggggcacgacgggcgcggacgagggccgaaatattaagaaagagccagtcagtctgagagcgccccgctcccgccaagggcggagacgctacccagggcgggcagtgggaccgaggcggcgccgacaacaggagcggagccgcaccagccgcgcaggacctcatagccgagggcagtgaacccgccacggggcccgggcgcccccccagttcgaccctaccattggcctgtcgcggccgccgtgttggcccgcgtcgccccgagctgcggcgcacacggtgctcccgggcagccgcggggggcgcccatcgtcgccccagcgccgcgcttcactttctctttcctccctgcggcgcgtgggctctcgcctcctcagccaagcccggcaccgcgggtgcatgactgaagctgggcggccgctcccggcgcactcacctcgaagggcgcccacccccgcctcccagagcgcccaaagcggataagcccgtcacacctccgccgggacggccgacgtcgcggccagccagcccgtcgccccatccgccttatcgggacttagtctagacaaaccacctcaggtccgctgcagggcgcgaaaccgccggcctggcgccgaacaaagagcagcgcggccggcgggcgctcgccgccacttcccgcggccggcccgcgccccaacacgcgccccccagcacttccgattcccaacgcgcttgagtttcaaagttatttccgtgcgcccggcgggccgacgacccccagccaggctcttctcctcccgccgccactcataccggccacagacgagtttcgagggccgtgagccggcctccgcgcctagccctcggcccccgagggcgcccggcccactccccgacgggcatcacgtctgcccgcggcggttcccgccccctcccccgcaccacacaaagagtgggctgcctgagggcaccgcgccgggggcgggccgtttccccgcgagagggagcaacagcgggcttgagacagtccagctgctgcgcgccaaacaccgcccgagcggcggcgcgcggaccccgagggggcgggcggcgtccagcctcaccttggtggtgatttcggagctggtgtctacggctgcgtctgacatggtggggcacgccggtgatccgatgcaggggattaaaaagaaagcgagagttcagggactctggcgataaagctgccggagtccgcggcggcggaggaggcgcgcggcggaggcggctgcggcgagcaaggaggcggatgaggaacaatgcaaagatggcttttcagagcagccagtgggggactcacgcggcgccagaagctttaatatagattagtgggcggcgctcggcttcccatgcccggccgctattggctgagcgcagggagcgggcgctcgctcattggctcgattccgaacaatggacaagcgtgcttaaagcggcagtgccccggcgcgtcccgcgctgcgcagtcgccgatcgcactgtcattcaaggccggagtttgccgggtctcagcagggccgagggcgcgggggaggggtgcgcgagcgcgttccggacgcgcgctcccgcagctgttttgctggggctgctgacgcagaaagccaaagcgcggcaaagctgcccgcccaacccccttccctccctctcccgccctccccgcggctgctcggaaggagggggagggaagagggggcggcgggcacacgacggctgccagcgcgggggaggggaaggcggggtgctgggccgcgctcgccccgggcggtgcccagcgcagtgcccgcggaggtgcccgccccccgcgcctgggcgccttggaccaaggattgtcccagtgcaagtggacggcagccccacgacgagcaacgaggtcacgaggccgagacccgggcacctgggccgccccgtccctctgccatgccctcgcgccctcccagggcagggcacccctagtcctgtgggcaggcgacctcgattgcccaccatcaggtccggcgtccgtcggccaagtcagtcgacaagcgggcaccgtcccaagcacacacggattcatgtatcaagcggactcgatgcgcgatgccggctccagccctcgagtgggacagcccgcgggccccgcacggcatagcggtcccctcattctaggtttctagttagggtctgtcccgagcggtcactgccgtcgcgacagcctcagggcagcctcctccaggggcctgccgggccatcgagtctacccttctcccaccccactgctggactgcgatgggcacatgaacattacagagttcctcgggaaaaatcatcgtctctggagccagttgggctaatctttggggactacctgaaatttgggggaccatttagagaaccatgcggagccccgagaaaggggagcatcaaaacgccacactcaagatggcgccgggctcggcaagcgtggcgtgacgtagcgatctagctcacgtgggcgatccgagaacaacaggctacgctggccttatcgccaccgcacttagctgtcgaactaagaaatcggttgtgtgggaaaaaggaccagaataggtggaaagatagtccagaaatttacctgtgccacacacaagatggcgagacgtagggttcgtccctgtgctgccaaaagggggcgcccgacacggaaggcgggactccggagacacgagcgcacattggccgagagtggcgggcgaacacaaagttgacgctttgcgtccttccattggcagtttcttccgtctgtctctcggttgcagccgagctgggaatggggaaaacccggagtgtgggatcgtggagggcggacgatgccaagtccagcagagcttgcgctcggggctagaagagagactgagtctcccttctcagtttcattaggtaatgggcgacatggctccgtctccacagcggggctttgctgagcttagcacgcagtctcccggcggggaggaggcgcgcagtgccgggcgccactccgtctccagtacgcgttaggcccgcgttcccaggtgcccgtctggccgctggactgttggcctttccggagcgagttttactttaggaagaagcccgggatcccggtagtttagcctgaagaaacgtggggcagatgctgggcagggcggggataccgcgccaacacccgctgcccagcggtcgccctcctatgcagcggcgaagggacgcccgctgtgtctccgccctgcccccaggcgccccagtggctggaggtggcattctccactggacgggcgcgcctcaatccgggggacttcc

SEQ ID NO: 3587 - DNA, 4001 bp, Homo sapiens
tatgtttacatttgttacacacattcttatattgtataattatatattttacatttattatgcatttcttagtttcttatatacaatgtttctacatgtgtgtaaattacttaggtttataattatctgttactttttttttttttttttttgagatggagtctcgctctgttgcccaggctggactgcagtggcgcgatctcggctcactgcaagctccgcctcccgggttcacgccattctcctgcctcagccacccgagtagctgggactacaggcgcccgccaccacgcccagctaattttttgtgtgtttagtagagacggggtttcaccgtgttagccaggatggtgtggatctcctgacctcgtgatccgcccgcctcggcctcccaaagtgctgggattataggcgtgagccaccgtgcccggccatctgttacatattttatatctacttatgaatttatcaaataactttggtcattttataaattataatctttgttatattcatttgttgtattgttttatgcagttatgcaatgtttattgtataaacggtcatttataatacttttatatatttgtcatatttctaaacttgatacatgtcaccatatatcagtttatgcgtttgtatggtatgtttctatgtctggtacataagcgattacactttaaacacgtcatcaactgtaatgtacagtgcctagcattctgcgtgagccttcctaatgctgggcttgcactacctgtattgtaacgtttagattttttgtttggttttgttttgtttgagatgggatctcactctgtggcccaggctggagtgcagtggcaccatctcagctgtgcagtggaaccatctcagctcactgcaacctctgcctcccaggttcaagcgagtcccctgtctctgctccctagtagctgggattacaggcatgcgcccatgcccagttgatttttgtatttttagtagagacggggtttcgctgtgttgcccaggctggtctcgaactcctgagctcaagcgatcctcccacctcggcctcccaaagtgctgggattacaggtgtgagccaccgcacctggcccacgtttagaatctttataggcagtgacgaacgcccctacgaagtgtgcgcccaatatgtactaagtgcttttcacccacatcatttaatccttagaccagtttggtcattcatgtccccatttcaccaagggagaagccgaggtcagaggggccaggtagaccgcctggaccacacgcggatggccgggacgcggattcgggacgggaagcggattcgggcccggacgcggattcgagcccggcgttcacaccctcaccacgccacagcctccgtgttcctcttcgccctgctgcagccccttccttcctgtggtcacaggggacagtcaggtcgccagaagcggcggggccggggctgtccagcgcagcagggccgcccgccctcccctgcggcgcccgccccacctgtcccgcccgcagccaggttgttccgggagcgcgacgaggacaccgggaacgagggtgtgcacggtccgtcccggcctggccgtggacgtcgcgctccggggccggggggcagagagtgaagacggagacagcaagagcgacagagaagtgctggggagagaaacacggagagaccccccgaggcggggagacaccggggacaccgagacagaaaggcagagcccgccgtgcgcggaggacaggcgtacgcagggccagggccggggcgcgccgctcgcggaccccgtgtgccactcacgctgaactcgccggcgaggactgccccctcccggccgccccgcgcttccagccgctccaggaagctccgcgccgagtccaggctgcggctcatggcgccgcgggccagcaaggtccagcccggccgccgcgcgcgcggcgagtgtggacgccgcgggaggcggaggccggtgactgagtccccgcccttgcctcggcagccaatggaagcgcgcagcggcgggcagggcgccccagccaccgtgttctgagcccgcgtagccccaccccgggcgctcgggccgctgtggccggagccctaggtcctcgcgggctgccctgagcagagtccagcgccggcgcttcccctttttttcggctgccgcgcccactggtgggggggtggcacggtcccaggttcgctccctgccgcttgggacccgccctcagatcgggatccgcgcccaggggccgacctccgggtgccggctctgggtggacggccgagcggtctcgccgggccctcccgcccgtcccctgggagccaggccgcgcggagtccgagctggggcgggcagcagccttgggtggagacggtcgccgagatcaggctgcccctcgtgccagaggaccccgggtcgggggcgtcccgcgctgtgcgctccagccgggcccaagggaggccggggaggggcagccacgccgtgggaaaggccaagtggcagcgggatcttctctgtgtatttcccgaggaatttgtggttcctttttcccggatgcgctggggcaccagggtcagtcctgtgtgagcatctcgacctgcacaagcctgctgggaaacagaactgaggcactggaagtgggttctggggaacgaagagcttctcttttttgcctgccctgacactcccatcttcagaaagtgtgcagaggtcagaggagagccgccgttccagcttccgggatcaccgaggggaggctggagagaatggactggcacctgggtctcttcaaggacaggcctaggttagcccccttctcgccgaggtcggaagaattaagaggggtgtcactggaaggggcgtcagtggacaccagtttgaggtcgttgaggggttgaaaggtagcattggggcctggatgtgtgcctgagtctctgaagggtcaacaggggcatgatgtcaggtggtcaatttaattcactaggggctatcagagtatttaagggcacactttcttaaaggtcccggtaggaagtggttttggctttgctatcgctgccccagctgcttaactcagctgtggcagcatgaaagcagacaatatagtgtggctgtgtcccaaagaaaccatttatggacaaagaaatcagaatttcatgtaatgttcatgtgtcatgaattattctagtgtgtgtgtgtggcctacaggctgtcgtttgctgaccttggctgaagtgatggagcgatcaaagtggctctgtggggatcagcagctagggctgtttgatttatcgtggggtccgcaggggtcactgtgagattcatgttcatcatttatcagtttcatctttgagcattctcagggaggtaattgtttaggatggtggtgatagggaattcattggaagccagtcggggtcccttggatgttcatgggggggggggtgtcagtagatattaatgacagtcattgggaggccagtggatacttgggacaagaagtgaaagtaattgtggggccattgggatttggagtgttagtaattgaagggtccgaagagtctgggaagtcattgagagctctgctcagtgcatgatagtgactctcagtataatcattgagggtttgtggatggccatggagatccagggaggtagaatacagaagcatcagtaagctttcagaaaataaagacattttctgggaaaatgtgagcccctgagcacacatggttattcagggcagtctttatgggctagaggatctctgtccagcagcagggatcctgttgagggcctgtcctcataggctgaggtctgtctgactggtggagggcatgtcgtccagctgaaggtctggttgactaggtgggtggggtgttctctcctctggggtaatgtctctgtccattttggggagggcacctgtccttgagggattctgacctttgcctggctggggggcccaggtgtctctctggccacaggcctatt

SEQ ID NO: 3588 - DNA, 4001 bp, Homo sapiens
agagacataaaaattgcttttgtggtaattggagcataaatttattctaacaaaaaaacagtgatgtccacaaaatgatcacacttacgagctagtgaagaggttctgtagaatacacaaacttctgcttacgagttttttctttaaaagaaagctgaatttatattagtcaaattcaagatttagatgatatacctagctctattccattaagcacagtttaggctctgaacaatcctttattttaaggccatctccttcccccttaaaattgaaaaaaaatttttttcctctggcacgttaaagttcagaaaaccaagatttaaaaatgccctggcttttactgttccagtcttctttctactctaattgtcttttgcaagtcggacacattggccttttatctttctccataaatatgttttaaatgtgaccaatcagctgtactgtttcaactgggcccaagatctggacacagaaacttagtattactgaaacctcttattcgaaaagcagctggcatattgcagatgcataacaagttatcctagaacaggcgttttgaaaaatcctacaaatcgtccttgtacatactgatgtcactacatgatgcaagcccagacataaaatcttccaccctaagttttgcagaaacatccacacatcacctgtgcaactgtaagctgttccattttatggaaaccctgcgaaatgcatcactgtttacccacatctcaactttttttttttttttttttttggctcaactacagattcccaaatacaggtatatactggtagaatcataacaggcttaaaacttcaatggtaggaatagttggctcatgcagcgtgcaagaagcgctcatatgagccaaaaaaaaaaaaaaaaaaaaaaggaattctaccagcaatggaaaactcaagattccaaagctttacctagagtttaggtactgggaacattccatctccgcacctattccatcccttggcccttcgctgacccataacagagattccaactataacccccgcaaaagcagaggtcccaggaagaaaggaaagaaagcgtttttttgtttgtttgtttgtttgtttttgtccttttttccttcctttcaaatcatcctcgtacctccggcttgccccacctggctcacctcccaggagccacacatgcaggtaagagcctcccgttcaacgtgcagggccgagaggccggcggggaccggagaacctcttaccttcgtatatcacagccgcgtcctctcggctggagaaaaaaagcctcgaggccccggcgcgcagaggagaagcgcgtcctccgtgccgctccggggggctacctcagcgccccccgagcagccgccgccgcagcggtcgcgccacgacccggagccgccagcaccacctcatgctgctgggcagccgcgggccggcgccgctggggaggtggcagggaggcgggcagccggcgacctctcctacctccctgcagggatgagataatccacacccccaaaagtgcgtgggggagggggcctggccccaatcctccgaccccgcggccaaagccaagtctctttcctctcccgctcaggcccaattccggcccctgggacccaggagtcctgagagaacaatgttggtggtggggcgcgaggagcggaaaagcgcactgcgcggcgtgagctggcgggtaatcctgggcagcgtttgtgtgtgagagtgcaagaggagctcagtcacccccctccttctccacctcctcttcctccccctcctcctcctctatctcttcctcctccctcaagcacaccccctctcctaggccgcagcatagcaaccgaacatggcggctgcgcaggcgccgccagtcagtggccaggagcggcggcggcagcaacaggaggcgatctcgcgagaggcgaggccaaaaccctgcctcgctagcgcagggagaagtcgcaccagtcggagcgcagagggacacgcaggtgcgagagagagcggcctaggaggattgggagggcggattggaggggggaggcggagcgctgtggcccccgccccgcagccgcgtcgcgattggttgtttggactgcgacccctgctgcacccactgaccgcagggaccggatagtgggcaagaagcgtgtgttaaaagggaaaaccagaccagttggcagcaggtcgccccaacctcagtgctcctggaggatataggttttggggggcagttttgaatcatttcctctcctaaacgtaggctccaaaacaaagcctcagcaaccaacctgcgtttataaaacaaacgttcgggggctccttctgtgtgcctggaacggtgtgctttttaaaatttaattccttctaataacatgaatttggtgttatcacgccagggtttttagccaggtgcattataatattttattggtgatacaaacttattggtaataccacagttgcctactggcgaatgatctcagctgaaatggaggaagaagggatttggggaccgccacacttcctttttgcccaatttttgttagtgcccttttctgtcgccaggcgccttctttgtccttccttgctcttagcttgagcatcctatcagagcctacctttataaagacgatctttcaaaaaccactttcccaagccgacaaaatgactacaaatcaggggaatgtgaacaaatctggaaaagacagaaatttctattgactctcttctccctcacacctgttagtttttccatttgaaaaaggcaacttgtcaatccatgtttccagctttacttccttcacttgcttttcttcccagatctctgttgtagccagtgctcattcattcctccctaaatatgcattcctgcctctgactctccattttgtctttgatcatgccattccctctgctaaaatgctcttcacctcattgtcatctgtcaacatccagtcatcctccaaccaaagatcatatgagacttccaccagaaattgaatgtttcatataaatagaatcatacaatatgtaatttttgtttagaggcaaggtctcgctatgttgtcaggctggtctccaactcctgggctcaagagatcatcttaccttaaccttcggagtagctgggattacacatgtgagccacatggcttacatgtagtcttgtgtctggtgttaagcaagacacaaaagttcctgagtggaacttcccctgcaagtcaccaggatggaccctttgaagttaccaatactcaccattattccttgaaaaatctgagttcaccttaaatctacctgcctgcaaccctggaaagagaagaagcaattattgtccttaaaaaaaagagagagagagctttagactgtgccccaggctcacatgggcccactgaaaattgaattgggaaataataaattagtatatctcacactttaatatacatgctgatcacctggagttcttattaaatggcatggtctaatccattaggtctagagtgggccctgaaattctgcatttctttctttttttttttttttcaatagagacaggctctcactgtgttgcccaggctgatcttgaaccctcctgacctcaagcaatcttcctgccttggcctcccaaagtgctaggatcacaggagtgagccactgcacctggcctagagactctttctaacaagctccctggcttttggaccaccctggagtagcaggggtgtagactactgttccttaaactggagtctaagaaaaaatatatgcaaattatctataaaatatgtaaatattttgctcttacttaaattatgttcttttaaaagttaatatattctagtcactatattggatcatttgatgaccaccttgtaacgaaaccctgcacttgattttgtatttggcaccaaccacaaatttaattttctggggctaatgggaaaagaatagaatacttcttgtggaaaggacagcattctggctaagtg

SEQ ID NO: 3589 - DNA, 4001 bp, Homo sapiens
ggtgtcagcagggggcttgaataagaggccttccaaagtccaggttgcaaatggactgtactctcttcactttctcccctacctctcctcctccaggcaagtcttccttcttctcaagcccagtagccctcttcctttctgggccttctctccccttcttgttttttattgcccctctccccccgatcttgtgagttctatgcttgggcctcactcaccctgaatacagacttccaggtgagagcagagcctgcggtcaaatagacagcctgtagaggaaaaggtgagcagaggctcagacacccactcacagagaatgggcagatgggtggacaggctgggaacgggagaagcagatgcaatttattctttcattctaaagaaggccttaagctgggaggagagtaggaatcaggcctgaatttcttaaaaggaagcatgggatcttgttttggattttaagaatttgtgagtctgtatccttaaaagcctctgtttgcttaactgagtgatagggaagaaaccttccaggtgcagggagagagattcatagaattactgcaggagaggttttggccaaattctgaaagaggaatttccttcccaaatatggaaaagcatcctataatggcctggaactcagaagaggttctagcacacttcccccggtcgggggaaagagggcatgggtggggctggggagggtgtctcttaggcatctctcctcgcgctgtcccgagccgctggcgctgtccgcggtgctgaagctctgagtctggcgccgccaagggctggccttggaggcggttaccagagaggaaggggtcacagagcgaggactctccactagacctgagccctctgttgtattctgccaacccacagcgtcacaggaagtactctgcctctcgggcctccaagcccgggtggggaaagagggcgccaggcggcgaggctgcgccccttcccccacgcgccaccctcccatcccccaccccctgtccgtgagtcagcgctgactgtctctgtccgcacagatgtgagtcagcaccaggcctggctgtggggagggggacaagagaggaccctcccctcttcatcctcttctgccccctccccgtgctgtcccccgttacaggagatcagatcgctgcaatcagcttctctaggcttacggagaaaccctggcctctctctctgcccagctgggactctatgtctgcggcccaggcttccactgcccagagatcaccgttccctcattctccccgccacctccccttcccattcctcagcgcctgtcaccacctcccaggcgcctcggagcaagtggcttctcctgtggtctcgcagccggtctctaagtccctctgcccacatgcaccccgtgtccttctcccgaacctgcaattttccccagagcccaattctcttaggtcccgcccccgtattcccagccccacctccaggcctacgcccctttcctccgagacgccctctcaccttcctcatctcgcatgcctcccccaacccatattctccccgagcttcatgacatttcaccctcacccccaccgagtttcgctccaggccccaagctgctccccgccccccaccacccgccagcccaagtttcctcctgaccgtgggcactaacggcgctgcagccccccgggcggctgctcagcagcaggaggcagaggagcagccggagacccccggatcccccgagacccccaggccgccgcgggcgccgcatctttccgagctccgggcgctcgctcccgggccggagccgcagcgacgctggcgggagcctgccagaggggctgaggcggggcttgccgctccccacctccctacgaggcggggtctacatgcccctctcgctgcaacgcggccaaccgcaggcgggtgctgacgacacctccacccccggctcgtaagctaatttgcgtcacatatggcgtaagagccctgtcggagcgggggacctacctagcccatccctcctccatcaaatagtaggcgcctcgctagaattcccacttggccccatccctgtagccctcttctaggatcacctctgtctccccgccccagggtgggtgaaaagggttaagttaagtggggggccaggaaagataggtgggtccagaacgataaacccgaagacaagaagcagaaaagtgggtagaataagtactcttactcattgtcattgaagatactgttctcttccttaagaaaaaatggttaggcatgcctagattccagttctagcagggcatctactaagggtatgaccttgggcaccttgtttaacttgtctgcgtccaagtttcctgatctgcaaagtggaggtgttaatagttactacccgcctcacacagtgattgtgaagattttgttcgttacactaatatggatcacttagaaggatgactggactggtgcatactacatgctccatacatattagctgtcatcattagcttttatttattttttattgagatggagtcttgctctgttggccaggctggatactggcgtgatcttggctcactgcaatgtccaccttctgggttcaagccattctcctgcctcagcctccctagtagctggaattacaggcgcacagcaccttgcccggctaatttttgcatttttattggagatgggatttcaccttgttggccaggatggtcttgaactcttgacctcaggtgatccaacggccttcgcctcccaaaatgctgggattacaggtgtgagctaccgggcctggcctcatcattagctttgactctcctttctctccgtctgtgccacctcgaggctatcaatcattttatggtttctccctgcaaaatacatctcccatcagtccacttctgtccatcctcactacctgaactgaaacactgtgctctttcaccacgaccactgcagcaatcagctagtaactgctcttttgcttccactctagtcatccaataagtaggggagtgagcttcttaagttcagatttgatctccttcctctcttgctttccagtaaaataaaataaaatttaaaaaggacagaaatgcataatgaatacttacatactcatcatccatacttaatggttattgatgttttacaatatttgcttctttttagtatttaaacatgaatgatagacatcatgacatttctcttctaaatatttcattatgcatctccaagaaataaggacattttcctgcataacctaagtgctgttatgacacctaaaaaaatttacaataattccttaatataattttttaaatttttttttttatttttttgagaaggagtcttgcgctcttttgcccaggccagactgcagtggcactatcttggctcactgcaagctccccctcccaggttcacgccattctcctgcctcagcctcctgagtagctgggattacaggtgcctgccactgcacccggctaattttttgtatttttagtagagacggggtttcaccgtgttagccaagatggtctcgatctcctgacctcgtgatgcacccacctcggcctcccaaagtgctaggatcacaggcgtgagccaccgcgcccgggcattccttaatataatttaatgctcagttcatattcaaatttctcagattgtttccccaaaaatgccttttcttttcaggtgttttgttcaaaataacagtcaattaagaacaaccacggcctttgttatgtttcttaatctctgtaaattagcatagacaccatatcctctctcccctcccccatttttgacattgtcatgttgatagaccaggtcaatttttctttagaactcttcttctgggtttatctgatttttttcttcatgttgtatttccctgtatttctccagtgtataacctgtatatcacctgtatttcctgtaaactagaagttatatatgaagtattgactgtatcaaattaaagaatttttaaagca

SEQ ID NO: 3590 - DNA, 4001 bp, Homo sapiens
gaaactccagtaagcagagatctttgttttattcccgatacattccaaatacctaaaactatgcctgctacatagtaagtactcaataaatacttgttgaatgaggaattgggtgagtggaatattatcctggctgaggattccagagttcttggctctgtagcactcagacaatgccagtgagaggaactggtcctaagaagatggaagctggccttttccagtgacttcttcttagaaggctcctctgggcttctccagagagtccaaatgtgaatagcccatctctagggttccacctcttactctagcaagatatgggaaggtgaggctccagcagtgggggtgataggaatattccttgaagagaaatcttcttccccacccataactaaccaagttccaatctctctcctccagtgcacccagaccttaccttgggacatgagttgtcggagcacaccttgtaagcgttggagaactggggaggtgacttgcaaaaggggccgggcctgccccactcccacctggcactgcccaaacaagccatctaagggcacaaaagtggtgtcagcagggggcttgaataagaggccttccaaagtccaggttgcaaatggactgtactctcttcactttctcccctacctctcctcctccaggcaagtcttccttcttctcaagcccagtagccctcttcctttctgggccttctctccccttcttgttttttattgcccctctccccccgatcttgtgagttctatgcttgggcctcactcaccctgaatacagacttccaggtgagagcagagcctgcggtcaaatagacagcctgtagaggaaaaggtgagcagaggctcagacacccactcacagagaatgggcagatgggtggacaggctgggaacgggagaagcagatgcaatttattctttcattctaaagaaggccttaagctgggaggagagtaggaatcaggcctgaatttcttaaaaggaagcatgggatcttgttttggattttaagaatttgtgagtctgtatccttaaaagcctctgtttgcttaactgagtgatagggaagaaaccttccaggtgcagggagagagattcatagaattactgcaggagaggttttggccaaattctgaaagaggaatttccttcccaaatatggaaaagcatcctataatggcctggaactcagaagaggttctagcacacttcccccggtcgggggaaagagggcatgggtggggctggggagggtgtctcttaggcatctctcctcgcgctgtcccgagccgctggcgctgtccgcggtgctgaagctctgagtctggcgccgccaagggctggccttggaggcggttaccagagaggaaggggtcacagagcgaggactctccactagacctgagccctctgttgtattctgccaacccacagcgtcacaggaagtactctgcctctcgggcctccaagcccgggtggggaaagagggcgccaggcggcgaggctgcgccccttcccccacgcgccaccctcccatcccccaccccctgtccgtgagtcagcgctgactgtctctgtccgcacagatgtgagtcagcaccaggcctggctgtggggagggggacaagagaggaccctcccctcttcatcctcttctgccccctccccgtgctgtcccccgttacaggagatcagatcgctgcaatcagcttctctaggcttacggagaaaccctggcctctctctctgcccagctgggactctatgtctgcggcccaggcttccactgcccagagatcaccgttccctcattctccccgccacctccccttcccattcctcagcgcctgtcaccacctcccaggcgcctcggagcaagtggcttctcctgtggtctcgcagccggtctctaagtccctctgcccacatgcaccccgtgtccttctcccgaacctgcaattttccccagagcccaattctcttaggtcccgcccccgtattcccagccccacctccaggcctacgcccctttcctccgagacgccctctcaccttcctcatctcgcatgcctcccccaacccatattctccccgagcttcatgacatttcaccctcacccccaccgagtttcgctccaggccccaagctgctccccgccccccaccacccgccagcccaagtttcctcctgaccgtgggcactaacggcgctgcagccccccgggcggctgctcagcagcaggaggcagaggagcagccggagacccccggatcccccgagacccccaggccgccgcgggcgccgcatctttccgagctccgggcgctcgctcccgggccggagccgcagcgacgctggcgggagcctgccagaggggctgaggcggggcttgccgctccccacctccctacgaggcggggtctacatgcccctctcgctgcaacgcggccaaccgcaggcgggtgctgacgacacctccacccccggctcgtaagctaatttgcgtcacatatggcgtaagagccctgtcggagcgggggacctacctagcccatccctcctccatcaaatagtaggcgcctcgctagaattcccacttggccccatccctgtagccctcttctaggatcacctctgtctccccgccccagggtgggtgaaaagggttaagttaagtggggggccaggaaagataggtgggtccagaacgataaacccgaagacaagaagcagaaaagtgggtagaataagtactcttactcattgtcattgaagatactgttctcttccttaagaaaaaatggttaggcatgcctagattccagttctagcagggcatctactaagggtatgaccttgggcaccttgtttaacttgtctgcgtccaagtttcctgatctgcaaagtggaggtgttaatagttactacccgcctcacacagtgattgtgaagattttgttcgttacactaatatggatcacttagaaggatgactggactggtgcatactacatgctccatacatattagctgtcatcattagcttttatttattttttattgagatggagtcttgctctgttggccaggctggatactggcgtgatcttggctcactgcaatgtccaccttctgggttcaagccattctcctgcctcagcctccctagtagctggaattacaggcgcacagcaccttgcccggctaatttttgcatttttattggagatgggatttcaccttgttggccaggatggtcttgaactcttgacctcaggtgatccaacggccttcgcctcccaaaatgctgggattacaggtgtgagctaccgggcctggcctcatcattagctttgactctcctttctctccgtctgtgccacctcgaggctatcaatcattttatggtttctccctgcaaaatacatctcccatcagtccacttctgtccatcctcactacctgaactgaaacactgtgctctttcaccacgaccactgcagcaatcagctagtaactgctcttttgcttccactctagtcatccaataagtaggggagtgagcttcttaagttcagatttgatctccttcctctcttgctttccagtaaaataaaataaaatttaaaaaggacagaaatgcataatgaatacttacatactcatcatccatacttaatggttattgatgttttacaatatttgcttctttttagtatttaaacatgaatgatagacatcatgacatttctcttctaaatatttcattatgcatctccaagaaataaggacattttcctgcataacctaagtgctgttatgacacctaaaaaaatttacaataattccttaatataattttttaaatttttttttttatttttttgagaaggagtcttgcgctcttttgcccaggccagactgcagtggcactatcttggctcactgcaagctccccctcccaggttcacgccattctcctg

SEQ ID NO: 3591 - DNA, 4001 bp, Homo sapiens
gtttctgggtcatccttactgccaattcacccatgctgaatcccattccaggaagtattaaaacgatcactcagaaaattattatttttgtgttattttgcataaagtttatctcttacctatgaaggcagaagccactaagctactcagaggcttgttttaataaattagagaatgccagtattgcgactcttaacctgctgagtccttctggcagagctctgctggaggactcatcagcttcttcagcctcgggcagcagcagagcatagtgagatacagtgaggctctggaatcagactactggactccaaactcttgctgactgtgtgatcgtggataagttaggtgacttcgctggcctcttcgtccctttataaaacaggaataatgcttcctaatggggatcaatgaaatcaggcttggacctgtgcctggcacacactaagcactcaataaatgtagttaatcctggtattttcttatattttattggcccttctgactacagcggcacctcaatgtaatcagtagcgactcctaagtccctttcttgagtcatgactaacaactaagaatcatgagaccctcttttaaactcaggggagtcacttaatccctgtaggcttcagagagtttcacctgcgacaagaggagtctaacctgatttcttgagacctcttactaggaagaaaatctaagtgaaaagccagcagcttctgttctgcctacacagattctcaaggcatttttcctacaggttaccgcttgatgtttcactatccagcagcaatttttctcttgaaagataatctatctttgtcagttacccatgaagggattactccacccctccacctgagttctggcttaaagccgtttttccttattataaaaagccgtttattattaaagccgtttttccttattataaaatatgtgcttaaggtagaaaattttaaaaatacagattaagcattaggaaataaccaaaatctcaccatgcactacttaatatgtagatgtatttctttagtttttcctttcaaagtctggatcattctgtatatatagttcagttagcttcgcatcatgagcactcttcccgaccactaaatatgcttcaaaaccataagggctcccatgaatatccttgtgcaaagctctttgggtgcatctgattattttcttaggctacatctctagcagcaggatagagagtcaaagggtaagggtgagatttgtttggtcatctgcaaacagaacctgactgctattttaaaaggtgtaccgatttacacacctggtgcctggtctagctgaagctaggttcaatttatactaacgtttttagtatttattttcaaataatttggcgtcctacccaggtaaatactcagtttgacttcactttgcactgtcccttcgggctcggttttgcaggaggacagcactttggggcatggctttaaaaagtcggccagtgcacaggcggaacagcggggacacaggagccaccactttaccgcgagcccagcagggggcggaggactgctgtccactcttcacacagtcaggcccttcccaagggcgcacctccagggaaacagctccagtctaaatgttaacgatcaccccaactcccgccgcacccactccccgcagccaggccttcggaccgaagaccacacccacttccgccctcgatgtctcagcacctccccctccgcccgagtgcctcacctcgaggaccactttgcgcatgcgccccagctcttggaggtaagcggctgtgtgcgggtggtcgcggtgagtgtgcaaggccgcggtggccgcgtgacaagcctgcgctaccagtgcgcccgccggccaggagaacggagcttgtgatagatcctttcgtaacaccaagtattgtaccaggacctgcggctccgccccagaggccgccatcttcctgaccacccgaaaggccggacctactccccggtgcatcttgggatcagggcggggccctgagcgccgccatgcttttgtacggcaggatcgcaaagcacgccgggaccggttggtttggttttgaagacgtggatggcgggaattctcgcttctggcctgggtgagctagaagggagaaggtaggggaaagacccattgtcggaccggaccgtggccagggtggcgggctgaacggccttcttaaaactccttccgtggccgggaagcccgctggaccagagtagccgtggcctcgggagcgcgccggggccgcgggatgggcgcgggggtgggcatggactctgctggctcggacgatgggagagggcgggcggctcaggaaaggggatcctagccgtgacatttgtgtcatccgcggcccaggggttgtgcctgagtggtgtgtgccctgccgtctgggtttgaatgggactagatgtgatgtgactgttgccatttttcttttattagcaaggacattggagtccctatcaccggttgcctagacaacttcatgggaaggcccttgggaatctgagatggagcaggcgaaccctttacgtccagatggcgagtccaaaggaggtattcagagggtcgccgcctccttcctgctgctgcccaaagatgacccgcaggctgagagagccctttcctcctggaactgacgtgggacctggcctgtttgggagcagaatagtgaaaggaactaacattgaagacaaagggacaggcagccaagattattcgaggaggaaaaatggcttcgtttctaggctcccaccccttttgaaacggataagttgcatccatcatatgctcagtgtttatattctgaactgcggttctagccagggaggtccctttcctctccccggattttttgggccatgtatgcattactcttgagggagggccagtgtagggcagtgactttagtgttggctagaactggttttgagtgttggctctgccatgataaatattgtgaccttaggcaagtcactttattctctgcctctgtttcttcatctggaaaatggaggtgaaaatagcactgtagttgtggttgtggaaaaagtatttcttttgtggtggaaaagtattgaactcagacttttcaagtgaagcatttagcacatgtctaatatataggaaatattcaatgaaaggcttaattctttacatactttgtgtcttaaaatgtagaaggtgtttaaagaatgcttgttagagttgcttagaattacgaaactattacttttacttagtccttagtcaatcctttggaaactgagatttgcgtttgaatttctgtccaggagtaagttgctttcttctttagtgcctagtaatatttgtggacagttctggttttgtgtgactttatgttctttgctactaatactttttagaactttgaaatacttactcaagcctgatgcctaaatccaaagggttctacgttagtactttgggaaagcttgccataaaacctaacttaaattacagttttaaaaagaatttctgagcgcgtcagtgaatttggttatcctatttttctctgggtcatcattatcattgataacagagaagtaactatattcagcctaagatgacttaagctgagactttagataataaaagtatatggggtaagatttattgttactttaagactaaaaataagtttggtgactttatgtagtggaaacatgctacactcaggagtaacctgttctctagtccaggccttatttcatttctgttaaagtaagtgatgaggtggaagttttggattatcaagagacttagaccagtctccttattctctacccaaaacaatatttaaacacttagctgttacccatactggttttatccctctgcttgtttgatttcagttttttgcttattatttgaattctccccactcatttgagaaggaaggacatggagttgtagttgcaaccagatgatttattcaaataggcagggatttt

SEQ ID NO: 3592 - DNA, 4001 bp, Homo sapiens
cccgggacgcggaggctgcagtgagcccagatctcaccacctgcactgcagtctgggcgacagaaccagaccctgtctcaaacaagaaaaaaagattcataaacaagtatggaatgcttgagagaaacaaaatccaagtattatttggtaatttatatacagtatttgtaatgcctgagaatttattctaaagtgacagctttgtaagagcaaagtaaatgtcagtaattaatttaggctcttttaaaaagttgaaatcttgctaaatgctgaaacacctaagagaactttggactcaaattaaggaaagcatgtgttaaacacagcttaaattgctggaaaatgcgtaagttactggcaattataactcaaaatagctagacctgtaaacaaaatttaaaaactggacttaaatcctcaagaaccaggtttctgaaataaaattttatttttaagattatcgtaaaccttttctgcatacaaaaactgccctcatgcacaccaagaaaattctacacaatgcaatttcaccaaaaatcggaattttaaagaaattcttgcagcacggaaaatgccatcatttttattcataatgattgagcaaatgaagtaaatcattgtttaaaaggaggctaggaagagaaacaagttgaaaatactcatttttgtttttttttttttatttacaggattccttaagtcatcttccaatactccaggtcacatggtgaagagtcacctgttaaacacgaaatctaaccattaaacaagcttttaaaatccttcggtaactccctttattaaaattgttttcttgacatacagtacctttacaggtattacatttctcttcaccgtttacaagcatttttctcatgttttccttcaccaaaacatctgccccgttttctcaacaagtaaaaatctcaaagtactaagtcctaacatgatgtcttattgcacctaatatgctggcaatacattcctctcttcaaaagtttacgtatgttagaataaaaagctaagttaagtaggttttctctggctgtgttttcagaaacaacactaacttttacacgtgtttgggcatgaaactttaaacattttccccaaaacctgacccaattcagatacaaaactactgctcaaatagtagaagccgctaatcttgtctttggttttaatttacatatttttctgaatatcgaaatccgttcctataacctaaacaaggcgaatccaagtcactgcttcatacccacatctgtccacggcaagcttttcccggacacactcgggcctttgaaaatgcccacacttgttttcataaacccactccttcctcttcacccacttgcaatccgcatgcttctctggggccacccggcctctcccctctttccgaaccctagggccgacagctcggtctctaacctccagcgcgccgaatcggagggagaaccgggtcggcgccccacgcccccgaggcggcggccccgcagagggaaggaagcgggaaagcggccggcgcggcgccccctcccccgcacgcgcacacccccttccggcacccctccccctgcattgtgcgagcgggccccaggccgcaccggcccgggcactcagcaggccctatccgccctcccgctggcgatcggctcccgccgaggccgccgcacaaagcctggggagccatcctcgacggcgccaaaggaccggagaaagagcgaacgcggactgacttacagggctgctgcggccgcgctgcctcagccggggacaccgaccgttgggcacacggcggcgtcgctcttggcggtcctccccctcctccgccttcggtggcggcaatgtcttctttctccacctaccaccctccccccccaccccacctcctccttctcctccccctcctcctccgaaccaccgaagtaccgagggtgagacacagagactcacaacaacatggctgccaccgccgcctgccctcccctcccccccgcccaccgggcgcgcgcagtgcaccccgggagaaaggggagggggagcgctcaccaaggcgcggctccttttaatgccttgcgtccctgctcccgcgctgccgccgcgcgggccgggggcgccctgcgcgtgcgcacgttctccgcgctctcacgtgtttggccgcctctccggcgtgccctcccccgccctcaccttgcgggctcgcgcttccctcctgggctccgccgcggcgggctcggagagcgcaggcgtactgttgccaaacgctgtgttcgactgtcttcccgcgtggggcctcgccttctgaatcttcttaccctcggcttcctacccggttgctcactgttttcccccaactgggtgtgcgggtgtctgcgcccgcgccgcccaccgtggggtactcctggcatttcgcttccagagtgctggcgcccacaagagccggacgttaattcaggcctttaactttcactctgtacctccccacaaccagacgagggagatgcatctgggggtggaagattgtaccctgcgagagggctgtcactcttctcgtggttgcaccccaggcaggtggagccagctctcagcaaattgtcggcccccagtgcttggtcccggtgcacacaaaggaaactcaggtcgttctccagctgggccagtgattctcactcgttggctgtttctttttctcgcgtactaagcgctctctccttccccgtttacaggctagttggaaactccaaatctgccttgctgtcctggacccccatgcaaagcagtggtgattccaggattctaacctaaccggctccaggtcacacagctgtaacaggcaccgtgtccgatttgttcttgatggtttgtttgcacagctcctggctctcctgacatgctgcacttcgtaaatattcagggcctcccgtatagtttgcttaatatatgtcttccctaggcgactgtgagctccacgagggcaaggaccttgtgttttgtttcacactgtgcccgcaagtgcctgttgaatacacatgggctcttcggtttttaactattactgaaaaatgtctgacattgaaatccatcccaagcccctaccttaggctcatatttcaggcttctagatattttcacttgaattttcttgtcaccaagcatgttaaaaactgaagtcacacccatcccctaccccccactcttgtactgtctctgtaattggcagtgtcaccacctattcattccccaaattacacctctgagaaccatccttgtctcttcctcttaccccgactccaaatataaataacttaccaagcctcgcagatttttacttcccaagtaattctggagacagtcttcctctgcctcctcactaatgctagccttgcttcccaggtctggatttctgtagctggctcttaatcagctttcctgtctccagtctcactccctccaatcagttctgctcactgctatctaaaatgcaaatccaattcctggcgctcaggcctctgcttcaaccatctcattgctccccatcacccacgacagcatttccctagtgtgctgtgttcagtgttaatagatgttcctttaagaaatgtctcacgatcaagtaagaatgggagatgctggggtgtacacattttgccttccttctcctttcccctccgttgagctgataatagcagaagagtctttatatacagttgcttagtgtgggtgaaactagataaatccatcacaggccctcccttagaatatggaattgggactaagagaccccaacctcgaaagtctcttggacctgggatcccttgggcagactggttccatcctgtaagacagggaacctgtagagaaagagtggagttgagagagaaaaggagagtgctgacaatgtctctctttcacatgtttctgtgcctggctggctgcctctacccttggagtctgagccgcattcctggatccttatggtaaattctgcttctttg

SEQ ID NO: 3593 - DNA, 4001 bp, Homo sapiens
aagcttttttcttttaacataccattcaacccagctactctttcccccaaataactaaaccctttcaaccactgtttcagatcatgacatttttttgatctgcaaagataactttaaaattattaaatattatttagaaagagtgaaaaaacaccagtttgaaaacatatatacaatatacatctaagaagtgataaagggagtctaaaattaatgtaggagtatgactctcttgttctttttttttttttttgagacggagtctcggtttgtcccccaggccagagagcagtggtgcaatctcggctcactgcaagctccgcctcccgggttcacgccattctcctgcctcagcctcccgagtagctgggactacaggcgcctgccgccacgcccggctaattttttgtatttttagtagagacggggtttcaccgtattagccaggatggtctctatctcctgaccttgtgatccgcccaccttggactcccaaagtgctgggattacaggtgtgagccactgtgcccagcctgactctcttgctcttaaagaattatcagcaagttcaagtttgtcatagacaagaaggttgaagcactgttcaaccctgcttttaatatatgttattctgctttttaaagagcaaagaaaagtagtggccaggaaagaacaaaagcccttttcatctgcctcttatttgccaatagcataaataatgcctaaccagatattgcactgcagtgaagctacagattttgtttacaaaaaaaattcaatttcttcaatttttcttagggttgagaattttaccttatgcactggtctaacaaatttattttggcaatacttaagcttaagcaccttaactcacccttaaatcagtcctctgaaaatgacatactctttggaaaacgctgttctgaagaaggggagggttagctagctgcagggtgccctcttgtggcccaaaggagagacttggactcttttctgcatctgaagagcacagcattggatggagtgagtctcatgaaggtctctattctaccaaggtaaaataatctccaggagcaagcagttaattacacatcttaggtctgttcactgttatcttctattatcaaagtctacgttagtagtacagaacatgacaaaatacagatgtcaccacaagagtttccataatcaaagttctctaagtattcattagctatatgaaaaatgaagtatttgatgccttaaaatatataatgatgaggttaactttggtgctccaaagaaaatcatagattaacgagaatgataaaatccattaagaaatgcgaagtgcctactatgctaggcattcaaagctaataatttacaggggagacaagtgtaaaacaaactaaccagcaatataataaaagtctgtatgaagaactagaagccagatgaagggcttaattctatggcagatagcaactagacaatagatacatcccagtcgagtcttgtagaagattagaagtttgttaagtaaacagttttgggtgaacaagagatttttggaagggagaatagtaaaacaagtatggctaaagcaaacacagcatacatatataaaacagcagaacaaggctaaagagtttttttcaagcaaagctaattatagttcattaccaaaatataagaaattatctcaccaagtcaatcaaatcacctagacacaaataatcacactaaaaattactgctaaaagctttttttttaaagctaaaaatcacaacagaattgtacaatctgaaatttaaacccctccatatagtttggaagatatgaccactatttccaggaagggagatggttaaaaaaaaaaaataagttacaatggctcaaaataaagtgaggtgtaagttcttagtatttgcaaacatttacctctcccattccccgagattctaatgcaagagcttgaaaatcatgattcatttcatccacagatcaaacctgttgaataacaaaaacaaaaattagtacaaagaaatgtttaaacagacttcttcaactatttttatattatattgctgctatgactaatattagcatgatctgagaaagggaagcactgatttctgtagggaagacaggttttcccagtttatgacagcaatctaccttaaaacctgtagaaaaacattaggtcaagggttcttgaattattctgtgtgccaacaactatgtgaaggcaatgaaaaacaattaaagcccagaaactggagaacagtctatactttaaagaaaggagtagcacagagtaaggttttttgtttggttgtttgttttttttaaatggcatttctgcccgagggaaggcctagatgtggaagtagggtccttaaattcctttaagaatccagccttaatggcctgaagaaaccaaaggacacagtctagagcaaccagagctgctggaaagtaagaaagggaatcccagagaggacacgccatgtcccgtgtataaattacactgggattttcagatgacgcctgaactgcacatatgtgagacagactccaaggagctcaattaaggctaaaagaattgagcagaaatttctgctgctgaccaccacaaaagtcacagaaatttggaggctgagtcccaacaaaacccaacatttggctaggtgtggtggctcacgactataatctcagcactttgggagaccgaggtgggtgatcacttgaggtcaagagtttgagaccagcctggccaacatggtgaaaccccgtctctaccaaaaatacaaaaaaattagctgggtgcggtggcacgcgtttgtagtcccagctattcgggtggcagaagaattgcttgaatctgggagacagaggttacaatgagccaaaatcgtgccattgcactccagcctgggcatcgcagagagactctgtctcaaaacaaacaaacaaaaaaaacacaaacacacaacctccacattcgccaaagaaacaacagaatctagagcatcttcaatacatcaatcatgaagtctggaatataatctgtaattactagacaggtgagaaaaaaggaaaatgtgacctaaaggaaaaagtcaattaataaccactccaagacgacccaggttagaattagcagacagcaatcctaaagcaactaccatagctgtgttcaaagatttaaagaaaaatatgctcctaaggaatgaacaaatgcaaaatttcagcagagaaagaaaaactacaaaaataaccaatgctaaaactgaaaaaaatatttaaaaattacactggatgcacttagcagattataaaacaacaaaagaaagggtcagtgaacttgaaaatatatcaacaagatttctaatttgaagaataggaaaatagtggaaaaaaaatgaacagagcttcagtgacctataaaatgtcaaagccaaataaaacaaagatgactctctaaattgaaaatgttgtatttaggaagcaagaatctaatttgggtgcggtggctcatgcctataatcccagcactttgggaagccgaggcaggtggattacttgagcccaggaattgagaccagcctgggcaacatggcgacactcgatttttacaagaaatttaaaaattagcttggcacattggtgcatgcctgtggtcccagcaactcaggaggctgaggtgggaatatcacttgagcctggaaggtcaaggctacagcagtaaaccatgattgtgccattgcactccagcctgggcgacagagcaagaccctgtctccaaaaaaaaaaaaaaaaaagataagatctaatgttctccatatggtcctatttggtcataggatgaccaacatggtaaaaacaatgtctctacaaaaagaatacaaaaattagcctgtttcggtagggcatgcctatagccacagctactcgggaggctgaggtgggaggatcacttgagcccaggaagtgaaggctacaatgagccatgagcg

SEQ ID NO: 3594 - DNA, 4001 bp, Homo sapiens
ttgaagaggtctaaaaatagaccccaaaaaagacctcttttgaatgtgtgttaataaacgagctatgaatttacaaacctctcaacatcattttcacctaccaacaatttatcaacttctcaagaatgttaacattaaaaggagaaaatacgttacgtcttaaatttggttttttcatcgtgagataattaaatgccaggatttcataagatattagaaatcggttgtccatattagatttattatgtttgaaagcaagccctgagaaaggcattccacaatgtaagttttccagtgttggttaccctcaagatgtttgcttttcgtttatgtgtttgttttatagaaataactctgtaacaagttgctacaaagccgcctttcatgtgtcaggctccctaggaggactgaatccctcctccccaaatcaaggataactagcccagtctctggcttactggaggagaggaaggactttattttcacctcttggacgattacaaaaaccagtcatcgaaaacgagaaaaggggcagggtataagaaaaactagcgaaatgaccagactgagtctcatatcctaagatcttttaaaactcatttccctaccgaagggtgtcattcgtaacgcggcgtggggctgggggtgtggatttacggagaaagaggtgatcacacttcactgggcttctgaaacattcagctctggaatctactgtggactcttgaaaagttcatcccgagatctaacctcaagcctcagttttcgccaagcaagcccttcccccttcggtcaggtgcaacaaacttcccactcacccctcctttgctaacaaagccgctccagcaggagagaaacgaactctctcccgccacacctcttttgcacccagtctgcactccttcacctcttacctacccgcctcaccttctccccagacgccggagcctgagatttaaccccttccggccctcgaagggaagagggaagactaaagacaacgcacctattgcgtctagcaattctgttccccgaggaaacgtgcgttttagaacaaaagtaccagcccgctctcgctaggactaagtgagcttctcccttcttgtttgtagaggaaatccgaaaaactgcctggtttgccacctcaccctacctcccccacgagcgaaggagtgcgtgcggctttactcccagcccgactggtccactcccagaaaagcctcggtgggactccgacgtctagggagttgtagccgctaccagaaatatcgatgagcctttaccctgaggtttagaaaggcagctctttctggggcaaatacaaagagcgtgtttcttcctacaaattagtggcatcctcccgctgtatggattcagctggcaaagtaactcaagccttgtcctgactgcaagggtgggcggggtggacggctcggtgttctgcccgttgtgtcttacgctccaggtgctggtctacgcgggcctggacagtcaggggtaggagcgggagccgagaggaggcggaggagatggcgtcccagccgccacctccccccaaaccctgggagacccgccgaattccgggagccggaccgggaccaggaccgggccccactttccagtgagtgtgggattcttcaggctgtgagtttagtgggcccgagcggggacttggcaggaggcggttgtagcggttgttagtggaggtattcccttcccccctttaaccaatacccaaccttggggataggggccgaggtggagctggggcgcttaccagtggggactttagtgtctcacagctgtttctgacccggcagctctaatcagcaacgtttttttcgggagctcctgggcgtctctctgggtctctgtgcttgaaagaaaggggggcggcttcctacctaccgcttctgttttcactttgacagaatggcttctctatctttaaagcgtagactttggtctgtagcagttgagagcggcatttgtccagccacggcatcgacagggagcaaagtctctccttaaaggtgttaacctctcgagaagttgctgaaagccggaaaggttttacgcaacaggaactcaagccccgtacactttgcattcttttccagcataactcagccagtgtttcggatcgagattggagaagcaactttaaagcaggagttctagatctgaggcctatggatggactttgtgtgcaaaatagtgtatttttctgaggcctgtattttttttttgtttggtttttaatcagtatcagttggtttctaggactttaaaaaggctaaaacatgcagagttgggagtgtttcgtggcctcgtgtggcttttgtttggtagtgctggacatcttaattcagataggtgtgattcaaatgtcaaatcacctactattgtaggttttcctaagcgtaaaaaccccaacatattggaatgtatttctgctgtattctgaaatcttttatttaaacactaaaatgctttaacacagtaacgacttagtttaataaggatatatacataacaagtaataagtttgattaggctggtaagccacggtgacattatctgctaccttttttttgagtgggttcttttttccccatttaggctgcttgtcgaatgagagaggttttattttttgcatctgttaaagttctttttatgtaaaattaaccattttcccactttatcgtgaaatattttaaacacagagaccagtagagagtaagataatacctatatattcactactcaactttaaacagtgttaacatttgccagacttatgtcgaatttttcaaaataaaagacggctaaactctcccattcttctttatagtggtgactattgtccttatttggtgtttcgcatacccagtaatgtttttatattttagtacttaggtttgtgctatttatatgcattttatatctaaaacttaacaatgtaacaataatatatattttatatctaattacatgttactatttatatattattttttgtatctgtttttgttttttctgttgcccaattttctattggctttatctttgcttaccaatttgtaagagtattgttaaactaatccttttttgttactacattttgctaatatttttcactgtgtggcttctcctctttatatttatgttcaattttttgtacagatgtttttgattttaatacagccaaaattgtcatattttattgtttatgctttttgtcttggttaagaaatcctgtctacctagatcaggacagtttttctgtatgttttcttttaaatcttccggttttttcatttgcatttaatccacatggaactgactttgtataaaaatctaatttttttttccatataggtaactaattgtcgcagcaccatttattgagtagtctattcttagtttttaatgccatctatgtcatatcaaggtttcctaaatatgtagttctgttttgggcattttctgactttctactagcaccacactatcttaattacagaattttataagtcttgatatgtagtatgtcaagagtttccacacattgctgttctttgtaattgcgctctttacacttagtcctttataaaaagacttactgggatttttattggaactgagctgaatttatggatcaagtaagtttttattccatgaatattgtataagctacaattggtgggaatttatctttttgccttaaatatcttataattatccactttgggagactgggcgggcagatcacgaggtcaggagatcgagaccatcctggctaactcggagaaaccccgtctctactaaaaatacaaaaaaacattagctgggtgcggtggcgggcacctgtagtcccagctaatcaggaggctgaggcaggagaatggcgtgaacccacgaggcggagcttgcagtgagccaagatcacgccactgcactgcagcctgggcaacagagggagactccatctcaaacaa

SEQ ID NO: 3595 - DNA, 4001 bp, Homo sapiens
attttcaacaagcaattaatattccggggcaaaacataccgcaagctttatgaaactgaccagatgggaaaaatctttgaggtgccatttttccactggctcagcaagaattacattatccagacccagggaaacctcacccggctccattctaaaagtccactgctgttgagtgagatgcccccgagtcgtccggcctgggctgaccattcacgggctctggaaagaaagccttggtctctctgcggaggaggagaggaactcgggcccccgccccgccccagggcctccaggaagcagcctgcaaactcggcgacccctgggagccgtggtctgtcccagcactttgtttcggaggtaggcgcactggccgcccacttcctgaattgttcactcaatttttttacaacttttgcagactctttgctggtgccaaaaagtcctctggctcagctaagaaacgtgaaaactatttttggcatgcagaaaagtcgctacaggactaaattagagtcggcgcctgaaacgcagcccgcgttcacagatcccgaaaatgttgaatccgactcgcttcagaacacaggaggcctgcagcgaactctggcggcatctcggtacctggagccgcggggcggagggatggggattcctgctgtggagaccgtgacgcgggacggcccgcaggacagggtgtcaaccccaacgcaacgcatccggttaaacgtatagcgcaactgcgaacacgctcgcgtggattagaagcgaaagaagagaaatgcccgaggcagaaacccgctctgagtcccggctccatctagacccgggctgccccgagactaccgcgcggcccctctcgggaaccccggccgcccggctcgctccgggcgcaggaaaagcccctgagaagcgcggggcccccaggacaccccaggagaggacgctccgggcagatgcgggggcactgggagcgggggcgccgcggctgcgggaactgaggctcctctggggaggcttccccggcgcggggggatggggtgggcactgcgctccaaggggcgggggagggggagagggcggaggctgggggaggagaaggaagggggggaggaggaggggaagggaggaggaggaggaaggggaggaggaggaggaaggggaggaggaggaggaaggggaggaggaagaggagcggaggaggggagcgaacaggacgaggaacggggcggagggggctgggaggacggagggggctgcgccgcgctcggggagcggagggggaccgaggggtcctgagcgggggaaaggtgagcggaggaggggccgcgaaccagggggaagcgggaggccggcggagcatgagagggggcggcgggaggcgagcggggggagccccggaggctccaacaacttcccagtcctgcggggattccgagttccgaacaaaggcggctacgaaggccgcgcgcacagcgctctgttccgcccctcggcgtctcccgcagggcgaacaaaggcccagcgggtccccgcgcccaggtccccccacgtcccccttcggaggttcccttctgcgtcccaagtccccaggccccccgcgcgcccgatgccccctccaccctccgcgccccccacctccgatcacccctgcgctcccggatctccacgaagccccggaccccgcgcccccggcgtcccccgcggcactcacaggatggaggtctgcggcgccacggcgggcacggcctccagcagcagatgcatgcagcgcacggtggtgcggaagcacaggcagcggctcggacaccctgcgcccggcttctgggccaccacggccagcgtcccccaggcgcagaacagcacgagcgccaacaggcagcggcgcccggggcccctggagcgcttggccatggccgacggcgcggacggacgctcggacgcacggagccaccacggccggctcccgactgcgcccgcccggccgcggcccacgtcccagctgtgcgcggggggcggggggcgccagctgtgcacatgcgcgaggctcctcccggcccctctgaatccccgagggcggggcggggcgagaacccggggccccagcgtccggcctgagcgccctcatcccggtggggcggcccgcatggccaaggcgagcgctcgggggcgcggaggagagcattggcacccctgattctgcgctcgagactcggggctcgggaccctggggcctacgcgaagcttctccacttctcttacccgtggtttctgcctgcgctcactacgggttttttagttggcgccttaatgtttgtaacacttttagagcgcttgctctgatccgggcacgattccaggcgcgcaggcgcgctcctctctttctccttctccctacccgcaaccacgtaggaaattatttaacgttccaaaaaagcccctcattccttttgaggaaactgaggcccaagccccaaagcgcacagcaagggagtctgcgggaagattagacccaggcggtccggctccccggggcctgtcagccacctgctctctgccggccgcctggctcagcacagttgggaaaatgaaaggtcctgtgtggagtccttggcgcggcgcaatgcagcccccgggattctcgcggccttcagtgcgtgccctcctgggacagacctaggaggagacccagggaaccccccccccccacgtcgggtgtgtctagagacagcagaagactttggaaaggagggaagacactgcgtgagatacgcacaaaggtggcgttctcacatagttcatacattctctccaatcatctcacaaggacccagtctgaatttcacagacaaggaaggtgaggccaagttgctgaacccaggccacagggtgacggtgccagattcagaggcacagcatgggcgtgttcccgtcgcaaaccccaagtctcagctgtgtccccgtgctggtgttctagcctgagctgcgtttgaaagcagcctggaatgggattggtgggtaataggctagtttcctgttgctatgttaaaacacaaaagcaactaccacgagacatagcccggaggtcacaggtgcattgctgaccacagggcaccatctaaggactggacccccgaggctgctggcagggggttccagttccttgccgtgtgggtctccatggcctgcacactggacatggcctgatgcctcccagagcaggtattagaagaaagaggaagagaatgagagtacaacacagaagccagggtaaaacctaacccagccttggaactggccccgcatcacacctgcggggtgcatcctcagaggtcggtggctcccgctgacattccagatgccatctttcctgcaggattttatccaccctctacagcggatgcagctcacactccggattccatttctcctgcaggatcctattcacacactccggtgggcccagctcacactgcagacaacatctctcctgcaggatactatccacacacagaagtgggtccagctcacactgcagacatctctcctgcaagatcctattcacacattccagtgactccagttcacactgtagatgccaaaacttatgcaggattctatgcacacacactagtggtgcatttcacactccggatgccgtatcttctgcagaatcctgtccacacatttcagtgggtccagttcacgctctacatgtgctctctcctgcgggctcctatccacacactccggaggtgccattcacactctagatgccatctctcctgcaggacgatgtccacaccctccagtgggtccagttcacactctagaggacatcacttttgcaggatcctctctacacattccaccggtgccattcacaccacagatgctgtctctttgcagagtcctatccacatgccccagggctgcagctcacactgcagacaccatcacccctgcagtatcctatccacacacctcagtgggtcccattcacactc

SEQ ID NO: 3596 - DNA, 4001 bp, Homo sapiens
aagacgtttctcaaaagttaaattctcattggtttaaaatattttaagaatcacagcaccttttcccacccataaataccccctgcctacacacacctacaaatgatcttttcagagtggtttgttcagtttccatctcatttattcccttccatttagatgtatcacaaagatacatttggtgtggctccatattccagtctgtaatgttctcttcccaatttctgaccagaagggtattctcagtgaagagaaggagaggattttttgtgtgtcattccacgttcttcttcatgggcccccatgggaagttgttttccttaaaataaagttattcttatgttacagacttccctcactaccaccaggttccctgtggcctgtggtctccatgtgtaagtggggcctgctgtgacccctgagtggtgattacattagatccgaagaattgaaatgggctattcatatatatatgcatgtagctgggtgggagtgggcatttaccagcgtgccctgtatttcaaacatttgagtaaatacaggcatactctaagtgtgtaaaaggtctgctcaataacactgccaaagtttatatcgcttcactttgctgcttttcttaatatctctataacatactattttatgctgacatcattaatatttgcacaatcccttagcaatttcatgatttcaaaactgttacacaagaaaaggaagtaattgtgaacccatgtaattgtgaacccatatacttcttttttttttttttttttttgagacggagtctcgctgtgtcgcccaggttggagcgcagtggcgcgatctcggcttactgcaagctccgccccccgggttcacgccattctcctgcctcagcctcccgagtagctgggattacaggtgcgtgccaccacgcccggctgattttttgtattttttagtagagacagggtttcaccatgttagccctgatggtctcgatctcctgacctcgtgatccacccgcctcggcctcccaaagtgctgggattacaggcgtgagccaccccgcccggccgaacccatacacttcttacagagggaacttgcaaatcacttttatcctaagttccttatatgcgatttctacctacaactagatccattttctctgaaaatagcaggtaccctcttttaagtggaggaaaaaggcttttgaagtaagcaggtctccagtaaaggtccttcctgccgagttgctccttttaaaaatctaaaacaaacaacacacatccgtcctgagactgtagggacacttcagcgccccagcagcatccttggatgaagcagcgggggggctgtgggcacacccccaggcgcaccccgcaccctagcggccccggagcgccggccccgttgccctccagggtcccgagtggggggtggcgccgcgatgcgccctcgcctcccggctcagcagccgccggcgagacacatttcctgtgcctatcagcacccccatcagaccgcagcccaggagaggccagtgacatcacccagcccccctggcgtctccagaacagccccggactggccgaggcaccccggcgagtatgcagagccccgactcctccgggcgccgggtggggcgccggtgcctgggctggggaccgtggccctgccccgcctcccgctctgcctaggtagggctgacccggccaggggtcctcgcatcggaccagagccgctcaagtacaactacgcagaaacagcccctcaccttctcctctggccaggctgaggcactcggactgacccccctggatgcccagggcagggcggccaccagcagcagcaggtggagggtgcccacgacgcgccggtgtcttccgcctgccatctctccgagtctgtctgggagcgggttccccgggccgctggcggtcacgagcccgggaacgcgcgtccttcgccttccctcttctccacccttgggtcgactgcgcccgccttcccatcgcccccgggtagcctcccgccgcgtcgcgcaggctgcagccctcctaccccggaccttcgcaaaccccggggctgggcggccctgggtgacagacacaagcttctgaacccaagctaacaaaggcggccacttccttctcttggagaagatgaaaggaaggaagcaagagacatggaagagcctttttatgatctccaatgccaaaacagggaacagaaaagggaggaagggttcaccagaccctggggagttatgaagtgtttcccacagctcctaaagaaggggtggacagggaatcgacgtctgctgaacacggcaccaggcaccgtcctaggtgcttgtccaaccttcccggatttaatccactaatcccattttacagacggggagactgagacacccccccaccccccatagaaagcctggactggaacccacaagcaaaagtatgacagtggatctttgccttttctcttttttctcacaaatagttgccttgcctcacatcatactctcaaattgaaaaggatggtcaaagtaattatctgaaataatgagatctacaatattcacagcggctctgaaggagtcatcttctccaaggcatggccccaaaaggaaaagccaaacacaattctatttactttgtaacatcaaaggtcattgttatccagataatcctagggcaggaaaacatttcagttttgtctgtaggtttctggtccaagttgtcaggacagtgactttcaccagcctcttttgcttccacagtgaggatcagggcttggcctgctctgagtcatctcccagtaacatctagttcccagaaaaatcagaacaaggatactgaagcagaaccatttcacagagagcaaagatttgaaggtaaggaagctgccagaaggcccacccactcactctgtcttcccagccttggctatgagtttttaaagagagggcttgcctggaaatacactgttctgccctcctctggagctgtaggagaagacaggatgtaaataactcctttcctggtgtacagatttgctaaccctattcatgtctgagagttttgagtgacaatttaaatctccaggcttaaataaaattaaatacacctttattaaacccacagacagttctgatcatcggacccccttcagaactttctactggctccagtttcagaactaaaccactgtcacattccccaatacagctcctctcttgctgcctgggtcaaccttgaaatagtgcatttcctgagtggctgggtaataaagagcctatttgcttttttttaccctattacctttatgtcttttcacaatatggttcctataagaaagagaacgtggaaatagcaaacctaaatgaaacaaaatgtgagaggtactatcatgctaagtatgagcaattcaaaacaagaaatatagaaataagctaaaatgtcagcacataacgtaatgatgattttgtttcctaagtttctccaattttggttatatttaagtcaataagatgttcttacagtttggtatctacaggaagcagactctgagacaagagtttaacatgcaggatgtgtattagggagtgcccttgggacaaacccctgtgggaggaagaaggggaacaggagagaacagagggagaagttagcagcaaagcgggcccaacaacctcacccaactccatgggagtcctgaagctgaaaaagacggtcaaagttgtcccatactgggccaaaatgtctggggccttatctctgcacctccatggagtgatttcctgcaagcggctttccagccaaaagagcttgactgctagaggctgtgggccagccggcctccaacagctggagcagggtccttccctgggggcagatctgggcagcgcatctcctgtatccaccacaaacgtattgtatctggtacaaatctaaaacattccacatagctagtgagactgatttcaatacattggttttttttttacatgt

SEQ ID NO: 3597 - DNA, 4001 bp, Homo sapiens
ccagggagacacacagagacagaaaggtagagagaaagagcaaaaggatgagagagggagaagaaagaagggcacatagagaaacagacaaaggaagagggaatgatggacagagactaacagatagggacaggaagagaccaagacacagtgggaaagcaagagacagagaatgggaaatactgaaacagacagggagagagagtcagaggggcagaaaaggaaagacagaaagagaaagaaaagaggaaggagggaggtagaaagataaaagagagagagagagagattaagatagatttagtcagaaagggagagacaccctgaaacaccaggtagatgaacaaaaaagggagacagactgagacaaagtaggaaagacaaatgtagagggagagggggagaaaaatgggtggggatagggagaatggaagatggagggagagatgagataaatcaagagggagagacaaatattcagaaagtcaaacagaaaaagagagggagggcaagatagagacgcacagacaaacagaatcctaaaggaaaaagaagaaatgaaaatgagcaaaagtatgaaaaagcaaagcagaatatgacaaaggatggataaaagcagttgtaagtaagaactgagagtatgtgttgcttattttaattttttcttttatagttctcaagaaaaaacttaaaatctgaggcttaaaaataatgaaattctcttggcattagggtgaagcaatgcatctgatagaagaccctaattttaataatagctattaatattttcatgaccctaattacttacacagttgggaatcagaaatagacaaaagaaagagcaatgacattcagcgttgataaaaggccatttagtgattttcttcctatttcctctagaaaagagatgaattatttcttaagaacaaaataattgttttgtaaatggagggggaaggaattcatatcataacaattccaaatgctgttaaaatttcagctaattccagataaaaagcaagcaaaactctcaaaaaccttctaaacaattcaattttacactaatggacatgtgttagtcattcagtatcacctacatgatgagatttcacttttgaggaatcaaagtatcaaggtaaatgtcaaagttttcagactgtataattaggaataagatactcctcaaaaattacatagtttgattagcatttgctctcttttgcaatgtgatatctgattatgttaatcatagcaatgacagatctaggttttgctgttacaagcactttaaaaattattctacctcttcccccaaaagggtagaaaaccgttaccatgagttttgaaagttaagattcttagcttcttaatttccaaaagtctcattcacattgtatttgttccacaataaaatttttaaaattcaacaagccatatagtatgtctattttaagatgaacttgaaagagaagtcatttttccagctgacaatttgctgtgctatacacaaataccaattagcacacaggtaaaccattctatcagtaagttacaagaaatatcaaacatgtgaggggtggggagaagaaattggtgctacagctgagaagtaaatgactctacttttcactccaccaacctaaacaaatatatttttgcaaaaataaacaaagacaattttaaaatgctctcactttcaatatagtagaattttatcacacatcctctaacaaaaattatggtactaagtgaacatgaatacttcatgtatcagattacattctatacaaatttagcaaaagaattgagtcacataccttcattgtattggtatttgcttcatcatacagagttaaggagatgttctttccatagtacctgtaaactgatgctctgcattgctcctctatagagctcactgcacacatccagctgattagtctggcattgggagtgcctgctagagcagtctaaagcacttgccgaggaggactcagacaatagaaagtcaacagctgtatgttgtgatgtcagtaacactctagccagtcaccacccagaatatctgaaatgcatcagaagctatattgagctcttcattagcaattcagaagcaatgatgcaaaagcccatgaaactgtgaatatgcaaagactgtcaggatttttgagatttctcgctattaaaatattgttgcacaacaatgcctgatcccaggttgaagaaaaaaagttgagacaaccatatttttctataattccttaaagaacaagccataaataatttaggtatggttaatatatcatttttaaattactctctttgacacttttagtattactaacaaaaagccttaaaaaaaggcaatttgtctgtaatagctaacttcctgtgacagttttgcatcttccaactgactttacctgtcacaaagaaaatgaattaacagcacaattccttatttcttaatctgtttttgctaaaattaaaagaagcttgcttattctggcaagagcattacttcttcataccaacagatggagatagcaatagaactgtgatccgaggacaattctgcctcatgtcagatgcttgttggctatattagctcaagtggcggacttagaagaaaaggaatcaaccaaaaccaaatttaaaaaacaatgtttaataattataaggcaaacaaataagataaaacagaatactaattgcatctattgggcaacacactaaaccagatgagtatgttttctggattctaactattgttttctgtgatagctgggtatagcatgtgcctctgtttcccattttgttaaacaaagatcatactttccaaaagcatacaggaatgttgtaaggatccatcagacaatgctcatacgttacctgcacgatgtgaagaaagatctgtacaccaaccagaaatcccacttttctatgtcactaaaatgttaagtcatgtagagtttacacaaccttacggattaataaaccagcagtttctttataccaacttgacaaacactaaaagataccagctttatagtataatgtgaaaaaatattaacacctttccaaaaatagactcggccctagaagtagattgttaaaaatacatagaaatccacaaaatcttcctaaatcttcaaacaacaaaggtgatgaggcagctaacaacactgagacttatctgagaagcttcccgctgatttacctaaaatttctccagtgtacaatcttttactgcaccctgaactttctggtaaaaatcaagtgccagcctaggtacccaagaaacaaatatccaagctcctaacttttttccataaagagctactgcttttgccaaagggtataaatgatttttttctcagataaaatctttgttacttatgagaaacatatttcaaggcagcttttcttaaaaactgtaacagaaactcttgttatgaaacagatggacaagctaaaatgcagaataatgaagcaacccacttacactgtagcaaaaacaaatgaatattttctactacatttcaaaagattctctctctctccaagctttggaaattgttaggtaggccttataaactcaagtaattgtgaattagtgaaaagtcataattaaaaatatcttaaaatacagttttattgctgtcaagtagaggccttcctctaattatgaagggaagtaacttcgctgttaatagtgagctttagtgataataaaccgttaatttaggaataatctacaacttgttagtaagacagaatcttatcttttaatattctttttggatgctacactggtaattgtatgagttggctgtgtctctaccttacaaatgttaaaacacaaatatgaaacaggtttaggtttctaatgatgttgtggaactgtgcttaaacatgctaccgaggtcaggtaatgaaaactttcaaataaatcctcaataacagaaatttgagttaatatttatttatttattttagac

SEQ ID NO: 3598 - DNA, 4001 bp, Homo sapiens
cagctctttctctatataaatcacccaagatctgaaagtatcgattgtataatttatcaattaactcttaagttctggaaaatactatgctggcagctggcaatatatgttacaggaactctgtggggatctcaggggacttgccttccaaggctgtgtatttatttctttatttttttgagaccatgttctgctatattgcctaggctggccttgaactcctgggctcaagtgatcctctcacctcacactcctgagtagcagggactacaggtgactactacatgactggcaattttcatttttttaatagataccacaaatttcctccaggacctgaatgtatctatgtcaattctgtaactaggtgtactagttatggaatacagaagatcattaagccaccatagtcttctcaaaccctgaagaaatgatcaaaactcagatgtttcctcagaacccaagtttattctgctaacaagtaaacctcagaaatgggcctagaattttatctctgatcacagttatgtctactacagactatagaatccatgatttaaagacatattcttccaggcataaaagcagagtggtatttgaaaagacgagcgtactccatcaaaatgtgatgaagaaatcataacagaatgccctaaaaatagccaaatatgccaaatttttagaaattgagacgtgtccaattattcctgtcagactggtatcctattacttagaagatcttgtttcacatattataaatgggtagactttcagtttgactttaatcatcttttcatttaaaagtttttgtcatcaatgatatttaagctaaaaaaggtttcttacagttacaattaggtaaactataaccatgaagatatatatatatatatttagaaaattttattagaaaaaccatttgctgttcactaatcctaatttggaaagcacctcttcttcaccttttacttaactatcccaggacaattacacacggagcatgatagtcccaataatttaagtttctttataaaaacaagctcaacagagtcaccctttgcacctagtcacagcaacaaaagaaaacaaaacaccaaaaaacttcaaagcccacaaagatttgttggcagcctaaggctcaggaatcaaaacgtgtgtaaatctgatcccgggggaccgtggcactgacagtcattcaactttctttttaatattcccattgtgctttttctggtaccacagggaaaatgtacctacattttaccaaccggtcgaagctgaaaattctcttggtgcaaggccaggggatgcggccgtggggcggccgggggagcccggggcaccggcgccagccacacgagagagcagtaccacgctcttggcaggcctgctgtggctggctcccgagtccctggggctgcaagagcagccgcggaggcagcagcagcagccatggcagggactcggaaacctttcccctgcctcctccgctaggcctcgaggggtttgcttttcacatggcccccgggtgggggcggtgggcacaaggcagtggctgcagctgcagccggagccgcagccgcgggccaggcgagcctggctcactcggaacccgacctaacggcgggctggcagcagcgggacgtcagaaggccctggctgaagcgccgacgacccggcggggaaggccacctttccacacaccacatctctcccctgcctgcctccttctccgttagcgctaccggttggcgggcgggggaggggagcaaggcgcgttattcccggggagctggacgggggagggaagggcatctcttacccgcgttactgaggaggaggaggcggttggagcgcggcgcggcggggcgacggcggggctgggtgggtgcaagtaagagtcttacgaaagggaattaaccccatcaccagcccggacaccggctccagcggcagccgcggctggcagaatcccgccccttcccaccacgcactagccccgcctcttcgttctctttgagcggcagccgactattcataggttgtacgtccccggagtgacatgagttttgcccaatcaagcttgaaaaaaactgtcttctctccacccctttacctcctcccaggccgcggagagccgtgccaaatcttcctccaacctcaagagaaaaagaaccaatccgtggtaagtaaccgcccttgaaggacgcaaaagccaaccaatggtaaaactaggaggacagccattttgcccacttgtaaaagagctaccttttcccacgagttggagcctgaggtgcggagtttcgtgagtttttactgactcgaggtatttaaaagacaaccagatctcctcagtgggtatttatagtgctttttaggggtaaaggaaaattatcctccatgtggggcgaagtgaggcatgctgcttaaggggttggctcctccccttagcgctaacgggttctgaaacgaacacctggtttctccagcttcagtggcggagggcggggtgattgctcttttcggcctggagcggactacgattcccaacatgcttttcccctactcataacttctcctccgttcacttgtcgcggtgcttggctggaattgtagttcctgagaggtacccatgccgccgcttcagccaatgaaaagggacagagttttgaatgacttgaaattagggcggagaacgagttgtcgcgaggctgtacagagcccttttcgcaaccctaacgggagagaagtgatggaagaagggtagccggaagagtttcctcaaaataccataggggttttaaattattagtacgtatttaaactcatctactttcacgttgtcccgttgaacgtcacttccgcttaggggcggacacgtcccaaacctgtggcgggagttggagattctgcggcgaatacgccaggtgtgactggctggaagtggcgtggctggcaagtcgctagtttcttgcatgggagataaaaagttgaacggaatttaatggcattttaagaaagagtgggtgacatgggatgggggtaatttccagggcccttattactttctccaccccggccttcaatcgcgggcgtctcggcctgctcgctattagattgcacggctaaatttgtagaaagtacctctactgcctttagtcttcgcgtggtcagtttgaactgtaaagacagggctccgaagttctgaactacatttacagacacactttttttttttttttttgagacggagtcttgctctgtccccaggctggagtgcagtggtgggatcttggctcactgattcacgccattctcctgtctcagcctccggagtagctgggattacaggcgcgcgccactcagcccagctaattttttgtatttttagtagagacggggtttcaccatgttggccaggatggtctcgatctcctgacctcgtgatccgcccaccttggcctcccaaagtgctgggattacaggcgtgagccaccgcgcccggccacaaacacacttctaaagtcagcttggaaggaaaagagtcacagaaaagggcttttctgtttgaaggattgataatcaagagtggccccatcaccactctttgagtaacgaccatttattaaacgagtggcagacaggcgcggtggctcagacctgtaatcctagcactttgggaggccgaggcgggaggattacttgaggtcaggagttcgagaccagcctgggcaacatggtgaaatcttgtgtctgctaaaaactcacacacacacattagccggacgtggtggcagagatctgtaggatctgtagtcccagctacacgggaggctgaggcaggagaatcgcttcaacttcggaagtggttacagtgacccgagatcgcgccactgcactccagcctcgggtgacagagcgagactccgtctcaaaacaaaaacaaaaacaaaaaacgtgtgactacagggtgccaactataatacaccgatgaataa

SEQ ID NO: 3599 - DNA, 4001 bp, Homo sapiens
aaagaaaacccaaaccaaatatttcagttacgctatacaaactgtttcaaatcagcttaattttgacaattcccagagttcaaagacgactgccgttgctttttaaaagcctctcaatataaaagtacatttaaaaatgggttcaactgcaccgccacaatgctgagagccatgtgtcttttaagaaatttattgcggagcggatgggtttcacaattaatatagcacaattagcgtcaatgccacttaaattttctaaccagattcaaaagggactttcctagagccttcccttttcctttcctaaacgggaaattcgattaaaaaggtcactctttagctcttacttccacactaagtaattctgaaacatggtgaaagtgcattataagtccatagggctatgactggcaaaatactttcctgtaaatactagagtcaaataaaatagaagagagagcttgacttcactccgttgggtttgaggacagaaactgatcatctccctcagattactgcttctgttgatgtctcgaaaagcactgaggcaaatatgccagagtcccaccccaagcgcgaagagcctccgattgtttgacacatcaatggattagtgaatgagggcaactcactcttcccttctaatttaccttaattattcttctcagaaaccctcaagtttactctaagttatcaccatatggaatcttttctttgccccaaagtataaattcaggcctttcccaaatagctagtactgcttcaatcgcaaccactgaaataaataccttaaaaatatcacacatctactaattccacgcaaatgtggaaaaagccagtccagtcgcctgaagaaataaggttctggaacatggttaaatgatgcatattttgtaacagaaggcactgagcatagtgggagactcgaaagcaaaagaccggatggaaatcatgggaagaccccgccccagtaagctcgatgccgattcaaacagtaacttggatgtgtcgtttggaatcggaatcactgaaacaaaggcgtatattacgggaagcaagatgtctggagtaaaataaacggtatgcagctaccgagaccgtacaccgtcctcccacaggtcttacctatggtggaaataaaggtagtattgaaggcatcatccgaaaaacgaaaaaggacgcaggtcttccccactccggaatccccgatcaggagcagcttgaaaagcaggtcgtacgtcttcttcgccattgggaggagcggctcgggctctcgccgccggcggccccaagggatcggtccctctcactacggccaactcctcactcgggcgttctcaggccggaggaccggggaagcgtgggaaaaaggctcgagacggcgcgggcgacctacgaacagctttgaggaagccccgacagtggcggcgtccagtgcctccgagggcggcgaccgcggctccgcagcctctcccagcccgtccgcccggttccggggagtcggtcgggacaaaatggcctcccctcccccctcagggcttctcggccgggacgctcccacgggcgagcaagcctgctctgccgtcgaggaggcgcagcgggcgtgaggacagtctctctcccgagcggaaactccctgctagcacgcggcgagggcagcgaagaaggacccctaagtcgacgagctcagttacatagccccaggaaaccgagccaccccggccagagccaccttttccccgtgccctctcacgccggcgtgcgcgctgcctgagacgcacgcaagggcgtacgcccgcccttccctcacgccctagccttgcggtccgcctctgcgcacgcgcacaagagggcatgggggcgcgccgaagtggcgagtggaatgctcctgtctccaagcctcagtctgaggctggacccagaggggagaagggaggggcgagaaagggcgaggccgcgggcgcgctccctgtggccgcctgatagggtgcgcggcgttacgagcacgccccgggggagacgctacctagcgactgcgcaggcgcagcgccccccctccgacccccgcctcccgcctcccgctccccgctccccgggacacccttacagagcccagcacctccttcccctcccggggtctcccgctggactgcgctgcggtttctctgcacagcgcttgtcgggtgtgttgagctggaggtcttggcgcagcgacgggcttgggtggccatgtgttcccgtgtaggtggagctcgtaaacgcgagaaaaagccgcgccctgggtcatttaatagcctctttgctagaacgagacgcctcccggcgtgccccctctccagggccagccctgacggggaaacatgagcgctccatccggattgacttcaagagcaagagtttgagatggaaaagctggccacgccgctcgggttgggatgaggtaatcctcacaacctcttcctgggcgaggagaggaaggttgaggaacacctgggcgcaggaagaacctccctgcgaagtggagggttctgtgcggtgctcagagaacctgcttcaggcctttgccgtccttcaggaatccgggagaacccgagagcgctctgcagaggaggtggggcctctgcctgccgccagcgtcgtaccactgggttgaaaattgaaaggtggtcaagcctactcccagtccgacacagcctgcttcctcgcattttctttttctttttttcttttctttcttttttttttttttttttttgagatggagtttcgctcgtttcctcgcattttctttttctttttttcttttctttctttttttttttttttttgagatggagtttcgctcttgttgcccaggctagagtgcaatggcacaatctctgctcactgcaacctccaccacctgggttcaagtgattctcctgcctcggcctcccaagtagctgggattacaggcatgtgctaccacgcccggctaattttttgtatttagtagagacggggtttcaccctgttagtcaggctggtgtcgaacacctgacaggtgacccgcccgccccggcctcccaaagtgctgggattacaggcgttagcccccgcgcccgggccctcgcattttctttgcatttgctttaccttctgttctctctccccatcagtcctgtttacgccaccctttttctctcctacccttctgtagttgcagtatgcatgctgctgaccttccattctcagggacatccatccctcaaagcacacctaggtgtgatggcacaggagttgaacctggtgagctggttcaacctgataaagtggaaaacgctgaagtatgtggaaaacaagaaacagggatagagaagtaaaaactacattttcacacacaccaccccaagatcgccaaatcaccaaaatgtgtatttgatatgtaattaaagttagactttcaggcaattccgtcttacatttctgtcttatatttctgtcttacatttttcctttcttctcaaccacccctaaagcgtccttaccgaagatacttgtcttcactaatacagctttctcttcagttgttttctccaattgctcctagtcttgtcacttaaacattttttttttttgagacagactctcactctaccacccatgctggagtgcagtggcacaatctcggcttactgcagcccttccgggttcaagtgattctcctgcctcagcctccttagtagctgggattacaggcgtgtgccaccaagcctggctaatttttatatttttagtagagacggggtttcaccatgttggccaggctggtcttgaactcctgacctcagatgatccatccgcctcagcctcccaaagtgctgggattacaggtgagagccactgcgcctggcctcacttaaaccttcttatcctctatgaatcattctgactgtagtcgggaatgccttatgataataacaattctaaaatagactagctatgcaaatcacaaagtgagt

SEQ ID NO: 3600 - DNA, 4001 bp, Homo sapiens
aaaaacaaggtccaagctatataccacatgatcccacaccctgccaccaaacagcaagtcatgaaggaaggcggggagcaggccaggggatggggaaatggagtcaggtcacagccatgcctggaacctgcactaacgccctccccatcccagaccacagagagccagccaggaaagtcattccacacccatgtttcagaaaacattcaaggtcagatcctttttacctaaatcctgctttcatttgggtttgcaccaggctcatccccctcctccagcaagccttcctggatttattcactcagtggatgccattccactggggcaaacctttccggcacctctcctgacctaaggcacagtcctgccccaatccccttaccctcctacccagatcactcccaagttaaccacttgagtgatccacagcaggctgtcagccccggggactggcttccagctcctgcccaagcccaaaacaggaaatggggctccaaggctgaagccttgatcttaacacaggcaaggttaaatgctgccaaaataaatgatttaaaaaaaccctggcccactgaggtggaagtgaccgggagataatctcctgctgttcattaaccatgccgctgcctctacctcaggcagggcagggcaggcaggcaggccactggaaggctgactcaagtgtttccttccttaacttagaagctcctcctatcctcagaccagggacacaggacacagagggacaggatgggggtgggggggtgacatctctagatagtggagggcatcttgagagcaagaggcagatgccccctgcagccagcttctacgtttagcggggtaatcaacattcaacctcgccctggaggaagacacctggctttccttcccccgtagggcaaggctgcgcctctccactcccctgccggacaggcgcccgcagttcccctcccctttgaggaaagggaggcaggcccggaggttctaagaacggccccaagatttcccttcttgaggtttccatagccccaaagcctctgaatctcattcctaactttacttgacaatctactcctaacgttcgccaccacttaaacctcccccaggcctcccagggaccaccagtggctgagccccacacagcgcacgtttgggaagcttgaagacgaccccgaaatgcgaagaaccaacgtttctgtcggtttacgcccttaagcacgaggcaagggctcactggcccggctgaagttcggggtcctgatcccccaccagccccgccctgttaggcctttagccgtttctgtgcccccgcgccccctactcactgcgtgtgctgggcgcggcctgcgccgaagacctcgtccagcgccaccgtggcctggcccaggaacttgtcgacgccgatgagcgagcggtgcatggtggtgagcaccagctcgcaggcggcggcggagctcgcggcccagggcgccgggcccgcgtcggcctcctgcgcccgcagcaggccatccagggcccccggcggcagctcgaaggagcactcctcacgccactcggggcagccgtgcgtcttctccaccaccgacgtactgtacttctcgcggcccacctggatcaccgtgtacgcgtcgctggtgctgcccgctcccgagctcttgccccgcagcccgcgggcccgcagcaccgtcacctggacgtgcgtgggcagccagcgggaaggccccgccgccggctccgcgccccgcaccagggccatggcggagaagcggggggcgaggtctggccgagccggtgcagaccccaggacctggtgacaaacccggccgcggcagaaggcggtcaggaaccaactctgagcgccgccgcagctgcgggctgggctgggccgggccgaccggccgccgcctccccgcctcaccgggccgctggccgcgggccgcgccgcgacgtcagcgccccgccccctgccccgccccgcgcccgccgccccaaccggcgaggcggtgcgacagggatgcgggcacgcagctcgcgccccggcagccgcagaccagcccggagcgggaaggggcggtgcgcggcctctgcagagggtgggcggagttcccgcggtggccccgcccctggctgggggcgcccgaagcaacccggcctcgcttgtggggagccctacacccgcggccaggtacgaaaaacccgctctgcgcctccaggccaatcccacgtcttccttctaaaagtccctgctccggaaagccctctccgtaaaagggtcccggcccgcagttcctgggatggccagcctcttggcgcggacttggggtgatggggacccccgccgctcccctgaccccgggccgcgctctcccctcctccagtccgcccctgcgggggaaaatgccggagtgaaactggagcgattgccgccccgccacgtgacggtcccgcatcggcgacctggaagcgggtgagctgccgccgcctccaatctctcccggcgcagggggccgggatgcggccatgcggcggcgcgggaggcccgagagcggggctcaccctcctcagactctgcggcggagagccgagtgatgaataaatgagtaaccacatcaatatttaagtgttcactcggagccttggggccagtgtgtcacgggttgggggaaattacaggccctggtggggggttaaataactacttccacccattattaagtgcctactgtgtgccagggcctaagtattaacgtatacttggtttattattgataataacgatgtttagtaattatagatgctgaatttcagccaactctggtcagtgcgcttttatatgcattacctcattttatcctcagagcaactctgtggggtgagtatggcttttatccctattttccagaagataaaatgtcagctcagatgggggagggttgtgaatccactagatgcccccagagcgttttttttttttttaactttcagagcctgtacttttaaaataataatttaaaaataatacacacagcttttttaaaaaaatcaaataggacagaatggcttgcaatgaaaagcaagaactccctctccatccttcaatccagggatgctgcttaaagccactggtgttttcaggtctgatggttacctccacatcactacattaagatgctcacatagctacatctgcatttatcaggactggccactgtctgttgccttcctcctatgatagataatgatttagctggctcacacccacttccatccctcaatcttgtgtagttatgctattatttttagttcctctatagcaggggtccccaacccttgggccacagactggtaaccctccatgtcctgttaggaactgggctgcacagtaggaggtgagtggtggtaggggctagctggtgaaacttcatctgtatttacagccgcttcctatcgcattaccgcctgagctccacctcctgtcagatcagctgtggcattaaattctcctaggagcacaaaccctattgtgaactgtgcatgcgagggatctaggttgcatactccttatgagaatctaatgcctgatgatctgtcactgtctcccatccccagatgggaccatctggttgcaggaaaacaaggtcagggctcccactgattctacattatggtgagtcatataattgcttcattatatattacaatgtaatgataagagaaataaagtgcacagtaaatgtaatgcacttgaatcatcctgaaaccatccctgccaccctcagtctgtggaaacttacattttggtccctggtgtcaaaaaggtggggaaccagtgctctataggatacccaacaggagaaacatgtatttcttcttagggagactccacagtacccctcaactgtccaccttccaggccatgtcctctactgggaatatgaacctaggaaaccagtagagtaggcagaggagacccatgatagcacacccagcacaggccc

SEQ ID NO: 3601 - DNA, 4001 bp, Homo sapiens
ggaaaatcgcttgaacccaggaggcagaggtttcagcgagccaaaatcccaccattgcactccagcctgggtgacagagcgagaatctgtctccaaaaaaaaaggttattttactataaacatacaagtgtcaatataaaagaagcagctacccataactccacccccgtaatacaaccacaaatggtatttttgcctacttctagtttttttctatgactcctaaaaacaaaccaaaacccatagttttaacataaaattattatccgatgggtaagaaatacttaataccaaaggcagtctcacacattgcttcaaaatcatgtttaatggacatataacatttctacaactatctcaacttgctgaaccattttcctaatactggatttttacttagttttaattttttctctgtaataagactgcagtaaacattttcttatataactttttgtgtgattgagtgttgtaagctttcaataatgagaggttggagccttctgtccaaagagaaaattaaaagtgtggcacctgacccccacctccagaatttaatcaagatggggttattagtagtgaaagatgttattaggttgttgaagacaaagatgttttcaggaacaccatattcaagactggcgcttctctagtaatcttaacttggggctttttaatctcttgcacctcccttccactaaagggaaaaaaaacggagagcaaatcccacattagtcttttttgcggggaaggggccattccagggaagggtctgattgatgagtctatcggcaactgtgatcctgtgtcacccttgcctggggcctgtgaagaatattgagattacgagaggtacacctgtacattgcattcagaatacagccatctgatacagaaaacacaatgtagattgtaaaaaggagtttacaagaaaacctgacaagcttcctagatatcactgggtattaaattgggaatgttgatgtcatttgaaatggatttctttaagagttcttctcattaccagaagttttttgtgtttttttttttcaagaccttaaaaccggaactttcccgaagaaaaatgcaaataagaatctccttctgggaatccgacttagtgagccatcagaaatctgaactaggaagtctccgccccagctttgtcctttgattatacacacatgggcacatgcacagacacaaacaaatacagacatgggtacaaacacgtgagcacacacacagacacacagagactcacacacagagaagcagagacacacacacacacaggcagacactccacaaagggcacagaggtttaaacaatgactcacctgttccccaggcccggtcacttgcagggagctgaagagcctgtcatcaccagtccacagcgttgctacctgtctccgctttctcctctctctggtccaggggaaggtttgcttccctccacaggcaggacaggacaggaggagcctctactccaatggaaaacagccgcagagcagaggtcaagagcagcagcctcggaccagagcaatgcccactggaccccagcgccaaggtcaggcctcttctcctcccagaaggtttcagggcaaagtccacagtggtcatgtggtcacctgaggcagggcaggaggctggacctcaaagcaggtgacccgggagcacctgcgcgctgccggaagtcaagtcacattccagtcctgcatttcctggcacccaactggagcccgtttttcagctttattccggggtttcacttccaggatctcactttggcacagaatgtttttcttggctccttccttggagctgtatggaatctttgttgcacttgaaaaaccaacagcccagaagagaaaagaatattccggtcagatgaattaattcctcccactgtcagctagaagccatccctggctgagccctgcactggccagaggcaactgagtgtgagccagtccagggtcagatcctgggctgatgccacctgagggcggggtgggggcgtggcctccgtgcacatgggagactccaggtgcaggagagggggaggtggacttcctcttggtcttcccaagccatgaaacttcctggcttggtggtaacagaagagtctcctccaggtaagatttccagagcctctgagtatggctggggtagcagggttgggcctgaggctgaggagatggaaatctgttgccgtgaacattactccacacagccagtatacgggaagccagctcactttatgtcctccaaactcaccctaacttctcgtttgggtctcatcccgcggggctgctgggaaataagctccgccaccacagtggttcctccgccctgtgggagtggggggctcttatgctggaggggggacactggcctggacttctgctgaggctctgcccctcatccctgcaggacggactagccagtcctaacacaggactagcgttgctctaccacgtccaagcctcctctgagattcttcctccatgcaaccacttcccctggggcgtggccacctccctggaagccgccagcatgctcggctgggcccccgcactctggaggcttgagaatctctctatttttgaatgacgtccttatcctctgcccccaggctggtaaccaaaggtctgggggtggtgacgtgctgggaatggtgtaactcgtgagatggaggctgaatgtggaaatacatgaatgtgcttctcttctctccagttcccttgaagaatccaccttcctgcagggttgggggagcgcagaatgggaggaagatacaaataccaattttatagcaagaatgcaaaaagaggccagcgcggtggctcgagcctggaatcccagcactttggaaggcgagctgggcggatcacttgaggtcaggagttcgagaccagcctgaccaacatggagaaacctcatctctatgaaaaatacaaaaaaaaaaattagccaggtgtggtggcatgcacctataatcctagctgaggcaggagaattgcttgaacctgggaggcagaggttgcagtgagctgagatcatgccactgcatgccagcctgggcaacagagtgaaactatctcaaaaagtaaaaaaaaaaaaaaaaaaaaattaaaaagacaaaatggttaagaaccagctttttacacccaaaatgggaggtttgtacctacagtcagacaacaggtttgaaagccaggccttgtgtggagaagggagttttggaatcagctaagctcaactgtgattatgtcacagcccatcgctcatgttagagagggtcccgactccctagaaggcgaaaacccctcaaagaccccaagccagtccccaaacagcacagagctgtgccacgtggcaccccagccaccctttgagcaatgcacatgcgtaagatctcagaagtgaccggtgacggtgcagagaggccctgagggccaggcacgggacagcagaaggagacaccaagacaggcaggctcaggagctggtgcaggcagggccaaggtgcctcagaggctggcggtccaggcagacattttcagcagagaccacggggaagcgaggacctctcacagatgtaaggacacacatcccctccccacactgccacgaagtcaccggccatactcccaacccaggcaccagtgtccatgtgagagagaggggcaaggtggcggcgtccgggagaagcagcgttttacctggtgatcctttacgttactgtaggacagcagatctacagggttggacggactgaaatttaaaatccccccctcctctgtttcccactagatcaagcccctggagaagatctccttcattaacatgaggtaaaacacatgaagaaagtctgtgacttgtggcaggggacagggcacagagcttctgcagctcagaggagagagccctgtgttcacagtggctctcaccatggcctggagtaaaaccagcacagcccctctagcatccccg

SEQ ID NO: 3602 - DNA, 4001 bp, Homo sapiens
atagcaaattcagaaaatttcctgaacagtagaggtctataaacctcgataaagcagtaaatccatgttctttattgttaccaagaaaactactaaattaagaacctcaagttcacctccgttcaactgtgcaaaaccaactttgtccttggagcccttgaaaaaaaattttttttaaactgtcaacacagcaaatgtcactacaagaacactaccctcaacttctaaaacatgaaattctaataaaatactacggtttctgtttagtgcaaaagatttcagcttcaagccacactattacaaaacttgtaagcattttgcaagagccatgtgacacacatatgacagtcagctaaactggtgggtggaccttttaggggaaaatgtctagcagtaattgaccaaaccagcaaataaactcaacttttacaacaaatactgatgttcccccatccctcaaaggcctttgacactgaaaaggaataccaattcggtctcttccaattattcattactttacatgcatgtaaactgtagaggaaatttttaaagggccattgaggagagcccaacaaactctacccaagggaagtgaacaccagttcccaggaaaggtgccaggtgtgtcacatctgctgtggtgacttcttgagtaagcaagaaaaagaaatgcattaacttttcatgacacgtcatggaacctcattccctatctgcaagcatccaagcaggtaatccaaaacctacatacagatctatcataggtcccgttcgtttctctttcaacttgacagcaagcttcctttaatctgcgagtatcaaaaagacatttcttggctttagttttttttttttcccttgacccacagaagacaaaatgacttaggtgtcctctttaaaaaaaaaaaaaacaaaattctcacaaatgcccaggtttttataggagggcaatggacccggcgagctcttaaacaactcctccaagacacaactcaaaaagagaactaataaatgttcagttgcttctcaccatctactcattcccctcaatcccacgcagtcccgaaaagcatccatattacctgaaacctggcggggaggatggaaggagagagagccaacaagctcaggatttacaagtaaagctggtttctaccccgaagatcctgacagctccgcagagtgcgggcgcagggtctgacagtgccctctagaagggctctcccaccccatcccctccccttagagacaagtcctccttcaaaagtcactgcctccgagagaagataccccttcacaccgccccaggcccctcggcaggcttcctcagcacccgccccgcagtcaggccctctaacctgacccggtccaggcccgggcggctcacccctccggcccgacccctcccccgcgcggccgcccctccgcgtcagacaatggggcccgactcccggccgccagcctctcctgacccatcaccctcgcctcaccccagccgatgccccgacttctgccccaaccctcctcgacccctttaagatcccccaagctggcccacggacccagccgaccggtgctctcctgaactcactattcgggattcatgctggacatgtcactgcagctgccgccgccgccaccgccgcccttgctgccgcagccgccgccctgactctccgcgccacgggtaatcgaaagaaaggaatgagataggctgttccgggagagcaaacgtcttcccctactccgtcccctagaacacaatcagcagccgccgccactcagctatcgcttccacccaaaatggccgccggcgaaccaggaaatagggaagccttagaccgaggggcctttacacggcccagagggcggccgcaccgcctggcatgccgggaaagggagtcgcgagcgcggctacgcgagctgaggacagacagtgcgacgcaaggccaggactcagcttcccgccaagcgccgcgcctctggggcatgcgtacctgaagggttgtcgcccgccccattccccactccctcacctccccaccctcggcccctccctgctcccctcccctctgactcgctggctaggacttcgctcggactccccctggcggattggctaaggccgagctgccctagtgatgtcatcagtgagacgtggcagccgggcgagtcagcgccccacgggggagggggcggagaggggcggagggtggtgccggcggccgacggaggctgggggtcgggggaggcaagggaccggggggagtggtcaaaccggagggactgccgggggtgcgggggcggggagggggccggggtacgagcgtgtcggctcctgcctccgttgcggctgttgctgacctgaccagcttgaggcttgcgccaccctggtggcgctggttgggggctggtaggaggacgtccgctctaagaacagaagggaagtcaaggggctccctggacggcacggagcggttcttctcgtcactcacccatccccacctgggttcggtcatcgtccattgttggccccgcgcactaccattttcttcttagatttcttcccattcttactgtgccccgctcttaactcgtcagcctggctattgcagtagtctccaaatggactctacctctctctctcctctccgccccagcccatttgcacacacagtcggatgtatctttctgagacagcacctgcatcgtgaccccacaaccttcaatggctccacatcccatggatgggagggacacagcccagagccagcctaaaatccaattcctaccttcgtcccggccttcaggttgaattgtaatgtattatcttttagttgctactaaccctgagccattctgcaagactggaaaataataagcaataaaaataggcaattcatcactatatagtgcctacaatttctgggagtaatattaactcatttttaaaaaacctatggccttaacagctctctttaatcagctcaggaatttaaatctccgctaaactttaacacattatcttgagttatttaattacaaagggcatagtgtaatacattgtccaaagtttatcttccaacttctaagaactaagaaaattgtctcctgagacttactgcagaatcactttaaattcctacaacgccaaaatatagaaagaaggcacttatttctacccatacactaattacaccccttagccctcaaattctgccatgggccttagttgatgaacttatcaaaagttacccgagtttggtttctgaaatgaacatgttggtttctgaaatgaacacggtcaccaccccaggaataccctgaatggttcagtaataggcaccaaaaagtgttcgttaccctggactctaaagcccattaaaaaaaaaaaaagcttattttgatttcaaataaaaactcagaaaactggccaggctcggtggctcatgcctgtaatctcaggaatttgagaggccaaaacggacagatcacgaggtcaggaattcaagaccagcctggccaacatggtgaaacactgtctctactaaaaatacaaaaattagccaggcatggtggcgcgtgcctgtaatcccagctactcgggaggctgaggcaggaaaattgcttgaacccgggaggcggaggctacagtgggccgagaggccactgcactccagcctgggcgacagagcaagattctgtcttgaggggagaaaaaaaatctcagaaaactgtgacctgagtcactagtaaaggcacacacacacacacacacacacacacacccccaaaaaaccctcagaaaactgtccagaactcgtcctcagccaaaaatacaatctgtcctcccctgggaagtatactcccaaacttcctttaattaactattttctttcccaacaaagaattaccccctgccaggcgcagtggctcacgcctgtaatcccaacactttgggaggccaaggcgggcagattatgaggtcaggagatcgagac

SEQ ID NO: 3603 - DNA, 4001 bp, Homo sapiens
ctgaattacctgagaccgtgttacacaagcaaaattttcagtcccacctcagacctacagaatcagaaactctgaggatggggcccagcaatctaagactctgatgtacattaaagtatgagaatcactggtcataggaatactgaatctggattcctgtatttagtttgggaagatgtccataacccaatcccgtcttccttgttaaccttatttatttcccttcaatagacagtcttcactctagtgaagatatatttcttcattcagtcccttcaaagattcattctcacctatgtctctacccatgtcagtccattctcatgtttaaccaaccacttcccactttcaaggcccagctcatttcctatcttttctatgaaaatatctccaactattgtagtccacaatatcacccctatttaaataataattattttaattattatttttacaggtagtaccaactggcttacattttaactatttgctgtttgttgttttttaaaaatatatgggtcaagtttctgcttttccctttgtatatagctctggacacccagtacctactcaatgaagtcttgccagtgtggttatgtcttactgacacttttatgaagggtaccacaggtctaactattattccaacaaggaccttttatattttcctgtgccacctaatgacacgacatccacaaatttcctctcccaaccagaaagattataaaatgctgtaacagcgtaaacactgacttcaacacccaggaaactgaagggtttctgtgacacttaacagaaaccttctcgatctaagctatcactcctccacaaacttggctttcaactaatttcagtaatagaacagtttcacccagacagctgttcatctgaatttgacaggcacaggaagcctgggcacagtacccactttaatgtaacaacttaaatcaaagcattccaaaaccatatgcagactttttaaaaaggttattctaaaagacaggatgggcggaggctcacgcctgtaatctcagcactttgggcggcccaggcttgagcccaggagttcaagactagcctgggcaacacagcgagatctttaaaaaattagttgggcgtaatagcgcgtgcctgtggtcccagctcctcccgaggctaaagcgggagcttcacttgagcctaggagttcgaggccgcagtaagctatgacctcgccactgcactccggcctgggcggacagactgagactctgtctccaaaaataaataaaaataaaaaattaaagacagcatggagatggtgggagtgtgacagatggacaactaccaatactctgaagaaagacttcctcctgaaaagggtataccaacgtacacgggatgaggtgcggcacaacctaccaagtttactgcttacgataatgagttaaacggtaatgaaaaccggaacggttgttgcagcctcggaaatttttcttgcgagtgggtaacaaccagaaaaccaaagtctaagggaagcggtctgacaggagagaaaacaaaactttctgagagcctgagcctcagggattggctgacgggggcgggccgggtgttgccagacgcgagacgcggaagaggcttgcggttgaccaaagaagactgggggaggagacccgggacccacggtattaccgttcccgcacaagtggcgtcacttgtggtgtgtctggggtcagggaagcggctaggggacgccagggcccatgggagctggtaaccaaaaatgcgattcactcacctttcccattccgaggcagtggtgaagtccgtgatctcaaatacctcggattcgggctgcgggaaggggaaggagagaaaaagaaattaagccccaaggcgaagacatgaggaacgaatttagatagtgacaaggattaagtagggagcaaagaaatcacctcactgtcggcagccatcttgaggagcgccgggcctggcgctaaggctgccgggaagaagagcgaaagagaacggggcgcgtccccgcccccggagcccccgccccctgttcatgagtcttgccctagtaagtaggagtgctgcttcttcgcccaggtctgttaagtctttagtccgccctcagctggttaataaaactccgctctagctggtttcataaaacttgaaaatttcctgtgatgaatacagaaagggaacagaagccaaggtgataggacaagaccctaaactcatgtggataagattgtattaaaaaacctaaagcatgttgggtttgttttcattcaacccatatttgtagttagtaccaattagcttacactttaactattgggtttcttttcattcaccctctatttattgattgtaaggcaataaactaggtgctgtaataccacttctaccctctgcccctgaccctgcaagaagttgctcagttgattgtcctgaaataaaatcatactagttacctggtttctgggaagagcaacatggtgttcaacaaacgcttcatttttttttttttttttttttttttttttttttttttgagacggagtcttgctctgtcgcccaggctggagtgcagtggcacgatcttggctcactgcaagctccgcctcccgggttcacgccattctcctgcctcagcctcccgagtagccgggaccacaggcgctcgccaccacgcccggctaattttttgtatttttagtagagatgaggtttcatcgtgttagccaggatggtctcgatctcctgacctcatgatctgcccacctcggttctgtcgccaggctggagtgcagtggcgcgatttcggctcactgcaatctctgcctcctgggttcaagtgattctcatgcctcagcctcccgagtagctgggattacaggcatgcgccacaacacccagctaatttttgtatttttggtagagatggggtttcaccatgttggccaggatggtcccgatctcctgaccttgtgatccgcccccctcggcctcccaaagtgctgggattacaggtgtgagccactgtgcctggccttgtctttattttaacaccttcaagttatttatatatattctgcatctgagctttatattgtttatatatgtagcaaataccttctcccactctgcagcttgctttttcactatttttttttcagactggtgctctaaaaaagcagacactacaattccaagctggcgaagtctctgaagtccaactggaagtgctagggcaaaaattatgcatcaggaaatgcgtagccccttgtactactgccttgctccgtcaatcattggccaggatctccccaagaaaacagtggccttggctatcactgtttgctcagtttttggctggaggaagcactccaagaatagcaggtccttggctcaacagttagacaaacctgataaacccaacagccgtaggctgttcatctaaccacacgccttacagctgggcagtgagtctttctttaagggaggtctgagcagcacatcttttgtgtctgccactctcttttaatagacagcctcttttaacatgcacctacaatgttttcgacatcctgtgctttctctttcctctggacatgctgtcgtttagaatctgcaatgtccttgtgtctatagtttacctggtaaaatttgtccttcaagtttcagcttggatatttgctcttctgtgaagactttctctgccccctgttaggagcttatttgtatttgcaaccagtttggtggtaatcgattggattctcactcaaaattcatatgttgaagccctaactcctagtacctcaaaatgtgactgtatttatggacagggtgtttaaagaggtgattaagttaaaattaggccgctagagtgggccctaatccaatctgactagtgtccttatgagaagagattaggacaccagggatgtgcacacacagaggaaaggccatgtggggacacagagagtaggtggccacctgca

SEQ ID NO: 3604 - DNA, 4001 bp, Homo sapiens
caaaatctattgcttacagaggtttcttactttttaaacaaacagaataactcttgacaattttaaaaccttgggagaaatagttcattagaacttcattatcttaccatgaagaagtaaatactaaaaacctgttctgaagcacttggttacttttctctcccagagtctaataaagcacatgtgaaaggaccatttgtgttagtcagaaatacattttatgttctgctacttataagtactcagtatgttctttaggactcattttgaagatgcaccaggaggcttttctcattcaagcactgcctaccgtgatcgctgaattctgacctcaaagaagatctaagtaatttacatcagtgctcaagaataattctggacatcttggtccacagcctacagcaagtggtatctgtaaaattaaaggataattccagtgggcttggtcggactgctgctttgccatctcttgtttgttttgaggaagtggggggaggctaggtaagaacacggaaatagggaacggggtaagggagaggtgagaagagcaaggagagataaagcaggctgtgaacatactgctcgttaaccaagccatactcatactgttgagatttccatcattttgaagtacattatcataacattaaaaaagaaaaaaatgttaagaaaatgtatctaatttttaaagttatcaccggaatatgctgaaataatttggctttttgtaaaatataaataatgaagacgctgactttttttgtgcttgtgaagctaatagatcacctccacgagacaggcagcaatgatgaattgcaaaacgttattaatgaagggaaaaggttcaagccaatattcacactgcagtcaatgaaagagtaagggggcttctgaggaagggttgaagatgacatgggagagtagcaggaacaacccccttcgctgactgtttgctcctgaggcttttccagttttatgtcactcatgtcttctctgcttccgtcctgtgtgctttccattcccggcaaagctgctgctacacgtcgaaagagctgctttacattgtatccagcttttgccctagtttcaataaacgtaacattcagccctttggctttcctctctccctcctcaactgacacttgcctcttgtcagcaagatctgttctatttcctactagcgtgatgataacatcacttcctctttctgttctgacatcatcaatccactttgtagtttgctggaatgagttaacatttgtgatatcgtaaactactacagctgcagcagaatcacggatgtacctgggaatgaggctacggagacgttcctgacccgccgtatcccacagccgaagcccgattgttccatcctccaagtacatagtttttgataaaaagtcaatgccaattattgcctgataggtgttgtcaaaactgtcatacctgaatctggtgatcaaagatgtctttgcaacgctttgctcccccaggaacaccagcttgaatttcctcagcggattcccgaagtctccgcccgcggacatggtggaactagaggagctgtcgccgcctcagcccagagacctcccggaccgatgctcctccagccggctgacgaaaaaggcgagcggaagggcgggcgccgagctctctgcgcccctgcaagggccggtggaggagcccggctggaggagcccggctggagggcagcagggctcgccacagactggcagccgccgccgcctcccggcagagtagccgagcacggagcgaggcccgcggctgggaagggaaggagggcggtgtcggcaggagccaggggtgtgctttggcttcccaaggctagggccgttccctccttccgcacccggctcagagacctgcgggagagagacggagggtggcggagcccaaaccgcagatgtatccgggatctctcacgcgcggcgcttcggcttccccagccgccgccgccgcagcccaacctgctgagtgcgcgagcctctggcgcagggcgagccagggcgcctcaacacagttttttaaatacacaaaacatatgtactaaaaacaatggtgcggtgaaaacaaaataatgcaaactagaaaaaggacaaaattgacattttaaaaactttattatgtattattaaatatatattaaatagaaatgttataaaatttaacgtccctatctccccgtctctgtgagaggtcagaaacctaacttttctaagccacaattaagcaaacacatctggcctaatcacatggaccaacatctctcctaacatcaggcaggaagtttcagtagctcctgcaaaactctcccaccttgcatttgaacagaaatgtcaactgatacaattacccaagacttgtattagactgaatctcacaatcacactcagcctgattattaacccttctcctgcatcttgctcacctaaatgtatctacattttctatgaactgaagagcttagaaatgtatgtcgtccatgtattatagtgtaagttattgtaatatagaaatatggattttctttaactcccattttctgcctaggaaatagcaatgttttttgagtatggcaagtgtttccaagcattcagaagtggagagtgtaggatatccactgcaaaatgaggtctgcttgtcatcctcttagtctccactgctatccctccctcatctctctctgtttcattggtgagtatggaagatcagtcacttttatatgaaatgaaaattgatgaaactaaggtgttgatttgattatccaagcaaccatttattgagtgttcattacaagtcaaattgtgttctggagaacagctcaggaaatgaatgtttgacatcgatgtacataacagaaatacgaacataccattaaaaactcagacctcttatgacaatccagattctcatgtaagttttgtgaagctctttcaagatgaaaatgtaacaattcaaaaaaaattatttaaacaagtcattcttgagacataaaaatggaattagaagatcatatatggctgtttcactagctgaaatctaaagtactgtttttagtcaattaacggccatataattgttagttttatatactgatattcatcagaaattaaaaactttaaaaagtatttctgtctcattctactaattttaaaatttcatttatttggttatatttcttcattttacctggccttgaatacttctttcctgcccagcattaagtttaattaatgtctaatttgtttacttggtttagttacttttgatcatgcttggtacacttcttatggaccaggcatgtagaaatgtttacaagtttatggtcctcactcttccaaatccctaatggcggcacccaacagacacataccacaatgtaaacacatactcacacgcacctgcacacccatactcacccacctacacgcagacacacacccatactcacccacctacacccagatacacctgcactcacccacacacacccagactcacccacacacacctgtagtccccagctactcccaaggctgaggcgagagatgcttgaatctgggaggcagaagttacagtgagccaagatcatgcctctgcactccagcctgagcgacagagcaaaaccctgtctcaaaaaaaaaaaaaaattagacaattgtggtagcccatgcctgtattctcagctacttgggggagctgagttggggggatcacttgagcccgggaagtcgaggctacagtgagccgtggtcatgccactgcactcgagcctgggtgacaaagcaagatcccttctctacaaagaaaaaaaaaaaagaagtcatccaccatgggcactgagtctgataaccacatactttcctcagcataaatctcccagtagagttgcttttagaaaatagaagtcatcccagcgcagtggctcatgctgtaatcccagcactttgggaagctaaggtgggagaattgcttgagcc

SEQ ID NO: 3605 - DNA, 4001 bp, Homo sapiens
tctcatggagacaagctggcagcacggcagagcctcccttcacctctccaggtggcatgtaggcaccgaaattcattacaagaagaagccagtcttcacaatgattatagtcaatcgtcagttctacccagttttctctatttcagagagtccctccaagaaagcatctttaccacctttacccaatctgtcacggtggcatagtcacttttgtctttccattcccactccccgcccttgccatccctcagcccacaaaccacatacaatgtcctcagttgctccacacgttctctcagggctcagaggaaacattcaaattcctcagtccttatgacctgccccctccacccgacacacacaacgggtcatgtgattcccctcgttcccccatgaacatctgggctccagccaagactgctccttcaccagccccaagaagccatgctcctctgcctctggaggactttttaaatgacctggaccctctctggggctggtatttattccctaatctcccaacatacttggatttgcccactgcgctgtctcccaggcagatgatcttcacgttgtcatcagcatcatacttcccttggtccaactcactcggtttggttttgtcttctgccattggctcctagctgtagagaggggtccagcccaagggaggggagggtattgtcactgtctgggaagatcaacaagaggctgttgtcagagataagtcccctcaaccaaatctccagctgtacctccatccagactgcttccctcagtgccagactgagatatggtatgcaattggctactagacttggagtagcagaggatgacacacaggcatcagtaatatgttatacacaaatagttaagtcctgcgcaccccaaatgctgctcctcacgttacccatttgcacaagacattcaccaggcatccagtgccaaaggctgtgtgcaacattatgtctagctctgttttactctcctcacacctaaatatgactttgcagacattcctgagaatgtaaccacagtccagactcttagctaggggggcacatagaaatgatatgatgatgagatagcagcaataggtgagccttactgggcattcaccatgagcagaccttgcacagggttcagaggatggaagacacaatgatagcagagtctactgtggtgagagctacgacagaagtatgcacacgggtcaggggtagaaaataccaacagggcccccgagttttcctgactgtgccaccacacagctactgcttctgcacagccagggacttcgccttgtttatccagggagacaattcctgggaagtggcagatgcctggaaagcatgatgaggggtctgccccctttcacctgtaccctgtagagagagcgacagaaagccaaatccagcttcatggctccatgcttgaagacgttctttcttttgtttagagatagggtctcactctgtcgcccaggctggagtgcagtggcgcgatcacggctcactgcagcctccaactcctggactcaagcgatcctccctcctcggcatccctggactataggcgtgagccaccgcttacgggcgaagacttgcttgtcgatgtcctcgccatctaagtgggtatgctatctttcgataaatgtttttggccaccaaccatgtccaggcatcgccaggctgcccgtcccgccccccacaacagcctcgcgaagccacctttccgtgcttcccccgacccggacgccctctcgcccacaccgctagggaggcctcggaggggctgtccccgcgtgctaagccagccaccggggcggatttgccctcacgtgcggttccgagtgagggctggagagaccagggacgctgcgggtcggcccctcgggccctgccgccagtctggactctgcgcgctctcgaaccaccccgccggcccagctcgcaccgcagcgcactccacttccggctcgccccgcgtcctcgcagctgctacgcaaccgcgcaaggaccccgagggaggctgcccggccgaaggcctgaaggaccccgccggggcgctggctgcccagcgcggcgcctggcgggagggccgcagggagtgcgcatgcggccgagtgcgggactggggctcctggctgtgggtgtggtactgaggcttcagcgggtgccgcccgcctagagggagtggagcggtgagcacgtcaggggtggggggcgcaggtcaagctttcaccagtttttaattctttgatggggtaaatttgagcaattttctcgacttgtcgacattcgttattaactgagcaggaatcaggagaggaacccggtcctctccacacagcccagcaggtacgccgcccatgtgcctgtggagaagagaggttcctgtggggcagacaggtgtggaccaagtagctgtgaaatttcttctgaagaaaacacacaaggaggaagcgagtgagctcagtggaggaggggcgctaccccaggggacgtccccatgcatgggcttgtgaacctcgaatatgtgagacggtctcagtcaatttagaaagtttattttgccaaggttgaggacgcacgcccgtgacacagcctcaggaggtcttgacatgtgccaaaggtggtcgggacacagcttgcttttatacattttagggagacaggagacatcaatatatgtaagatgaacgttggttccctcgggaaaggcgggacaactcgaagcagggagggggcttccaggtcacaggtaggtgagagacaaactgttgtattctttcgggtttctgaatagcctccgcaaaggaggctatcacatattaacctatctcagtgagcagaggggtgactttgaatagatggggaggcaggtttgccctaagcagttcccagcttttttccctttagcttagtgattttggggcccccagattcattttcctttcacaggctagacagctttaggaactgaaaggttcacgaggctgtaacgaagagtcgagttgctccaggtgagcctgggccacaacagcaggcaggacctgggcgcccacgaggggctcctgggagggttcgggaaagggatgtgtgaaccctatctgagatggtttcaggtaatttagaaagacgtgcacccgtgacacagcctcaggaggtcttgacgacatgtgcccaaggtggtcagggcacagcttggttttagggagacatgagacatcaatcaatatatgtaagaagtacgttgcttccatccagaaaggtggggacaactggaagcagggagggggcttccaaggtcacaggtaggtgagagacaaaggttgcattgttttgagtttctgattagcctctccaaagcagggaatcagatatgcacctatcttagtgaggagataggtgacttggaatagaaagggaggcaggtttgccctgagcagttcccagcttgacttttcctttagcttagtaattttgggtccccaaaattttcctttcagagagcctacgactagatttgcatctttacgtcctgcgcggaggctgctacacacatgcagaagtcatgctggtggcctggacattgaagggagagaagtggatttgggagacatttaggaggtaagattgctaggaccttggtgatagcttggacatggagggtggaggaggaggggtgtctagcataatgctcttaggttaccacctgggatattagggagagtgagcaggctgttttttgtttgttaggcagaacttggttttgcggtgcagtagggtgcctggagccgaaagcctgacttcctcacacaggccagaccccacatgtgactgccaggccactttgaggctgagagagatggttttgtctggcctctgtcctgcacatgtttacggatgacctctgtgttggcagatttgggggtccgccagataggatcctgtgaagagacctcaaaggtctttagtccaatctataaaacattttta

SEQ ID NO: 3606 - DNA, 4001 bp, Homo sapiens
aaaacttgttcagttctaaataacttccttttctttaacataggtttcatattatcttctaatagtcttgaagaagttaaaatctttactagatatgcagtatgattttccactatattttttggatacttcaaataaagcatgcacttgaaaatgcattcctcttctaattcaaaatcattttcaattcttgttaaagagtcaaagttattgagcaaaaaagctatgttagttttcaatagaatatctaaaggttctgaaacactatcttgtaaatatatgcttaaaattccattctttatatttgtattcatgtttctggttattagattttgaataccaattataccaatttgctttttacacttcaaaatgttacagcaggttaaaatactattatcttttttatttcctgaaatacttttatggaaataaaaaatttctataatgaaactttcaaaagggttgttcacatgaaagactttttgtgtagtattgtatctcaactgtagagtattatcattttctcctttaccatttagccaaacagtcgttattaaagctgtctgactacctaatatttctcttacgagaagctttgattgttcttcatatgcattgatgacttttgcacagtggtaatcttccttgcttaaaaggtctatttctaataataatagccaattccatttttcttcagtttttttcatattttcacatttagtcttgcaattatttataatccaacaatttcctctatttcttctcaaaatatgtctaacgttacagtcccagttttgagatttttccagcctggtaagtacgtaactgtccagacattctgcttcctcccaatttgcattttctagtatagcgaaattctttctagagtctcttacattacactggatactactgcagttacagtagtttgaactgatcaagtcttttctcttacaagtattttggctactgagtgatgggtagtcattttcataacatttggaaaaaatgttttccgcttctacagtttttttatcattctgtaacttttgcttcttaacatcaggtctattttgggaccagtaaatgtttgtgaaatccctaacatatgcctcttttttgtcattctttttcttcgctatttcctttaaatagacagaggacattttgctatttaagtccattggaaactgagggacacttattgtgccgctatctctaaaatagctaggtttggcaatttccaagctgggctggttttgagattttgatatttttagtacagatgatgaaatgttattttctcttttatttgatggcacaacactgttagctttacatctgttcttaatttcatgaaatggtgatttagtttccttgtaaaaggtaacatctaaaaatggattttctttgtgaacattgtctcttccttggacaaactgttgttttcgattctcatttctaattccatgtatatcgtgtatagaggtgctgggcagaagttgactaacccctgctttggagctattactgcggtgcacactgaaagcctctctgtcatgcaggcctgcctcagaccttcctgaagccctcaaatcagaatcaggactttgtgaggggggagactgcaaacagctactcatttggaatttgagatttgagcatttcagattacatatctgcttcccactgactgatttctccacacacgagtctgtggagttatcgaaaatagcattcgttgaaacaaggagtcccttgaagggtctaggggacaactcccagactttttccgcctcagacaagcgaggcaccagaggcagtcgccagcccgccttaaagacacctccaggctcctcaagacagagccgcttgctactaggtggttgggaatccgggtcctcaggaggcgttaaagaggaggtaggctttctgagctcggccatccgcggcgtgggctgagggagagacatgacagcgaatggaaaggatctgtccgagtcccggcggggctccaatcccttaataggcggttccgggccgctctggtcacgcccctgacccgcccctcaagacctggccttagcctaatctcagggtttgccccaccccgaatccgcccctccacagccccagcctcagccccgccccgcctccctcagtccctcctctccctgcccccacccacgcgccccggttgtctcaccactgaaggtcggagcaccctgggccgttacattgtctatttttagcgcctttttctaatgccacgactgtagagagtctaaatgcttttttccctgtggtagaacgaaggggaaaagttagaacctctcacttaaaaaaaaaaaatttgtgaatggtaacaactttattttctaaattctaaaattttgtttacctcagaaacggcatctccacaacggctcgagtgactctccagtaaaatcgtgtagttctgtcagcaccagaccaaatctctctgtgtatggaaaaactttttaatccttccagcgtcacttaagatcatattaatatttccacttcactaataaagtgtgtttgggggaaaaaagccaccagtacttaccagtctatctgaggaaaaaatgtgtggaaattattatccggataattattattcttcacttaagactaaaaaaaaaatagtttactatgtgctgtggggatttcttctcaaatattgtggataaaattatttagagataaaatattatatgtttgaactaccccatttagtgtaaacataataatacaggtctgactcatacctactaacaaatttttagacgctatttcttgtttttttttttcctgctttgagaatcatttatgatttccagtcaattctggtttttgtgaattctataatcattaagaagaaaatgtttttcaaaatgtttattattattatatacatgtttcttaagaaacatgtaactggtgctcagtaataaacacctcgattcccttggtggttgtttcaagcttggtatgttttatattacattttatgctaaaatttataataactacaataacatgcaaccagaatcctaacttcagaaccctcccatggcatagatggcaatatataactagccttctactttaggtaataagatgttcaccagtttcatgttttttaaatactcttagatacattgtgattacttcagtgtaaattcctctagagaaatgtttacttaagtttgtagaaagccttgcagcagaagcacttcattaacactataaataagaatgtggcagtggttcagattccacatcagtgaattctccaagttctacttctgtgtatcttatgttctattgcttttctatcccagattttccacaaatctatattcttttctaatccattctgttttagcccataaggggtgacttgtatagctaaggtgtatataattggtgcgctagtgtgatattaggaccaagactttttaaatctgtaaagtaaatgccattgattgtgatttctagtctagattgatctgtaacttgatatttgattatttcttcatcttgctagtttgcccaagagcacattattttttatatctccatcacatcattatttaacaactctacattgtttaaggattaaaattcaaataaaacccagaagtattacatgtaactcaacaattgtttgactccaagatacagaaatgtatagttattttctccatcctgaagaaacttacagccataaagaccaaaaaaagagtcttttcttgcatttacttatttaaacattatactaatggccactgccatttcaaacaatggctattgaaaccactatttatgtgggttttttcctttgtttttttaaatgccacctagaaaatgaaccagttataagtgagaaatgcaaaaaattatgtcttcaactcatcataatcaaaatataaataagacttgtctgaatcttactgatgcctcaaagccca

SEQ ID NO: 3607 - DNA, 4001 bp, Homo sapiens
cttggcatggtggtgcaagactgtaccaagctactcgggaggctgaggtgggagactcacctgagcctgggaggtgggggctgcagtgagcggtgatcacaccactccactccagcctgggaaatagcgcaagactctgcccccaaaaacaaacaaaaaaaggattatctcaattctcaggcttaaaatttttcatggaatctcaagccatcttcagtcaaggcaagaatttagaacttttctaccctcatcttctaccaaaatctcttcatatgccgtggaagactctaaatcctgtttatccttatggtctaggtcccaagttcccaaaagatatctaataacttacactattttccacacacaatcctgggaaaatgttctattcctcgggcagagggaaatctggctgagatctccgataagagtgctgtttccaatgggaagcaatgtgaatgggcaaggaaggaaagccccagatgtggtcagaataaagcagaccggctgacaactaaagccacgcacaaaggatatgtctccctggccttcttctcccccgctcctatttcgtttaatcctaacaattaggataactatcatcacccttctacagttgctgactctggagctcagagggggaaagatcgtgctccacatcacaacaccggtaaactctcagaacctgcatcaaacccaggtcttcaaactcacccctcctgtttttcccaatatgcagtgctacctttcatggtcggcccatttctgggaacttcgatactgtgcttctattgctccaggtttaaggagcattctgagccttgaccggttctgagctttgacatccaacaatcttatggctctgcttggaacatcagtcattgacacctctaaaagattcactatcccctctgatactccatgcccaccatccatccccaaaacttcagaagaaatgaggttaggaaaccaggacagagcagaaagtgcactgttctacaagggctgaagatgagtcacaggtaacccagatgagcaatcagccaagtctcttccacggccaattcattcagtccgccaggcacaagcacttctctcccgaagactcacctgataagaacaccaaagttccaacgtttctcgttggaaatgagcacagagaggacactgctcacacaagcagtgtggacgcagcaagctccgcgccccgcaaccctgcaccgagcacggttaacctcacactcccacaggcggcaagaaccgggacggcgatgcccagtccaggcgcttccccttagaagccccttcgccgctggcccctatcagaaaggaaaggggaggaggctgggggagaaacaactttatgctcatttgcaagacaggaccaaaacaaaaccagcaaaccgaagccctttaggaacaccgcccagttcacggcgcgtgcaagttccgagggcagttaagtttttgcaacacttcccagccctgaccctgcccaagccgcggccggaggactgaggaagtggacggtcccgagcgggaggcccgcggcaggaagtggaagcagagccatctgcgggatagggaaggaaccgcggctacaagggagaggcggaggccgcccccacttcctcagccccaggcagcccaggaagccgagactcccccagggagtcctcccggagcggagcggggccgctgccggggcgtcgccctccgccggcctcggggcgcgacatgtcctgccgccgcccggccacagcccggcacggagggagcaagaggctgcgggcgtgcggcgtaccccactccccagcccgcgccccaccccgcccggggcccgcgggcgccgcgcccttaccagggaccagtcccgccgcctccgccgtccgcacccggcccgcagctcttaaacgcgccccgccccctcccggggccggaccccagccgtcctccaccgatttgtcattgagctgccgggctcgctttcccaccccccgagcgcgcctccggcgtcgcctaggcaacccctcctctcgagagcgcgccctcgcttccgttcttgccctctcctcggaagccacgcccgtcggggggctgtcagccaatccgaggctgattttccaagcagcgggcggccggggaggaggtttcaccaatgagaagctgccccaggcacgggggggcgggcccagcgcgcctgccccgtccccctctgtttctctctctgcccctcggacacgcagctggtaaccctgcggcagtggaggagctgcccgccggtattgagggcgggtgcgggtgcacaaggtggggcgccagttgtgggattcaggccagggctaggacgaagtaatggaaagcaaaagcgaaggacagacctgatcatacagaaacagaagaaaattacgaggtggcgaagagtgctggagcgcggcgatggggatgccgcccgggggtcttggggcgggactccacctgccgccaccactcgcttcgctgatgacatcccattagcagtaatggagttagtgagtgcatggcggagactggacccaggccgcctacaagggccagaatcccaccccagccatagcctcgaggcaggaagtgcagtgggcaagctccctgccaaagcccaggaacgtgtgattttgtatccagtacagcttcatctcggtggattttccttcctaaccacctcctcctccacaggttttgtgaccgtgctgacccctacgcagacctcatgagagtcacaagccatcgcaactgacagtttaaacgtctgcctcttatctctaagggagggaactatctcttatgcaatgtgatatccatggctgctagcacagtgtaattaattctttcattgttgatcattgtaagttaggatgcatgtgtatactatattggaggctttgggccatgattagattgctatgtatctaccagatccagtccctccatcagcatctatatcaaaaagcacagaagctttaccttagtcttaagtgaccaacttaacaaaaaagtgcaatcagaagaatatcctagtgttagcctactaagtattctgtttttaccattctcattcacatttaaaacttttattgagtgctaatcgtatgacagacactttgctaggtacagtaaggagatggggtaggaggcttctcaaagaggaagctccctagtatttataacctagaagaggaatcagacccaaaccttttcttacggagtaacagttaagtgcacaggtttggagtctggaagcataggattaaaggagggctctaccttgtgactagcagttacttaattaggaaactacttctgtgggctttagtttcaccagctgcccaatagcagcacctccatgctataggtaagaagatgtacatgcaagtccacatagagctctcagtacagtgctaggaacttggtgagtgcctcaggaatgtgagcttacattagtgattgccaccagaggccacgatgtacagtcaagtgtgtgatcaccaatctggtacagccttatctcccaaagcccatctgtatcaagtgtgaccgcgtgcagcctggtggaaagggcctgctgtggtggtaccctttgtcaaatgcaagtatagagaggagagcagctgcagcagcctacccaagtgaaaagggtatgatagttgagggaacagggtcagaaatcaggccacaggccaggattctactgttcccacctgccccccatcccctaggacccacagcagatgcaggaggtttccccaccttttctggggtgctgaagtgccattcctttgcattggtaacaggatgcacagggctttctgagaaatgctgctttcattctctgcctgcctagaactcggaggggtcctactgggactcctccagcaggatcatctattcagatcctggacatgccagaccctgagctgtgcagtatattcagagaggagtggcaggacccttttggcggggctgtc

SEQ ID NO: 3608 - DNA, 4001 bp, Homo sapiens
ctacctaagacaaatagcttgattgtaaaattgtcacagataagttcttaaacctgtaaactagagtacttaaaaaaattccacattgccattcttggtagcaaaatcttcatcaccaaggagacctggctagtgctacagcttgggaaggaaacagcctgtgctcagtaattctactaattacagctgggctccaatgacattaatttactgataacctcataaagttttgtttgttcttccaagagataacattagccaggccactcaaaataacgttaaaattacaggactttggactttcggcagaacatgaatagttttctcggtaaacaaggaaggtctttatatgtgatcgtgacatagtgttttatttacacaagctttagagggttcagcctctggacactagtaaagaacgtttatttatttggttatttatgtaaaaaatattccacaacccagctctctgccttgctaacaaagaaatgtttgtttcttagtaaatgaaaacagtgaaggccatgtcaagccaaatggagagaataaaattactgcgagattctgctttccacgtaacttcagccaaaactctaaagtggcaagatccgctttcagattatattatatcggcctctgaggattctatgcagatctgccaccccttggagaggtttacaaatagggaacagaaatccatggctcccaagaagccctggcccctctcctcgctgggccacgaaccactcccccagctacaacagcgccggtggtccctgcttgcccagtgccagcgccaaagaggtcttgtgcggcaggtgcctctgaccaacatcactgtttccggggaaaggccacacataccagaaacaactgctccggccttcccagggacactgggttctcccacgccagtaacctattcacagtttccgttaaaaggtagctaaatacacggaataatgcaatagccaaagcggtttagaaggggcttgagttagcattttaggaacacattacagacaagggaagtgaacagcaccgtttcttgccgagtgtgtggccagttcctgtggccatgaggctgccgctaatctccacttctccctccaagtggaaagccaaacgtgttccaccacttcaccaagggacccgtccttctttaaatttctattagccaaaagtgccaagttaacaagcaaaccaaaagaaaaaagaaaaaaagcgatggaagtgtcccgaaaagggctggcctcatttctgcaaaagacgtgatttgcaaacaagcaactgctgcaggcgacagattgtcagtgttgactaatttccatacaaaccggctgtggttctgattcccgaacactgcgtcttctgcaaggtgcccgtctgcaggttttgcaacgcgggacggcctagggaagggagcctgcgctggcagtcaccgcggcgcacagcctgagaaacgaggtgcggggctggggaaccccgcgtcctgtttttccttctgaaaactagttctccagtgtgcagggctgactcaccccacgctttccagaatgcccgctctccgacgtccccaaagccgtcccttccccggcgagaagcgcaacaccggtccgcgccctccgcctcccctgtgccctggggcctcccgcctggaaccggggcggcccgcgttcaagggcagcggatctgtgcgcccgcggcgcccgcccccacccgctcccacccgctcccacccgctcccctcctctcccctagaggacaccggctggccaggggaagggagctcggccgggacccctggacctactcacccaggagcagccagaggccgcgccgcgggaggcggcacagggcccgggccatggtgcacagcggtgccgagtcgagtccgctcgccacgcgccccgctgaggactgagcccgccgcggcgcgggcccggaggagacgcgccgggggcgggagcgggcgcgggagcggtgggaggcggcggccgcgcggcccggcccactgcggctccccgcgtgggtgccagggccgggggcgcccagggccggtaaaactttgcaggggggccgcgcgggcgtctccaggcccctcccggggggcggcacacttggggtcccaggaaggcctcctgaaatgttctccgagcaaataaacactttttaaactagggagggtctcctagacgactcagcgtgaggggcaccttggtctccacctggggatcttcccctcctcctcctccgaggttctgggcgttcctgcctggtgtttgccttgcaaaaggctaagatctcccagccttatctacctctccgcccaggtgcaggcgctggggagcgtggggggcaaaactcgccaccgcgcctggcgagacccgtagtaacccaaaatggcgcacacttaccaggccctggaatgctgctccagatctgcaggatgagtgggtgggcagaggcggggacagcacggcaggtgaacagaagccgtggggctggaggaacagggctctttggggggattgagatggcctgggagtcttgctgttgatgggtaggtagcgagagcctggcaggaggttgtgagggcctggccacagagtcttgagatgaggtttgctttggtggcactctggcagctgcatggaaaactgatgggggatcttgggtacattcgtttatgtaaagtggtgagaggagggcgctctggagatgggccggggaagcctgcggaggagcaggttttgggaggcacaggcctggcctctcggcattactggtggctggatttcacttgcagtggttccttcttgtattatcctgttccgagaactcttagcaacagtaaatttatacttgtgctaaggaatgcaccactgcccttggagggggaagaatcaccaccctggtgctgcggccacagctgtctcttttgtggtggaagctgcaagcgcacagcattgctgagtgaccatcgttttctcctaggaaagggaacagtctgtggctgagaggctgctgccacctgcagtaagctcagagaaggggagacagctgacagcgaggtcatccactggttcttctaacacaggctgggagggcactcagggccagcatgcctaccacctgtgcaggggccccaagtgttctgagagtgaggggtgagatggtgggggagggcacacattctcttgacttgattagcccttgttcttgaaccctaggagatacaccccattgggtggcctggcatccctactttcttcatttaacagacatttgtgtccctatgtgcaagacactgttagatcgacaagccctgcccttcaattggtgaatctagggggtgacctctaagactctcaataacatgagcgccacaatacaggagccacccggaacaagggacactcgcctcagctgcagtgcaagtaaggagacaaaggattctggacaaaatgcagcccaggcagtcctgagggctgggtggagagaagggcacaagggaaatgcaggcccgagcacaggcctggcagccagaggccgtgccatgtgagagcagcacagctagtggggaagggtggctgccagcacagccctgggacagggccaccgtacatcctgcactaggcgatggccagtcatagtgggggagaagaacctgcatctttctgcagccatcactcgccctccatatccagggactctggcttgagccaccctttctacttgtagcttgtggactttggctgcatgtttttggttggcaactgggactcctctttcatcaggctcagcaggagtctttcttcccaacgttttctctttgaagcttgactgcaaggaggcaaggccagaggcccctgtcactgctgttttctcaacaccccctaaaggatacattttcctaagaagacaaagcctatttctcaagttcacatgctttagaaattcacagttctctggagaatgctgaagtaaggcacacacct

SEQ ID NO: 3609 - DNA, 4001 bp, Homo sapiens
gacagagtgagaccccacctcaaaaaaaataaaataacacaaaaattaaagtctttaatttcaggagttacaggaaccctcaattaaggtctgttttagactctatcatcacattcatatttatactatgctagcagtttgaaattacaatgtacaagtagatatctatcctcctcctctggaggaatagactgtaacttactccactgttcccaagagaaactaaatcagacccactgccaaaattctgctgcactatctatttgaccctgaacaagtatcttaaatctctacaggtctcaatatccacagggctgctggaagcgcaaaataagataacctatgcttagttacgataagagacacaattatgctactattataatcatggtcatccgtgagtttccgggttttttttgtttttgtttttgtttttttggagtctccctctgtcgcccaggctggagtgcagtagcgcgatctcggctcactggaacctccgcctcccgggttcaagcgactctcctgcctcagcctcccgggtagctgggactacaggcatgcgccaccacgcccggctaactttttttgtatttttagtagagacgaggtatcaacatgttagccaggctggtcacgaactcctgacctcaggcaatccgccctcctcggcctcccaaagtggtgggattacaggcgtgagccactgcgccccgccaatatccttttaacatcaacaataaaaagtgacttgtagctaacatttagtgctatgtgtcaagcaataccctaaatgtttaaaatggatcatcctatcaaattctattaatgttacaactccatctatggatgaaaagtgtaactggccccaaatacccagcttataaacgacagtgctgtgattattcaagccaaagcaaactgactcaagattctgcgcacatccacctttaatagcttcttccgtcactctttagatccaattactaaagtcttattgaatccaaaatagatcacattatttacatgtaaagaggaaaaatacccttaaaacatttgtggaaaaggttaaaaattgcaagccatactaacgatttgtaagaactttagaattttttttttttaagcaaaggcagctaccaaagtgttccgggcggggaggggggcgagggaggtgagtatgaggagcggagtggagctggacccttacaaagggacagcgacaaacacctcatactcaaaacaaggggactttcagtgtcatttgcgccgtcgggccattgcaaatgtccgcgctgagatgcctaccttgtcactcgacgcagccgccaaagctcacccggagctgcgtcagtccccactgggttcctccaggccaaggaggtacgacctccgccgcagcatataaagtatatgtccaggagatgggaagaaacccgccgatacagcacccgggtgcccaagcccccgagaactaggccgcgcgggtactacggggtgcgcgatcggccagaaagcccgggccagggcggccccaggagcgagcaccgtcgggaacaagcgtcgggaacaagccgggagaaagaggaagcgccggcgccaaaggtctcccgcccaccgctgtccccccaggactcttcatgcgcttgcaagcgccacgccgcccacaggactgcgccagccggccggcgcctcaacagagcgcgccagggagcagcgcccgtcgggagccatgacgcctgagcagcgcgaggccgccgcccggccaggtcgaggccgtcggtctcttcgagacccactcacctgtcgaggcgacggggtggagccctgcaccgaggcgatgtaccgctccacgtcagccttgctgcgcctcatcgcgccgccaacctggctcccgaggcgcgtgagaccagcgctcaggcccgcagcagtcgccacttccaagaggaaagcgcctgcaaaccagtgacgcagcgccgtagccggcggaggaccactgtgacgaacttgcggcgcagccggcggaggaccactgtgacgaacttgcgtactgcgtcagcagtgtgcgccacgttggcgacgtcggcgctcgagctgcactcggccaggctcttggcagcgccgcgtgctctgagggtgtcttggcaagccgggatcagatttcggccgccagtgtccacagcctagggcgtagatttccagcagataacaatttgcgtgatgggctcttaagcgttttggtcacttgttctaaattataagtgcgcaatgcattggaagaaaaaaagcactcaggccaatttggtgaacgtgtaaattggaacaaagtttctggagatgactggttaaatacgttgcatcggacatgtgtgaatactaaagcatacatttttaaattcatatcttattaaatgagggccaggcgtggtggctcacgcctgtaatcccagcactttgagaggccacggcgggcggatcatgaggtcaggaaatcgagaccatcctggctagcacagggaaaccccatctctaccaaaaatacaaaaaattagccggccgtggtgtcggacgcctgtagtcccagctactccggaggctaaggcaggagaatcgcttgaacccgggaggcggaggttgcagtgagccgagattgcgccgtctgggcgacagagggagactccgtctgaatttaaaaaaaaaaaaaaagggagatttagaactgcataatgaaaaagaccacaaatattaagttttggacaattacaattttttaaacagtcatctcggcgggggattggttccagaaccaccgtcttatgccaaaatccacgcattccgccgggcgctgtggttcacgcctgtaatcccagcactttgggaggccgaggcgggcggatcacctgaggtcaggagttcgaaaccagcctggccaacatggcgaaagcccatctctactaaaaatacaaaaaattacctgggcgtggaggtgggcccctataatcccagctactcgggaggctgaggcacgagaatcgcttgaaactgagaggcgagggttacagtgagctgagatcgcgccactgcactcaagcctgggcgagagtaagacttcctaaaaaaaaaaagaagaagaagaagtccgcgcattctcaaatcccgcagtcagtcctgcgggtggaacacttagaggaaaagtcagacctctctatatgcaggcccctccaatactgtattttctgtcggcttataagcgggcccaggcagttcaaacccatgttattcaagggtcaactgtgtatataggaatagccattcgcctggcacagtggcttaagctggtagccccagcactttgggaggtcgaggcgggaggatccctcgagtccaggagttccaggttacaatgaactgtgatagcgccactgcattccatcctgggcaccagagtgagacccttgtctcaaaaaaaaaaaaaaaaaggaaaaggaatagcccccccaaatctatatatatttcactagcagaataacagaacataccaaaatttaacagtaataatgtaaagattttgagccgtctgtattttccaaatcttcaaaaatgtctattttgggaatttggatattaaaatcttacttttaaaacaaaatttaacaaaacatttttaatagtgagaaccttttagattttaaaagctcacatttgtgtaaacattacagtctgaattatgtggacaaatatcaaatgcgttgacatttttaactggaaatttgggctattttggttgtggataattttttatcctttttgtttttccatattttctaaattttgatataatgaacaagtattgcctttctaaaaaaggaaaaacagcattttgttttatttcaacaatattggatgtgaataaaagaaaagaaaaagatgattctgagcttaccagtgtgtgtgacccacattaacagaaatgacatgtaaagaaaatctagtttggagtg

SEQ ID NO: 3610 - DNA, 4001 bp, Homo sapiens
caggaaagtcccatgaccacagggctttctacacataaagcgcttaacagtatcccccagtcctcaccacgagttccttctgaaagtctcaagttcttaaagctttcccaactagaactgcctttgcctgggggaacccgttaaaccccagagcggatttctccagatgatggctgaacaacaaaaaacaaacccagacatttggaatcacaacacatgacaggctgagttctcaccatgcctgcccaggggcccagcaaaggagaagaacccagagtgccacacaacacaaccacagagtgaagaagcccagccccttttctgtggactcagtccctcggaacaaggctgcctcaaatgctatcatttggttaactgtccccaatcctttagggatgctgaaaaacagccttgctacccacataagaattcagaagcagatctctttgtccttggatgaaacgaggcccttggtggaaacggatctcttcttgctctgcccctgtcctttagcacgctggatctttcttagagtattttttcagtttgtctcatatttgtgtctatgattgtcttttccactagattgtaaaccacagaaaagcagacagagggcattttgcacctccacctggtgggaaacaagtatgtttgctgaatgtgacagaagcttcttagagatgaaatgtttaacgtggcatcaattctgttgaggtgagcagctattgagaagggcaggctgctcagtagcttagctgagtgggtgaggagacccagtgtaagagaacagtgcaggggagagagtgggggtgaggtgtcaacagagtcctggctagtgcacggccaagggaagcatttcggaaactagtttaacagcagctcctcaaagacctgagtattcactctacactcccgaaatgaacacccaaagtagcgccagctcagagaaagcaactactggttatagtaccctaccggcaggcccaccatacagcatctgggcattcctggcatttgccagccaagccttgatctgctcagacccctgatcatcttctgagaaacactgaaatcactgcttggggagcaggtagaactcttagttatcaataatgtaacagaatgcctataaacagcaaggacttcattgagtctgagagctacaggcaaaataccttccaggggcctggagggtgaaataccatcacccacaatctgtttccttgaacaaaattcatttttaatatgtgacattcaaatatgtcactagaaaaatacatgtatgtaatttcactgtgataaatgttactctgcctagttatgaacaactacttttatttatcttctagaaacatatttaagatcatcaggctaaataaacatgcttcactagcagaaagatgagccaccactcaccccctggccccacacacaccacaaacaaagatgaaatcaaattatgtccctgccatggtacatatttgggtctggtggaacataattagaaaagccagagatgtttttgagcataattccaaaatgcaaacagtaacatgtagtatttccccactctcccacccttcactaaaaaataaaaagattcattctgaccttgtagagcatacgtccttctttttcggtctctcaaagttctcagacatccagtgagcatctatcctttatttgatcagcaaaatgtaccttcattgccgttcattccctgttcgtgtctactactgagtggctctcagtccacagaaaggaaactggtgctgatggttctccaggaaagctcaggcagtctaaggcaataagaaaacacttccttttttttttttttttttttttttaactttagttagctcctaataacttcactcccttcctttctggatttgaatcattttgccactccatggaaaagcttgaagacacaggaatgagaccctggtgcagacataagtccaagtcatcgaagcaggcttccgcttggtttaaaagaatcagaactgtgaggagagagacaagagaaccagccaacaggatgtgtgtggctggagttcctggcatgaagtcttggctttcatgtttatttttggatatatttttcttagtcctttgatgcaaatttctggcctgagaagtaaccctacagtacaagctccaaggttgccaaaagtaagctcgggctcctgacttgggagaatgcaggccccttggcttggaggctctggttgctcctgatgagggtatgggtctcggtccccgtgcattatcaggcaggcaaggggctgccttgtctgcaggtgggccgggcattcctaactcaatacccaagcccattaaatataaacctgaaaagcctaccattaatgcaaaagtgaaacaacctgaaattgttagtatggtggataaagccatacaatttacctgagaacttctgggatatctgtgttctgagatattaatttttaagtatttggctttcatttttctgacagctacagacagatagaaacatcaagcctattagagcaagatcagatgcctctggaaggtatattattctaacagtgtttttaaagcacctcagcaaagactaagctgctgttgcttcaaacaatccttattctcactgtggcttgaaagattttaatggaaaagggattttcccctatttactctaaaaaaaagtcagtaaatggaagtaactaaaaagctttccagtttcacaaccgccaacatatctggtagaatcttatagaaaaataaacattctgaaaattagggaatagagacagtcataaacatatttcttcaacagcattcattattctgattaatatctctatttactaattactttcttttcttaagacagaaacgtgcactttcttatttttaccactcagttttgtatctcataaagcatgaaatacattttcagtcagttaacaatgtttactgaggccacagacacatttgagcagtgaatctaatgtgccaatcattatatccaagcaacggctctccatgacacgttttgccctggttggaataaaatcacaatagcatgtcaagaggctcccagataacaatcacagctaagaaaccacttttatagtgacacaggtcagactacaaattgaaaacattgcttttatttttaatggctctgtaattttattattgtctttaattttttaagaacatattcataaatatgtgttattattttgaatatgctcaaacatggctcatggcaacagggaaatttttccagaatggtgttcatgcaattgaactacaggtaaagaggtggtaaccactagttcaagggcctctcagaagcatctttcatggatttaaccaagagcacctctctaatctactttcctgaatacagtggactcatcacctcattcaatttcatgtatttgaaatattccatgtaaagatgtcaaaacatgccacaaacctgaaatcatcctcatacaaacacaacatcagacagaaagtcaagaagaaaacccaacaaaaccttcactgttttgttctagccattggaaaccctcttatactatctgtgctgagcagaaattcatggacttggataatagatcagtttttatttattccaagagctactatcaatcataaaatacccataatcttagatcaactattaatataataactgctttaaactcccaaacttacagttaactgctttgccatttaacttccttactgagggtagaaaatgccactagtgtcaaagagtttaaattgtaaattataattgtctcaagaactaaaaatgggccgggcgcggtggttcacgcctgtaatcccagcactttgggaggccgaggcgggcggatcacgaggtcaggagatcgagaccatcctggctaaaacggtgaaaccccgtctctactaaaaatacaaaaaattagccgggcgtagtggcgggcgcctgtagtcccagctacttggga

SEQ ID NO: 3611 - DNA, 4001 bp, Homo sapiens
atcaatacctcatttggccattgccgctgttgacaacacacttcgacaaagactctttgaaaagggtcttttttgctggcagtgggctcatttaaagcaagttcttgctacgtgcatcattttggcaaacaaggacaagttcaaggaaattagaggccaaacttgacagagcactgggtgcagctgctggcccagctgtgcagtgattctcaactggtccattacctccaaaactcaactattcagcacagcttccctagtccagcactcctgtcggtctaatatatttggcaacagccattatttcagaaatgaatgctcatgtgtatttatagaaaatcacatgcctgctctatcaacaattaaacagattaagattcagcagacatattcctctaattaggacaagatggaagacatagtgtatagaaccctgcagtttggtcaaggtttattctttcctaacaagactgccatactacatttcatcagtcaaacacctaggctcgccagggacaccatcttcctggtatagcattcacttcctgtgtctgccccatggaattttcagtcaggggattctatttgcaactggcacttcaagatacccccttttccctccctctaaccacactataggatcaatggactgttttaaggcttgttttgaaataacatgtggacagcatcatgtggtcactaatttcattcagttacacccttcccctgagcctcagtgtatgctgtatgctcacacttaagtagtgtctcctctgaacaaaagcctgatcacactgtctgggccataaattccatcttgcttcgctcttgcccatgcattatttaagcaatcttctcggtgagccggcatgagaatttccctcagagcaacaatcagcaggcgctttaagccctgttctaacgggaaatgtaggatatctcagagagttccacccattcatagtctcgataatgaaatatgataatctaatttggtaaaaataaactgtgaaatcagagatttgaggcaaaaactttaaagatgcaattcagactagcaatcaatgctcattcagtttctgtaccatctcagctttctccttgtgcagatgcttaagtgatgctaaattaaataattgacaaatttttaaaactgctgaaaattaccatctgtacttaattttggaatataaaaaggtccatagaaaacaccctttatgattattttgtctaataacagatatgaaacaatacaaacatcccagtcataaaatataatgcgtttctagcaggctggctttacatatttaaacatagtttttcaaaacaaaagaccacaggaggagtgaaatgctgggtgacaaatacattttttaaaaaaacaattgccaaataactgagtttttcatttcagatctactcctctaacccttcacttccccgtaaaacaaaaccaaaaaaaaaaaaaaaacccaaataaacaaaactcacgcacaggcttcctgcagacagttatgacaaccattacttttttttacatttctctcctggataaacactgggttaaactgttctctgttaagaactttattaggttgatattacatttacacaaaatgaagtctacttctgtaaataaacatgcttgaggcttccatgaaaacacagagaagagaaacaagctccctgtatatgtgaacacactgctaaatacatggataaaacaagctgaaacttacaccagacacttctcccaggtccaccacggcaggagccctaggggtacattctagttttttttaaatccatgttctcctcttctcactgatgggactactcaggcaacatggtcaagttgcaatcagcttctcccttagtgatgtatgagagctggactgatttatcttggcttttctgcagcatattagcactaatgtttctgcgtatgcatcctacctttctttagccgtagccccggctttatcattggtaatctaaattaaagagccagtgaacagagcagggttgttgtcccccacccctccctgttttccatgaaacaattgccaggcagtcactcccggacaaggattccactgtttattctaccgagcctcctcttcaatattccattgagacaggaagtcagagtcgcaaaaggataggtccagcaagactgtcttagttcaaaggtatatttatgatttatgctcgaaaacagtagatggcctcaggaaatactagagagagctgtcatttaccagtttttcagcccagaattcagaatcgacactatttataaaaacagagcaacttgatacttcaccttactgcccagggtgcactttaccttcagggcactctttctgagaaatctcttcctttttccaccaatatttgttttatatacacatgcttaaatgtttattttaatgagctatattgagctatgacttagcaagttccatacaaagaataaaatgctataaaaatttgggcagatccatcaaacaaatcattattaaccttgttgcaacctgctatcaacaaacagcagctgaagcaggagctaaaggctgtatttaattcatgagctgtcaattcctttctttaaaacatgtttaaaatcttctcaacctccacaaatgtttgggaagaggaaatatatcagagtacattttcatatgaaagtttttaatatcttgaaaatgttgctgccttagcagcacctcaatgctttttaaactcagatttacaatgattactgaagtaatattaggtttattttctcattttattcagcaagacttaaaccactgttaagcaacagaatttgatggataacaaagcataccaagtttcatctctatttttgtgtattttgttaagggaatacatgatcattttcataattttaaacatgttattgcattttaaattttgcttattaaaattaacaaatttaacacacccattttcatgtaggcataaaatacagacttgtcattttaaatagctttatatattcatttccctaatcctaatgacatctgcatttcttcaatttttcattataaaataaaatgtctcatcagaaatgctaaatactcacatttcaggttcttccccaaccgcaccccccaaaaacagaaaaaggcaatctcaaactttatgcttctcagcgtttttcaaaatttcagtcaggagaaataacttgagagggctgattagagactattcagggtatcagttcttcttagattatatcacttgggtaaactttaaaaacatatattgatttctgtgctctaaaacttggttatacttaactgctccacaaacatccagataaattattttaaaaatttaaatctgggcttgtcactcggctgcttaaaactctgcatagcttcccattactcttaggctgaaagccaaatctttatcatggccttcaatgactcagttttatttcactgggaagataagcccaccttcccagaactgactggctggcattcagaaccatcaatcaatcaagtattgagtccctgctctttatgggccggtcactggagtatggtatccgagcactggtttgggatgctgagagaattccaggagcacatacacaggccttctccttcagtttgaaagtaacatacatgaacaagattttactactctacaaatcagcttatgaactatgacaaaatcaaaaagagcaagccagactttgaaaatacatcataaagataaaatcaaggggtaagaggaatacgatgaaattaataatttggtaaatgttaattcaaactgacttaggctagatgagaaaaagggaaacagtcaagaaggagcataaactcaaaaacaagaattgctcaagcctggtcttgttgttaggctttgaaagtcatgactcacatcagctaaattacatttttaaaagtttactatttatccataactgtggttctgagtgttttcaacaaataact

SEQ ID NO: 3612 - DNA, 4001 bp, Homo sapiens
aaaattcgggtactcttttcctgtgttcatgcaatgctatcagcctggcatattgttttccttccccctgggtagcacccacccagacattgcctcctctgtggggctactttgaaccctttcccttcttcttaacaagaacttcacagccccactatgtgtctccacaaagcagatactagaggccagcactggctaagtccttggcatacattatctcattaatactcttgaacacctccctgggcaagatgctactattattctccttctgtagatgaggaaacaaatgagtaaggcagttaagtaacttgttcatgttcccatgttagaaattggcagagctgggagtttaactgaaaccctaagagctcctaaatccctgtcctgaggccacactaccctgatgacatgagcacccacaatacttcactgttcttatttgttcacgtgtgcttctgtctaggctgcagtgccatattttcatagtcctatatgacggcctgagattgatcaataaatgttcattaaattgaagattttcaagcaagcagtggtatattccaggggtgtttctgagtcattctttggctgaagggaaatagaaaagaaaactaaattaaactaaaaaggatttagacatttataaaaactggcaataggaattctgaacaattctggaccatattagtaaaggtgatttgaccattttcttttctgaaaattttaaagaattgaaattgctatatacatatttatacatgtacaaatacatatgtatgtgtctatatatattatgtgtatatgtatatatatgtgcatttatctgtcatctgtcttcaatgtaatgtcatctaaaggtaaagagggtgactacggaatatttaatatctgtggacttagggaacctgcctgacacagaattgttggtagaagagaatctaaaccctaaatgacatgtcaacactagattagtttatccaatctgagaacactataattttttctgctaaccataagacatattttgcaaataatttgttctcagtttctcaaaacaataaaaattcaaacacatcaaacataagggatactatctattttattctcacagttaattgagataacatgctagcagcccaaagtaactggtgatgacgataattgccttcagtacaggagaaaatatctctgaagacagcaatatactctcccacagcttggaagcagcagctgtgtacattactaataacatgacatcacactcctccctccctgctgacagtggaacaattctgagctgcatctcaaggctgtgaaatgttttaagtgagagcaagaagaagctgttggccaaagagaaactcatttcttttattattattattaaactatcgaacattacacaggttatctgggatagcttgccaaatcaaattctgatgactgaagatggagggagcatattcaaagcagggccgtgcagtatatctcagctgcaaccctagaaaatcgtcagcatggcggcagcattaaaaagttctatttcataagagagattttaaaaattgcaaagaaaccaaacatagaatattaaaacaatcaccaaatgtaattcacagtattacaaaaataattctaaaatatagcaatgaatcatcaccccaatacatctcctttcaccaacaaactcacggcaagcaggtcctaggaacaatgtccaggacattcaaaagcaaccaacacacggcataactgacaacagaaggatcagagttctagagtattacctacatttcctatttaccatttagatggatgacaactacacgtcattcctaaaaatgcaattagcttaccacttcagaagctagagagagagatggtatggctagcttttgtaagagttgaggaacagatggaataaaaagcagaaagaaattcagcaacgacagtctgccccataaaatgcataactcacaagtacaaaaacaaacatttcctcagagactggagagctgaagttgttcttggcaccttcaacatgaagtcacggtattttctagaaggtggggcaaaataagtcctggctcgggggttacgctttctaataggccagctaatgaaaggagtatttacacactacacagctcacaggattgggccagcagcactgctaatctaatcttcatttgggtgataagcaatgtgtccttcaaaatcaggacaagatggctcaagattttcaaagcttcagcattttgtggtttcactctcctattaaagttttgtaccctggccagttacacgtgagtttcagaacggtaatggcactagtgaggccactggtaccctagagcagagggacacaactgctaggggaacatcggtgacactggccaaggtgtcttcataggttcagcctggatcaatcatgtaaagcagggttttaaaaactgtgttccacagaaaacagtttgaattcagttggtcctcgaaaggtggagttgaaagggtttatacagccttatggaattatctctgattgttggtttttttcttttttttttagagacaaggtctcactctgtcacccaggctggagtgcagtggtacgatcctggctcactgtagcctcaactcctgggcttaagcaatccttttgcctcagcctctcaagtagttaggattactggcatgagccatcaattatctgaatttttaatgttttaagtttgtatgaggatacataatttcttatttctttatctggcccagaatttcattgtcttagccagtctgtagtgataaaatgttgtcatataataggtggaaaatattctaatttgttctctctaaccttaaaaaagagcaacaataaagttaaataaatgttattgtattccctaaaaattccccaaattcctaaccttttgaccctcacagtcaaaaggttcttattattctactgcccttcccttaatgagaatttccacaaactgtgaaacttatttccttactagttgccatttgaaaccttacatctttataataatttctaaaacttattcttcatataaatgacccatagtttttaaagtttgagaaactcctgctttaagtaatctccttaagatgagacttgccaagtggtttgagatgatctccaggctgggtcattactaattactagcaggaattcttctagcacttgggaaacaactttgagctccacattgatggtgatttatagcgagaaagcattcttcagtatttagcaaaaagcttattaatcatactatcaatactataactgcctaaaaaatgaggacctcgggctgggcgcggtagctcacacttgtaatcccagcactttgagaggctgagtcgggcagatcacaaggtcaagagatcgagaccatcctgaccaacatggtgaaaccttgtctctactaaaaatacaaaaattagctgggtatggtggcacgcgcctgtagtcccagctactcagaaggctaaggcaggagagtcacttgaacccaggaagcagaggttgcagtgagctgagattgcaccactgcactccagcctggtgacagagcgagactccatcttgaaaaacaaacaaacaaacaaataaacaaacaaaaaactcacaaaaaatgaggaccccagatgatcctctgggaaacaagatgtttataaattaggaaatgagattatgttgtaatatctccgtgagtctacttctccagctccttccacactaaagtaaagtattaccttctaaaactaggaaaccccatagcagttgccctttcagaagtatggagcacaataagcaacacaatctgcataagtagccaaaaattaaagacagggtcattattccaaagggcaactgtaacattcagcattcaacattcaagctttcttatcattgtgatttttaacttcagtgttaaacatagtcagtcaggtatagcacatataaaagacag

SEQ ID NO: 3613 - DNA, 4001 bp, Homo sapiens
gtgcctaaaacccttaacttattgatctatccactcatctgactcttctgatgctaggctcagtatctgtgaagggtttttttttttttcctagatttttttcccattatgaatggtggcattaaatgggggcaccatgctctaaaaaatccatttcaagcaaaatcatttaggcagatacacattatgaaaagagagagtcgaatatgtcccacttgtgttagtattgctctatgattttgccataagtacttcttattgactaacgggtttccagtgaattaccgactgttcaaaaaatgccatgccatgcatttctacacatagaaatatgttattatctaaaaattttgctcataaggaagcactactatttataggttaagtgcaagatcctgaatcccatataattcctttttcctgaactattaaatgtagatacttatcacattaacaacctctatactttaaatactcttagttcttctacataatcctgtgtgatttaactattactttaattctcttactatttattgcatgcaactcttttaatattagtacatatcattttagacataaatagggcactacctgccaaaaaatcttgctactgagtggtaattgaaagtcaagattatttctcagatatattaagcttttcaaatgagctacatttagcttttctcaaattacttaatatttttcaacaaaggcctataatagagtatgcaaagcacgtcacacttaagattttcaagtttgatctggttacgaatctgttaattgaaaatttttcaatatggcagagcacaaaatatttcacacaaatgcaaatagagatgtcatgcagatagctgcaagacgtgcatcattgcccttctgcatcaaactccgaaattcagaggcagttcactctgcaagatttcttgctcagttcttaaaagttcagatgcatcaccttttaatcagggtaataagctataattgctaacatactgtgtaacgtttaaacctgcaatctggacaaacagaaaattatgctgtcacagcctggaaacaactgcaatccactgttaacacacacatcctccttagagagagctgtcgtcgggagttacatgctttatggttttaattatttttagcgtaaagatcttttcccgagaagcaggtattaagacgaaagcagcctcccaaatgaccttctctaacacagaccttgagcgagcgactgcgggggcagagagctgtgaatttcagcaagggattcgacagctccaccgggtccctcacactttgctttcaagaacaaaaaaagaatgttactctgcacctgccggtgcccccacccctctttaaaacttcataccccgcaaggtctgaatagccggaaagggtatgcatcgattcttctgtcccgtgatgccaagagaaaataaacccccacccaggagcggagcctggagtcgcggcagggcagggggttggagaggtgggtgctctctccccttactgcgctgcattttctccaccacgtgtaataatctcatgccgctggcaccccacgagaggcggggatccttgtcctcctgtctcccggacgaggacctcaaccccttcccccgctcggggaccccggccacccgcagcccggccgcgctgcgcccaggtgcggagctgcggcggtctcagggcccgggcagcaccgcagagctcggcccccggctgcggcccccggcgagctaccttttatccaggcaggcgatccactcggcagaggaggaagaatgggcagcgtgcgcagcgaccatgttgagcggcggcgcgcggtgtccctggctgcggcgacctcccgcgctcgctctgcctgcgcctccgcccccgcctcgtccgccgcgcggaccccgctcctcccggacgcctggcgaccagcgcggctgcgacaggcccgccctccccgcgggctcccgcggcctggggcggtggggagagggaggggacccggggggcgggacgcgggtgcggggagggccgagtcgcccgcccgcccgccgctgcactgcggcgcccgtgggtggggattccgccccggggtggggaccccgcggtcccgctgctgggggacactgggggtggcgaccccggtggccggccacctgcgacaggtgtccgctgcgtccctcggagactggggccccaccctcaccccggggcctctgaggcggggcgggagggcaggcgccaaggcagagtggggagagggctgccagtgtctatatatttttcatacagcaaatgctactaaaatggctgctgcctctctgtttccttagaaacccatgagtcttcctcagcagctgtcgaaacttgccggcggttgcttgctcacctttgctgtctccccttcagaaaaggctggaggggagggcgaggaaggcttggcgtggggacgcccgtcgagtctctcagtgaggaatgagaggccagcttctcctgcggggtgaggaagggctgggcgcaatggggggcagtgcgggcagggctgaggggcagggagggaggaggccggtgggcccgatgtggtctgagggggtgacaggctgaagtcactggccttgaaccctgggcctgcctgggcttccatcacctgcatggtgaagaaaacacagttgagaatggggagtagccgggccacagcagaaccgagaccccggacgcgcaggtgaacttgtatggctggcccccttgctgttcttcctctggctggagtgttgaatgggtggtgataacggcctgtctcttgtagatgttcacacaaatgtcatgtctacaagttattcagttacactctgccaagaaccaaattacacgccaatggttgtttaggaatttgcggacaagttaaatgttttggactattaccaagcactgttttgatatttatggcactacatttggggccagacaatgggggaaagggacatagcattgctttcttctactgttccctgcctcctccccccaccaaacctcctatccaaccctgctcaggggagagtcagggggactggagagaaggaaagagcaagtgctttctgggatgctttgatcctaataaaacaattattaccatgatataaaagcctccaaatatgtgccatttccctctgctggatagccaggatctagtttcagacctgccacagtgttcccacagcaactcctccctccctgctcagggcttttcccccagttaaccttcattctgttaatttctatcatgtttatgctaatatttaaaataatatactatagaaagattaaccaaaggtatttatgttgtggcttttttactatacaggtatgaaggaggaactgtatctcctatatatattaagtttcatttataaagacatcagagagcacctgagaatgtttcaaggtcaccaaaagctttctgaaaatgcctttctgcaaagaaggtttccaggtaaggagctagaggagaaaggagctgcacatcacctgtcatcacacagaggctcagagttgccatagctttggttatgatactaataatagtcgccatttattgaacatccactgagtgttagaccctgtgcagtactccttacatgtgtgatcccatttaatcttcagaacactctatgaggcagagccagaaagacactactccacaaacagcaataaatatccttgaaaatgtagtgaaatattgaaaatgatatgtatcagtactttcagggagagtgttaattggattggaaggaagacactgatgagctgctgggagtgagagtgagaccctcgaggagtccacagtgcattttaaggagtgtagctctgatgaactgcaaggcctttgttttgctgtgtgggggccctgcctcttctctaaagagaagttgaagacttatttaaagaacatcctttcgaaggagaaccaacaatcactagcttgtccagagcatgctcat

SEQ ID NO: 3614 - DNA, 4001 bp, Homo sapiens
aaatcatgaattaagctttttgtacttacttgagtagggctgcatctggtttctgggaaattcaccacacaaaaagcaaaataacggagacaatctttgaaggtcagactcaacaagagttaaaagctattgagcgtctctattttgcccctcccccaaaggtcctccccctcaattcggctctcaaaggatagcaccaccatgtgaaatgtcctcctccccatctgaatctgctgaaatcctactcatccttaaaggtttcacttaaatgccgaggcttccatgcattcctccctcaatttagaattaatctctcttcttcgctctcctattctatacctcaacattttactatatagttcactgtattacacttacctacattcactaaccccccgcaccgcacccccaaaaaaaccaccccgaggaggaaaggaatttaaggtgctgttaaacacctctatgccaggcaaggtgctacgcattttgcatacattatctcatttaatctacatgaaaaacatctggggaggtaaacaggtggtgttattcccattttactgatagggaacgtactgcagagttcaatagcttatccaactcacattgcaagccaattccagggcgtacggtttcccccactccgaagagctctttccaccaccccatgcttgttcacctggtgtcacccagcctaactgacagagtaggtattccataaatgtttgctgaatttaatatccccatggactgactctttaataatccgatcacgcctcatccctaacccgttacctttactgttccttaacggtggactttacctacataagcagctctccacatttccctgagaaatgctgcagacaacatcaacccttattggaagattgagtgaagaacttttccattctcccggatttccccaacggatcttcccaaagaatttaagaaatgcacacacgcaagacacatgtaacacttacaccctccctcaaggctcttatttcatattaaaccatgtcttcgagcttgtaagcaataaggtttatgcggtttccagctcacacagtggggacaccctaagtcactgccttaagaaaaccacatctttcaacctgtcttaacacgaaggcatcctaatactatcacactgccccctccctccgtccaccccccccccccccccatgaattgcagtttggatttccggcgggaatgtataatacagaccgcaagaggagacgcggttaaaaagcaatgaagcaattacttatcctgtttaattagaaagaagacacagaaggagccccgcctttcaaaatctctgcactgaactcatctatgaaagatgggggcatcgaaacccaagcaacccgacatccagtagctggtttctgcagctgggcgggggaaagtcctttcctccctgcggtcccgggccaccagcccccggtgctgggtcggagaagcctaaccgcaccctcccaggcggccccttatctcattgtctccctccgtcgcggtccccaggggcgcagggtgcagtccaggccccaccgacctccatccaccagccgggagcggtccagccagccccggcccgatccccaacctggcaacgaccccgccccaggctgccgccgaccgtaccgcacccggatggcggggccgggcgccgggaaaatggaggcgggagcggcaggagcgcctcacggccccgcgcccagccggctccctaccccctggccccgagggcgaggctaaccactcaccgcggcagtcggtcggccttcccgcggccccgggcaaggaaaccgccgctcgcgctcctccagccgctgcctccgcctcctccccaggcgcggcgctccctcgccagagacgcagcgactgccagcagctcccgcgccgcgcgctcagtgactgactgactgactgactgactgactgactgactgactggcgggcggcggcgggagcgggggcggggcggccgcagcgccccgcggcggcggcggcggcggcggagccgagtgtgctcgcgtccagccgagacgcagaaggcggggttgagggccggactgccgactgtagggccgactcgcgcgggaccgcgcgccgcccccgcccgccgccaaccactcacttccggcgcaggccgccgcgcccgccgcccttccctagcccgcgccccgcgccggccctccgccctcccttcaggcgcccggccgcgcccggccgcactcaaccgcggctccgctcgtgcctcgcctttcctccgcaagtccctgtgagccgcctacaggaacgagtgaatcagagaatgaatgagtggggaggaaaatcccagtgctgccccaccccctgctcgcctttcataggaagccggcccagcagcctctgtcctagcgccctgggaggcacagcagcctccagcagttctgtcagggagctgtacgcatccacctttatacgctgtccgtgtattcagagactccagaaacgcatccggggttggctcggtcacttacaggaccattgtcgttgagatctgtgaggcccttctttaggaaatcccattttggccaaaaagtctctgcagtttcatggaatgtattgggaaacttaggaacgggacatttcgatgacctttactttttaaacttcgaaatctgttaatcctgcctccttaatttctgtccccccaccccatcggaattgtgtagtagtaaggtgtcggcatttttccttatcgctaagctcagctgctgcctctttagatgcaggcttgacttcggcagacttttagattttaagtatgtccttattttgaccttcacctaaagttgatcaaagaaaggaacaaatggaactaagttatgtttgcttggctacatgcaaagcaagtttgttgacagcattaaaacaattgagaaattgggagtgtgacctgaaattggttgcaatgaacattgctttttcatgtcttcccatctgcttgctaagaatttatttaaattttcacaaagcattgactgtacattcctgaaatcctagctccctctctaagaatgagagtgttcatttctctgtcctggggccaaatcctggtttggttaattacattcttacttcctgatattcttgaggactttcaagtggtttcagtcttttttgtacaatctgttccaaactggtacacaatctgtttcaaattggtatttagaaccatacaatacagatactggctgcctttcacacttgagatatctgtacttttgaaacataactgcccttttgtattttaagttcagtaggtatgtcaatattcttgtatagaataatactatctcttgactggattaagaaaatgtggcacatatacaccacggaatactatgcagccataaaaaaggttgagttaatgtcctttgtagggacatggatgaagctggaaaccatcattctcagcaaactatcgcaaggacagaaaaccaaacaccacatgatctcactcataggtgggacttgaacaatgagaacacttggacacaaagcagggaatatatcacacaggggcctgttggggggatggagaggggggagggatagcattaggagatatacctaatgtaaatgatgagttaatgggtgcagcacaccaacatggcacatgtatacatatgtaacaaagctgcacgttgtgcacatgtaccctagaacttaaagtataataaaaaataaaaataataaaagaataatactatctcttataaatgaagatgatcctgctgaccaacttcttttagacttctcttcctttcttgtgggaatcatcatttgccacctaattatttcaagaagttatcctccaaaagtgaatataatacaacactttattcatccttgtatctcccacaatatctagcatagtatcttgcacaataagtatttataaattaataaatgctttaaaatttttcataagtgataatttt

SEQ ID NO: 3615 - DNA, 4001 bp, Homo sapiens
ggattcttctacatttgaaggaaaagaaggtggagaacttctcaatgtcagactagccatttgtttagacagggcatccgaaactgcttccatcagagaacattggttggtgcggtactcaagacccactgtgctgagggaaactcgatcgcagaagtgccgtgccctgggtcatttttaatccattctccacaaacaacaaaggatggtaagggtggggagagaacagtgttccctcatggcagggggcagagggcgaaagaaaaccgtatagcttgagcctgtatgagaatccatttgtcacacgaggaaacaagcgcactccaggttgtcctaggcttatcacaagcaaaacaactatttggtgagacttcaaataaaaacagcccctctctgcccaccctcctcaagatccacgcgatctccagaaacaggaacctgtttggttatctccctgcagcctctgattcaaagacctgtcactttcagagctttacgtcatcagtttagagctctgccctctctcttttccccttttgcctttcctctgaagcattctgtctggtgactaccaaggaaggacaaaagtcaccgaacaacagctcagttccagcatggtgcctgctttgctgctcgcccaagcgcaagcaccattactgctgaatgaacctgagaaggagccggttctctccgtaatttggatgccaggcctcccagagttaatcatcagctgcaggcagcactttcccagtcaggtcataaacaaggaaaaaacagcctgagtatcacgaaaacactaaaataaggaagaccagcggcaaccgaacattttaaagtaatgaaggtgaaggaagaccaggggcaactgaacattttaaagtaatgaaggtgaattagcttgttggggggaaaaaaagtcgctataaaatacagctttcaattagttggaaaccatgcaagaaatctaaatatgatttctaatgtgaatctaaatattattttgtcagtcttctatattgcagacagttctacacagttaaatgagatattctcaaaaattgaataggaaaaatcaaatcagccatacaataaattcacaagttactttaaacaactacgttttcaggtttcagtggtagaaacagattaaaatcaaatctagtcatcaactcacttcaatgaagtctctacttcataacctgaacttgactttgaacctaaacaccatggactagaaaaatcttgaacactgggaaacaaactttctgtttcctagacaggaatgaagccatatgccccattcatcctcaaagttacaagacacgttgccgaaaataacaggttctaaaaaagggctgtgaaaacaccaatggctgttaacaggtacaaataaaatatctccttctatcgtgccagagggaaaccaaaatcaaaatcaaaagttgttggtggcttgcaacacacacacacacacacacacacacacacacacacacggagagggaatgaaagagagagagagagaggaaagttctccagttacttactagggtggttttgtcgtggtatttttcacatcagcactctgcctgtccagctgccaagtgccggagcacgccgagagcagctgtttccttcaagctggggctctgagtcttaaccagtcacatgtacctcctgataaataccgcccgccaccgtgccaggaggtcagaaactgaagatcattcttctcctcactcgcaaaccacctcataacccctgagttggctcagccatctcatgagcatgcagagcgggatattccacaatttgttttcctttagtgacaaaagccaaacagctgataagtcacactgaagggcaggtcactgcaagtggaaagttaaatgtgtttgcgtgtgtgtgtgcgcagagggggagactggcaggctccatgctctctcatctcactcaagtttcactggggctctcgaacggcaagagagaggatcaccaactcgcacagcaggtggaagttgctctgtgttaaccccggagtacaactgtttggtttcgttttctcagaatctcaggctccagtttgttagacgagccacaagcctgactaggtggctggtgctggggaaggcagaccctcactcaccatctaagaatgcttaggttggacttcaaaggccggggctgctaagccaagggacgctgaggggcaaatatgggaggggttaatgaagactatcaaaggcagctttatctgaagagctcttggaagtgatttcaggtagctttagaccaaacttccgcattgttatctgttgaattgcatcgagcagctgagattatcagccggcgagtgtgaatgcaaacagaaattatcaccaagttgacaacgcgctttacagacgcactactgccccctttggtgtgctgggaacttggagcaaactgccgttttctgtgctgctcgcaaacgtggcaaaccatccctgatgttttgttgaattcatatgtctcacctgagctgatgttcccacccttcccttttcatcctcccttccaaggaaagcccttgaagtatctgactttacgtagtgtctgaccttggatgtctgacttcttggtatagtaagggtgacacttccccgaatcagtgtctgagcctgcccttcaggtagagatatgacatagaggcagcctatttggcaaagtgaacatccagaaaagatggttgaagtcccccaggggatttctgaaccataatgtgcctgttaaactattaaccctgatttttaacacataatatcttactcagtgtaagagcctgtgtgagtaatcttttatatttaggctttgtctcataattatttacagtgttaatcaaaccagaaatttccctccatatagaggatacagtgttttctagaataagagaaaaagacaaaaaaccctcagtctcaccatactatcagggcagtaatttgttgtcaacttgtgagagtccgaagagcaaatgggagaattttgtaagcaccaaaacaaatcccttcctcagcatttcaagttagtaatagaaataaacttcagatataaaaatgcaatgcataaaatacacatttccctcacaggcatttttgtttatgtgttgatgtgacaatcttcaattagaaacagaaaaagaggcctactgaggatttgaaacattattttgatttacttacccccttgtatttacagtaatagaaacttttgtgatctgatggcatccatccatcactttgtttaccattgactgggttaattattctgatgatccattgcatgccacataaagaaacagggacttctagaaactcttcaatgcccaacagcgacaacagcctcaggaaagttaagttgtattagtccattcttgcattgctataaatacttgagactgggtaatttataaagaaaagaggtttaattggttcatggttctgcaggctatggaggaagcatgatactggcatctgttcggcttctggggaggcctcgtgaaacttacaatcatggtggaaggcaaagtgggagcagatgagtcacatggccagagcagcagcaagacagacagggggcacttctaaatgaccagcgcttgccagaactcactatcagctgggtgttgtggctcatgcctataatcccagcactttgggaggctgaggagggtgaatcacctgaggtcaggagtttgagaccagcctggccaacatggcaaaaccctgtctctactaaaaatacaaaaattagccgggcgtggtggtgtgcttgaacctgggaggcagaggttgcagtgagccaagatcaagaccgcaccactgcactgcactccagcctgggcaacagagtgagactctgtcttaaaataaacaaataaataaaagaactcactcactatcatgagaacagcactaacaggatggtaccaaaccattaatgagaaatctgcccctaagatccaa

SEQ ID NO: 3616 - DNA, 4001 bp, Homo sapiens
caaccctgcactggtttaactctggtttctatagtaatcaatttaataaataactactcccatgtgggttgactttctttgtgcaacggataacccaaaatgctgaggtggatatgaaaacaacaacacaaggagcatacagctgaaaagtgtataatctagtagcagatatgacgtgtatgaatgtagaatgtagtcaattgtgctactcacattcgtctgagtcaaaagactgagtcaaaagaccaagaaacaattacagaggcatatgccatgtgctataaggaattacaatgggatatgggatgggggaagaggcaagcagcattcctgaccaagaagactaggaatggtactatgaacatctgagagggccctgaagcagaatttcagtgaagggaatatgaccaatggatggtggtagaaaggtgcagagaatgttccagaaacattaagtagacagtttgactggggtatgagctgtgggcagtaaagggaaagaaatatggagggcagtgaaactggagagacagacccgggtccatccgaaaggccttaaataccaaggtacagagactgaactctgttctacaagcaacttgcctctgaatagaggaaagtgagagcatcgagagatccaaaagagatgaaaggagaaaaggctcgtaccaaacatctcaatgcaagtgcacagcagttcatctaatgttgctgctttcccaaggccacttgatcccatggttatttagccgttgtcaaaaaactagagacattttcagcatcagatagaccatctccataatcatgcaagtcagcgatgttagtgcctagtggtgacctgtccttagttgtacttcaagaaaactctaaaaaaaaagaaaaaagagagaaagttattagactagagttcagaccccactagagcatcactttcctacctgaaaagataatgacttccatagactgtatctttgtacaagaaaagtatcatagtgactgagattacatcaaccttttatgatgccaaaatacctgctaagctgttctcggggatggatgctgcttggagaccatggaaatgttccctgttatataccatcccacttcactgctgaaattttttaatgcaatgttttatactttccttatatccttttttttgattgtttttgttcttgtttttgagacagagtctcactttgtcacccaggctggagtacaggagtgcagtagtgcgatctcggctcacagcagcctcgacctcccgggttcaagcaattctcccacttctgacccccaagtagctgggactacagacacacaccaccactcctggctattttttgggttttttttttttttttttttttgtagagatggggttttaccatgttgcccaggctggtctcaaactcctgagttcaagcaatctacctacctcagcctttcaaagtgctaggactacaggtgtgagccactgtgcccggccacctttcctcatgttcttaagtgataagatattcaagaatattataaatgttacttggtttaatattaataaaagaatatgtaaggaaaaaatttttagaagcaaatatatttataaacatcctcaatgattacataaatattcaacaactgtaacagattctacttgcctgagagtaagattattctctgcagtggtaaaaatactactgttaatttattgaacacccacattatgtactatgcaccattccgaatgctttgcatatattattgaacttgaccttcacaacaatgctgtaaggtagtaattattattcccagtttacagatgaggtgatgggattcacagtgatttagcaacttacccaaaaccatgcaattattaaggcctagagtcaggactccactataaaataaagcttctgtgttccctttcttcttattacttctacaagcatggatatcacaaaccatcatagttttgcctgctaatctagtgtaaagggtatcactcctccacatcatctcagaaagaagatgtaagacagattatctgttacagagacagaaggaaaatgtgaggatgagagctatcccacttgccagcactgtcatggggaaaacgtgattggcaatagcctcttatagttgcttatactcaaaagcatcgctgctggatagacattatcactttattttacagagcaggtccttgatgccaggtccccataggacttggagcaggagggaggctgtcatgttgtaagacatttatccactttagacattttagtaggtaaatgcagccattgaggattcatctcgtgagctgtttaaagtcaatgtctattttactcttgaactttatttattcaactggcaatcattgagcacctgacctatgccaggaacttggttaggcattgaggctgccaagatgaacaaatcattgtcccattcttaccttcaacaggctcatagtcaacttcagaaaacaaacatgtgaatgaataggaaaaaatacctaatgtccatatgtatggttgtattagttcagtgagaccactggagtgacattggaatgagtctgttcaccaggcacataactctggggaaaaaatgtttgccctctattaattctgtgaaagaaccagattcttgtgctgaaggtaccactcttagaacataaaataaagggttatttcaagtgttcaataaaaacagcagaaacgctggatcaaacgctttcccaattctgctgctgaaatgatttgtgaaagcagattattaaagtcatctggaactaacttttttatatcttttaacaaagttaccttatctgtaaggcctttcctgacctatttaaaacaacgcacctctcagctctcacccacctctcacttggcatgtcctactgcctttcctggatttatttttcttcattacacttaacaccatctgacaaactatatattttacttgtttatttgtttttaaatctctatagtgtcataaacataagctccaagattgtagggatttttgtgtttgttctctggtatacaccttaacacctaaggttttgcttctcacataaaagatactcaaaaattattcactaaattaataaacgagtggattaatgggtgaggaaatgaatatcatgaaacttgtcagaggtttgtcattgaatatgagtatatttatgtgagtgtgtatagataccatacatttttaagagactttttgaagtttgtttactaaatcagctttaagtaaacatcactgggacaaaaatttctgccagttttctaaacttaatagaatctgcctatattcatcattagaacttgccttttccaagacattctggggcagaacttctctgattcctctaatgtaaactctatcagtacccttaaaagtcaagattgaacaattaacaagtttgattaccttcatgtgtatacagacatttttttttagcctgttactcacggaagagtagacatattacttagaacaaataggcctagactaaactggtttctcaattcaaaaccaaaattactcagctgagctgtctggggaaggtgttcacatccccataaggggttagagataacctggaaccaaagactcatcaccacgtttagggttatatttctgatctgcaaagaaactggcacacgacgggccaggtgggccgggctatcaggttacaatctgtttctgcaatcagtagatgtgtctgagtctctgctccaccttctgtcacctgcacatttacctgagatctcatttcctatgtgtggacattattgtgtctacaactacctttttcagaataaggcttctttatcacaaaagcaatatacacttattatttaaaacaggacattaaggaaaaagttatccctaatctcatcatacaaagataactcctattaacatcatagcacgtttcttttagtttctctaggcatatttaatttttattagaattctta

SEQ ID NO: 3617 - DNA, 4001 bp, Homo sapiens
ctcaggtgatccacccgcctcggtctcccaaagtgctgggattacaggcgtgagccaccacgcctggccccatgaatacatttataaatctatggtcatctggaaaccaatgaccagcaatgagccttttacaagtgaaaaaatatattcttgaaataatacatctaactcataattttatctttcttaaaccttacatacagttaaaacattttcattctcataatgtaaacatgtgaatgtgtcaaatgtgaacgttgttttgaaactctaagggaaatgagttcaacatgatcagaaatcagaattgctgtaagcaacattgctgtaattagagccatgtggcgtggcaattaattaagtcaccttagagtccactctgtggaagatctaaagtggactcagaactgactttgcagcactggaatgtcctgaaaataaatgctgagggtttgtttgtttgtttcttcagatctatcatatttattcagattaatttcatttccctctctttttttttttaaccacttaagttcagctaagaaatcatgatctttctattcaaacatattatactttctaacagtttccatggaattataattttctaatcagtaaaaaataacccttaaattctcccaggaaagaagacggccagtgggatccacactgagcctgagccgagtcctggcctcctgtgccggttctagctggttctgcttttctggcttccagctttgctatcttcttgggacagattctaaacatcccaatctcaaacagggatagggcaaaagaaataacagccacacatttccttctgctcttccttttcaataatccaccagaaccgtattcctctgttagtcattgtggtaacattaatcaagttactccaagacacaaatgtggttattatcagcagcggatgcaaatatggtgcatcatttaaacaaatgtgcttgtttaatggcaaagaatgttaaaagaatttggaatgtccctagtagctttccaagtttttgtgggcaacatcaactgttcttggatttaatccatttcctttcaaccttaccatttccaaacccagtgacatttttcaaggtactcaaaacataatgaacgaatgtttggaaataataatttaaatctacataactactatgaacactttctatcactggaaactattcagtgctgttttttgtggttctagaagattctccattttctgaaaaatgaatgttcaagacaaaaaacctgtattaaaatttgttatctttgcttaattttatacaaaatttaaattttatatataacttttatacaattgtccatttctgcttgaaggcctatttattaaaagtattctaaactattattcatcaaataaattataggtggattattaatcagcaatttgaaaagggcagacaagcagacaaatatcaaaaatatatttttaaaggtgatcatcaatgaaattatttatactatctaaacccctgataataatgaaactgaagaaagtttgtaaagttattgtcaagaaacaactttttaaaatatttattgtaaaaacctgaagatgtcataaccaaggttgatttctacatttcttcagagatatgagcaaagcatattgaaaagttacatgaggatcggacctcaaatcatatccattgtctgtggctaatatccatagttcatgaagtgcattaagacgcaacaacagacagatttttaaatgacacttacctttgcagaactgcaataatgttgatccctatagtgaattgtctttttctttccacttcatcacctctagcaagtttctcttcaacgtgcctaaacacctagaattcctgttctgtcttctaaaatgctgtcatcacctccattgcccaaatctagttcaaaagtgaggagagaaaaaaaattgaaatttgcaagctgtttatgcctaacaacaacattgaagctgctaagctttgagctcaatgaattaaaggttgtttggctaaatggcaggcagacttcctcctattctttccgaacttagttttcctgcctccagtggagctttttcctttcctgggctataaataggctggtggtaagagtactgaggaaagaagaaggcaggaaatgtatttgatttcagaaagcagccttaggtatatgagtgcatgtgtgcttctttcaaatgaataccaacaaacaaactaaaaatttggcctcaaataattcagctttggtctgtgcaccatagtcaacattttctttaatttcctatggtctcagttttactataagttgtcatatcctatagacacttaaatatggttgattcttcaaggtgggagtgtatgtctggaatgaagggacagtttaatttgtgacatacatatttttttccctttcaaatattatactgtgtatgccatgctttcaaaacattaattttaaagacaatttttaaaactgttattacttaaggtccttcatataattctattagatgtctatgtattgatttgttatctaacagtcatctatttatctgtcacctccctcccttactctgtcattctacacttactgtctgtcaacagtgtttgttttagccacccagtaagtgtttgttttagctgctctttacgtgagtaacactttgagaagaagcacaaggaatttctccataggaggggctacttaaagagtggtccaaggaccggccaggcgcggtggctcacgcctataatcccagcattttgggaggccgaggtggacgaatcacgaggtcaagagatggagaccatcctggccaacatggtgaaaccctgactctactaaaaatacaaaaattagctgggcatggtggcatgcacctgcaatcccagctacttgggaggctgaggcaggagaatggcgtgaacccaggaggcggaggttgcagtgggctgagattgtgccgctgcactctagtctggcaacagagcgagactccgtctaaaaaaattttaaaaattaaaaaaaaaaaaaagacaaaaaaaagtggtccgaggaccagtagcatcagcaaccctggatcagaacctctggggctggggctcagatgattaacttcaggtgattctgatgctcactaaataggagaaacatggatctacataattactttgtgtgcatgtttattaatatctcttcaaaaaggaatttaagagtagatttttttaatgtaagaatcagaaaataatgtatatgctttttatgctggtaacctccatctagatgactagaagagtttttagatctaatgttaagaagacatactaatttcctaattacttggagaagctacctaatgtgaggcaaaagcagtggaaaaaacaaaaggatagtatttaagagagagacaacagcactcacacatggtgaagagtcatcctacatatagataaattctaagcaaattttactaacagctatatctaaaaattataagttgtctgaaacaaaaccaaagtaaacagtgaagaaatgaagcttctaatggaaatacaatgtcccagcccccactttttttgtttgtttgtttgagacagagtcttgctctgtcacccaggctggagtgcagtggcgcgatgttggctcactgcaacctccgcctcccaggttcaagcaattctcctgcctcagcttcccaagtagctgggattacaggcatgtgccaccacgcccggctaatttttgtatttttagtagatatggagtttcaccatgttggccaggctggtcctgaactcctgacctcaggtgatccacccgcctcggcctccccaagtgctgggattacaggtgtgagccaccgcgcccggcccccagcccctatttttgtttagtgatttgattattgttttgaaacccagccatttcttgtccatgcttgggtttcatactaggcccccgtataatagaagcaataggttgaacaatga

SEQ ID NO: 3618 - DNA, 4001 bp, Homo sapiens
gattacaggtatgagccactgcgcccggtccactttagttttcttactcttctgccacttcacacataaaatcatggtaaacatttagcttggtggatttcccatggaatgaatcattttagatgaaggtttattcctttatgtaactcaactttatgaatttttgatgaaactttttctaaagtgaaatacatgctctatttttatacaaaatttagtaagtaccatataaccttttcttgaaaagagtcatcaccagtaaaatcaattgctatattgtgttgtaaacacagtaatgttctttctacacagatgtctgcaaactatggcctgcaggatgttcttgtaaggcttgggaggtaagaatggtttttacatttaaaaaatgttgttaaaaaaaaatgtgaccttgaccacatacggcttgcaaagcctaaaatatttactatctggccctttacagaaaagtttacttactcttgctctagaaaaagatgtacaggcctcttcaacaaatgtctccaactagattcaattttatgctctgtcaccaaaggaaagtatttttatcttggcacagtgtctgacagaatagttctaatatttgtggaaaaataaaggtcattggtatttaaaattcttttgttgcttcttctcgttacacagtctcctactcatcctcaagttttcgtcagtcactataactgcctctagcagtctcttctctaactcccacctttctaatctcagtggaaatttggtaacacagcttataaatattttaaggtaaggttaaattggttacatgaagaccctagacctattttctgagtagaatacaggtggtttggtgcagcaatttggtgacttattttgattgtcccaaagcctttttgtttagttccacgttctctattaccctttggaaaagcaacatttcaggacgaatgaggtgttactgtagcatacctgatcatttttataacacaaagtagcattacaactgaaaagatattcatcaaaagactgaactgcagtaattggagtggtaggattttcttggaatatctgaatttattactaattttacagtgaacatacattacttttgtaatcagaaaagctaccttaatttaaaaaaaagaaaaatcagaaggatctgtctactcaatcttactgacctaactcaacaattttcatttggcatattttctatcataatttgatcatcgttttcagaggttgtaaatactgtgtttatgtttttattttgattcatacttggcttgctgaaaaatacgctgtaaatataaaatactgcagtaatgccgacaatcaacatggtgaaaggtgacagtctttttgatttctgctcaactcattattttatacaataagctcagacgaataatacccaatttggataatgttacgcttgacaaaacactttacttcatttagtcctcacaacaaccctgtgaggtaggcacattctcggaggtaaaatgacgtgggcaaagttccctggctcgtttggggaaaggctcagcagccgggccaagaaaggtctttgggggcgcaagtctttggagggcaggtctttggggagcgctttgagtaatattagagctttcactaaaccctggcctattacgtcccctcccctgagatttacctttatatactcaagttctttcatgccaggaaggtaggctgaaggcttcgaaaacctgcagctcatacccaaagctagcactgtctatccctggagacccagcgcccaaaagctccactgggcgcatagcgcacggcacgcctcctcccccgagccgcagactgagtaactggccccggactaacctgaccaggtcggtcatgcaggagcccaccactaccaccgccgccacctcctcttgccactgcctctggggttccccagacgccgccatcgctcaaaggtgctgctgtccaacctggacggtgacctctgccctttgcccgaccccgtaaccagagacgccactcctgccctccctaacgacgcgggcctttcagacgcctacgcgggtcgcccacctgactgcccgaaatcaccccgcccaccaagtgtcccctcttcttcctggaatagtctcggtgcacagcctcacgtaacagggccctcctgatatggcgagactccgcgctcctcgtcactcacggggcaggcgctgaggaaggaactgtcaggcaccgcggggacgcctttccgagcgcccggctcggcgcggcgcgggggcgcgcacgccgcccagcttcggggccgcagagggggcggggcgggacgtccggggagtgcgcacgcatcctgcccgcggcgcgcgcgcaggtcggtgcgtctgtcgggggcgcgctcgggtacctgtaccccacgtagtcgccggttaccgatcggactaagttccaggtacctggactggggctggtgcggggaggttggatcccgagtcgcacaggtggcgtggagaactgtggtttaaatatggccaggggactcgcctcctcttcctatggagaaggcccccgttccaaagatgcccttctcatccccatcacgctgattccctcaagaacgagcccccaaggccagaggcgtctctttctccatatctggcccatcccctggttcctgtaaaccccgagtattagttccttgttgcctgatgaggggaatcatacagtttggaagaggggagagtgtccctttttaagacgtcccctagagtggggtggtcattcttcgggtctgagctaacttgtttttctcgaatgttgccccttgggggaaattgcttccccagtgtaacttccctcgtgcgctgtatgacgtcgacgtgacgcagcaggatgccacccctttccgttccatgacgtcagcagggcacatgtttccgtgtttgtcatctcattttaattgcaagaacctggatggtgctttagacgtctttgtaatccccaggcctctcatcaaaggaccttttgtaactttattttggggtagcagacccttgcaaaaattgtaattttgcattttccttttgcaatacgtcaaaatcaggaaatacaaattgcagtagtagtattcaggggactctgaccaccgtaaatatttgtatatctggggtgtattatagtgctgccatgcgtaagagttactaccggtggtgactccctgtccatgtacccggttcactgcaccaaaggaccagtgtttttggctaagtgacttctgattttggagtcattgtgttccactccccaccccccgccctttttttttagagaagtcacacctcctcatggttgaaatagattttaatactgcgtgaaaccttgcactgttaaaacatagtattatggctgccctggaaatagaattcattccctcaggtgtcatcctaaagtcacgaccgttgctgaattagaatgtattgttgtcacttagtatggtttggcttctagagcaaggctgttccctttaacatttgactagtgaatcactcagaccaggttcagcagtaggtcagcaatagtccagtttgtttttagtggtaaagcaatcatttgtttaaatttttactttttgtctgttcacattttataagatatacgctttacaaaatcaccttgatgcttttctctttggtgatagaagttatcaatgtttatttgagagaaagatgggtatagtggacttggagaatccggatttggattctgatcctccagcttccaacattcaacaagttattttattttgctgagctttaattttctatttgtcaagtttctttagcttccacttgtcaaatgggaacaattattgttctcagggaacagagttggggaaatgtaaatgaaattacagatagagatgagtaatataatgcctgataatgggtagataggtgtctagaatgtgttggttctgtttccttcttttgtagaagcaagagataaag

SEQ ID NO: 3619 - DNA, 4001 bp, Homo sapiens
tttgttttgagatggagtctagctctgtcacctacgctggagtgcagtggcgcgatcttggctcactgcaacctccacctcccgggttcaagcgattctcctgccccagcctcctgagtagctgggactacaggcatcagccaccatgcccgactaatttttgtatttttagtagagatggggtttcaccatgttgaccaggctggtctcaaactcctgacctcgtgatccgctcccccctcggcctctcgaagtctttttttttttttagacagcgcctcgctctgttgcccaggctggagaacaatggcgtgatcttggctccctgcaacctccgcctcctgggctcaagtgatcctcccacctcagcctccccagtagctgagactacaggtggatgccatcacgcccagctaatttttgtatttttagtagagactcctgacctcaagtgatccgccctccttcgcctcccaaagtgctgggattacaggcgtgagccaccgtgccgggcagggagatcattttctgcaccccaacaatatcaaagaaaaacatgcaatcaatttaaactcaggaaatcttacttcagctctatgccctcattagtactaataccatatttctttattcgaatgtctactggtaatttatctttaaaatcaaagaaacttctccctgaaccagtatttttagaagaaaaaaacataaagatgtaaattttgtttggtaagaactagtttctatgaatcatctaatgaattagtacttcaatgacttgccaatatttgtccttaactccctttcataggttggagaaagtatggctaacatagataattttactgaggtcaattatgaataatgagggttgttcatctcttctacccacgattaagataaagaaatgcctagagaaagacagtcctttcaaggactttgaaacgagcagcttttagccaagacatactaacgtgatggcgcatttccttgcatcagtattgtgttataacagacttggccatcttatcagaaagcaaaaagtatatagcaaaactttacttttgtaagtaaggcattgggaagaaacagaagattcattgactgcatttgtttatattgattttctcaaaatcagttgtttattttcaatgacgacgcctctaccgccaccaggtcaacaaaaacgtacttgcttttgcatttccgggactctagcatttcagagcaggaattaaaggccttgccaaggcttttaagcgattgatggaaacaaaacaaaacacagaaggataaattttgaatttgctaagacaagaattcgcaccaaggcagacataagacatgaggatgtcttcctgacttgcgtccttggctcgaatcgttcttattagcccttttcaaaaggcagctgtgacctccatttctggctaatcaggccacttttgttccccccgaggcgtgggaggacaacagttaagccctaacagcctgcgaagcagctcctcgacgaacggcggcgtccccgtcgcctgggcagtgggtgtgggaggtgacagcctagtcctgagcctctggagcgggcctatactgcaccgccgtacgtgaatttcaggagcgcgcaatgccgccacctgggaagggtgcagcgaggctgacctgagtttgcccgccggggtggacggctctccggggcccccggggtccctggggcccctccgtgcgccgccccctcccgcgcagccctgcaccctggcccgtcgcgcccggttccgcgcccttctaggggaccatggcgacggtacaggcacggacctgcaccgcaaaacccaaagcaaaagcaacttgccatggcggaggggagacgcgccctcagcggccgcagaaagcccacaaccagcggaacgcaggcgatggggagaggagcgagcaggcaggttttggtttcgttttttgttccagctcccttggaggctacgaagaaaagggcggtccttccacccgatccggctgttctgcgacctcgtggcctctgagtgggagctcggactcaggagtgctgttgccagcgcctgcccagacgccctccgtagttttgcaacttgtggaagcactctggagagaggccgagaggattcctcgacaggaaatttgggaattctctgggtgatgcatcagtgattgcaattttgtttttacccgttttgctaagcagcagcaacaacggcagagttgatttaaaaaaagaaaaaacgcaaaaagggaaaacacatagtaggtggtggccgcttcctgtgttgatactggggggctacgcttttcctaacatcaatcatctcgtagttgcagagagccctagatgtcatgatagttttgaatcgcatgcattatcatgtaagggagttaaatatcttgcatgcatgctctcttctgtgtttatatattcgatgccatgaaattgaagggcatgtggctaaaacctttttactacatgaaactttacaacacttttgaaaacatttcaatttggttgatgcgcactgtaatatttctccagataactgtccaaaattttccatggagaaggcttttatcctcattagttgctggcctcaaactaaccatctaggatattaaacttctgccagaattttacatccagctacctttactttttagaacgtattctctatcatgttattgatatcaatttctacttcacacagatggttttttacaacagcaaatcaagtttttctaacatcagttttaaaaagccctgcactcagtgaaatctggatgtctttcctacgcccttattatctgtccagacttcttccccttcccccaccgctcacctgggccttttcctctgcacaacctaccccagttccccaacccccacctcaacccccaacgccgtgttggtcaccttcccagcccagaccaggagccctcttggacctctgccgggtgctaaggacacaggatgagagcgccaggtccctgccagcagagagctcaccaccttgtccatgccttagcacaggaaccccgaatggcgcctgtggggacacagggaatctctggacaaacttcaaaatcaaatcaatgaatgcatgaagaacaaaggtagatggctagcagatatgaagaaacccaatcccactcctaagaaatgtaaattgaaataataagataccatttttcacaactagatctgcaaaaccagaaagtgttagcctgaatgtaagcatcagagttgctgcaagcatagatggatgcaaatacttctaaagatttttatcaaaatgtaaagtgcaaaaaaatgtaaaatgcacatattcttagtctcagcaattctacttttagaactgaacttgaagttatagtgcgcaaatggcactaagatattgtatagaaattttagttgtacattgcttgaaatacaggtagtaataatttttttataaactgggatccacctagtttatcattggatggagctatttgttatacggctgatgatatatcagtaaggcacaaggctatgaagattttaaaacagaatgaggtagggggaagtggctcccgcctgtattcccagaactttgggaggccaaggtgggcggatcattttgagctcaggaattcaagaccagcttgagcaacatggtgaaacccgtctgtactaaaaatacaaaaattagccgggcgtggtggcacacacctgtaatctcagctactcgggaggctgaggctagagaatcgcttgaacccgggaggcagagtgagccaagatcacaccactgcactccagcctgggcgagagaacaagactctatctcaagaaggaaaaaaaaaaaaaacagcatgaggtagatctgtatgtaattccccaatttatattttatctccagatttatatatctaagtgcccacttgaatgtcaaacaagcatctgaaatttaacaagtagaactccagagcaagactctgtc

SEQ ID NO: 3620 - DNA, 4001 bp, Homo sapiens
tcaaaaaaaaaaaaaaaaggattgagagtcccaaggagtatttttttttatttgggtaatatccatcaatacttaccatattagaaattaaagcaacattttcaaatatttattaatttattcatagaaaatacattcgttacttaagtaaaattttaaattaaaaacatattttcaaaaaattggtgagaagagcaacactatctcaagctggattctcattcacatctgattctacactcaaatctgcatttaatgaaatctgcagtgtgctgcaagcttcattcttaaatatgaagacacccaaagttaaaaacgtttgccaaagagaaaattttagtataacggaagtacttgcagatcatgtatgcgatagaggtctattatctagaatatagaaaaaactcttacaactgaacaataaaaaggcaaacaacccaatattaagaatgagcaaatgacttgacaaagaggatatacaaatggccaataaacacatgaaaatatgctcaatttatcaagagtcatgaaggaaatgcaaatcaaaaccaaaagatatcacttcacacccactaggatgacaataacaataacagtaacaacagtgttgagcaggtcatggagaaatcagaaccttcatccattgccgatgggaatgtaacatggtgcagccactctggagaagtctggcacttcctcagaaagttaaacacaagacaaccacatgatccagcaattccactcctaggtacatgcccatttttattattttctttgagttctcacttaccgaactatttcctccagtgcacgaaactccagggaatggtatcgccagaaaccacaggactcgcccttgacacctcccttatccctgaggtcttgtcaattttaactcctgactctcacagctatgcagacaatcacctcacatctggccagaataatctttctaaaatgcttatcgaatcagttacgctcctgcttaaaactcagcaacggactgtcactgttttcagacagattaaaatctgaataagtcctgtaaaaccctacaacggtccgggctctgtgttagccttggcacttggtgtcttccagatacaccctcctttccatttccttaaaaagtcaggccctggccgggcgcggtggctcacgcctgtaatcccagcactctggaaggctgaggcgggatgatcacgaggtcaggagatagagaccgagatcgagaccatcccggctaacacgttgaaaccccgtctctactaaaaaaatgcaaaaagtcaggccctgtgcgttctctcgcctgcccaccccctaccccaccttgagttcacgctcaacttcagatctcatcttaaatacgcgcttcttagggaaaccgtccgggcacctcacactaggtcaggagctggcgccgtcctccagggcgtcctacgcgtcggtcaggggcacacacgcctgagtacggaacgaacttcacgtccccctctcgctagagtccccgccccgcagcagaggctccatcagtctccacggcaagaagaagcatatgtgcgaatttctagctttccccggggacataaccaagtttgggagaccggccccgcgacttcgttcgagaacgacttttgcggtgtcggcgcccgctatgagggcgccggaactccagtgccgcccaaggaacgcgccagtcccccgcccgcctcgctggcctcgcctacaccgccgttcggagtccccgcgtgcttcagcgggacgggcctcgccgccgggaccggccacacgcggggttcgccaaccccgaccgctcaagcccatggcctcgccctcgccggcttcgccgcccgacctgccgccccgcgtctctgtccgtcgcacctcggatccgctagaaagccgccgccgctgccgcctccacgggccagcgccccgctctccgcagccgcctccgagtcagtggcgccaccggagcagccgcggcgcctgttgggtaacagtcaccagcggcccgcccaccgcctgtcgggcagtatgaaaagtgcggcactgtgattggcccagcctgtgggcgcgaaagcgcgggaaggaggccgcctgcttgaatgttgcacgacgtagaagagattgtgggcgtctgtcttggagcgcagagcggcccccaagactttcccgctttgcagcctgaaaccctcgtctggaccgcgcagctctgcaaagtcaccatatgaaaatacttggaagcgctgcttctgccagcagaggccagactgcccctcgcttgggtccggtgcaggccgagtcctccgccctcagaggcgggacaggggcccggcctccttgccgaactgtttcccaggccgcgtggtccctcccggggtttggcttgtcctctgcccatcttctagaaataccgttagcagggtcgggccgcgactagggtgaggccagtgaggcatttgtcatgagcacaggatttcagaggctgccaaaatagcaatcaagataaataatattttaatgcagtctctaaaaaaagtcaaaagtaatgaaaaaattcagtcctattttttcctttcgcctcagactcttaaaatggctccacagggtacattgttactggtcctgtctttatttaaaatttgaatattctgggctgggcgcggtggctcacgcctgtaatcccagcagtttaggaggccaaggcaggtggatcacctgaggtcaggagttcgaaaccagcctggccaacatggcgaaacctcgtctctactaaaaacacaaaaaatagccgggcaggtgtggtcgtggacgcctgtgatcccagctactcgggaggctgaggcaggagagtcgcttggatccaggaggcggaggttgcagtgagctgagatcaccctgttgcactccagcctggatgatgacagagcaagactccgtctcaaaataaataaattaaattaaattaaatttgaatattttattatggattttttgcattaatttcgattttttaaaagattgcattaaaagattactgagtttttgcatcccctcccctgccccccatgttttgtgcctagtcttatccttgatagggaatttaaacctgtataaaatgacacagtcctgaaggggtggggacaggatagagctgcaggtggcttcatttgcttattagtctaaacatgcacttgattgttgggccacggaggactttggataggtggcagatagaggaggggctctaaaactgcacctacccccaaattatcccctcaaatgaggctgcagtctctgaaatgcacttcattcattcattcattcattcattctgcagattgctattggcctgccaggggccaggggctgagggtgcagtggtggacagtggaccgtgagcatggatcttgggataatgtaatacacttatcgcaaatcttgccattaccaaaagtgctttcaagtgtcttttaaagtgatatggcctgtccttttacagtggatttcatttagaagtccctatgttattggaagttaacgccagtggctggagagggcggccacggcagcagcaggccagagctgctgatgagattatgaggtctggcctctgttatagaaaggggttcagattgaggctcacattagaaggctggacactctcccctgggctgctgggcagatggcatctggagcaggactgggccatggtgaccctggaaggggtggctctggaagtgtgtctgtgggccagcagccctgatgtcaagacagctggaaaccacgttctactctagacccttggcgtttctcctttgactgctccaccacagttagaattttgagaaattcctctctgaacagccatttgccaaatgctcatttcactgttagtctcctctccaccctgtgggtgggtacaacacagaaagagtcaaatctttcatttatcaaccttttaaaccatcgaagacagtgatcatgccatccttagg

SEQ ID NO: 3621 - DNA, 4001 bp, Homo sapiens
aaaagagagggtacatttcggtgttgggcctttaatttctcttatagaaatttatcaggggaaggtggtccatcaatttcaaatatgggacagttttttgggctgcccacaagggctctgtggccatgttacactcaaaatataaaaatcctctccactaaggtcataattggacagcgataaaattcattagtctagtacaggggtcagcaaaccacagctccatttttggtatagcccatgatgtaataattgtttttacagtttttaaggactgtaaaaacagacaaggttatgtgacagagactgtatgtggcctgcaaagcctaaaatatttactagtcagccctttacagaaaaagtttgccaattcctgatcctgtatgctgtggccctacaattaattttgttgctgtcactctgacacacttcagagggttggagaagtgggaggaagggactgtttactgtgttgttggtagagtcccaggctccttctctttggtggatggagcaagacctccagagactgaaatatctctgagccctttatttacataaatccatattaataccattctcagtttggaaaacaattttttaaaaaattgagaaaatatttttgtgcaaagtaccaacagaataacatacacagcaactatttacatggggcagacgaaggctacaatttaagcaattgccagattctcaggattgagtcctgatttgagatcacagggagtaagctgtgacatcttggctactactgatcaataacaaggacattattgagggcttaccctgtgtgaggcactgtgctgacagcacatattatgtcaaataaccctcaaaatgatccttcctgccatgtgtcattatcacaatgatttggctcttcttaaggcagtttactttggtctgctttcaaagaaaagttgcagtaacagaaagggtcaagaaccaaatgtatgctattaacactttcagaaacagagctcattcaaaacaattttccaaaataacaaaatgtgaagaatatgtaacagtgaccgttttaaacacctgcacttattctttctgtacatgtattctttcgcctggtactaggaaaacgtccaacaccagaggtccctccccagtttaaagtacttctgtcaagttgttaacgcctcatctgtacctgaggaaaagtagagtttttccgttttttatatatggaaatctgggcatctgagagaggaaggtcagaaaagtactcaaagtaggctaggacgagtttggcagtgaactcaagagctggtggattagtgagggcgagggagaggggaagcccagccactgctgttctgtcacccggtggccgcggctgccgggtccgctctcgtggggcaaacactccgcatcccgtccccttccctgcaacccggcgcagcttcgtgggaggggagcctctcctcaaagcagcccctgtccccaagccaggtgctgtctggtcagctgccgggaacggatgttccactcctccctcaccccggcagagcagcaggtgaagggaggtccaagaggcccactccttcccccgagggcaccccgacccgggcacccgcaccttgatgggcttggtgtcgttggggccgaggcactggccatgcatctcctccatggccctgcaggcctgtgagctgcgggcgaacttgacgaaagcaatgcccttggactccttggtgtgcttgtcccgcaccacccagatgtcctggatgtcgccaaaaggcgagaagcgctccctcagcaccgactcaggtgtgtacttgctgatcacaaggaagatgcggctgttgggcggttcgtccaggctgtccacgcccgggcggaagcccccgccgctcgcagagctgccagcttcgtccatggtgctccacccgaatgcaggagcctcactgctctttgcttctgcggtgtctgccaccgctgctgtctcacacccaagcctttgccggctcggtgctccgcttccgggagaaagaggagtccggcgccaggcgctgtccagccgcgcaggatgaggccttccggggagcggcctgcagcgccccctggcgacgcgggggaccctgacccagtctaagtctcaaatcctcaaatccagctgagcctaggcccaagttatcagttgtgcaatcgttccctgcaggcagaacagcgctgcctaatgcacaggctttcccaacgctggctttaccccacccctaaggccaaggattctttccagtgttaaagaaaaaattattcatgacactcgttagagatggtacaggaaggccgactttgacaaagggagccatggagataggtccagggacagctgcaatggggtcttgcagtgggagagagagattggactgaattttgactctaataaggacaaatttctaaccaagaagcttggtgggaggtcagtggatggaaaattacaaagagggaacatcagtgttaaggaggattctggctaaaccaacttgacaggatagttgctgaaggcaggccagggtgattgatatccatggtagtcagacaccaagaatgaggattttcactacactgattcagcaggattcttgctcaaattggattctacaaggacagaaagcccaagatcaagcctagtcaagcagaggactcaaaggagcctaactaagttttggtcaaagtggagagttgtcaccatcttggtcataagctcaatagatgatcaatataggacagagttcaaactatatagcattagagttggaaggaagctttgagatcattcaatttcagcgtcatttgttagagatgaggaaactgaggcctatagcatagccaaagtaatagagataaaaagtacgactaaaaccagaactaacttggccaggcgcagtggctcacgtctgtgatcccagcactttgggaggccgaggcgggcggatcacgaggtcaggagatcgagaccatcctggctaacacggtgaaaccccgtctctaccaaaaaaatacaaaaaaattagtttggcgtggtggcgggcacctgtagtcccagctactcaggaggctgaggcaggagaatggtgtgaacccaggaggcacagcttgcagtgagcagagtttgcaccactgcactccagcctgggggatagagcgagactccacctcaaacaacaacaacaacaacaaaaaacccagaactaactccatctgttgatttactcaacttctacaagcaaccctggggttggagggcagtgagggtggactgctcagctgtggaactaagagaaatcatagagtgcaagcaaagtgggaaatgccttcttgttaacaagccttagaggagaggtcagaaacccagtagaaatccagaaacaaggcctggatttagcagtggcattggaatgaagtgaaaggaataaacccctaagtagaccgagggcggagttcttcaaatgaacaagttctggatgctaagacctaggttgctatgaagtcaaccagataaatacttattgtactccaactgtgtgccaggctctatgccaggagctagatatataatgaggaacaggaaagacatgtcccgagggcttgttttcccccactgtggaaatcttacatgtaaatatataatgcaaagtaatatcagattatgttacatggttttgctactgaattgtgtgagcctggacaagttacttaatacttgcagcttcggtttcattaactgtaaagtaggaataatattacctactaaataggtaatacatattattttgtggttggattagttaagcttgatagccgcctaatagctacgcaggagcatgactatcaagtttaattaattcacccattcacttaataagtatttttgactatctactatgtgttaggcactgtgttatactgaagggatgtagtattgaacaaaataattactcttcttcccccacagagttaatcattta

SEQ ID NO: 3622 - DNA, 4001 bp, Homo sapiens
aactagcatctcctgcaagttcctaaaacaaatactgtgagaactacacagagatgaataaggggtatccttgctgctaccatcttgctgctttctggtgacccaaagtaaagtgggaattgggggaagtgaaaatgaggcccgggattgctaggacatttctggtctcgaaactgacaagtgtcctttttacgtagacaaatacagggctatgtcgtaagtacatgaaaacgtggaccacacacattctaagaaagaaaaggctgaatcagagattctttgtaccaggccggaaatgcccaactaccagcaagcagagcatgattacaacctcccaaagaaagttcggacactgcatccatacctgattcttttgtgatctagaagggcacccagagttgtgatagatgttaatggctgaagaaggctgctgcgtccaacttccaccctcccaaattctggcggctgcttccaaagcagtgaaatttccagtcttcatggcccaaataatttttttaaatgagttcgggaggcatcaaattcttattgtaaaaataagataggcccactaacaaagtacccagggtccctagaaagccaggcgcaatttgtatggctacatgtcatcaactgttgttacccaagagtgtgccgaggtcactttttaaaaagcaacattggaaatcgatctgtggcaaacatataagctagttttgtttttgtttcttttttaaccaaatacgaagtcacttctttctctgcactgaaatctgcccattgtccctcctttgcaaaacctctagagattagaagggacatcaatgaacgcgagtgaactttggccacttttctacccaaaacaccagcgtaaaagtagaaatcagtaaccaggtgaagtgccacaccgcacaaagatcagaggcgaggggcgggcgctcagggccggaggcggggaggaaaatatcccggccccgccgcccctccagccccagtcatcgcgtgcgcgggaggtggaggggcgtccctggggggcgggaggctccgcgccacggcgaggggagcgaagagttacagcttacagggcgaggcccttggagaaggggtcgaaaagccgggccaccagcggatccagacgcgcacaccaggcgacggccgccggccagccagggctcggcgaggggcgccgctcgaccccacgaccctccccgctggccgggccaggaaggggctggtggctctttcctgtctagtctctccccccgcggctttctgtaacccgatccccgcactccgctcccagggaagccgccgccccgcgcgccgcccggctctgcccaggccagcgctatagttagcaaccttccagcaactccgcccggcggtggcgggggttcgccgcgcgcccccctccccaggcctgaccctgcgcgcgtccccgggccccctcctccggccgtcacctctccccggcgcccctttaccttggcttgcagatactgggggtaatagtaggtggcgtactgagggtacatctgctgtttccacactttgcccatgaagctggaagggagcctgccgtgcagggtcgcggacactttggggtttccaagtctcgggctctcctgcctctccctttccggcggcggcggcagcggcggcggcggcggcggctgctgctgctgccgctgctccacctcccagccgggaccagacgtcctcctcctcctcctcctcttcctcctcctcctcctcctcctcctcctcttcctcctcctcctcctcctcccaggcagaaagaaagacactgcagagcgcagagggcaccccggacagggcgctcccaaggagtttcctcccggagcccgactgctccggggctgccaagggctggcgcgctggccgcggtccgctcgggcgagccggctgcgcggggctgagaggtgatcaatacaagtggaaagtgcggcagcggcggctgcgcttggtgccaggcggcatctggggtgggtgcgcccgatgtggagagaggagaggggctggcgttccgaggccgtgggggaagggcgggcgggggcggggcctgggcgccgccgagcccgggacccgctggaggtgagggctgagttttaaccactcctcacctcccaggctcgcggttggacgggcggaagccctgtgagtccagatcgctttgtgtcgggggtggggaaatgggagtgggagtgggggtggagggggaatgcggggggacccagcttaagaactgcagggcgggcacctcttttgctttcccgagtttttatcttcgtaagggggaggggaaataagggaaaagaggaaatctgattaatcgttcacttcccaccgcccagtaattttttttcacaagggaaggaaaatgatttaatgcccaacaaagctggagtctggacacctgggttctgttcctcccacccacccccgacccggggccacaagactaatctaggtgaccttgggagggttagcgtccttcggtttggttttcccagatgtgagacgtgaaatcatgccccttgcacaaggggaggcaaagcacatacatacatacacacacacacacacacacacacacacccctcacaacatatagacggatccttctaagagggggatgccgcaaagaggcagaatgttattagaggacacaatatagacatcagcttttctctgcctctttctaatgctgccagacagtctgtcaactcccactcaggagcaaggaaactccctgagtttggaatattttaaggccattttgaaagtcacgctggcatattgttgcagtgtgcttcagtgacatataaaatcaatctctctttctgcctctctccatctcctaattgtcacagctctagacagcctcagaccagcagtggttcagttcactacataactagatataatttaatggaattaattggtccccgaagctgcctgcagaagacttttatattccagctcaaaaagagagctaataccaaaatgtacatacggatagcataggtaagcaagcatcctcaaattagggttccggcacatctaataaaatgtaataaaaaactgtgtttgttattaaatagaccttgtttactttgtcattttggtttttgaagagtcttttgttaatagcacaaggtaaattaaactcaactggaatgcattattttgttaaacagttattatttttatatgataacattttaaaataggtttagtaagatactttaaaacaatgacaaaataaggacctgaaacccttataatcgttctatggtttagacaaatttctagatcttacatgtttgacaaaaacaaaataaatataagtataggtgagaacattttggctctgccaggaggcaaatcatgtccctctcatttacctatgtaaaagcctataaggaagctaatatttactatgtctgctatattgtaggcactgttgaggtgcatgcagacctgaaaagtggaatgggtcactgtcagactaggggagcctaaaatatttcccatattgtttcaatgtggggccttttaatgtttttaaacagggaactgacatgaactaaattgtgctttaggaagactaggaatgatggtttggaagagtgacagaaggaagagaagtaaatcgagaacaatcgcagaagttctaggtttgaggtaataagggaaactaccaaacttagactgttctacttactgttttttctggatgatggaaattcagcctgttttagagagcccaaaagcagacctacacttgtatagacacttgatttatgactgagttggtattatagcgcagtggagaaagaatgaacttttcaataaatgattctgggtcaactggcaatcatatggaaaaaatgaaatgggagccctgcctcacacataccaagggaggagggtggaaaattgaggtgaatcatgacctggatgtgaaaaacaaaagtata

SEQ ID NO: 3623 - DNA, 4001 bp, Homo sapiens
actctgccgtattgtttatgtgaaaatgcagactcactgagccagtctaagacataagtgattattcctctatccctcctgcacatgtaaattgtattcagtaaaaggctaatcaaagacccaaaagaatgcaaccttttgtctcccatctacctatgacctggaagcccccacttcgagttgtcccacttttccaggagaaccaatgtataccttacatatgtgattgatgtctcatgtctccctaaaatgtataaaaccaagctgtgccccgaccaccttgggcacatgtcctcaggaccgcctgaggttctgccacgggtgcatccttaaccttggcaaaataaactttctaaataaatgaactgggaaatatttctggcctaagggcatcatgaaaaaattactgagaaaatttgggaacctcttctctagactcaagagactctacgtcatataggcacctttcttgtcccagctaattttaaatttcactcttctgaacaaatgccctctgaatgccagttatccctgcaagaaactcttctacctcaatctcaacggagaacatccacttatgtggaattacttaccatttgcacaaagaaatcctcacacctcactgccaggcagcaggaggaaagaacaagggttaaaagcaagtgttctggagacagaccacaagcaagtttcttagccttcctatgcctcagtttcctcgcgttgtaaaacagggatgataataatgcctactccacagggttactgtgtagcttcaatgacagttataggcaaggacacttcattttcatttaagacaaaaaggaaaatctgaaatgcttggcacagctcctggcatacagatcttcaataatgctgggtgttatttttattcctgtctctgtatggagcatgaccactgggttccaaaatgtattctacttggaaatcaggccacagtcccgttaaggatggtgctgagtttactggtggcagcgagctccttaccccagcagaaaaggggcagaggccgggggaaggagaactttttttaaaggactgatatgaggtccttagctagcaacttcccccagtgctcaggggttctgaagacacagcttggtgcaaattcacttctgacacaggaaaaacaattcagaggccatggatctacttcggggcggtcctcacgtaacgaaatgaaacgttcagaaactggtttatttatttttctcttgggcccatttctttttcgacatccttagaggacagaaggcagccctcccagttagtttctctttccctctcaaccctgcagcttcccggccgcctcaaagtggctttttggactcctctcagcctcagcggttcccaaggtgacaccctgaaccccagggcggtccctcgcggctcagccccagcccgcagtcccctcccacaccgtgcccaggccctccccaccagcccggccccccgaggcccacacctggagcatttcctggcagaaggcgcgcaccgagcgcagcgaggcgaggtccagctcccggactatgagctcgcccaccccgctgacgccaggctctgggccgcactccgcggcctggcggagctcgcggcggagctgacccgccgcctcctcggcgcgcgcgcggtcccggcagcccatgatcacccgcgctcccaggcgcagtagctcggcggccgtggcgcggcccaggccgctgttcgccccggtgatcagcacagtcttcccgtgcatgaggccggggtccccgcctctgcgcagccgctggaccctgggccccacgaaccggcgggccgccagccacagcgccccgcccagagcggccagtactgccgccgcagtggccactgccatcgtcaggcccgagggcccaccggcccctccacgggagttccgcagccgccgccttaccggaacccaagagaccacctgtacgcggagaacgctggggcgcggcgggtcggcccctgacggtgcgcgtggggcatgctgggacttgtagtttccctctgggggggtcgcctgattggttgtgagagttcagcgccctgggtcctgcgccctccgtggaagctcctcccagcctaatgatggaggctgggcaaccagcacagtgttcagggtgctggggttcatacgtattgaaatcccagagtagtggcggacttccccatgggaatgtctgatgagtactttgaatcacagatctctgtacaggccctgttacaaatgccactcctcagggcatttcgtgtgttttcctttgagggctcttgggacttgtaaattcagttcaattcaccttctgaggaatgggccctgacaagctgaagtctgaggtaggactgtttttcatagatgagacaaagaattaagcaacatgaatcagttggaaatagaatggtcgagtagttctcaaacttaaatgcacatcagaatcacctggaggacttggggtgggggttcggggtgggggaatgaaacaaaacgaaaacaaaaaaccagggccccagtattagagtttctaattcaataggtacaggatggggcctgataatttgcacttttaacaagtttccaggtgctgctgctgctgcagatctgggaaccacactttgagaaccactgaacaagacattatgtcattggtccctattaaaaaaaagaaagccatcttcaaatgatcttcacactggcagaggtacagtgggaaaagcttggacttattgtaaatataggcttctgagcaggccatttacaaatgcctccctgccctctccataggactattacacacaacgatggaaggcaaagtgcttggctcactgtaaaatgcctcattaatatcagggttagtgtcacagggacccttcttcaagctacaaacttcatagctgtagaccaagctacttttaaagactcattcgttcgtctgcctctccatccaatatgtgcctggccctgcctgttccctgttagagccacagagaaatgggacaccatttctgctctcagggtgcttactttctggaactgtgatctcccacttcccaccctccacccattgcaggttctccagacaaggaaaaagaaccacagcttgtgtcgtttgagacaaactccccaataattgtgataatccatcttccactcccttacatttgggaaggatgtaacatgcaactaatagtcagaatacaaagaaaaagggatggattccaggaggtttcttatgagtaatgagaatggagctcagaggtgggaaagagcactcttactggggattatacaaggcaccaggaacaggaatcatgagaggtggtcctacaccaccctatccccaatttgaagctgctactcaaactcattgatcccccagcatatgtttccactttattgtcctttctacccatccacatcttgcccatccatcaaaatcacaggctacctcaagtctttctttcctgaccacttccagcctataaagatctctgctcccttcatgtgtgaccctcagggtcatgtgtgaccctcactggcactgaagacaaacagccttctagtattggctgtttgagtttgcacatttgacttccttgaccagattgttaaggtttcaagtttcctagaggataggattgtgtctgcgtacctcttgtggtctttgcatgggaggacacctacaaaatggtaggtactcagtgtcacatgtcacaactgatatattttggactggtttacataaaattagggagcatcagaagatgtgtttcagctgtggtcttctctcatctagagccaggggtggaatacatatgtacaggtggagtagagatgaaggtggaggtagagagagcaggagagggtaggaggaaaagaggagggaggaatccttagacctgcagtgtaactgctgtgtagtttatgcatggaacttaatgaaatgattaatctgtaccagatgggtccaaaggcc

SEQ ID NO: 3624 - DNA, 4001 bp, Homo sapiens
caccaccctgaaggcaagacagtgttggtcaggcatgaggctgggcaaggcgtgtcagccactttcctgtattattcatgtcggctctgccagcagaaatcttctaaatatttaacatgccacctcaaggtgcagcgcaaacaccccgcagtcaggaacagctgtggagaggccttcacggaatgacttgggggctgagaggcacagacactggctttgggaggaaagccctgaatggtggcgggagacaatgctgagatccacttcggaagggaaaatcagtaaagaagggaagggagatgggtggtgtttcaaaacgtggggagtgatggtgcacaatcactggggtccagagccccgtgttctcagacaaagaaaaagcccgaggtgcctgccaccctcctccccgccttagactccccacacccatttcagcccctgctagctacagcaggtggcaaatctgttctgactcaggccaggatggttagggaagaacagggacttggaacagccacgtctatctccaaaggagaataaatccaccggggaagctcttcaaacgcctacaggtcctggggcttgaaggagaaaatcggcccccacgcccacccccaatgacttcacacagacctcaccctagatgactctgcgctctcctgcaaggcctgggaggtgtcatcgccaccatgcgggtggctgtcacttgaaaatttcccgtgcattcctggaggtacctgcccctgtctctcaatcccctgcaaaaggagtcggagccgggggctccaggcgtttactccaagattcacatgcgtcttcccatgtcccagctgcctttgccgctgtcgatgcagacacctaaaaaggaggatttttccaaccccactgggagccccgcctctgcctctccacccgttccgcgctgaccctccaggcagcgcccctggttcgtctgcgctgtcctttccacctgacaaaagctggggcggcggggcgcggcgccgggcgacctcacatttctgccaaaggagagagacgcgtgtccgcggtgcgcccattcggggcctctgcaaatcgaccgagctgaggaacaaagcggccagcgcgcggcgagacgcagcccccacggaacccccgagcgccccagccctcgccgtcccggcccagccccccgcaagcggccgccggcgccggctgcctcctgggcagcagccgcgtcctgcgccgcccgtccgcccgcaggcgtcctcggcggctactgtacctgctaaatttagctgcgccgggtattaatagcccgagccactgggaccgggcgctgtaggggcgcgcgcagcccggggccgggggcggggagggaggggacggaggggcgcgggggagaaggccacttacaccaccagcctggagatgatccatgacaccatggcgggcaggcgggcgggcgaggcccgggcggcgcggctcggctaggctgcgggcggcgcgggctgctgcggcgttcccggaacgtcagtcagctcacggcagccgccgccagactgagcgcgcccgccgccctgcccggcgttcgcgcgttggcgcagccgcggcacgttctggcggcggcggcggcggccccagccccccggggctcggcgggcccgcagcgattgggcggtgagctggtcagggcacccgcgggcccgccccgtcccgctcgccctggcccccggctgaaggcgggcgcgtcctgcgcgctccccggggcaccggccccgccaaaggaaccctgcagcggccccgtttgcagggcagggacccgggtgctgccccaccctcagcgttccagcggagaaactgaagtccgaacctgaacctcgggaatctgtctgcacctgtctaggtgggatgctgtcatccctcattcagctagtgcgttagcctcataaagggtttacctggatccagacctaacctcttcagtctgtccgttgctcagcactttctgcataagaaacaaacctgggcgcttgcctccctacttaaaattctacagagtccctatatgatcgtggtacctgcctagaaccgtgttgccaagaccattcccccaaatagtcctctagctcttttccctccaggcatcttggactcaaatatttgctgtttcttcttccctgtcagtacacgccacgcctcatcgtcctgccttggtttgattcagctccttcttctaggctgggctgaagggctacttcttcctagggaaggcctttccttgggggctgctccgggccctaggaggagactagaagctgcgactgcttagcaccagtgccccgctgagccacgttgaactcttaggcaaaagggaacttgtgcaccctatataaacgtttttatgtattttttaaaataccgtattaaatattatggtggttttttttgttgttgttgtttttttatgagacagagtctcgctctggggtgcagtggcgcgatctcggctcactgcaagctccgcctcccgggttcaagcgattcttctgcctcagcctcatgagtagctgagattacaggagtgcgccaccacgcccagctaatttttgtatttttagtagagacggggtttcaccatgttgtccaggctggtctcaaactcctgacctcgtgatccgcccgccttggcctcccaaagtgctgggattacaggagtgagccacctattatgtattttagttgctgaattttatggcacctcttaaatgttgcaccctcactgagcgcctcactctgctcaccctagtcccggccgcagatagtacattattctgttacactggaaacgctttgtcctctactcctaggctctgctgctgcttttcccaccctccaatagcttaggttctgcgtggtgctcccagcgccctgtcctttgctgatgatggtgtcatgtataattcagtgtcagatgtgagaagcgcaggagacagcttagtactctcagatgtagcagaatctgtgcgtgcgtgtgcctgatatagtcagaagaaagacttcacggacaacaaagggactgcagatgagacatgctctcatatctcaggtctccaaagaacccataaaatagctgtaatgtagcagttttttcatgctgccttgacccagttttgaggctcaggctggaggctggtcagttccccttctccagcagtctattaactgcatacccccaaccacttccgttagcaggctctcacacgcgggacactatacacctgtccagggctaggcaccaaacaactagttacagcccctgtacttcagaacccgctgaaattatccaaattagcctatcctatatctgcttgccttatttcactctttccttccctcagaaaccatgataaagatgtttgtccacaattcccctctctccctctctctgtgacagaccctggccctgagtggacctgcatggtgtgctgtgatctctccaggaaactgtggatataaaaagctctaaaactctttctagcttctctctcttgatctgtgtctggccccaccatatctcactcaaggtaaggttatacgggtaaaacaatgctccacggggaaaagctttccatacttactaggcaaagagaacaccaaagctagatcaggacagcacccagcacagaggaccttcctgagacctcccttcccctccatccatacccctcacctatgctccctgcgtcagaaaggctgttacccatcttgcagggggagcagcggagggatggactactgtggttcaaagagaccctgttggtgggaaaataaagaagaggtgaccacatgcttgttccctactccctataagtggaattctcagatttgactattgcacaggactgagcattttaattaccaaaatgaaactattcatggggttaaaatatcttgaggtcttttcattagctgaagaggaccagaaaactagtgagaccaacacatatttctcacaaggg

SEQ ID NO: 3625 - DNA, 4001 bp, Homo sapiens
gctggccaacatggtgaaaccccgtctctactaaaaatacaaaaattagctgggcgtggtggcaggcgcttgtaatcccagctactcgggaggctgaggcaggagaatcgcttgaacccaggaggcggaggcttcagtgagccgagactgtgccactgcactctccagcctgggcgacagagcgagactcggtctcaaaaaaaaaaaaaaaaaaagggcaggggtgagggaggtgctaataaaactaatgatagtcacatgacccagtgctaataaaactaatgatagtcacatgacccaggatcagatgccctcactcccagcccagcaggacctacagagagcccaccagccaggccagctcaactctccagccccaccctgagggcttcccagaagccactggcaatatcgatcccagagaggaaacaccaccctgaaggcaagacagtgttggtcaggcatgaggctgggcaaggcgtgtcagccactttcctgtattattcatgtcggctctgccagcagaaatcttctaaatatttaacatgccacctcaaggtgcagcgcaaacaccccgcagtcaggaacagctgtggagaggccttcacggaatgacttgggggctgagaggcacagacactggctttgggaggaaagccctgaatggtggcgggagacaatgctgagatccacttcggaagggaaaatcagtaaagaagggaagggagatgggtggtgtttcaaaacgtggggagtgatggtgcacaatcactggggtccagagccccgtgttctcagacaaagaaaaagcccgaggtgcctgccaccctcctccccgccttagactccccacacccatttcagcccctgctagctacagcaggtggcaaatctgttctgactcaggccaggatggttagggaagaacagggacttggaacagccacgtctatctccaaaggagaataaatccaccggggaagctcttcaaacgcctacaggtcctggggcttgaaggagaaaatcggcccccacgcccacccccaatgacttcacacagacctcaccctagatgactctgcgctctcctgcaaggcctgggaggtgtcatcgccaccatgcgggtggctgtcacttgaaaatttcccgtgcattcctggaggtacctgcccctgtctctcaatcccctgcaaaaggagtcggagccgggggctccaggcgtttactccaagattcacatgcgtcttcccatgtcccagctgcctttgccgctgtcgatgcagacacctaaaaaggaggatttttccaaccccactgggagccccgcctctgcctctccacccgttccgcgctgaccctccaggcagcgcccctggttcgtctgcgctgtcctttccacctgacaaaagctggggcggcggggcgcggcgccgggcgacctcacatttctgccaaaggagagagacgcgtgtccgcggtgcgcccattcggggcctctgcaaatcgaccgagctgaggaacaaagcggccagcgcgcggcgagacgcagcccccacggaacccccgagcgccccagccctcgccgtcccggcccagccccccgcaagcggccgccggcgccggctgcctcctgggcagcagccgcgtcctgcgccgcccgtccgcccgcaggcgtcctcggcggctactgtacctgctaaatttagctgcgccgggtattaatagcccgagccactgggaccgggcgctgtaggggcgcgcgcagcccggggccgggggcggggagggaggggacggaggggcgcgggggagaaggccacttacaccaccagcctggagatgatccatgacaccatggcgggcaggcgggcgggcgaggcccgggcggcgcggctcggctaggctgcgggcggcgcgggctgctgcggcgttcccggaacgtcagtcagctcacggcagccgccgccagactgagcgcgcccgccgccctgcccggcgttcgcgcgttggcgcagccgcggcacgttctggcggcggcggcggcggccccagccccccggggctcggcgggcccgcagcgattgggcggtgagctggtcagggcacccgcgggcccgccccgtcccgctcgccctggcccccggctgaaggcgggcgcgtcctgcgcgctccccggggcaccggccccgccaaaggaaccctgcagcggccccgtttgcagggcagggacccgggtgctgccccaccctcagcgttccagcggagaaactgaagtccgaacctgaacctcgggaatctgtctgcacctgtctaggtgggatgctgtcatccctcattcagctagtgcgttagcctcataaagggtttacctggatccagacctaacctcttcagtctgtccgttgctcagcactttctgcataagaaacaaacctgggcgcttgcctccctacttaaaattctacagagtccctatatgatcgtggtacctgcctagaaccgtgttgccaagaccattcccccaaatagtcctctagctcttttccctccaggcatcttggactcaaatatttgctgtttcttcttccctgtcagtacacgccacgcctcatcgtcctgccttggtttgattcagctccttcttctaggctgggctgaagggctacttcttcctagggaaggcctttccttgggggctgctccgggccctaggaggagactagaagctgcgactgcttagcaccagtgccccgctgagccacgttgaactcttaggcaaaagggaacttgtgcaccctatataaacgtttttatgtattttttaaaataccgtattaaatattatggtggttttttttgttgttgttgtttttttatgagacagagtctcgctctggggtgcagtggcgcgatctcggctcactgcaagctccgcctcccgggttcaagcgattcttctgcctcagcctcatgagtagctgagattacaggagtgcgccaccacgcccagctaatttttgtatttttagtagagacggggtttcaccatgttgtccaggctggtctcaaactcctgacctcgtgatccgcccgccttggcctcccaaagtgctgggattacaggagtgagccacctattatgtattttagttgctgaattttatggcacctcttaaatgttgcaccctcactgagcgcctcactctgctcaccctagtcccggccgcagatagtacattattctgttacactggaaacgctttgtcctctactcctaggctctgctgctgcttttcccaccctccaatagcttaggttctgcgtggtgctcccagcgccctgtcctttgctgatgatggtgtcatgtataattcagtgtcagatgtgagaagcgcaggagacagcttagtactctcagatgtagcagaatctgtgcgtgcgtgtgcctgatatagtcagaagaaagacttcacggacaacaaagggactgcagatgagacatgctctcatatctcaggtctccaaagaacccataaaatagctgtaatgtagcagttttttcatgctgccttgacccagttttgaggctcaggctggaggctggtcagttccccttctccagcagtctattaactgcatacccccaaccacttccgttagcaggctctcacacgcgggacactatacacctgtccagggctaggcaccaaacaactagttacagcccctgtacttcagaacccgctgaaattatccaaattagcctatcctatatctgcttgccttatttcactctttccttccctcagaaaccatgataaagatgtttgtccacaattcccctctctccctctctctgtgacagaccctggccctgagtggacctgcatggtgtgctgtgatctctccaggaaactgtggatataaaaagctctaaaactctttctagcttctctctcttgatctgtgtctggccccaccatatctcactcaaggtaagg

SEQ ID NO: 3626 - DNA, 4001 bp, Homo sapiens
accacaagtctcctttcctatatagtcggcaatctagtctctcttgtgactctgacagtaacaaaataggtaagaagttggtgcataaagatgctttgttgactgaaaacagaataagtttattcatgaatgacaagaacacctaggaaattcagccttccacttatatctccaatcatctacagtgcaccttgctacacaggacattagaggatctgtaaacagcctgatttctggaaagcgataaaagctggtacttaagagaccagaacttgaacctccttcttacttctcaaacctgatcattaggagataaagaaggctgcagcctacctttttggggtcatggaggccaatccagacattgaagtcatcagtgccactctccttaatcagtgaggccacaaaggcaccctcggcctgggtgagcacagacaccaggttgcccgaattcatgttctggcaatagagctgttgcagaagaaaatggagcactcagtggaggaggaagttgtgacggatatactgagtcctccaagaggacgggtcagaaaaaggacagcagagtaatgtccgtgatgatgctgtcactgaccaccaggttctttgtgctgggaatgtgctgaataatgggataaagtagattggaaagtttggggctgatgatagtatagcaaggggttcagtctcatctcattgcagccactgaacacactggagagtggcagcttcccctcccttcatgagtctcccttcccacactgctctcctcactcacatctgcatcaacccaggtctcacggtcttcattaaagtagtagcagtaggagcgataggcattggtgccttctgggcagctgatccgggcctggggcaactctgtctgggcctcttggcctgaaaaagaagagacaattaaaggaggctctcagggtaaggaaaaggcttgaaggtgaggtaagagcttctgaggttcctttatagaaacagaagaatccagtctattatgggatgactgctcactattgctcctgcatcctacatcttctgtctttggtttctttgatcaggggaaaaaaaacagaatgaataggccaaagaaacaagtctccagtttcccttttatgtctggagctcaggctcttctaccttgaaggactcagccttctactttctcaagcctgacttggtttccctgaacacaaggctctcttcagttctccaccccattagtgactgtctacacacagacatccccaaatccaccatcacgtataaatttaatcagataaactcatgccaactgcagcagttgcttataaggggtcattttaaattctagctccaactccttaatgaggtgtggatgtatataaatgtgaagagatcagcaataaagatcactaaacaccacaaaacaacccttaacagtgactctgctttttttttttttttcaagtagacccgtatgcttggggatagagtgaagtcttcagggctagaaagagttggttggtggaaaagagatcttaccttggctctgagacagaaacatcaggcaggagatcagcatgaagtatgagctggtctgagccatgctgagctgcaatgaatctcttgcttaagaggcaaatcaacaatctctataggagaacacagagaagggggttctgagagatggagagcaaagcacctattaccttccttaaaacctcctctcagaatttctgagaccaggaaggtcctctgagacacccacaccttcaaatgtttctcttgagagtggggattatacagactcagtaactgaaaaacaactttggatcccactgaggcttcattacagctaaaacctcttggacagaaactcatgctgtatcttcccgaagattttagatctacagtgcatgttagagacgcccttctcctgtaatgcccacttacctgttggctgagtctgagttggcttctcaggccaggtagctgtaggagctttatatcaggatctgagataagaaccacgtcatttaagcaaaaggggtgggggcaagcggtgagttttgggagcattgacagtaagagattctggcaccagtacgagccttttcccggcacacactgggagtggtcacaactcaggtccccttctggcaaaaaatttggcaagctgtctaagtccaaggtggactttgctcttgctcagcagaaaacaactgagggctcccatgtgccctaataacccagagaggagcagagaacagtagacttccttgtattccctgtaaatttagaggctcctctttggtgtcaggcatgggtaggagatggggaagaattaactgattccaaataatttagaacaatgtgcttgtggcaataagtggttcctccatgtctttttaggctcacaaacctctcaagacctacctcaaggggtaggttaaatttatatttctaaacatttaacatgtctaacaaggtttgagctaacaaaatacacatattctcaatgtgagaattgtagagagctgatgcctaaggaagcttaaaggagctaaatatgaagtcaggcttcattgaaattgtccatttgaagtcaactgtttgttagtatgaagtcaaagattgtgtggtgaaattgagtatttaccagaatcatcatagaatagtcatttataattcagggaataaaagccaatcagaatgcaaaattaggaagaaaaaactaacctgaatattcacagaaagagagataagtatatgaattgggacaaatggattaacaaaatataataaaatactaaacagaatttaaatcgaataaagtagatatctatatttcaacttggactagtatcaaagccataacattgaatacaaaaattcagttgcaagaagttataagctatttgataaactttatatatggttttaaaagacagattaatactaaattttatttattaatcaattcttatacagtttaaaaaataaaaatctgaaatgtaagaatatatattacaatttgtcatagtatttgcctaacaattttaaggtttttttttctttatataaaaactgatgatgggcctggtgtggtggctcaagcctgtcatcccagcactttgggagactgagatgagaggatcacttgagcccaggaattcgagaccagcctgggcaacatagcgagaccccatctctacaaaaaaagtatatatatatatatatatatatatatatatatatatatatatatatatatatatatccagatatggtggcacatgcctgtagtctcagctacttaagaggctaaggtgggggattgtttgagcttgggaagtagaggttgcagtgagttgtgccactgcactccagcctgggtgatagaacagggaactgtctcaaaaaataaaaacaaaaactaacgatattaaacaaagatgacaaatgttaacattgtttattctcactggttcatatgcatttgttaaattaatccaaattttttctgcttttacaaaaagtagttataccttttaaaatgattacaaccagagaatgattcctatttttttctataaataagagattcagaaatattcttccgttaacaaaggatatagtagggaagagtcgggtatacttggtatcattacatatttatcttgtgaaaattaaacaagcaattaatttttaaaaaatctaagataaaaatactttatggcataatgttttcttttctttttttaactttaatctttttttttttttttgagatggagtctggctctgtcacccagactggagtacagtggctcaatctcagctcactgcaagctccgcctttggggttcacgccattctcctgcctcagcctcccgagtagagtagctgggactacaggcatccgccaccacacccggctaagtttttttatttttttttatttttagcagagatggggtttcaccgtgttagccagaatggtctcgatc

SEQ ID NO: 3627 - DNA, 4001 bp, Homo sapiens
attctcctccactactcattttctatatagtctacagagggacctcttccaagacagacaatagcaaaatagggaaaaagttgtacataaagatgcatttctagaagtagacacaatgagtgggtgcatgaattcccagagcccagaaaattcagccttcagctcatgtctctaactacctacactgaacttcacaactcatacattataggatctataaagaggttgcttttatttaaacaaacaaaaagataaaagttggtgattgcggtgccagaccttaaacgtccctcttacctctcaaaaatgtttataaggagatagaggtggctgcagactgaccttttttgggtcatggaggccaatccagacattgctgtcatcagtgctactctccttaatcagtgaggccacgaaggcaccctccgcctgggtgagcacagacaccaggttgcctgaattcatgttctggcaatagagctgttggagaagaaaatggagcactcagtggagaaggaaggtgtgagggatatactgagaccttccagaggatgtaacagaaaaaggacagcacagaaatgtccctgatgatgctgtcactgaccaccagcatctctgtgctgggaatgtgtcaaatgatgggataaagtagattgggaagtttgggaccagtggtggaatagggaagggatcaatcttatctcattgcagccacagaacacactgcaaattagcagctgcctctaccttcataagcctcccttcccctgctgctctcctcactcacatctgcatcaacccaggtctcagggtcttcattaaagtagtagcagtaggagcgataggcattggtgccttctgggcagctgattcggggattaggcagctctgtctgggactcctggcctggggaaaaaaaaaaggagataattaagaaagaatcgcagggcaaggaaaaggctggaaggtgaattaggggcttcttggtgtcctttataagaacatatggatacagtgaatactggggcgattgctcacttctgccctcctgcatcctatctcttttctctctagtttcctctgctcaagacaagagctcacaatgaataggctaaataaatgagtcctcgttttcctttaattctgaggctgaggcttctgcctttaaagacccaggcttcctcctttctcaagtttctctcggtttccctgcacacgtttgccttagctctccatcctagcaatgactacataaaaacatcccccaaactgccatcgcatatagattcaatcagataaactcaaccacaatggtcacctataagtggtcctattaaattctgtctcaaacccatgaatgaggtgagggtgtttttgaatgggataaaatcagccataatgatcactgaacaacataaaaaaaccctgatgttgactctgctttttttcaagtgaaccttatacatgaggatggagggaagaattcagagttggggttgtgggaagtgtgggggaaaatctcaccttggctcagagacaggaacatcagggaggagatcagcatgaagaacgagttggtctgagccatgcttagcggcagtgaatctcttgcttaaggagcaaatcagcaatctctgtaggagaacacagggaagagggtttgaagaagagagcagagcacctgttatctttctaacatcctctcctctctgaattcctgtgagccgaaaggtccactgagatagctacactcccagatatttctcttttggtttggggataacagaggccaaattacccgaaatcagctttggtcttgcttaagtttcattactactgggatcttttattcagaaaatcaccctgtatctacctcaaaatgaaaagagaaaatcccacgttagacatgctcttctcctgtaatgcccctttacctgttggtaagtgccttgtccacttgaggtggcttgtcaggtcagacagagtaggagctttatatcagggtctgagagagaactacatgatataaacaatgggtggagcaaggagtaaggatcagaaggcctacagagggcactgacagtaagagattctggcatcaggaatagcttattcctggcacacattaggagtggtcacaaatgacatcaacttaccacaaacaggttggcaaactgtccaagttgatgttgagctttgctcttcctctgcagcatccaggtgtccagttcccatggcctttagcagtcctagaaagagcagaagagtagatttctttgtgctaggtaaatgtgggatgatcctttctttggtttaggcatgggtaggggtaggggaagagtcaactgagtccaaatgattaagcccaattagctggtggctttaagtcatttctccattccctttcaggttcaggaacctctcaagacctacttcagaaggcaaggtgtattagtccttttcatactgctataaagataataccagagactgggtaacttaaaaaggaaagaggtttaattgactcatagtttaattgactcacagactttcctgaggatggggaggcctcaggaaacttacaatcatggagacgaaggggaagcaaagcatgtcttacatggtggcaggtgagcaagagagagtggagagggaagagccctttataaaaccatcagatcttgtgagaatgcactcactatcaagagaacagcatgggggaaactactcccgtgatccaatcacctcccactaggttcctcaatccacacatggggattatgaggattacaatttgagatgagatttgggtggggacacagagccacaccacatcacaaggtttagtagttacgtaaatttaagccagcgtttccagcaaggtttcagcataagtagctagcatgatacagatgttctcaaagtccaagcaggtgggaactgcagggagctgatgcctaagtaagctcaaagtaatggaatatgaagttgttggtttgaagtcaattgtctgttgttgtgaagttacagatagtgatgtgaaattaaaagcttactgaaattcccattaaatacccattcagaatcagggaacaagagcaaatctggaatttaaaattcagttgaaaaactaaccaaaatgttcacagaaataaggatggctatatcaattgggataaatgacaaaataatatattttgaaatactaacaggagttaaattaaataaactaaatatatttatataaacatgagctcatttcaaaagcatatataaacaaaatgaattttaaaagttgcaaaaatttacaaactaataatatttatatgtgctttaaaaaagctaattatttatatttttttatctattcacatgtagtttaaagtaaaataaatccgtaataaaacactatacaaaaaattttcatactcattagaaatgcaaaatgtttgtttctcagttctgcaaggaaaagtcagcattcagacaaaaagttctctcagcgaggcaatttttaatttctgcagaaaggatgcccctcacagatggaacaatggcaagggcatacacagaatgaagagacaccagaatatttattccttacgcatgaggtccctattgctgtgtcctgtctccattggctggagccagacctcacaatctaaattaaaacctgattggctaataatttaaaactttttaaaataggtacaaaaataataatatttccaaataaggaaggggcacaggctgtgaactaggacatacctatgagcacgtccaacacaaatatcttggttaaggtacaaggacatggaatgtactacgtgcctgtgactgttcaacagctatataagatagggcttaacaaagagttattagcgtaaagcgagggggcttgaaggaagttcgtctttaaaataaactattatttctaacacttatgatttattctttaacaagaagggaaactttgaacagggatctttttaccgtttaca

SEQ ID NO: 3628 - DNA, 4001 bp, Homo sapiens
atggccccttagctgcaacacctgatttgctccccagcatgaggaaagttggtctgctattccagatgctgccggtgagtaggaaactcttccttgactcctcattgctattggaaaattccagccaataaacataagacctttggaacaactcaaggtaatatattatttgcagaacaataattgatgtagcatttgtgattagcttgtgaacctcaaaagtaatgtcagttctgtatggggacaaaaattgatcctatcttcattaagagttccttcagaatagtaggcaaagactccatgaagctcagagaattgttaacccagcctcatatgagaattatgtaatacgcctgaggaaggcagattgattttatctgaaagatagagacctccacagaactcagatcttcagatgcttcatggccttccctttccccccaaatattccccagaatctgagctccagtgctccctgaagtacttcctgggcaggcacaggggacagggagtgggcctgggcaacaatagcaccttgagaggtaacagagaggggaggatatactggcacctgtgtggggtcatggagcccaatccagacgtatgagtagctgttaccaatgctcttcaccagggaggacacgaaggatccctcagccccactgagcacagacaccaggtttccagagggccgcttctggcaggccagctttgagggcaacaaagagaatgagagggagcctgagacctgctgagggagggcagggcaaaggtaggtgggaggaggactgtgtgaaagataaacgtgttcatcctcattcccaaggaactctcctgaatggagaccctcctccccctgagaccggtcacctccaacaccacatctaaccactcacatctgcatctgtccaggattttggtgacaaaaacaaggcatagcagtgggagccataggccttggagcctttgggacagcggatccgtgcagagggcagttccctctggggttcttcacctgaggtggaagaagaggggggagggtaaaatgaagagtggggcttggggtgggagatgaccttggggaatacctaggaatgtccttggggaggaagaccacattcctgacaccccttcatcttcccttatgttttcagaaattctttatctcaaaatagccgtagtaaatggagcaccatccagtctcttattaccctttccccttattcaaccattcaatactctcctcactctgggctgtctctacattgggtcctccaatcattgtccctccccacatctcattactgaccctccagtgtatattagagtccactttcccaccagtgtatattagagtccactgactaaatggaagccatctcattccactgttagtggaccaccatggagcctcccactgcaagttaacctgaaggaaggagagatgatgcaagaactgcaggcaggttcattagacaccacgtcattacctcacatgacacacaggagccttcctcctcttgttagctctgaggattcatagggaacccagtgctagaggcaaagcaatctcaccttgaacctgagacagcagcatgaggcaggaaagcagcatccaagatacactgggcagggccatgggaggcagcatagtgtctgcgacttgaggaggcaatcaggagtcactaaagaaagcgtggtcagtgggagaacacacagataccccactgcctcatgtcattttccttctctagtcccctaggactaaagtgatcttggtcacatccatcatcttctacagttctgaatgagttgtgaatctgtgtactctcccatccccgagccctcccaggacacccttgctgagtctcagagttcctgtgctccctgaggaagggaccctcccatgtattctcctgtgtcatgtgcagtagctcctccctgggtctcatcttctctcagctcccacttacctctctggtgggatatggtatggtttgtctggtcaggaaagagtgggattttataagaggatctgggggagggacattggagtgaagagtgacaatgagtaggcaggacaggggtcatggggtggggttggcatggactcttcctggcaaagactggggattttcccagatgttgcctctttcctgttggcaggccaacactttccctaggaagaggtgaagtttgctttttcctctgcatcctccttgtcaaaggcctgtggcaccaaatgtgatatgaaatcttctaatgtggacatctgaaagaggagttcctctggtgggtttcttaagaacccacttctggaggcaaacctatgtatttcttattaccttgcctagtaagattaaataaatgttaggtgttaagtgaagatttacgggaattataagtatcatggacagttgaggacatagatggtactgaagctaagagtaggagtgagggttcagggccattatgcaagcatgatagctaattttgatgaaacttcagaattgtctgacaagtcaatacatgagccacaatcttacagaaaatcaggtgaatggacttgtctttccagtcttcagcaagaaagagcttccccagtggagaatgacaatggcaatgtgatagaataagaggtaatgaaggaaaacaagacataagaaggactacagtcaaataatgaggatcaaagaagaatgaataatagttaaagaagggaagagcagccattgtgtaaaatcataggtcagttggccaggtgctgtggctcaggtctataatcccagcactttgagaggctgaggtgggaggatcacctgaagcaaggagttcaagagcagcctgggcaacacattaagaccctatctctacaatttatattttaatttaagccagttgcggtggtgtgtgcttgtggtcctagctactcagcaggctgaggtaggaggaccttcagttgaacccaggagttcaaggctgcagtaagttatgatcatcccactgcactccagcttaggcaacagagtgagagcctatctctaaatttttgttttgtgatgttgtaaacataattctgaattgcatgtaagtctctattacatcaaaatgctcactacttgtaggttgctcatgagcttccttgctggactgccatttggctgtacattaaaagcccttttcattgcattcttactgggcaaatggtcagcttcatatgggtatactgggagaagttcttttagtcatgtttatttttgagttagcagtttggtgcctctgacaagcatactacattgcccatacactggttcaggttcagtttggccagtccaggaaaaagttaggctgggaatttctacagaccctgactctcatgctattgttgtaatatgccaacttgtatgcagatgtttatagtaggggtctgtgacgaggtcatgagatgtagctcatccttaattcacgtcctcaaaattcagtacccaaaattcaatgcaattcctcaaataatatgagaagaaatatagccagcagattattttgttaaaaaggatttttttccacaaaatttatacaacaatatgtaaacacatggaggtacggggtagaaggtaaccagagggtagaatagttaccagaggctgagacgggtgaggggagatgaaaagagtttagttcatcgtacaaacatacagctagataggaggaatatgttctagcttttgatagcacatagggtgactatagttaacaacaatatgttgtatatttcaagatacctaggagagaagatttgaaatgctgacagtttattattaaaactcacttttgttcttaattgaaatagtgtgacctttgtaataagccttaaggttataaaatccctaagtgcaatgtgaaattttctttgcaatgacactcactaaactcactaaagttgagttgtttttgttttatttttcattgtttcttcataacaatgcttattaaccaagcac

SEQ ID NO: 3629 - DNA, 4001 bp, Homo sapiens
catggccccttagctgcaacacctgatttgctccccagcatgaggaaagttggtctgctattccagatgctgccggtgagtaggaaactcttccttgactcctcattgctattggaaaattccagccaataaacataagacctttggaacaactcaaggtaatatattatttgcagaacaataattgatgtagcatttgtgattagcttgtgaacctcaaaagtaatgtcagttctgtatggggacaaaaattgatcctatcttcattaagagttccttcagaatagtaggcaaagactccatgaagctcagagaattgttaacccagcctcatatgagaattatgtaatacgcctgaggaaggcagattgattttatctgaaagatagagacctccacagaactcagatcttcagatgcttcatggccttccctttccccccaaatattccccagaatctgagctccagtgctccctgaagtacttcctgggcaggcacaggggacagggagtgggcctgggcaacaatagcaccttgagaggtaacagagaggggaggatatactggcacctgtgtggggtcatggagcccaatccagacgtatgagtagctgttaccaatgctcttcaccagggaggacacgaaggatccctcagccccactgagcacagacaccaggtttccagagggccgcttctggcaggccagctttgagggcaacaaagagaatgagagggagcctgagacctgctgagggagggcagggcaaaggtaggtgggaggaggactgtgtgaaagataaacgtgttcatcctcattcccaaggaactctcctgaatggagaccctcctccccctgagaccggtcacctccaacaccacatctaaccactcacatctgcatctgtccaggattttggtgacaaaaacaaggcatagcagtgggagccataggccttggagcctttgggacagcggatccgtgcagagggcagttccctctggggttcttcacctgaggtggaagaagaggggggagggtaaaatgaagagtggggcttggggtgggagatgaccttggggaatacctaggaatgtccttggggaggaagaccacattcctgacaccccttcatcttcccttatgttttcagaaattctttatctcaaaatagccgtagtaaatggagcaccatccagtctcttattaccctttccccttattcaaccattcaatactctcctcactctgggctgtctctacattgggtcctccaatcattgtccctccccacatctcattactgaccctccagtgtatattagagtccactttcccaccagtgtatattagagtccactgactaaatggaagccatctcattccactgttagtggaccaccatggagcctcccactgcaagttaacctgaaggaaggagagatgatgcaagaactgcaggcaggttcattagacaccacgtcattacctcacatgacacacaggagccttcctcctcttgttagctctgaggattcatagggaacccagtgctagaggcaaagcaatctcaccttgaacctgagacagcagcatgaggcaggaaagcagcatccaagatacactgggcagggccatgggaggcagcatagtgtctgcgacttgaggaggcaatcaggagtcactaaagaaagcgtggtcagtgggagaacacacagataccccactgcctcatgtcattttccttctctagtcccctaggactaaagtgatcttggtcacatccatcatcttctacagttctgaatgagttgtgaatctgtgtactctcccatccccgagccctcccaggacacccttgctgagtctcagagttcctgtgctccctgaggaagggaccctcccatgtattctcctgtgtcatgtgcagtagctcctccctgggtctcatcttctctcagctcccacttacctctctggtgggatatggtatggtttgtctggtcaggaaagagtgggattttataagaggatctgggggagggacattggagtgaagagtgacaatgagtaggcaggacaggggtcatggggtggggttggcatggactcttcctggcaaagactggggattttcccagatgttgcctctttcctgttggcaggccaacactttccctaggaagaggtgaagtttgctttttcctctgcatcctccttgtcaaaggcctgtggcaccaaatgtgatatgaaatcttctaatgtggacatctgaaagaggagttcctctggtgggtttcttaagaacccacttctggaggcaaacctatgtatttcttattaccttgcctagtaagattaaataaatgttaggtgttaagtgaagatttacgggaattataagtatcatggacagttgaggacatagatggtactgaagctaagagtaggagtgagggttcagggccattatgcaagcatgatagctaattttgatgaaacttcagaattgtctgacaagtcaatacatgagccacaatcttacagaaaatcaggtgaatggacttgtctttccagtcttcagcaagaaagagcttccccagtggagaatgacaatggcaatgtgatagaataagaggtaatgaaggaaaacaagacataagaaggactacagtcaaataatgaggatcaaagaagaatgaataatagttaaagaagggaagagcagccattgtgtaaaatcataggtcagttggccaggtgctgtggctcaggtctataatcccagcactttgagaggctgaggtgggaggatcacctgaagcaaggagttcaagagcagcctgggcaacacattaagaccctatctctacaatttatattttaatttaagccagttgcggtggtgtgtgcttgtggtcctagctactcagcaggctgaggtaggaggaccttcagttgaacccaggagttcaaggctgcagtaagttatgatcatcccactgcactccagcttaggcaacagagtgagagcctatctctaaatttttgttttgtgatgttgtaaacataattctgaattgcatgtaagtctctattacatcaaaatgctcactacttgtaggttgctcatgagcttccttgctggactgccatttggctgtacattaaaagcccttttcattgcattcttactgggcaaatggtcagcttcatatgggtatactgggagaagttcttttagtcatgtttatttttgagttagcagtttggtgcctctgacaagcatactacattgcccatacactggttcaggttcagtttggccagtccaggaaaaagttaggctgggaatttctacagaccctgactctcatgctattgttgtaatatgccaacttgtatgcagatgtttatagtaggggtctgtgacgaggtcatgagatgtagctcatccttaattcacgtcctcaaaattcagtacccaaaattcaatgcaattcctcaaataatatgagaagaaatatagccagcagattattttgttaaaaaggatttttttccacaaaatttatacaacaatatgtaaacacatggaggtacggggtagaaggtaaccagagggtagaatagttaccagaggctgagacgggtgaggggagatgaaaagagtttagttcatcgtacaaacatacagctagataggaggaatatgttctagcttttgatagcacatagggtgactatagttaacaacaatatgttgtatatttcaagatacctaggagagaagatttgaaatgctgacagtttattattaaaactcacttttgttcttaattgaaatagtgtgacctttgtaataagccttaaggttataaaatccctaagtgcaatgtgaaattttctttgcaatgacactcactaaactcactaaagttgagttgtttttgttttatttttcattgtttcttcataacaatgcttattaaccaagca

SEQ ID NO: 3630 - DNA, 4001 bp, Homo sapiens
atgctgccctagagtcctctgcactggaatcttttccttaactcctcattgctttgggaaaatcccaaccaataaacacaagaactttggaatcactcaaggtaatatgttacttgcagaacaataattggtgtagcatttgtgattagcctgcgaacctcaaagataatgtctattctgtatgggggcaaaatttgatcctatcttaatttagaattccctcagaataatagatacagactccctgaagctcagataattgatttgtaaggattcccttgagaattatgtaaaagttttacaagagtccgactaattttctttaaagactagggatctccgtagaattcagctcttcagctgcctcatggacttcctattctcccaaatgtcccccagaatctgagctccagtgctccctaaagtacttcctgggcagggactggggacagggagtgcgcctgggcaacaacagtaccttgagaggtaacagagaggggaggatatactcgcacctgtgtggggtcatggagcccaatccagatgtatgaatagctgttactaatgctcctcaccagggaggacacgaaggatccctcagccccactgagcacagacaccagttttccagagggccgcttctggcaagccagctttgagggggacaaagagaatgagatggagcctgagacccactgagggagggcagggaaaaggtaggtgggaggaggactgtgtgaaagataagcgtgttcatcctcattcccaaggaactctcctgaaggagaccctcctccccctgagacctgcatggactttcccctatcacctccaaccccacatctaaccactcacatctgcatccatccaggattttggtgacaaaaacaaggcatagcagggggagccataggccttggagcctttgggacagctgatccgtggagagggcagttccttctgggtttcttcacctggggtggaagaaaagggagagagtaaaatgaagagtagggggtgggtgggagatgaccttggggaatatctaggtctgcccttggggaggaagaccacattcctgacagctcttcatcttcccttgtgttttcagaagttctttatctcaaaatagccctactaaatgggccaccatctagtctgttattaccctttccccttattcaaccattcaacactctcttcactgtgggctatctctatattgggtcctccaatcattgtccctccccacatctcattgctgaccctccacactttcccaccagtgtatattagagtccactgactaaatggaagccatctcattccattgttagtggaccacagtggagcctcccactgcaagttaacatgaaggaaggagtgatgatgcaggaactgcaggcagtttcattagacaccacgtcattacctcacgtgacacacaggagccttcctccttttcttggctctgaggattcatagggaacccagtgctagaggcagagaaatctcaccttgaacctgacacaggagaatgaggcaggaaagcagcatccaggacacactgggcagggccatgggaggcagcatagtgtctgcgacttgaggaggcaatcgggtcactaaaggaagtgtggtcagcgggaggacacacagatatcctactgcctcttgtctttttccttctgtagtcccctaggactgaagtgatcttggtcacattcatcatcttctacagttctgaatgagctgtgaatctgtgtactcacccatccctgagacctcccagtacagccttgctgagtctcagagctcctgtgctccctgaggaagggaccctcccatgcgttctcctgtattatgtgaggttgcccttccacaggtctcatcttctctcagctcccacttacctctctggtgagatctggtatgctttgtctggtcagcaaagactgggttttttataaaaagatctcagggatggtcactggagtgaataacggcaatatgtaggcgggacaggggtcatggagagggcttggcattggttcaaaaagattatgccaaggggaggagactcttcctggcaaaggctgggaattgttacagatgttgcctttttctctgtagcaggccggcactttccccacaaacagttgaagtttgcacttttcccaccctcttccagatatcttcttctgagaaacttaagggaataaaggcagtcttgtgagcctggtattatatagtttagaaaatattatgatattacatagttatgagaaatgtcaaaagtttgtttttgatcaacgtgccaggagctcacttctataggcatacatatgaattcctttataccttatctagtaacatttaaaataaattaataaataaaaattgggtgggcattaaaattagatgtgttggcaaagacaatgtattagtcgaaataaagaaacaatagaaaccagaagcagcagcactggttcagtgttgctacttcaacttcacagcaagatgtaaaagaagcttgaaataatcttgtgagtcattaggcaagccagggtcttatggaacagcagttaaatagatttgccttccagctacctttgtgtgagaagaccaagagatagttccttggtttattgtagttctgcgctgacagtttgatatctcagagtagcgttcttagattgtgatctacacaccaatgggggtcttcagggcctgtttggagtggttgtgcagttataattttcataattatactaaagtgttattcgtcattttcgctatgttgacatttgcactgatgaggcaaaataaatggtggatagaagttctggtgccttaacatcaatcaaggcagtggcaccaaattgcattgctcatatccacgcacttgcaagaaacaaaataaagccatttttacttgaaaatgcccttgaacttgatgaatcagggtagtgaattggcttcagtaaatctcaacccttgaatacatctagagggaatattctgtatgactaaatgggaagctgacatgctaaagtataatggttgtcttgagggaaataatttgtaacactgagttttagttcactatttcatggaacaccatttttacttgaaaaataaaccaagacaaacttcacttactgacatatgggtcttttgttaacatgttttcaaaaaagttcaaagtgagttagtaaatgaatatttttaacttttctcttttactatatattattataaatatcaatagctcacatgaacaaaattttttttcgagtgtcctcaatattttttaagagtgttaaagggtcctgagatcaaaacagtttgagatctctggttaacatctagctggcaatttccagaaaatataggacatggggatggtattatattacaacacaggaataccatcagcaaaatttagaaggtgggaaattctacaggacaaataagtacatttccccagcaagtgaatttaaggaaataaaacaacatctcactcttaacatgtgaaaaatatatcaatcaaataaaatgtgtgaaccatgtttggatcttgatttgaacaaattaaataaaaaatataattataaaacaattgggtaaaagtgagcatttgataatgttaaaggactatatcatgttcagatgtaattataatattgaaataatattatttaaagtatccttatcatttaagatacataacacaatatttacagatgaaatggttattcagaatttacttcaaaataatcaagcatgatagagataaagaaagagagagacagataaaacaagagaggacttgaggtcatgagagttgttgcttggtggtaggtacataatgattcataacactattgtctttgggtttttatctaaaatattggtggaaaattttgagaaaaagaaaaattcagggccatcgtgagaaagaaatttgaaggacaatctgactcaagaacacagatgca

SEQ ID NO: 3631 - DNA, 4001 bp, Homo sapiens
tcttagcacttctaatctacacatgctttgaattcataaatttacacgattatctgaaagtctggtgtcacttaagtgggaaaagggaaagttgaaatattttaaactacacttagtattctcacaaccacaaacaaactgaaatcaaatgtcatgtgaaacaccccaatttccttttctgcctacagcaatagctatggcattgttctgctcaaccttttaaaaaggttctttaagcttcctacttcctcatctctactagacatcagcctacttctgagggtcactggaccaggcagtttggggataagagtcaagttcataaacggggccccctcttcattctcttagtacagcatttaacatgcatttagccctccctgcctttgctcacgctgcttcctctgtctggaaagtgtcccccactcaccttgccaaaatcctggtaaaagaccaactcgaccccaggctacttgatttatccccccgccccggctctcccgtccccctcaaccttaagctccaggcagccccaaccacatctgtgtatataggagactttcttgctctgcaatgtttcttacaaacttattcccccccaaagggagagatcgagcatttattaagggaaaatatatagtcacataagtgataaagttgtattcattcctactcattattttaaagctcggatattctaaaactcctctttccccttatttccagcgaggaggaagggggattcaacgtctctattcgtcagattaggaaccttgagctttatctcacagtaaaaactacattttttttttttttaaatagagacagggtctccctctgtcgcccaggctggagtgcaggggcgcgatctcggctcactgcaacctccacctcccaggttcaagcgattctcctgcctcagcttcccgagtagctgggattacaggcgcgcgccaccacgccccgctgatttttgtatttttagtagagacggggtttcaccatgtttgccaggctggtctcaaactcctgacctctggttatccacccgcctcggcctcccaaagtgctgggaatacaggcatgagccaccgcgcccggcctacacttggtcgaagcaacattaacacttaaaataccacggattttctaattcgtgttaaaataccacggatgatttttaaagccgtgacacattttgtacaactgtcagtacaagggggatcacctctttgcatttgatgaaattaaactaaaaagggggagagagcttgcccgaggtctgaaggttcctcattcctgttctaaaacataaaaccaccatcttcaatacatatacatttttaatgagaactcttcgtcctcctttggttcgcttatgacttccctaatcctaaaatcaagtcgttgggaatttctaaggttcctgctatgacaacaggatcgaattacagagcgtggcttggattctgcacgcaaaccctgaagcaggtaacttttttaaaagctgacaattttaccatatgagattttaaagacagaacgcgccccagcaaaaactgagctccctaaactcactgcggcaggacccccttcagaagagctcctttcccccggcccaggcccgcgccccatgaacactcaccggaggccatggctccgctccccgcaccttcccgcaggcagctcccagcgtcctggccggaggcggccgcagtcagtcagtcaggaggccgagggacctctgccggcggggcccccagtcccccgaccaccctagaggcctcctccttcttcccgccctccgctgggtttgcggctcacaccttcccaacccctgaattcttgcaccccgggtcacccagcgtcgccgtccaccgtacgggagccaggggcagggggcggagcggggagagccgagtgctggcccagccgagaggcgagcagcctggcgggaggggaatttcccgcggctgacgtaggcccgacgcagcaaccctcacccggaggcgtgggcggggcgacctcgcggccgccgcgcgcgcgaccgcccccagcgccccgcccctgcctgtccccgcgcacgctccccgccggcccccacgcatacgcccccggcgctgctgcggcggctggcttgggagggggtcgagggagcgggagcttggggtgggcttcgggagcgcagggaacggcgggagccgggaggtgacggctagcagcgtgagaaggccgctggctcctgagaaatccccctcctccaggttgttcttccgagtgtggtttaaagttcaggagcgggcgggagggtgcggatgacgtagagagggccggccgctggggagcttttgggggcgcgcggggccgactctcccggcctgggagggcgacggccggggttttcgagaggtggttccccctcttcccgacttcgcacatgcaaatctccacccccgcgccagcggcgggacgttgcgccctgtagggggaagtggtgctgcggcgggggtcctgtcttcttctgtaattcctgtatttgcatacggggaccccccccccgactgattttttttcctccatctaaattgcgagggtactgtgaactttacgtattttacctactgaaacccgtttaaactcaaaaggtccgcacttggagttcgttgtctcattaggcagtgcactgaagtttagtggacactatatcctgagatttcacacagatgccaagaaaggcggaaatggagcacacatttagtgcattaaaggacctaggataacttcgtttccttcatttgaatagtacctgctatgcatcagataatgtccatacttaatctatgacgtatttattattcctaactttatagatgaagtattcggggttcagagaagttacttcaacatacagtacttcagaatgctgataaaaggcacagtttaaagccagggttgtctgactccaaagctccatgcccttgcccctgtcccttactagttaaaattagtacggagaggtaatggggaatatcagcctgccatacaagtgcccaaaactgggggacccatatgggcaaataatttaaaatatcctgccaaccccaaactgttctttccacgaaatgcgcaatgtacaacaaaagaatgaaacagttttattattggatatgtactaaaacgtaccatgatgcacatcacaggcaatccactgaagagagtgcaaagaccaaaaaaaaggaaatctcaccttttcatatggtcaggcacgtacaatccattacatacctattaattgtctttatccaaaggaaaataatgggaagttatcttggaaccaagagccaaggcttaaaccctcctagagacagaaacatggagcaccatccttgatgttcacatttccaagagatggctccgaggcccgcaagaaagaccttctgaggacgcaaaactagcaagaggcttatttagctttttaaaatatgtacatacatttcaaagagacggaaaacattttcagttctctgaaggaatttcaaaatgaaaagtgactgggggagaggaaagttctgaggaggtgacatttgagctgagtcctcagtttaagaaagagccggccaggcgcagtggctcatgcctgtaatcccagcactttgggaggctgaggcaagtggatcacgaggttgggagttcaagaccagtctggccaagatggtgaaaccccgtctctactaaaaatacaaaaattagccaggcgtggtggcgggcgcctgtaaccccagctactcaggaggctgaggtagagaattgcttgaacctgggaggcggaggttgcggtgagccgagatcatgccacttgcactccagcctgggcgacagagcgagactccgtctcagaaaaaaaaaaaaaaaaaaaaaaaggccattcacagggagattcagggaaagaacattccagctgggggaacagcaggcagcaggtccttgagataggaaagagc

SEQ ID NO: 3632 - DNA, 4001 bp, Homo sapiens
gtaatcaggtgggtaggtggggcatggggaaacaggtgagcttcatcttagggaagtcattgaagcctggaagtgttagggaggaggcctggaatcattagaaaaggtattggtttgtttagggtttgaggctctggatccttttcctgaagcccacagtttgcccaactgtgcatgagaggaaggacaggggttggggaagagaacccctaatgctatgcacaccttccttcttccagatcagtgagatagggctggaggacagtctgttttttgctatagtgtagttaccatgagccattctggacaggtctttagaaaagggaattctcctacccagtcaaatggatgtctaataatttcctgggggtaagcgtgacaaagttttaagtagagacatttggggatgagaaagcctccttaaggaagtagtggaacctccaacaccctgaggagaagggaaagagcttcgggaaggggagctgattctctgaggcagcgttcccaggactggtgggaaggagtggtgacccgctcgggctcggcgtggacccggagcgcgcctggcgctgtccgtggtgctgagaggtggggaggccagcgtggcggcggcgctgggcggaatgtgggcgagacatctccgcaaggcttggcggtccttccccacggccctcatcctctcattgccaccaggcctcctcccacagctgttcctgaatccgctgcattggcctctaaaaccaaaaatcagggagagggggcgacagactaggagtttgcgctctcttccccatgcgctctgcgcaggagttctcgagtgtgcgcagtctggcacgtgagtcagcgcggggtctacgcggattggtgcgggggaaggggagaaggatggtcccattccccctccatcctgctttccctcagcggtccccttattggaaaccggatcacagcacgaggaagccctggctcgtctcctggcccagccttctccctggagccaagaccccgatacccgcagccctggtcaactctttttctggcctttcttgcttctcctgtggccacataggccagttttacctctctctgttcatttgtctttctgacctcttcccaaatccccaattttcacctgaacccacttctcgtgagtccagaccccatatgcccagcctatctgaagcctatgcctctttccgctagacgctgtctacctttttctcttctcacgtccttaagcacattcttttacttccaagtttcctagccttgaggccccctgcagacccccacttctcaggatcgctttcttggccctgcccgcaccccccagggttcctcctgaccgtgggcactagtgtcgctgcagccccccgggcagctgttcagcagcaggaagcagacaagcagctggagcccctcggagctcccaggccacagtgggtgctgtatcctcccaggctcggcgcgctcactccccggccaagtctcagtgaaggtagcggccacggccgaggggctgagcggggctgcagcttcccaccagcccgcgactccgaatctgtttaaccctcctcggcagttcagccaatcgtgagcgggccctgcccctgcggtcgcctccccagctccttcccctaccgcctccccaccctcatctcttggaattcctgacccggctcctttcgggcattagctgggtcccaagaaccaccgcctgtactcccagtcctaaggctgcagaaacggatggcacgtaagatacgggtgcaagttgtacctactcaggtttgttgtgagaatcaaatatgaacagcgatgaaacagtaggcactcaaggaatttagtttattttattatccttgacactctttactctggcccacttaaaaccctttagaaatcatataggttcgatctgctatatatatatatataatattatatattatatattatatatggcacatccatccactttactccacatccactgccatcgccttggtccaaaccactgcacactgtacttttttttttttttttttttgagacagtcttgcaatttcagatcaccacaacctccgctcgacctctactcaacctcaggctccagagtagctgggactacaggtgcacactaccatgcccagccaattttatttatttatttatttatttttgtagagacagggttttgccatgtttcccaggctgatctcaaactcctaggctcaagcaatcctcccaccttggccccccaaagtgttggcattactggcatgagccaccatgccaggccttggacactgtactcttttaaattgagttgttgtagtaactaactagctaactgacctcttgctttcactcttgtgtacttacaagctagtttgtgagctttctaactcttagactggcatttaaattttttttcattaagcttaaaacatttattaaactgggcatggtggctcatgcttgtaatctcagcactttgggaggtcgagatagtggattacttaaacctaagggtttgtatagtgaacatttggggttgatacattacaaaggatctgaattatattattatctttaaagggtaatagtttgagtttgttctggcaggcaattaaatttttggtaaaaagtcttgatcctgtggcagtctggttagggaaggagtacttcatcctattctcaattctagcctgtatctcttagtcctgggatatggtgcttatggctaaggtgtggtcctttttggatttcaacataacccaaagtcatttaccaaaactctctattttacgggtcctgaactccaaactcagtcaccctaacactgtgacagctgccaaaatctctgttcagatatttgactttttcactaggttccttgaaatctcaccctgcgcaagtgccatttagaagatagctaagaattggaggggagttaggatgcagattttgagttcctctctctgtaatttattcattttctaaatttcttcctcaatttccagatgctctggcatctctgtactccaaaagctgtttccttagtaagactgccagttgctgacagagctgtttccctgtgtactgcagtgaactctgaagtatcttcagaggaaaagcctatacatgtataagtcacttggtggacttcctttttttgaggactatactccctgtaggtttctaactcttgatcagtctccatgctttcatacagttatttttatattttgcctagagtatatacccaatgttaggaggatccgacacaagtttctgtcttgtcacgccaaaaactagaggtttatctggttgtcactgattatgtactggacatgctattttaaaataaatttatagcaataatttgaggcctaagagcaaatgaacgtgaacctgctttgtgaagtataatgctcctggaaaaagggaaatattggtctttgggtcggctgaacaaaggtgagtgtgctcctctctgtattttaagattttaaaccaccaggagaatggctatcaaaatgataaatgtacaggagcattgatgctgctcttctttttactgttcattggaagggattctaatgctaagagtaataccctcagaagacttagcaggttttcaggcctattgaaccaggggttcgtaggaaggaactttctttcccaagaagaaagaaagactaccataaagtgtagctggggagagtgggcgaaggaagattgtaattcagctgtggtcctactctgtcttacattcatgttacaaatgatgtccggaaggagaaggagatcagaagcctaggctccatgtgtaccaaggagttttactatttcaatccccaccccaaatgtcctctctgttctggctttacatattttaattcagaagctctggctgaggcccactgtcttacttgcagacaagcctgcttaaagaattttcatgaaaactcactttaaaaaatccagtagcaagt
